United States Patent Application Publication US 2011/0014706 A2 - sequence listing, part 50

SEQ ID NO: 155557 - DNA, 3102 bp, Arabidopsis thaliana landsberg
  unsure (1)..(3102): unsure at all n locations
tgaaaatctcttctttgaatcaagcggcggagacggcggcggtgaagaagaagaattagagagagagatatggttgatacgagacgtagctcttctgcttccaagcgtttttgtgctgcaacaagttcatcctcacgtcctaccaaacgatccaaggttaagatcgacacctacgttcgtggctctgcttcaattctcatctctgcttgattctggatttcgattttagggagaaaggagtttgatcaattctcttcctcctggatttgaatctgggttttatgaattttggaatttcgtgttgattttgagtttggttgtgtttaggcggcggcggaaccggcatcgtcttcgtcggcgagtgaggtgccgattgataatcaagcaccggtttcggatcctggatcaatatctggagacccggaacttagaacttctgatccgcagagtaacgatgcggagaggccagttactaccaccgatgtgccggcgatggagaccgacacaaatccagaacttgaaggcttggtgacgcctacacctgcaggtttccatgcctgcatgttgtcctttcattatatagaaaaaaggatctctttttctcatatgttttgggtctttttctcatatgttttgggttttttcaggtgaagtggtggtggaagctgagaaatcgaaatcctcaaagaagcggattgctaaggctccttgggccaagcttctttctcagtttcctcaggtttgtgttatttgatttatatgtttgcttgcatgtttcgcattacccttagcaaattgagcctagttggtttaccggaatatggtaaagatcctggcttttggtttattgggtccactttagtctgctgccatgtcaagggatgtttactggctagtctctatctagggatgtttcaacttccagtgactccacttacttttgtccttatttgcaatttcagaaccctcatcttgtcatgagaggctctgtgtttactgttggacggcgaggctgcgatttatgtatcagagatcattctatgcccaatgttctatgtgaactaaggcagtctgaggtatggacactatctgattgatcttctactaccctacaggacaagaaagccttttttcttataaggttttgttttttgcagcacggaggtccatcagttgcatcgctggagataatagggaatggagtacttgttcaggtcaatggcaagatttaccaaaggagtacttgtgttcatctacggggtggcgatgaaattatcttcaccacccctgggaaacatgcttatgtatccttttacaagttctttgaaaagttatccacgttccgtaattagggttgatatatcatctatgaggttcttattatctatattcagtggttattctatttttttcttgactagtgttcagatatttcagcctcttaaagatgaaaatctagctgctccagacagaacttcttccttgagcctttttgaagcgcagagtgcccctctgaaagggcttcacgttgagacaagagcacgagactcttcatctgttgatggaactgcctctttattggcgtctatatcaaagttacaaaatgtcccttttctaccacctactgctaaaagtgtcaaaaggcagcaaaattcagaggtccctgtgttaccttctagctgcgatgattttattctggatgttgacttgaacgatgctgatagtaataatgatcatgctgctattgcttcaatggagaaaactgttgcttcgacttcttgtgctgccaacgatgaccatgatgcagatgggaatggaatggatccttttcaagaacctgaggctggaaatattcctgatcctgcttatgaaattagaccaattttgagtttacttggggatccttctgaatttgatttaaggggtagcatttccaaaatactggtggatgaacgaagggaagtgagggaaatgccgaaagaatatgaacgtccatcagcttcggtattaactagacgtcaagcgcataaggatagtctgcgaggaggaatactcaatcctcaggacatagaagtttcatttgagaacttcccatatttcttaaggtcagccgtgcttataattttctattagatttctttgctattgtggtgttccaaatttggataaacaactttctgaattctcacagtggcacaactaaggatgttttgatgatatccacatatgcccatataaagtatggaaaggaatatgcagagtatgcatcagatttgccaacagcgtgtccccgtatcttactctctggaccatctggtataagggaaactctggacaagtattgtttatgaatcttttgtttctcatttccatttccctaacaaattctcatatggaatatttgaaggctctgagatatatcaggaaatgttagcaaaagcgcttgcgaaacaatgtggggccaaattgatgattgttgactctctcttgttacctggggtaaacttctgttttttttttccccattttgagcgtttgattgaatgcatatttgtaacatatttttttgtctatcttggaatcgtgagcatattggtattaaattggcactctgactattggttccaaatgctttagaagctatatttgtccaggcaatctgttaagttattggaatttacacaatactgctagcattgattctctgctgtttctggatggctttagggttcaacacccaaggaagcagatactaccaaagaaagttctaggcgtgaaagactgtccgtgcttgctaaacgagctgtacaagctgcacaagctgctgttttgcagcataagaaaccaatttcaagtgtagaggctggtataacaggtggatcaacattgagctctcaggctgttcggaggcaagaagtatcaactgcaacctctaaaagttannnnnnnnnnnnnnnnnnnnnnnnnnnnnnnnnnnttttttttccttgtggtgccactttctgtgttactgaacaagcacttccgtaattcttaggtgatcgagtaagggttttaggcccttcaacttcttctcttgcttctctccgagctccacctagg

SEQ ID NO: 155558 - DNA, 1209 bp, Arabidopsis thaliana landsberg; identical to SEQ ID NO: 18225

SEQ ID NO: 155559 - DNA, 891 bp, Arabidopsis thaliana landsberg
catacatctatcatcttacatgctatgtatttttttcatacgtgaactcagtggagtgatgctgaatttaaatccaaagctctgcaattttgttgaatggagaggatacaaagttgtttacaaaagatatgcaagtctctacttctgcatgtgcattgatcaggaggataacgagttagaggtccttgagatcattcatcactatgttgagattctcgatcgctattttggaagtgtgagtaccaaaaaaaccagcacctgctgagattccacttttactatctcttaccttaacggaacctctaaattatgataaggaattgttttatctgatgaccctcaggtgtgtgaactcgatttgatttttaacttccacaaggtatacacacacatactctacaggatcaattattctccactctctgtatcttacttcattatcattatgacaattgtcgaaactggttgctattgttctaggcgtattatatactggacgagctgttgatcgtcggagaactttaagagtcaagctagaaaacagtcgcaaggataatatcagcccaggtatggttttttaatcctaatgcccactgagacaaaaaacgattagtccttaagggttgtgtaaatgatgttgtgttataatattggaaggatcaattggaggaagttgcgaaagaggaggcgagttccataagtaatataattgctcaggctaccaagtagtccttctttgaacttctcttatgcagctgaaacaatcgtaaatgagttaatattttccttcaactctgagaaattctcttctgaatcacactttgtttgtcatgccatgtcatgtgattgtttgattgattagaagaaagaagcattcatcgttttgggttt

SEQ ID NO: 155560 - DNA, 2651 bp, Arabidopsis thaliana landsberg
ttaaaccaattgaaaattagtgaattaggggttgatgtttgttttagtttgttactcaaaatgtagatcgatatagattttgatatgtgaagttatgatatatatatatatatatatatgtgtccagagaaagatcacaatagctatggttatcgaggtaatattcatggcggtggtgatcttctgcacaatgtattttttgcatacaacaaagcagagatcaatgcttattgggatcttgtgcattgttttcaacgtcatcatgtatgctgctcctctcaccgtcatggtatgatgcctcttctttctaaactaatcacggaaatgcaaaaattggatactacactatcaacttttttcttttgttctctttatctcgtgaatttccatttaatgagtttagttataatgtggaacagaaacttgtgataaagacaaagagcgtgaaatacatgccgttcttcctatcattagccaacttcatgaacggtgtcgtttgggtcatttatgcatgtcttaaatttgacccttatattttggtaaaccctcatatatatctttattgtttggaactcaaatccctacatctcaaaaaggactaattatcttccatgcatgaaaacagattccaaatggtcttggatcgctatcaggaataatccagcttatattatacataacttactataaaacaactaactggaacgatgacgatgaagataaagaaaagcgctattcgaatgctggaatcgaacttggccaggcttgatagtttcagctatttcatcgtctacggtgcttcatcgataggttaagatagaatcagaagtgaggtgaagttcttattactagtattttgtgtaagcctatgtagaaaaaaaatgaacaagtggaacccttaagttatgaagtttcttgtgtatgaagaaatgggttttcaggtttttttgttggaaatgattgtaactttcgcaagttgaatctatgtacgttgttacaattttagttttaatcgaagtttattagattacttttataacattttcttttttggaaactgtaaggaaagaaacaaatttgtcctcttaagagcagagtaataaacagagtttctctcttgttttaggttttttttttggtcctgaccggttaagaatatttccgagaaagttaccggtttagctgattcgattttaaaaacgaacccataatctaaaccggaatgtgcgattcacaattgtggttttgtaaccttaaaacacggaggaccagagataccgtttgagatgacgattgaattatgttatcatcatcaccggcggtcaccaccgcctcacacttacatcctcctccgtcgccggaaacctaccaaattcctctgaatttactttcctcgccgcatattacccgccgagaccttttcaaaactctctccgtatgtattgccacaccatcactctccgtctccatcgccgcaccagctaacgcacgcggtctctttcaaatgccgcctctccggctctctaatcggtaatttactttttcaaaaccctagttttgagtttctgtgcatacaaccagatgtgcatcaatgtatacgtatcttcgtccttttgattggaactaagtttaaaggatcttgtaaagctttagtagattagtgagattccaaattcttcacattgaactgttaagagtgaatctctgacttttaacattttgattcttgttcttgattcgtttccggagttatttagcctggttatcttagaaaatggagctaataatacacaatgtgtttttggttgttgttttttcttggatcaagttattaccttgtgagagctggggaatcagattacgaaagcttagggataatcaacacaaacccggttgccaaaacatcggtagatagcggattatcagagaaaggtaagaagcagactctgagagctgcgttacagttaaaagcaatgggagcttgtgaccgaaactgttggctctggccttccataacacagagagcttatcaggctgctgaaatcatcgccgccatcaatggaattagtcgcaggtaaaatcgtccattagtcttcttactctttagtgaggttttagctgtggaatctaatctttgtgatggtacgctgaatgttttatgttcacttggttttcgcagctatatagttccggagtatagcttccttgatgctcgtggtttaggagcttacgaaggcaagaagcttgaatctatatcagaagtaagattttagcatttttcacattaaaacatacaaacaaaaactcgggttgaagtatgaaagtttcaacttctgtgcaggtgtatgcattagactcaatatcgatgaagacaaaacctcctcctataagcgacggtacccccaacgagagtgtatcagatgtatttgtgcgtgtgacgcaactcatgtctattctcgagactcaatactcagaagacacaatcgtgattgtttcgcctgattcagacaacttatcggtgttacaagctggtatccaaggactcgaccttcgaaggcactcggagttgtattttggaccaggagaagtaagattgttgaatgccaccagcattccagtgtataagcaaccagcttatgccgtatataagt

SEQ ID NO: 155561 - DNA, 2023 bp, Arabidopsis thaliana landsberg
aaacactagtatcaaaaattgaacccgttaaccggcgacccgaaacaatgacccggtccgcaggtttccctctcttcctcttcgccgttgtactctccctctcttcttctctcctcgccgacgatcccaaaccaatccgccgtgaggtctacgaaggaggtaagatatacgacatcagccatcgttacacgccggagattccagcttgggaatcttcggaaggattgggaaagacgttcctgcgattagccgcgagtatgaagaatggatcattcgctaacgtatcggagatgaaactatctgttcactctggaactcacgtggatgctccaggtcacttttgggataattattacgatgctggttttgatactgattcgcttgatctccaagtcctaaatggtaatttttgaatctggtgtttattgattttagttgggttagtgataaagttttgaaattggggtttttgtctatataggtcctgctttgttggttgatgttccgagagataagaacattactggtgagttgttgaatttgtaacgaaatttaaagttaggatctttttgtctaatgatttgcttttgggttggattattatttattagctgaggtaatggaatcacttcatatacaaagaggagttcgtcgtgtgctctttagaacatccaacactgacaagtaagagtctcagtattgagagtgtgtgttattaccttaatcttggtaaaaacaactagagagcataagcttactcactctgtgtttgatatatatatattaggcggcttatgtttaagaaagagtttgattcaagttttgctgggttcatgaccgatggggctaaatggttggttgagaatacagacatcaaacttattggtaagagatggacaatttcggtttcttagcttttcatgatcgatagcttgtattacacatttttttctgaaaccggttattctgcattgtggaatccagggcttgattatctttcatttgctgcttttgaggaactacctgctacacacagggttatacttaaaggacgggttagtatatctttctctataaaaaaatattcaagtacctaaacatttccaattctcctgtgatgtttggatgtcaaaccatgggatatgattgaatatagcggtattcactggacaagaaagtgagagagataggtaggcttaaaagggagatgaactacgtcttaacacgtgagatacacatgttttcaggatataatccctgtcgaagcgctgaagctggatgacgtggaggtaggaatgtacacgcttcattgcttaccgttaagattggttggagcggaaggagcaccaacgagatgcattctcatcaagtgattcagttcatctttttctatctaagttgtatatgaattactgataataaacaataggctttttggcttcttgcttccaagatctcataaccatatcgaagatgttaacatatgggatcattttgttgtaaaagaagcgtctaatcttattatataaagtatggttttcaaaattagtaactcataggattgtgtcacatgacacatctatcagaaattttttaaactttgttattttccctttaagaaaaacaaaaaataaaaagcaaatttacatatactaatttatgtctatatctaatttttgttttaagcaaaaagaaaattcacaaatttgtttttatatgtgttattggtcaattaaatttagcatgtattatttttttataaaatcatttagtctgaataatagctatttaaaaggccattgaagtttaaaatataaaataatttatttaatattaatttagttggataaaattatatctttcattgtaatataatgttttgattcgttaagctaaaacacacaaaaaaaaaacttaatgagcttataagaaataaatttttgaatacttatgttctattctatcaattttaatgcatcatatgatggaagggatcccatactttgatgtgatactgcaaact

SEQ ID NO: 155562 - DNA, 1621 bp, Arabidopsis thaliana landsberg
gtaatagaatgtttatcgatttcgtgaacagagttttttgtttgcaagagaattctatagtaaacaggtgggctctaaagtgtggaatcgatattgatccagcttgtgtcattagtggatattaaacgtgttggaacgtggtgtatcggaacttgatttacacgttagtgtggatcgtggtgagcttccttctaaggtctttatgagtgagtcacttgttagtctgaggatagaatctcaaaaagttactcccattgatgtggaagatgtttttcttccaaagcttaagactctttatcttgatactattagtttaggaaaagccggtgattaccttgacaagattctatcgggttgtcttgtcttagaggaattggttctgatcaatgtctactttgattttaagaaccgctctgtgtcttccagaaccctcaagagactaacgctatggtgtacagagtcgtatgataaaaatccgcatagtgtttcgtttgatacaccaaatcatgtctacttgaaatactccgattatgttgcggcaaagtatccaaaagtgaatttcagttcgcttgttgatgccactattggtcttgcaatgacaagtgatcaggatgcaaatgcaagctatgatgctttggtcggcaatgcaacagactttctaatgggaatatgcaatgttcagatcctttgcttatctgccaacagtcttgcggtatgttagtgtacgtaattgattaatgattattttttagatagtgattgcatatggatgatgatatggtacttgttttggtttttgtttcaggttcttactttctgctgtgaatcaataccggtattcaacaacctgactcatctaactattgagagtcatccggaactaggatgggaatcattgccaaatcttctcaagagttgtccaaatcttggaactcttgtcttccaagtgagcaaatcaaacccttggaaatgaatctgttgattagttttacatcaaagtttgagatgtttattttgtgttttagggactccttcacaaagcaacagatagatgtggggatgtgtgcatgtgccaaggtttggagaatagtcattcttgcttatcatcaagtccggtgaagtgtctaaagatattgaaatttggagaaaccaatgatgatgacgatatggagatagagatggagcagatcaagaattttttggagaaaatgactaatcttgaacaactcataatatactacgaatcatcaatcgataatgatttagttagagtatcaagccaacttcaggaggttcctacagtagcttcactcaagtgcaagattcaagtaatctctgataaccttagcttgtcatccactttgcccatttccttgtcgatggaaaatggatttcacctgtagaagaaccttactggtttcgtggaattagtaatgcggtcatgcctcgattaccacttggaagctatatatggatgtgctcatggctacaagtatttgtagttactaaaattatcttaaaaactcaaatcaagattctcttgtttctgttgtttgtactttgttactaattgaaaaactctttatgctttggaagctatatttggatgtgtctcctggct

SEQ ID NO: 155563 - DNA, 3548 bp, Arabidopsis thaliana landsberg
  unsure (1)..(3548): unsure at all n locations
ggtcccttctggcagttgaccctgcgatagagtatatcagtcatttctgtgactttttactgttttctcgaccagcaactcgacctatcttcccagcaggatcaccaactgctccaaaaccagttgctgtcaaaaacaaagaaaaggtctttgtccctcctccctacaaaccgcagcttccatttcctggccgtcacaagaaagcgttgacagataaatatagagctatgtttgccaagaatattaaggaggttgagttgcggatacctcttgttgacgctctagcgttaatcccagactctcacaagtttctgaaagacttgatcgtggagagaattcaagaagtgcaagggatggtggtattgagtcatgaatgcagtgctatcatacagaagaagatcattcctaagaagcttagtgatcctggttcattcactctaccatgctctttagatccgttggctttcaatagatgcctatgcgatttaggagcatcagtcagtctcatgccgctctctgtcgccaaaagattggggttcactcaatacaaatcctgcaatatatccctcatcctagctgacagatcagtaaggatccctcatggtttgctcgaaaaccttccaatcaggatcggtgctgtggagataccaactgactttgtagtcctggagatggatgaagagcccaaggaccctttgattctagggagacctttcttagacactgtaggagctatgattgatgtcaagaaagggaagattgatctaaaccttggcaaagcctttaggatgacctttgatgtcaaagacgcgatgaagaagcctaccatagaagggcaactcttttggatcgaagaaatggatcagttagctgataagttactggaagagctggcagaagaagatcatcttaacagtgctttaaccaaaagtggtgaagatgggtttctgcatttggaaacattgggataccagaagctgttagactcccataaagcgatggaagaatcagaaccctttgaggaattgaatggaccaacaacggaggtaatggtaatgagcgaagaagggtcaactcgagttcaacctgcactctcgaggacatactcgaccagccactcgaccttgtctaccaacgaatctggggagccgatcattccaacttcagatgactggtctgaacttaagacaccgaaggttgatctcaaaccacttccaaaaggtctaaggtacgcattccttggtccaaactctacttaccctgtgatcattaatgctgagttaaatagtgatgaagtgaacctgctattatctgagcttagaaagtataggagagcgattggttattcattatccgacattaagggaatttcacctagtttatgcaaccataggatccatcttgaaaacgaatcctattccagcattgaaccacagaggaggttaaatcccaatttgaaagaagtagtgaaaaaagaaattttgaaactgcttgatgctggtgtcatctaccctatctctgatagtacttgggtttctccagtgcattgcgtccctaaaaagggtggaatgactgttgtcaaaaatgaaaaagatgaactgatccctactagaactataactggtcatagaatgtgcatagattataggaagttgaatgctgcatctaggaaagatcattttcctttaccattcattgaccaaatgcttgaacgtttggctaatcatccatattattgctttcttgatggatacagtggtttctttcaaataccaattcaccctaatgatcaagaaaaaaccactttcacgtgtccttatggaacttttgcctataagagaatgccatttggcccatgcaatgctcctgcaacatttcagagaagtgtatgacctctatattttcagacttaatcgaggagatggtggaggttttcatggaagatttttcggtctatggtccctttttctcctcatgtttgttgaatcttggcagggtattgaccaggtgcgaagagacgaatcttgttctcaattgggaaaaatgtcatttcatggtgaaggaannnnnnnnnnnnnnnnnnaagatatcagagaagggtatagaggttgacaaaggaaaagttgaggtgatgatgcagttgcagccaccaaaaacggtgaaggacatcagaagtttctttggtcatgctgggttctacagaagattcattaaagacttctccaagattcattaacaccaccatccactcgaccaatcactcgaccacatggtcaagtcccttatcatcattcactcgacgtccttactcgatgacaagcttcaaagccttcttcattccgcactcaaccagacactcgagcacaagaagaaaagaagactccagctattcactcgacctcccactcgaccacatgggtcgagtacagttcttaatccgtcccaatacttcgtcgttttgagtattagggtttcggaatatttggctataagtagcatgtacttcacattttcgcagaaaagaagtttttatctagttttattccgcagactttatgttctagactttttgtaattcggatttctctttatctattcagtattcagtattcagcttttgttcttgatttcgtttactgttgttcattctgttatcttcctgatgttacactgttgttatcatgtcttcaacctgttcaacgtttatgctttctgttatgatgtctgagtagtgaataggtttctgaggatgggttagagtagtgtagaattctcagtatgctaggtgattgagtattgattgatagatcccttctggattagttgttcttaatgcctattgctttctgatcaactggaatttgagcccagacatttccgcgcccaaaagatgttcgatgaaatgtctgaaccactaattccagagattcgtgaccctgtaccaaggtattggttgcagggagcgttttggctttaacttgttgattcgtaatgcctgttaggttagctctcgtcaatggtgattgagtctgggactaggttagcttgagagtctctgttgcggtggcacttagatttggttaatgaacttgttgtctagggttaatttattgagcatgtcaatcacctgtaaactgaggaaacgaaactactcaattatcccatccttaggaattctttatctaattgattttattgtttactctactactgtttactacatcctgtcatctgttgtttagtttctgcaaatctttactgttagtcgacccgatactcgaccacccagttgtctagcaacaaactgaacagtcgagtatccctgtttcattttctgtctgttactcgaccagtcaattgaccacacccagtgctctgcaacaagttgtgttggtcgagtgttttattgtttctgcttgattttctgtttcctgcatgttcacttaggactggtagaacaccccaaaacctggtattgcttggcttgactctgtgaactcggattgcatcttgattgctagcatcacacccatttggattgacaacct

SEQ ID NO: 155564 - DNA, 1162 bp, Arabidopsis thaliana landsberg
cactttctctacctcaccggtaaaaatggcgatgtgggtattcgggtacggatctttaatatggaaaacgggttttcctttcgacgaaagcctccctggtttcatcaaaggctatcgccgtgtcttccatcaaggtctctctctatctttctccatctttatcacacaatcttgattatgatcttaagttgtatagtaatgttaaatacggaatttaggtagtactgatcatagaggaattccggattttccgggaagaacagtgacattagaagctgctcatggagaagtttgtgtaagtatctttatgatccaattgatgataagtactactctattcaacttctttgtttatgtttactgcaaatggagagcacacagtgtggagttgcttacaagataactaaagaggaagataaaagagatgctttattggtaagtgattactctctttgttagaatcatgacaaaaaacatttatgttgtttgtttgtgttgtcagcatttggaagtgagggagaagcaatatgatcagaaagagtatcttgatttcttcactgtgagtccattttgttctctgtttcgttttcttctttgggtgtgtgtggcaatggttactttgtttgtagcaggactataatgcttcggaaccggctgtggcaggagtaatggtgtaagaaacgcatacgattacatcacgtcggtatatatgtaaacgagtaacaatgtcgatacgtatcttccttgtttactcaggtatatagcttcacctgacaagaagagcaacaacaactacttaggaccagctcctcttgaagatattgccaagtaggtggctttgtttttttagcttcttcaaagattgcatttgacaagtcgtttcttgcgttttgcttgtgtttacgcagacagatagttaaagcgaaaggaccttcagggccaaacagagactatctcttcaacctcgaagaggctcttgctcaactcggtaaactaacttttaccaattactcagtaatctttggtttcagtctttcagattacaaagtaccaaaccttgttttctgttctttgataccaatcagggtttaaagataaacatgtcacagatcttgcaaaccaagttaggcacattctttcagaatccgaagagttagacatt

SEQ ID NO: 155565 - DNA, 1788 bp, Arabidopsis thaliana landsberg
aaaaatggatgaaagaaagtgaggaaaataatcatgttcccttttactatttccggcacacttcaactcaatgatccaactagccagaatattccaccaccttggtcgtcacggttctccacacttctttcaacttcccggatccttctcgccatccacagtttacttttcgaactatcactcacaaaaacgaaggagaagaagaccctctctctcaatcagaaacttcttcgggtaaggacctcgtcgtccttattagtctgctgaaacaatgctacaccgagccgtttcgtcagtctcttgcagaggaagtaggcgaaggagggacggtgtgttgtttggtctccgacgctctatgggggaggaacacggagattgtagcgaaagagattggagttcgtacaatggtgatgaggactagtggtgcggcaacgttttgtgcttatacagctttccctctccttatagataagggttaccttcctaatacaggtaatattgttttatgttaagaattgtttccttgcagcaaagttcgagtaaacatacacttatctttcaattttttgtttttctaagaaatacatatatttatagtttggtttcttttctttttcaactatatacagttatcggatttaaagccaaattagtatagtggcgacaataaacaaaagttggttagaagtttattgtaaacaatacaaaatagtagataataatattaaaaaatattaaatatgaacggttactttttttcctttccgataatgtatacatggaccatattaattttgcgatatacttaacggtaaatcatcaagtcaatttaagttggacttatttttattacaccacttgtcacttctctataaaacagttttttatataaaataattgcaattgggtagttataatacatgttattggattatataatccaaacttttcgcctcgaaggattagtttccgttttggtttaggattcctggttgaaaaaaagtttcttaacatttttttagcaatattaaagatttgccacccactatttttaacttcaggttctagattagatgagctagtgacagagcttccacctttgaaagtgaaggatcttcctgtaataaaaacgaaagagcctgagggactaaaccgaatacttaacgacatggtggaaggagccaagttatcttccggagtcgtatggaacacatttgaagatcttgaaagacattcactcatggattgtcgcagcaagttacaagttccgttgttcccaatcggaccgtttcacaaacatagaaccgatcttccaccgaagccaaagaacaaggacaaggacgatgatgaaatattaaccgattggcttaacaagcaagctccgcagtctgtggtctatgtgagttttggaagccttgcagctatagaagagaatgagtttttcgaaattgcttggggtctaagaaacagcgaactaccattcttgtgggtggttaggcccgggatggtccggggaaccgagtggcttgagtcattgccttgtgggtttttggaaaatattggtcatcagggaaaaattgtgaaatgggtgaatcaactagagacattggcccatcctgcggttggagcgttttggacgcactgtggatggaactcaacaatagagagcatatgtgaaggtgttccaatgatatgtacgccgtgtttctcggaccagcatgtgaaccccaggtacatcggtgatgtatggcgagtcgggatgatgttagagagatgtaagatggaaag

SEQ ID NO: 155566 - DNA, 777 bp, Arabidopsis thaliana landsberg; identical to SEQ ID NO: 56387

SEQ ID NO: 155567 - DNA, 2396 bp, Arabidopsis thaliana landsberg
  unsure (1)..(2396): unsure at all n locations
acaacgcgttgttttagtttcaaatagnnnnnnnnnnnnnnnnnnnnnnnnaattcgttttgtcgccgtcggtaatggcgaaaaattacacagtcgccgatgtcgtaaatatcgacagtgacagtgacagtgacgacgacaacggaggagtaataggaatggttccgagcttggcatctctaatagagaatcagaaagtttcgatcgctgatgctgcgacggtggctcctcgagaaaccctagagtgccgaagtttctggaaagccggcgaaaactttgtgatcccttcaagtgttactctaactgccccaggttctttcttcgaatctctctctcactcacgctccacaattatgggttttggagtacttattaatgagatgaaatttgacaggtatggttgagcatgctcgtgttcatccaaagtttcttcactcgaatgctacttcacataaatgggcttttggaggtaaagctatgaattggctctactggtgccatcaattagataaatttgtgatttttttcttttcctcggaggtgtagaatgaagaaaaatgcggtgatgattgttttccttgtaatgtattgcagcaatagccgagctaattgacaatgctgttgacgaggtatgcctgaggggtgaaatgatttcttaagttcatttttgatgatctttttcgtttcatgctcattgcgagtgaatttttttattaaagcattggtactgtatgttgttatgttgaattgcttatatctcagatacaaaatggtgctacgtttgttaagattgataagatcaatattgtcaaagataattccccagctttagttttccaaggtatatttcctattatagagtgtgtagtgcttttcccttaccgaggctttgtatgttgttaatgacatggtgtcttctttttttccaacttgaagatgatggcggtggaatggatcccgatgggctcagaaaatgcatgagcttaggctactcatcaaagaagtctaatacgacgattggacagtgtaattgttttacttagttattatgatattgagctcatttctagttgagttggtcttgctgtcttggtctccaacaggcggtctctaaccagagtttcaccttttgtgttcagatggaaatggtttcaagacaagtaccatgagacttggagctgatgatattgtttttactcgctcaactcgtggagggtattgatatatctgatcatgtacactctgaatttggtatatactcttgtttcaaccttttttttttatcttttctgttttagcaaatctactcagagcgttggccttctgtcatacacattcctcagaaaaactggtcaggatgatgtcgttgttcctatggtaaaatcttcagcattttttgtttcatgcctgaaataaagaattattgtaaactctagaatgtgcaactcttctttgttcttaagtgatagatccgatatgcaatgcagattgatattgatacatccaaggagcgaccacaaccaattatctatggatctgcagaagattgggctgccagccttgaaattatactcaagtggtctccgttttctacagagggcgaactttggcagcaggttgtttctttcgaaagtcagctcatgaacattttattgcatcattgttcttccttgacttgtgtcctaatgtgctgtggctcccttaaattcattctgaagattttgagtccgtgtgatagcggtctgttttgttaacttttttatttccatcttccacccaccagctcgaggatattggaactcatggaacaaaagtaattatatacaacttgtggcttaatgatgaaggaatctacgagctgagttttcacgacgacaatgaggtaacacacacttgtccttatatatactcgctgagatatcctgccagaggtgtcttaggtcaggtctttgctgacgaaattcttacaaaccttttaaattatttactttgatatcggtataggacatccgactccgagatgaaagtgtccatgacagtaaacgggtgcatcataatttattggaactgagatctcatatttcataccacttacgttactctctgagggtaatatccttaatatgtttttttttaatagttctttgtttaaggatgtttgaagattgactttgttatttggtcttccttaggcttttcttttccatgttatatctcaaaaagtccaaaagcttcaaaattattcttcggggagtctttgtggcgcaattcaacattgctgatgaattcagacatcctgagacaataatgttcaaatcccaaagcatgttgcagtggattatgtaatacaaactaagaactcctctttttctttcgtattacttcgctggttttta

SEQ ID NO: 155568 - DNA, 4396 bp, Arabidopsis thaliana landsberg
atgcttgctcgggctcctgctccacctttgctcctcccttctctgaatccgcagccgtgtgctctaccgcaagatttgaccagtttggtctctccttctgaacctcccgaccctccagacccaccagactatctcgttggagcttccaactcctttctctcgattttgctgttgaggtcttcagatctaggataagatcttgttcaagctttgagccctctagatctgggttttgctttacgatctattactgctgtgtgcagttcgtggtaccaagtatttcctctcgcttgtttggagctttggttctctattccacacctctctcatcctctagtcactctatcaaaaggttttgtctatctgaaaggtagtaatttctttgaattttttaccttcctttggaacatgccttcgtttatacttcagttccctcaccatgaggatgtgatgatttctactagttttaggctggttttacctcagtatgaggctgttatgatcttgcttaagctcaagctgttcttacctcattatgaggatgtgttgttttcgattggacttcgaattcagcttcttttacctcagtatgaggttggtttgattctgtataagcttaggcttctcttacctcattatgaggatgttattcaaaaactttggttaagagcaattcatgttattgtttctttggtttggtttcttgaaatttcacgcaggataaaggaaaagacatatgacgtcttaacaagaaatgatcttgggtcttggactccagatttgttcatcgagaagtggtggttttcgcaaccccacacctctccgaagttgaggtttttctcacatctcgtaggctcaagaagttggtgctttgtcgcctatgctatcgtaaccgtatttcatgatgcgttttatccactagaggatgttgcatctccggacagcagatcaccaagtgtgctctcttatttccgaaagctcatctcatgtttcagcactattggtgtctccaactttagttgcttaactgttatgtatgcttctatctttttctttcgtgttttctgtatgccatttgtagcagtggtttctttgacctttgtagtctctttgatgtacttgttgaaccatttctttggagagtagaatgatttataaaaagctagtttgaccaaaaaataaagatctcactgattttgccaataccaaattttactattcccaattaactgtaccaagcaatatctttttggtttgtaacataattttggcaaagtttcgacatgtatcaaactatcaatcaaatttgcgatactgattttctatatatagtttcaattttatttggatatcacaaataaaaactaaaagtgggttgaagaatttacgaaataattaacataattttggtcggcgctgaccataataattaataaattgcgtcttttagctcttaagtatagtcaaacgttaattttttttagtaaagcaaaagacgtgtcaaagtcaaactaactaaaactagatgttctcatatactgatatacaatcatatttttaattatgaaactatattgcgtcgttgacaaaaaaaaacttagattgcatcaattatggttattcttacaaaaaaaaaccccgttaataaatgatataaaacaaatgagaaattaaaaaattcgatatcataaattcatgatattagtaattagatctccgaataataaataatcgtttactaaaaacgtcctccacaaaattcggcaagtaaaagaccaaaaccaaatctcttcagggtcaatttcataacttcacactaattccataaccatacataaaaacaaacaaaaaaacaaatcctgcgagaaaaatccgaaaaaatcaataatttaaatcactttccatagtttacagacaacacagagcttgcttacgtgttctccaaatttgtatacaatattttcacaaaaccagttcctcaacaactagatccatcatctctagcgttcttaaagtttccaactttttttttttattaatttgggccaacttttttgttttattaatttgggccaactttttttggtttgagaattgggcgagggagaaagatgggtaaagtggcagttgcaacgacggtagtgtgttcggtggcggtatgtgcggcggcggcgttgatagtacggaggagaatgaaaagcgcagggaaatgggcaagagtgatagagatattgaaagcctttgaagaggattgtgcgactccgatgtagaaactgagacaagtggctgatgctatgaccgttgagatgcatgctggtcttgcatccgacggtggtagcaaactcaagatgcttatcagctacgttgataatcttccttccgggtaatgttttctaattggattcaaattctgttgcttttcattgaaattttcaatctttgtcatattagaagatagaatatttctatctcctaatatgtcatccattcaatgttgttgattgtgtaatatggattacgttatgaaatgagtttcgtcctgatttggagatgtaattgcattgtctcttaatggtcaaaattgatcgattagataggattattgatctactgtttcagaatcagtgaatcttttggaatccagatcatgtcccactgaatcattgtctcattttcttataggttttgttgtatcacttcttgattttgtagatttgttttcatggatttgagagttattgcccttttgattaaggtttaatacatagttacattaaggcagacaatgacagtgatgtgaatatgatttgtctgaaaagtctgtccacagacatcacttttgtcttatggacttcgtgattagatggcatgatggcattgattatgttatattacgtagaacattttggtgcggtttcattttcgctttaatattgttagccaatgcggcaatgcgtctagtttcatgttgtaggtctgtcttacatttactaccattaatataacagggatgaaaagggtctcttttatgcattggacctaggggggacaaacttccgtgtcatgcgtgtgcttcttggcgggaagcaagagcgtgttgttaaacaagaattcgaagaagtttcgattcctcctcatttgatgactggtggttcagatgtcagttttctgttcttcaatttgtcatgtttagtcttagatgatctttgtgtaacaagattcttttgcgttcttttgatggattcaggagttgttcaattttatagctgaagctcttgcgaagtttgtcgctacagaatgcgaagactttcatcttccagaaggtagacagagggaattaggtttcactttctcgtttcctgttaagcagacttctctgtcctctggtagtctcatcaaatggacaaaaggcttttccatcgaagaagcagttaagctcgattttcgttcaactatttcacttaaaatgtttagttttcgcctttgccttaatctttgtttaacctgttgcataggttggacaagatgttgttggagcacttaataaggctctggaaagagttggtcttgacatgcgaatcgcagcacttgtgagttctctttcgccttatgctctctagtgaatcccttttgtcatgtgtttgttgatttgtttttgacgttttacaggttaatgataccattggaacacttgcgggtggtagatacactaacccggatgtcgttgtcgcagttattttgggcaccggcacaaatgcagcctatgtcgaacgtgcacatgcaattcccaaatggcatggtttgctacccaaatcaggagaaatggtttgtgttttcgaataaaacataacaactccaattgagctttcaagtacctgtttcatcttatagtatgtatgtaccacaatgtaggtgatcaacatggaatggggaaacttcaggtcatcacatcttccattgacagagtacgaccactctctagatgtcgatagtttgaatcctggtgaacaggtatgagctttgaaactatgctgttttccgagagtttcgcttattgaaatatcatcatgaccataagattatatctggctatatttgttttcttcagattcttgagaaaatcatttccggaatgtatctgggagaaatcttgcgtagagttcttctgaagatggctgaagaagctgccttctttggcgatatcgtcccacctaagctgaaaataccattcatcataaggttgattagttgctccgtcgttatgactacttgccatcgattcagaagtctaataattatgtttgcggtatgcaggacccccaacatgtctgctatgcacagtgatacttccccggatttgaaggttgtaggaagcaagttaaaagacatattggag

SEQ ID NO: 155569 - DNA, 632 bp, Arabidopsis thaliana landsberg
tctcagttatgtcgcttctacttcacttccccaaattcgttgaagctgacaacaaaatcatcaagttggttgagtttgcggatatcggatgcgggtttggaggcttactaatctcccttgcgacgcttttccccgatacgctaatgatcggtatggagctgagagataaagtgacggaatacgttaaggaacggatcttagctttgaggagaacgagctcggagggacagtatgagaacatctctgttgttaggactaactcgatgaagtacattccgaattacttcgagaaaggacagctttcgaagatgtttttcctcttccctgatccacattttaaggagaagaatcataggaggagagtgattagcactcatttgttagatgagtatgcttatgttcttagagctggtgggattatttacacaatcactgatgtggaagagcttggcgagtggatgaagtcttgcttagagaagcatccgatgtttgaatctcttacacaagaagaacttgtttctgatcctgttgttgagcttctatgcagtgctactgaggaaggacagaaagttgctagaaatggtggacagactttcagagcagtttttagacgcattgcatatgtttcttga

SEQ ID NO: 155570 - DNA, 1515 bp, Arabidopsis thaliana landsberg; identical to SEQ ID NO: 18663
  unsure (1)..(1515): unsure at all n locations

SEQ ID NO: 155571 - DNA, 632 bp, Arabidopsis thaliana landsberg
  unsure (1)..(632): unsure at all n locations
acaaacaaaatatcaacactcttgaaaacagagccatggaacattctctcatcatcctcctcttcaccgtccttcttctcaccaccactcccggaaccctatctcagccctcttcagccgtcgctccggccccaccaggacccacaaacgttaccaaaatctagannnnnnnnnnnnnnnnnnnnnnntcatccgactcctcaaatccactggagtcgctaaccaactctacggccaactaaacaactccgacaatggaatcactatattcgcaccgagtgattcctcgttcaccggtctcaaagccgggaccctaaattcgttaaccgatgagcaacaagtagagcttattcagtttcatgtcataccaagttacgtctcttcctcaaacttccaaacaataagtaaccctctccggactcaggccggtgactccgccgatggacattttcctctcaacgttaccaccagtggcaataccgtaaatatcacgtccggcgtaaccaacaccaccgtctccggcaatgtctacagcgatggacaactcgctgtttatcaggtagaaaaggttttgcttccacaacaagttttcgatcctcgtcctcctgctccggctcctgctcagtatgtat

SEQ ID NO: 155572 - DNA, 1142 bp, Arabidopsis thaliana landsberg
aaaaaaaagagaatggaagaatgaaaaatgttaagaaaaaattaatagagaaagaagagaaaaaacgagatcaaaatgtcaaaagtaaagagtgttaattaaaaatgtgcaacgaagaaaaaaagtgtgggatggtaaagaactggaagatgtgtccaaagaagacgaagaaaattgaagatccattcaaagtaattaatgaaacggatatcatacattttagtcatgaagaacatgtacttagattggatgagaattgtcatatggaaaatgacgctacgcgttgccgggggtgcattcttgctattaatggcaatctatcctacaaatgtctggaatgcgatttcatcattcacaaagtatgtgcaagtcttccgcggaagagacgacattttttgcacaaccataaactcactcttcaatcgacacgtcttaatggaggtacaaatcttgagtgtataacttgtggaaactatactgatggtttcatatacaagtgtcatcatgaagattgcaaaggtattagtgttacgtacgatgttcggtgtagttctgtatcggaaccgtttcaccatgatctgcatcaacatcccttatactttaccttggaaagcaacaatcagtgtcactcttgtaaaagacctatagagaataatcccttaaactgtacggtttgtgaggagtactctttatgcatgaagtgtgccactttaccaagaaaggtaaaacataggtgtgatgatcattttctgtcattatgtcaaggtgtgggaaacgcaagcggcaacttgtggtgtgatatttgtgagaccaagacagatccaaatgtatgttactatacatgtgaagaatgtgggctcagtctccatcttaattgtgttcttggtgatttttattatgttaaggtaattcctgatcagccgaaagtatttgccaacaatggggttactcgacttttttgcggcgtttgtgaagttcgttgcaagtttcccttcatcatgtggggagctgtaggagactttactggctacgtttgttcgattaactgtgtattcccaaaagcggataaataatagggtagccatgaaagtattatacaaatttgtgaaggcattcgatatgtttccaagatgctgcaagaa

SEQ ID NO: 155573 - DNA, 2700 bp, Arabidopsis thaliana landsberg
gaattggtcttgaccaccgaccaatccaaaggttcggttctacgcatatctttacttcgcggaactcgaaacactagagaagaatgagactagaaagatcaagattttgtggaatggttcccctgtttctgaaacttctttcgaaccttcttcaaaatattcaacgacgttttctaatccaagagctttcactggtaaagatcactggatttctattcagaagactgtagattcaacgcttccaccgattctcaatgctatagagatttttaccgcacaatctctagatgaattttccaccacaattgaagacagtgagtttccactttcaatctctatttagatagaatgagatttctactgaaactcacatagtcacattttctcttggtaatgcagttcatgctatagaaagcataaaagcaacttataaagtgaacaaggtttggagtggtgatccttgctccccaagattattcccttgggaaggtgttggatgcagcgacaacaataataatcatcaaatcaagtccctgaatcttagctcaagcggattactaggaccaatagtctttgcatttagaaatctctctcttcttgagtcattgtaagtatacgtatacaattgacactttcaccactttttatgcacatgaactatcagagagttatgcattgtttttctcagggatttatccaacaatgacctgcaacaaaatgtgcctgagtttttggctgatctaaaacatttgaaagtcctgtaagtaagcacaaacatacacagtatcgttcaatctaaataatgaaattacttactgacacatttacttgtgttgtaaggaatttgaaaggaaataatttaactggatttatcccaaaatcccttatgaaatagttaagggcgagtttacttacgctcaggtaacagtttctagcattattcagatagttattcaacacaagcactctctctgaatcttgtgatttcctctgttttgcagtgcggatgagcaaaacctttgtaactcatgtcaagacaagaagaagaagaagagcatggtcgtgccaatagctgtagcagcatcagtgatcgttctcgttgtcgtcttggttatcatatggatcatactaaggcaaagaaaaaaaggttagatggctggaatatttacttcaggattaatgaattgaagttgttttatgctgagaaaaacgagtgttttgatttcaggagcctattcaggaccactcctgccttcagggaagagaaggttcacatataatgaggtctctagcataacaaacaacttcaataaagtgattggtaaaggagggtttggtattgtgtaccttggttcccttgaagatgggactaaaattgctgtaaagatgataaacgattcttcattggcaaaacctaaaggaacttcatcatcatcatcatcccgggcttctaaccaattccaagtcgaggtaatctaaagaacaccaaaaacatgatcagatattttagaaattaaaatggtcaagtactgtaaaatgtttgcaggcagagcttcttttgacagtgcatcaccgcaacttagcttcgtttgttggatactgcgatgatgatcgtagtatggctctcatctatgagtacatggccaacggcaacttgcaggcttatctttcaagtcatcttattatatatctctatatctctgttaccaattgttgcttttgcttcctatgagctcacgggtattatgtttatggacatgcaggtgagaatgcagaggatcttagctgggaaaagagactccatatagccatagattctgcacaaggttggtcccggttttggcaaccttgattcctcagggcttaaccaagaaaccaaacctggtttagcctagttctgtattgtgaaacctggttttatttccccctttgcaggtttggagtatttgcacgatggatgcagaccagcaatagtacatagagacgttaaaacagcaaacattctaataaacgataacttggaagccaagattgctgatttcggcctttctaaggtcttccctgaagacgatctcagccacgtcgtgactaccgtcatgggcactcccggctacgttgatcctgagtaagttccttttcacaatcaatacagatcacatgttctggctggtagcttcacaaaccagagcggtttagtgagactagggttagggttggccaattcagttcggaccctttttaagtttatcaggaatacatggtaaccaatttgcgacgtgtggtgacagatactacagaacatttgtgctgaacgagaagagcgacgtgtacagttttggggtcgttcttcttgaactcatcactggccagcgagccatcatcaaaacagaagaaggagacaatatcagcgttattcactacgtttggccgttctttgaggctagagaactagacggcgtcgtggacccgctgcttcggggagacttctcgcaggactcagcttggaagtttgtggatgtggcaatgtcttgcgtcagagataaaggatcgaatagaccaacgatgaaccagatcgtagcggagctgaaacagtgcctagctgctgagctggaccgtgagccacagagccagtgaaagtcaaagagattacggagaagtaggacgaagccaaatggattaaaagaggtttggataatttct

SEQ ID NO: 155574 - DNA, 1534 bp, Arabidopsis thaliana landsberg
  unsure (1)..(1534): unsure at all n locations
cttctccaaaacgcggttcccaatactctgcgtttcccgtttgcgttttccggcaatggctctccaagccactactactacgttctgcttctccgggtcaactttccgatcaactcctcactcactcacttcaaaacgtcctatctccatcaaagctacttcttcttcaagactcgccaattcacgatctaatctcaaaggttaaatctcagataaattctcataaaatgttgaaattgcagaatttgcttggtttatgcattaatcttatagaattgtatttttgtatattatatagtctttgtacatgaatttgtatatagttgttgagaaagagattttgctttgtactgattgatacaatttgtgttctttgtttaaaggaagagcattgtctagtgatggttcaacacaagaatctccttatgtagtctgttttggagaaatgctaatcgattttgtaccgacgacaagtggactttcattagccgatgcaccggcttttaaaaaagctccaggnnnnnnnnnnnnnnnnntagctgttggtattgctcgtcttggtggttcttcagctttcattggaaaggtgaatggcaaaaacttgttcttcttgttttttagattgtaacattttgaaactttgattctttggtgtgtataggttggtgaagatgagtttggttatatgcttgcgaatattttgaaagataataatgtgaacaatgatggtatgaggtttgatccaggagcaagaactgctttagcttttgtgactttgactaatgaaggtgaaagagagtttatgttttaccgaaacccgagtgctgatatgttgttagaggagtctgagcttgattttgatttgatcaaaaaggtaagctttgaagttttatacactgcaaaacatgtagcaaccacttcaaaatgttaaccgatcttttgtcaggcaaagatatttcattacggttcgataagtcttatcaccgaaccgtgcaagtctgcgcatatttctgcagctaaggcggctaaggaggctggtgttatactctcttatgaccctaaccttaggcttccgttgtggccttctgcagacaatgctagggaagagattctgagcatttgggagactgctgatattataaaggtttattttttctatatatgtatggttacatttgcgtatattatctttcacttttgttcttgacctgaaacttgttgtctctgtttgataaaatgttcaagataagtgaagaggagattgtctttctaacgaaaggagaagatccgtatgatgataatgttgtccgcaagttgtttcatcctaagctgaaactactacttgtcactgaaggtcctgaaggctgtcggtactacaccaaggtgtgaaaagttcctctctaccttttggttttgatacacttatccaactttaaggcggattatgatgagaacttcgtatccttagtcttcatactcaaggttttaatggcgggttttttaccgcaatgtgaggtcataagtacttaaaaac

SEQ ID NO: 155575 - DNA, 5155 bp, Arabidopsis thaliana landsberg
caacaagaagagattcctaagagagattaggcgcttattgggatgaccttatttttatcattgctcagatggagtttataggagatgcattgctgcaacagaggttcctgatatactatcgcattgtcagagctctagctatggtggtcattttgttatcttcaagacagtatccaaagttcttcgagcagacttttggtggcttacaatgtttcgagatgctcagaagttcatatcgcaatgttacccttgtcagagaaagggaaagatcagcaagcgtaatgagatgcctcaaaaatttatcctcgaagtcgaagtcttcgattgttggggtaaagatttcatgggacccttcccaccttccaacaagaatctctacatcctagtagttgtggattatgtctccaaatggttagaagctatagctagtctgaagaacgattcagcggttgtcatgaaactcttcaagtatatcatcttccctcgttttggagtgccacgcatagtcattagtgacggaggtaagcatttcattaacaagattcttgcgaaattgcttttacaatatggagtttagcatcgggttgctactccctaccatccacaaacgagcggccaagttgaagtttccaacatgcaaatcaaagaaattcttgagaaaatagtgggtaaagcgaaaaagaagtggtcctacaagttagatgatgcactgtgggcctacaggacagctttcaaaactttgcttgggaccacaccttttgatcttctatatggtaaagcttgtcatcttccagtagaattagagcacaaagcagcctagatagtcaacatgatgaattttgacatcaaatcagctagaaaggagacttattcagttgaaggagcttgatgaaatatgaattcacgcctatgacaactcgaagctctacaaggaacgcactaaagcttaccatgacaaaaagatcatcatcggacctttaggcctaatgaccaggtacttctttatgattttagattgacaatatttcctggaaaattgtcttctcgttggacaggtccctacacagtccactcggttaggccatatggaacagtcattctaaaaaacaacaatggaaaaccatttgctatgaatggacagatagtcaaacactactgggctgaagccgagattctagtagaaaagcctttggatcttcaggacccacctgttgattaagcaactgcagagtcaagctatagactataaacaagcgcttagtgggaggcaacccactggtaagtacttctccgttttattcatttcattcatttgattcttaacattaagattttttattttataggactattcagaaagaaaaaaaaacgtgtgttgaccaaaaacgcgatagtgtcgatcgacaccctcattttctaggtaagtcgatttaacctaaacttcatcttcttcatttcagttttttttcaaaatcgccgaaatcactcttttctctctagattcttcgattcttcactgtttctagtgatttcaggctctaaactcactagaatctcatcctctatcttccccaagtgtcaactccatcgatctgcaagatgacagggcagaaaaagaaggcgaggaagagcgttggaccttcctcctcctccgtcgcccctcaccccgcctgcgcttatccactgctgtcggtctccgcccatcccaaccgatatcccaagttgcagctcctcaacctcctgtttatcgatttccatggccaaagcttccaaaagagagaattccttctcaaagggtttgggagaaagatgtcaacagggaattcactaaaggtggctatatcaatcgccatttttctccagattaggatgattatgatactctgttctataatgcctagatgagtgtagaaattttgcctactcggtttgcgaatttcggtttgatgcagcgtttgcagatagagaaatctgttttaggactgctagatgacataggtttgggaatcatctattgtaggcagtacgatttgtatcctgagctggtttgacaattcatggcttctgttagggtttcttatgtgaatgacaggaaacacaacgctcaggaaggagctcttatcttcttcgtttgcggtgtcagatacagtctaccactgagagatttgtgtgacatctatggggtttgacaatgatctcactagagtttccctgcctggtcagtttaaggattctcagattttctggagcaggtttggtaatggaatctatgattccaaggacgaagtacactcagagatccgtcaccttgttctgcaatatttggttaggttgattagtagcacactgttgtgcaagattgagcctggcaagatgagactttctgagttgttcttgctctatcacgctcttcatgacttctttccagaaaaccttggatttgagcaggttgaccgtaatgtcaactttggtgctgtgttcgctcatcacttggtgtcactcaagaccaagctctttacaggtagaggacagaaatctgagagagttggcagtcttctcactcccatattcgagcattttcgcatcagctttgagggcgaagaagtcaacaccacgcgtgtcactatggatgagacttacctgaagaactctcactggcttaaaggcaacttactgtggtgcttcaaagatgatacatggcagcacatgattcagttacctcgccttgcgctttcagagattataggagagcatgaggagattagttttcatctcgatccttcctttttgcatttcgcgccacgctctaggagatagagaggttcagcttcaggatccgcaccaactcagactgaggataagtttatcgaccctgctgggggtcctcgagttggctcttcctcttcagctctcccatatcatctgccttctcctcctcctatcccgatggagccacaggtctttcagcagaacgtcatcgacatctttaagagtgtctggaacgccatagctacactctctcgctgcggttgtgttgctcccactcgtcgccgtcatcgctctcccgcacccacctccggctcagagcatgaggattagccaacctccctatcttgctttgttttctaactttgtttttgctttatttcagactatttgttaatttttttggaacttgttgcacttattttcttatgctttgttggaactatagatgtgtgttttagtgatttaacagtcttactgaaggattcatgtgaaaacactaacccaagctctacaacaatgagctgagttcacaaagctatgcaaaaacgaccagagtgtcgatcgacaccaccctgatatcgatcgacaccactctcaggtggcaactcccgtttctctaacttataacttttgactatttctctttcgattcctctagctttataactttgggggcagtgttatttaagtctgggggagtcagttactaacttcatcttttcttttcttatgagtcacttatgtcattctaacttagatagttgttttattgagtcaaattttttgttttaaattatgatctatctctcgagtttattgcatggattgcttaagtactgcaagttcaaatcaatccgactaatggaaaatccagaaagccaatcaacaaaattaaggacatccattcccaacataatccacaaaggctggagctaatctcactactcttccttttacctcttcaaaacggttagtgttcataggatttgactccttgttcgtacctgataagtcgactaatgtgttaaaaagaaaatgttcctctcccaaaaaataaaaaataataataataataaaataaataatgagagattgagaagactttcagatagtgtataggggtagaaatgtttcttatgaccccattattataaaattatttggaacgataaattacaaaggttggaaaaatgccgagggtgtcgatccagtatgcgagttcccctttgtttactctctgaaatgaataagtttgggggagagaaagaacaccaaagaaataattatttaaagaatggtagatctatcatggtataatacaggaatgagtctaaaaggttcttaagcattaacttgattgatgagacccagcgatgatagcctagtggatatagctgagtgctttggtatggaatctaggatgtagtgtgggctagtggaaaattacatggtggtcaggatttgactagaactctttagtgcatggatttggtttgtatgctcagggtaataagctagagagattggaagtttctacatttttcaaacctctttcacagattcaatcttttgttttgcttgagggcaaacaaaggcgaaccccaccaatatttaactatacttctcaactccgcaagctgaagagaacttttggccatcagaagaaaaccttaaaaggtttagctcagactgaagatcctacagaagatgactggtatgagatgagaaaaaaatttagatggcaaagcagagtcatagagggattatcttcaagggtgatgaagctgaatgatcaactatggatgtttgaaaaaagagttaataaattttcaaatggtattgacctagagaagatgaaaactgcactagctatcaaggaggacgaagatttcacaacataatggtttgcatcagaagatcagaaaggagttcacttagaggaaagaagcctagagagaaagttgttgagtgaagaggaaatccctattccgacttattctccatgagtacctaaaccaaccaccaacccatctactgaagaagaacacttgattcttgattctgttgctgaagaactcctggagctctagattggatataaagctcaagaggatacaattggaaagttaactcacaagatggaagagttaaacagcaccattctggaacttcaagaaatggtcaaagactaccccaactttgaaattgaggattggtcaaaggagcctggttcagaagaacaagattactcacatgatcaaaaagaggtttattttgaagaaaacacaaatgagtactcatcctaccatatctcaagagagaatgcagagtatgattcaagcactaaaaattcaaccactaaagatgaagacttctatttcctctc

SEQ ID NO: 155576 - DNA, 1100 bp, Arabidopsis thaliana landsberg
  unsure (1)..(1100): unsure at all n locations
agcaaactcttaaatcctttaatggcaggctattgaaattatagaccggtatgatgttgagtgcattcntgaagaatatagaaccaacaaactgttgtatataactgattcatctatcccaaagaattgtacgcgctacttgaaggtaattcctttctgctccattgattctcaatcagtgaattaagattctcttcattgttacctattggtgaggttttatacttttcaatatcaggtacaaaagtatatgaaagctcccatttttatctactaccagcttgataactactatcaaaaccatcgccggtaaaatagctagatgccttattgatttacttttcaaatctagtgatgagaaagtcagccatttggtagctgatgattcttttgcaggtatgtaaagagtagaagtgatcagcaactattacatggactggagtatagccacacaagttcttgtgaacccgaggagtcatctaatggtctcccaattgttccttgtgggttaattgcttggagtatgttcaatgatacatttacgttttctcgtgaaagaacaaaactgaatgtgagccggaataacattgcgtggaagagtgaccgcgagcacaagtttggaaagaatgtgtatcctatcaatttccagaacggaactttgattggtggagcaaagttggatccaaaaattccagtatgcattctcaaccactttacaataaaaaaaatttaatcatatattttagcttaggcaatgctgtttactttgtagctaagtgaccaagaggactttatagtgtggatgcgagcagctgctttactaagcttccggaaattatatggaagaatcgaagaggacttggaaccaggaaaagttgttgaagtaaatttgatgaacaattacaacacttatagctttagtgggcagaagaagcttattctctccacatcaaattggttaggaggaagaaatgatttcctgggtatcacctatcttgtcgttggttcctcttccatagtcatatccatcatcttcatgttgctccatttgaaaaatccaaggtaaaaaaggctacattcgcagaaaccctttttctgtt

SEQ ID NO: 155577 - DNA, 390 bp, Arabidopsis thaliana landsberg
ggcatgcgtcgccgcaggctcggtgccggtggtgggcgtatcgtcaggcggcggatccggagttggatcaggatcgagcaacatgctgagattctacacagatgatgctccggggttgaagatctcaccgccggttgttctgatcatgagtctctgtttcatcggcttcgtcaccgctcttcacgtctttggaaaactctacctccacaaatccggatcccaaacttagatccggtttcttgatctggatcttttgactcgttttttttttgaaatgtttctctgtgtttactgttttgtttccttcttttctttaatcttttcgatgagatccatgtaaatcgctaagcgttgaataaaacatgtcacttctgaaacagagtaacacat

SEQ ID NO: 155578 - DNA, 1919 bp, Arabidopsis thaliana landsberg; identical to SEQ ID NO: 28437

SEQ ID NO: 155579 - DNA, 3496 bp, Arabidopsis thaliana landsberg
atgataaatttttgggccgccccgaatctaattgagattgattcgtccattgacttccccatatggcgggacgaaaaccatggggatggtaagtctaattaacttaaatttgggggtcaaaatgtaattaataaacttcgaaatgaatttaatttgtttcaattacttttacgaatttgaacattttatgttctatctcttgtcttgatttttgataatgttgtcgtcagagataatcgaatttcattaaacacattttatggtggatttttttagagctattggatacaatagggataaaagtattatgtttttggaaaataaggggtacaataataaattagtgtaataaacgttgatgttgattagtcaatacttgaagtttgactggctcgcaatgtattgatctgaaccgtccgattatatttgtacggctcacactagtagttgacagctcatatcaagtaaggacctcagcaagtttttttttcccaagtcaagaagtataaattttctctttatataaattaaaattttaaatgtttgcctcacgcaatgcgtagaattatttttttcaattgtcaaaaacattcagagaaaaaaaaaagtcaaaaacattaaagattgttgatattgtttaatctggaattggtgtttgattttgatcctggggattttgtatttaatctttttctgaaataataatatcgtatgtgttctttaagaaacaaaaaaattgtatttgttggaaataaattttagatatttatgaatcataacgtgtgatacggtggattcaagacccacacataaaaacaaaaccataaactatgggcctgaagtgaaaggcttttgtaacacagtttctttcgcatacaaagtccattatcaaacaaaacaaaatgcgccaaaaaaatggaaagatactgaaaagaagcggtaagagttttttgccaaaaaaatagaaattgaaatcggcgggggaacaattaatcgaatttaatagctcccgcttaaagctctctcctttacaaaaaccctagtacctctctatcattcttgtcactatctcacggcttttagttttcaccattctgattaaagagaaaccaaacgtttcatttttcaatatctagagagaaagatgcagacttcggtgaccccagatgccatctccaccgttttgtcaaacccatcctttgattcgtcttccgatcgatctgagatcgttgttcaagttgtggatcttaaacctatcggcaatcgctatacgtaagtttccttggcttttcatgatctgggttttacttgatttcttaaatctcgcttgttccagctttaggtcagtgttatattctctcaatcacaattgtatagctagattatgatatgcaacgactttgatgactctatgatagaagagatctgggtttgttgataatagtttgtatattgcctagtttgggttttagttaccgattttgttctgatggatctgttttgattttggttgacacatttagtgcaaatgaccgaaagactaaagtcaaagcaatgtttactgcttcactcacacctgacatcatttatgggaacatccagaacttgggtttaattcgtctcattgatttcactgttaacgacatttcaagcaaatctacaaagtaagacttctcttttgcttcttctttacatggataatcactctggttcgattcttgaaatcaacagttactaacatgtgtgtttctctattgtctctgtgtcagatatttccttgtgactaaatgtgaggctgttggttctgtgcttgattctgagattaacttggacagtaagagcggagaggaggaggctcgtgagcccaagaagcagaaactagagcattctcctgtcagtcctctgaatgatgttgtttctactggtatcacattgaaaccgaagcaggaatttgtagccaaatcagcttctcagataatgagtgaacaaaggggaaagtaagcaaattatcttttttgatcttcaatgtttcattactgtctctgtcaaatggttattttattagtgttttgcttaaattcgtttggattttgacagtgctgcactagctgcaagaatggccatgactagaagggttcatccacttgtgtcattaaatccatatcaaggaaactggaccatcaaagtccgagttacaaacaagggagtgatgagaaattacaaaaacgctaggggtgaaggatgtgtcttcaatgttgaactaacagatgaagaagtaagaaagctccttactatctctcaaacttggtatagacaacctttatgcggtttctcattttgtttatttggctgttatccagggaacacaaattcaagcaacgatgtttaatgatgctgcaaggaagttttttgacagattccagttgggaaaggtttattatatatcaagggggtcactaaaactcgctaacaagcagttcaaaacagttcagaatgattatgagatgacactgaatgaaaattcagaggttgaggaagctagtagcgaagaaatgttcatccctgagacaaaattcaacttcgtacccattgaagagttgggtctgtatgttaatcagaaggaacttattggtaagagccttattgtcattgaacattctttttccaggtaaattatacattggttgtgataataacttaattgttatgctatttcagatcttattggagttgttcaaagtgtatctcctaccatgagtattagaaggagaactgacaatgagatgattcctaagagggatataactttggctgatgagtcaaggaaaactgttgtggtgtccctgtggaatgatcttgcaactggcataggtcaggagctactagacatggctgatcagtcacctgtgattgcaatcaagtctctcaaagttggagattttcaaggtatgatgtatttggtattattgaacagtatggataaatcacacttgtttgaaccttttgctcatagaatccaatctctccaggtgtttcgttgtctaccatcagcagaagcaatgtggttattaacccggaatcaccagaagctaaaaagttgaaatcttggtatgccttttggactgagccagctgataaaataaaatgatgaaacttgtctctgttattcaattaccattctctttgacattggcaggtttgattctgaaggcaaggaaatatccatgtcttctattggctcagggatgagcccttctgccaaaaatggatctcggtctttgtatactgaccgagtgcttctctctcacatcacaagcaatccatctttattcgaagaaaaggtactaaacactgaaattcaaatcctgaaccaaaagtgcttaattatagagttatgaacttattatgaacttggattttctggatcagcctgtatttttcagcactagggcttacataagcttcatcaaaccagaccaaacaatgtggtaccaag

SEQ ID NO: 155580 - DNA, 866 bp, Arabidopsis thaliana landsberg
aaaggttaagaaagagcttgagatttgcttcgacctcgtacataggctcgggagaggcattgtatacttaggttccgccagaatcccaccaaaccattcacattatctgcaagcacaagagttgagcagagaagtaagtaagacccttaacactccacaagagcttagtttagatatagatttctcagagttgtgtattttatcaggcagcaactctgttggactgtactacatggtctggtgctggaccagggcttatggatgctgtgactgaaggtgctttggaagctgagaaaccggtcggtggcatcaaaatagaaaaagaagccggtgaatggaccgcatcgaagtttcatccatatctccctcctcagaattaccatacttgcaggtaaacatagccacacaccattggttattacttactgtgcttgcacaagaatgagtgatccctaaaatgcgaaatccatgttaggtttttctcggcgagaaagcatggattagtagatgctgtgattagaaacaatgtatctgagaaggcggcgataattgcacttccaggtggcattggcacgctcgatgagatgtttgagattttggcattgattcagctcgaaaggattggatctgcattgccggttccattcattgtgatgaattatgatgctttctattcaaagctgcttgaattcattgagacttgtgaaaacttgggaactgtttctaaaggagaagtttctgcactgtggaaggtatgcaacaacaactttgaagctttgacatacttagctgaattctatgacttgcctgacggttctgcaaagctggaaactgaacttagaaaaaccactcccactcgtggatga

SEQ ID NO: 155581 - DNA, 1514 bp, Arabidopsis thaliana landsberg
  unsure (1)..(1514): unsure at all n locations
aaggtagaattcgattttcatacattttagctttcatggtagtgacaattcaaagaatctgacgtggtttatgtatcatagtttcggggtggccaatctcagtagctgagtatatggaggaggttttgactaatcctaaagcaggattctatatgaatcgtgatgtttttggagctcaaggtgatttcattacttctccagaagttagccaaatgttcggcgaggtgatttacttggcgtttgttgatttgagagttatgcatttgtgttttggttctatgtttgagcttgagattgaaagttttgttactttgtgttgtgatcttagatgattggtgtttggaccgtgtgtctttgggagcaaatgggaaggccagagagggttaatcttgttgagctaggtccaggtcggggaacactcatggccgatctccttcgtgtatgtatttatgctcttgtatccttgacagttctagttccgttccataacctcgatgatctcattactgaatactaaaacctttgacttgtagggtacatcgaagtttaagaatttcacggaatcattgcatatacatttggtggaatgtagtcctgcattgcagaagcttcagcaccagaatctgaaatgtacagatgagagtagttcggagaagaaagctgtaagttcactagctggaacacctgtgcactggcatgctactcttcaagaggtaccatcaggaggtatgcatcttttgttaaatttctttggaatttaagacttacgaattgtgattatgaatgaggttgtggtctttcaaaacaatgatgtttttcatcttttctcatggtgtctcttttgcttctgtggcagtaccaacattaatcattgctcatgagttttatgatgctcttccagttcatcaatttcaggttagtttggagattatggttcatagttcatcgttatatgtggaaaccaacttgcaatgtagtcttcttctccttttagtttatgtgtgtcttatgtagactcaatatctgcagaaatctactcgtggctggtgtgagaaaatggttgatgtaggagaagattcaaagtaagtatcagggaaatcaaagaaaaaggagatatatcagtcttgnnnnnnnnnnnnnnnnnnnnnnnnnntgtgttgttggtttaggttccgctttgttctatccccacagcctacacctgcagccttgtatctcatgaaacgttgcacatgggctacacctgaggaaagggagaaaatggaacatgtcgagatcagcccaaaatcaatggacttgacccaagaaatggccaagagaataggttctgatggaggtggagcacttataatcgattacgggatgaatgcaatcatttcagacagtcttcaggtttgttgtctcaacatgttctgatcatgtttaatgtgacaatcattttctgactctgttatggcaaaatgtcttcaggctattagaaaacacaagtttgtcaacatactagatgatcccgg

SEQ ID NO: 155582 - DNA, 4613 bp, Arabidopsis thaliana landsberg
agacagctccacagcttttcagattgtcaaatctcttcagcagtttgctcacatatcaagcgctactgtacttgtttcgcttcttcaaccccgccccagaatcctatgacctctttgatgacattatgctgatggccaaaggaagaatcgtgtatcatggtccacgcggtgaagtccttaacttctttgaggattgtggattccgatgccctgaaaggaagggtgttgcagactttctccaggaggtaaaaaaccaaagctttgttccctaagatgaaacttctgtgcttttgaagtcatcagttgttgaccttctcttgttctgctttgaaggttatatccaaaaaagatcaagcacaatactggtggcacgaggatttaccttacagttttgtctcggtagaaatgttgtcgaagaagttcaaggacttgagtattgggaaaaagatcgaagacactctgtcaaagccatatgatagatccaaaagccataaggatgctttgtccttcagtgtgtattctcttccaaactgggagctgttcatagcatgcatatcaagagagtatcttctcatgaagagaaactatttcgtctatattttcaagactgctcaggtacaataagagtttccattccacagattttctccttgtcttctttagatgtcgatagtattcctgagctttctagctttatgtgcgcagcttgttatggccgcattcatcactatgacagtgtttatccgaacacggatgggtattgatatcattcatggaaattcttacatgagtgccctctttttcgccctcattatacttcttgttgacggattcccagagttgtctatgacggctcaacgtctagccgtgttttataagcagaagcagttgtgtttctatcctgcatgggcgtatgcaatccctgcaacagtgttaaaggtccctctctcgttctttgaatctctcgtttggacctgcctctcatactatgtcattggatacacccctgaagcatccaggtgagctttcccctctgttgcttggttcacattcaagtctggaaatgctcagtcaagagtaaaataatgaagtttaatgttccaggttcttcaagcagttcattctactctttgctattcacttcacctcgatatccatgttccggtgtctagctgcaatcttccagacagtagttgcttcaatcacagctggcagttttggtatattattcacatttgtctttgccggtttcgtcattccaccacgtaagatttcaccccattactgtgctaaatcttacctcacaagttgtaccattcaagcatgactctaaggttctgtgtttgctgcagcttctatgccagcatggctcaagtggggtttctgggcaaatcctttgagttacggtgagattgggttatcagtaaacgagtttcttgctccaaggtggaatcaggtgatctctcttagtttcgaaccgtcctcttctctcttaatcacccaaccttcttctttatttggcttctcagaatttttctggttacacatgtagatgcaacccaataattttaccttaggacgaaccatactccaaacccgtggaatggactacaacggttacatgtactgggtatcattatgtgccttgttgggtttcactgtgctcttcaacatcattttcactctggctctaacgttcttgaaatgtaagtacatccatcatcatctactaaaagtaaatgtatattctttcaaaacacagtcgccacatacttagacagcctttaccaaatcacagcacccacatcatctcgagccatgatttcgcaagacaaactctctgagctgcaaggaacagaaaagtcaacagaagattcttctgtcaggaaaaagaccacagactcccctgtaaagaccgaagaagaaggtgaaaactttgttgactctcttctcacatctctattttttttctcccactaacactttctgctgacacagacaaaatggtcttaccattcaagcctctcactgtaacatttcaagacttgaactatttcgttgacatgccagtggtaaagctatcataactcaaactataaaccatatctcaagactatcgccacggctctcacttattctttaatattccaatgatgatgatctcaggagatgagagaccaaggatatgatcagaagaaactacaacttctctcagatatcacaggagctttccgtcccggaatcctaacggcactaatgggagtgagtggagctggaaaaaccactcttctcgaccttctagccggaaggaaaacaagcggatacatcgaaggagacattagaatcagtggcttccctaaagtccaagaaacattcgctagagtctcaggctactgtgaacaaacagatattcactcaccaaacatcactgtagaagaatccgtaatctactcggcttggcttcgtctagctcctgagatcgatgccacaacaaaaaccgtaaacctctgttttctctcttctcttctcttccattactcgaaatcaaaagcttaagtaacgaaacgttgaaaattgtacagaaattcgtgaagcaagtgcttgagacgatcgaattagatgagattaaagattcattggtgggagtcaccggagttagtggattatcgacggagcaaaggaagagattgacgattgcggtggagttggtggcgaatccgtcgattatatttatggatgagccaacgacggggctagacgcaagagcagctgccattgttatgagagctgtgaagaacgtcgctgatactggacgaaccatcgtctgtactattcatcagcctagtatcgacatttttgaagccttcgacgaggtaaattgcataattggctcaataaactgaattgttatattttgaccccaaactgttttatcttataaaccaagtccaaacttgaatttgcagctggtgcttcttaaaagaggtggtcgcatgatctacacaggaccattaggccaacattcacgtcacattatcgagtattttgaggtaaatttgcataaattttacttttagtctatgattgtttttacaaagatatgttaacttcttttatttattggattgaaaaacagagtgttcctgaaattcctaaaataaaagacaaccacaatccagcaacatggatgcttgatgttagttcacagtcggtagaaattgaacttggtgtcgatttcgcaaaaatctaccatgactctgctctttacaagtgagtaaaagcttttaaactatgcattaataactgttattgttctaagaatgtggttgtaatgaaaacatgtgtgattgttataggcgaaactcagagcttgtgaaacagttgagccagccagattcaggatcaagtgatatacagtttaagagaacctttgcacaaagctggtggggacaattcaaatctattctatggaaaatgaacttgtcttattggagaagcccttcttataacctaatgcgtatgatgcacactttagtctcttctttgatcttcggcgcacttttctggaaacaaggccaaaatctgtaagtggagagtgaacatacctcttatatgacactttagatcccagtttgctaacattttgagttgtgttttgtcatttgtagagatactcaacagagtatgttcacagtatttggagcgatctacggtttggtactcttcttagggataaacaattgtgcatcagctcttcaatatttcgaaacagagagaaatgttatgtaccgggaaagattcgcagggatgtactcagcgactgcttatgcattgggtcaagtggtgactgagataccttatatattcatacaagctgccgagtttgtgatcgtaacatatccaatgatcggtttctatccttcagcctacaaagtcttttggtcactctactctatgttttgctcactactcactttcaactaccttgcgatgttcctcgtctccatcacgccaaacttcatggttgccgcgattcttcaatcgctcttttatgttggtttcaaccttttttcggggtttttgatcccccaaacggtaagatcacccatcctttagtttcttgaacaagaatctttaccaagaagaaaatgttttgtaatgtattcttttggtttgtgaaaattgcagcaagtaccagggtggtggatttggttatattatctaacaccaacgtcttggacactcaacgggtttatctcgtcccaatacggcgatattcatgaagagatcaatgtctttggacaatccacgacggttgcaagattcttgaaagactattttggatttcatcatgaccttttggcggttaccgcggttgttcaaatcgcttttcccattgccttagcttctatgtttgcattcttcgtgggcaaactcaacttccaacgaagatgatcatgccaattagtcttcatcaatcatcattttagaataaaataatgaaataatggtttttatttttgtttgtgaaaataaacatataacatataacttttctttttggtatgtatatgattttgaggaaagtaaacaaagcattgtctatgcaaaac

SEQ ID NO: 155583 - DNA, 425 bp, Arabidopsis thaliana landsberg
  unsure (1)..(425): unsure at all n locations
acctccacttctacttccatgacgtcatcaccggtgacaaacctaccgcnnnnnnnnnnnnnnnnncccgccgaacaaactccctcaacgtcaattttggcgtgatcatgatcgcagatgatccgttgaccgaaggaccagacccgagctcaaagaaagtgggaagagctcaggggatgtacgcatcaacagccatgaaggacatagtcttcacaatggtctttaactatgttttcacggcaggagagtttaatggaagcaccatcgcggtgtatggacggaatgatatattttcgaaggtgagagagttgccgattattggaggaactggtgctttcaggtttgctagaggctatgcactgcccaagacttataagattgttggtctagatgccgtggtcgagtataatgtcttcatttggcat

SEQ ID NO: 155584 - DNA, 646 bp, Arabidopsis thaliana landsberg
aaccaaaacatgtaatgtaataaactcatcaaaaacagagctctgtttatcttttcttccgtcattcgaatggctgatcagattgagatccagagaatgaaccaagatcttcaagaaccattggctgagatcatgccaagtgttttaacggcaatgtcgtatctcttgcaaagagtatcggagaccaacgacaacctgagccagaaacagaggccctcaagcttcactggagtaaccaaaccttccatttccatcagaagctatctcgaacggatctttgaatacgcgaattgtagctactcgtgttacatcgtcgcatatatatatttggatcggttcgtgaagaagcagccatttttgcctatcaattcttttaatgtccataggcttataatcacaagtgtcttggtctctgctaaattcatggatgacttgtaagtaaataattctgaggctaattaactttttgaaatttactaatgagttaacattttgtttaattgttaatatctttgtgtaacaattttaggagttacaacaatgaatattatgcaaaagttggaggaataagcagagaagaaatgaacatgcttgagcttgacttcttgttcggaattgggtttgagttaaacgtcaccgtttctac

SEQ ID NO: 155585 - DNA, 1170 bp, Arabidopsis thaliana landsberg
aaagataatactcagctttgccaataactacgagagcttcggagggaggaagcaatatgtggattgggctcgaagcagaggccgtcccgtttcttctgaagacgacttcttcactgactctcttgttaaagatttctacaagaaccatatcaaggtttcaaaatcaaacctttaatcttctctcttgtgcagattcaaccaaaaaagtgcaaaaagtaatggatttttgtttgctcctgcaggctgtgctgaacagattcaatacctttaccaaagttcattacaaagatgacccaaccattatggcttgggagctcatgaacgagccccgttgcccctctgatccttccggaagagccattcaggtttcactttcacctaaacacattttcacaccatgactctgttacttgtctagtctttctttgggatctgacttgtttgggttggtttggttttttacattatgaaaacaggcttggattactgaaatggctgctcatgtgaaatcactagacagaaaccatctgcttgaagctggcctcgaaggtttctatggtcagtcttcacctcaaagcaagactcttaacccacctggccagtttggaaccgatttcatcgccaataaccgcattcccggcattgatttcgtcacggttcactcttaccctgatgaatggtaaggccacaaaacttaagttttggccaaatcagttgaatcattaatcacttttgtttgacttttgtgctgttttattttcttgtgcaggtttccagactcaagcgagcaatcccaaatggatttcttgaacaaatggctagacgcacacatccaagacgcacagaacgttcttcacaaaccaataatattagcagagtttggtaaatcaatgaagaaaccaggttataccccagcgcagagagacatcgtcttcaacaccgtgtacagcaagatttacgggtctgcaaaacgaggaggtgcagcagcaggaggattgttctggcaacttctggtaaacggaattgataattttcaagatgggtatgggatcatacttagccaaagctcgtcgaccgttaacgtcatttcacagcaatcgcggaagttgactttgattaggaaaatcttggctaggatgatcaatgtggagaaatggaagagagcgagag

SEQ ID NO: 155586 - DNA, 761 bp, Arabidopsis thaliana landsberg
tgccacacactcactcactcgtagtttcgacgctatctctagaacattccgataaactacaaagaagaagcagagcaaaagtaaagaagaagaagaaaacaaacatgtcgtggcagacttacgtcgacgatcacttaatgtgcgatgttgcaggcaaccgcctcaccgccgccgcaattctcggccaagacggaagcgtctgggctctgagcaacaattttcctcaggttagggtttatttctataccgactactcaattcttatcatcttgctgtttctggtttggttctatgttgaaatctgcaacctttggttttgtttagctactaaaccaccaaaattcagcaattttcaatgtttggttttgattttctgattcatatgttcttgaggttatagagtgcaaaagatgcattagaagaagttcgaatcacaagtttaaagctcttttaagaagaaagttttgacctttggaaatagacaagttctttgtactggttatgttgctcataagttattaagttgctttcatgagatgtttaagagagactgaatttgtttctcttatagattttggattgttgctgttttaggcgaagcctgaggaaatttatggcatcaaagacgattttactacacctggaacacttgccccaacaggaatgttccttggtgggaacaagttcttggtaattcaaggagagcctaatgccgccatttgatgaaagaaggtaactacactgtttgaatattgattgat

SEQ ID NO: 155587 - DNA, 1919 bp, Arabidopsis thaliana landsberg
ctaaggtccttaacgatctcaacatatctgtcttcaaacaccattttgcaatcgatctgctcacttctcaggttccacttcacacccttgaaaaacacatgtgcatatatgatcaattggcttatcagatcatatctttttgtatcttaacaggatggcttgaacacagtttgtcatggtgtggacactttgaatatcaaaactaatgaggtacacaaagatcttgtttctggtggtttgatcattcaccttatatcttagattgtaatgtaaaaaaactcatgtttcttcaggtagtacgctttatatcgaaggtgacattgcttgcttcaggtggagctgggcatatctatccatcaaccacaaatcctctggtaacattttctatagactctctttttaacaaagctctatggaagtttcattttaccaattttatcagaagaaagaatgtgcaggatcaacacaacagttttgtgtgtttatgggaaatatccaaaaatgaaactttgatttagtaatgtgatttatcccttgaatacaaaagaaaatgtcgaaattatcacgggtatacacaaacatactgcattagagttttagatttaatagttcaaacagttgcagaaacaaagagattttagtcatagagtacatttttttgctaaattcggttgtgctagtcgcaatgatatttctctaaaagtgatatattatgctccattttaattatcgacatggtttttgtataggtggctactggagatgggatggcgatggctcatcgagctcaagctgtgatctcaaatatggagtaagtgaacaccgaaaaaccgactgaagaaacttgttgacaataaacttatgttttgtatttgtttttggttagatttgtgcagtttcatcctactgccctagccgacgaaggtcttcccatcaaactacaaactgctagggaaaacgcgttcctcatcaccgaggcggtgagaggtgatggtggcatcctctataatctaggaatggagcgattcatgcctctttacgatgaacgagctgagcttgctccaagagacgtggttgcaagaagcattgatgaccagcttaagaaacgaaacgaaaagtatgtgttacttgacataagccataagccaagagaaaagattcttgcccatttcccgaacatagcttctgaatgtcttaaacacggtctggatatcacccgtcagcctattccggttgtccctgcagcccattacatgtgtggaggagttcgtgctggtttacaaggcgaaaccaatgtccttggattgtttgtagcaggtgaagtagcatgtacaggcctccacggggcaaatcgtcttgctagtaactcgcttttagaagctctggttttcgcgagacgggctgttcagccttcgactgagctcatgaaacgcacaagacttgatgtatgcgcatcagagaaatggacaaggcctgttgttgcgacagctagattgctaggagatgaagtaatagcaaagattatagctttgactaaagaagtgagaagagagcttcaggaggtaatgtggaagtatgttggtattgtcagatcgacaattcggctcaccactgccgagaggaaaatcgcagagctagaagcaaaatgggaaacatttttgtttgaacatggatgggaacaaacagtggtagctcttgaagcttgtgagatgagaaacttgttctgttgcgctaagcttgtggtgagcagcgcgttagctagacatgaaagcagaggtcttcattacatgacagactttccttttgtggaagaaagcaagcggattccgacgattattctaccgtcttctcctacaacagctagttggagctcaaggcggttacagaatataagtagcagctcacttattgattgctaa

SEQ ID NO: 155588 - DNA, 2414 bp, Arabidopsis thaliana landsberg
acggaatcgaacttttcatcatcggcgatttcaatatctcttacgtatggaatattccggcaaaggaggaatctggagtcgaacgtaaaagcggtaacagaagggtgtgtcgacgacgcaaattagtttgatataaatacattaaaaatcaacggtttttatctaattgatgtttgtcacgtggcttaatcttaacggttttgaatctgggaatgttttaatgtattttcaattttgacttgttgtttctttctatagctttttcacccctcactgatgcatcatcagcttcgttgctgtgttacctgagaatttagtagtaatattggtgaaggacctgctctcgctactgtctgttaagtttaatgttgagtttaagggttaatcggcttcttcgtaaacccttaatccgattttcaccttgcataagctctaatggcgaagcatctttctcgacatcttcgtcgaaacatcctcatggtccagagatagaaggagattcttctagtcaagaagatgaccactttggagagtttaggcaattgggtttcggaaagtcttcagctttgaatgctacgagtgttggtgatcctgaattcggagaaattcgaaaccctaggttcaatgagattgatgaattaggagaagatgacgatgatgaagaaggaaatgtaacaagtggcgacgaacttgatgatgataatgatggttttgctgttctgaaatcgatcccacaatcgagagaagaggctggtagattcgatgtcgaagaagatgaatctagacatcctttggtgagagaggtaggtagattgattggcatcaggtcatcttggaacccgaagcatgaaggtcagatgaggaatcttttaaggagccttaaaccatcacaagtatgcgctgttttacgctcacaagacgatgaacgggttgctcttaagttcttctactgggcggatcgtcaatggcggtatcgccatgaccccatggtgtattactcgatgcttgaggttcttagtaagactaaactgtgtcaaggttctaggagagttctcgttctgatgaagcgtagaggtatatatcgaacccctgaagcgttttcacgtgtaatggtatcatatagtagggcaggtcagctgagagatgcattgaaagtgttgactcttatgcagagagctggagttgaacctaacttgttgatttgcaatacgactattgatgttttcgttagagcgaataggttggagaaagctttacggtttctagaacgtatgcaggttgttggtatagtgccaaatgtagtgacttataattgtatgatcagaggttattgtgacttgcatcgagttgaggaggcaattgaactactagaggatatgcatagtaaaggatgtttgccggataaagttagttactataccataatgggctatctttgtaaagaaaaacggattgtggaagtgagagacttgatgaagaaaatggcgaaagagcatggtttggtgccggatcaagtcacctacaatactctaattcatatgctcactaaacatgatcatgcggatgaggctctttggtttctaaaagatgctcaagaaaaaggttttcggattgataagctgggttatagtgccatagttcatgcattatgcaaagagggaagaatgtctgaggcgaaagatctcattaacgaaatgttgtcaaaggggcactgccctcctgatgtagtaacttatactgcagttgtcaatggcttctgtcgtttgggtgaagtggacaaagccaaaaagctacttcaggttatgcacacacatggacataaaccaaatactgtgtcatacacagctctgttaaatgggatgtgccgaactgggaaatcgttagaggcaagagaaatgatgaacatgagcgaagagcactggtggagtccaaattctattacttatagcgtaattatgcatgggttgcgaagggaagggaaattgtctgaggcctgtgatgtggtgagagagatggtactaaaagggtttttcccaggcccagttgaaattaacttgttgctccagagtctttgccgggatgggagaacacacgaggccagaaaattcatggaggagtgtctgaacaagggttgtgctattaatgttgtgaattttactacagtgattcatggtttttgtcagaacgatgagctagatgctgctctatccgtgcttgatgacatgtacctgatcaacaaacacgcggatgtcttcacctatactactttagttgatacattggggaaaaaaggtagaatagcagaagcaacagaacttatgaagaagatgcttcataaaggaattgatcctacccctgttacatacagaactgtcatccatcgatactgccaaatgggaaaggttgatgatctc

SEQ ID NO: 155589 - DNA, 737 bp, Arabidopsis thaliana landsberg
ccacatacaacaacaacaacgacaacaaagaagagttcaacaacaacaacaagaacgatgaaaaagtcaacagcaagacggtctccactgcaagcctgagcgagaccgaagagtctttcaacaactacgaggaaaattacccgaagaagacagagaactacggcactaacggttataacaatgaggagttcaacaacaacaacaacaagtacgatgcaaacttcaaggaagagttcaacaacaacaagtacgatgaaaattacgccaaggaagagttcaacaacaacaacaacaactacaactacaagtacgatgaaaacgttaaggaagagtctttccccgagaacaatgaagacaacaagaaaaacgtctacaactctaacgcttacgggacagagttagaacgtgaaacaccgtacaaaggttacagccacaacttggagagacaaggcatgagtgacacaaggttcatggagaaaggtagctactactacgacctttacaacgacagaaaccacggccattactaccggaagtcacacagtaaaagccccgccggttactattcttctcccgcgaccgagactaactacgaacagcaatcgtactcgtacggaaacaacaacgaggagaacagttttaaggatccgtacaactccaagtgggagaagaacttgatgaacgaacagcctgaagagtttgttgaagagcaaggcactaatcagttcaagccttga

SEQ ID NO: 155590 - DNA, 6486 bp, Arabidopsis thaliana landsberg
  unsure (1)..(6486): unsure at all n locations
ctcattctctctatggcttcttcatcttcttctcgaaactggttatatgatgttttcttgagcttcagagggggagacgtccgcgtaactttccgtagccactttctcaaagagcttgatcggaaactaatcactgctttcagagacaatgagatcgagagaagccactctctttggcccgatcttgaacaagcgatcaagaactccagaatcgcagtggtcgttttctccaaaaactacgcttcgtcgagctggtgtcttaacgagttgctggagattgtgaactgcaatgataaaattatcataccggttttctacggtgtggatccttcccaagtgaggtatcaaatcggtgaatttggaagtatctttgaaaagacttgcaagagacaaacagaggaagtgaaaaatcaatggaagaaagcgttgactgatgtagctaatatgcttggatttgattctgccaaatggtatgatttttataccaaattcattattagatacatcttgaaataaaattgttgtttcatatttcttaaattatctttcaccttattagggatgacgaagcaaaaatgattgaagaaatagccaatgatgttttgcgtaaactgcttttaactacatcaaaggattttgatgactttgtcggcctcgaggatcatattgcaaatatgagtgcactgttggatctggaatctaaggaagtgaagatggttggtatatggggttcctcggggattggtaagactaccattgcacgagctttgtttaacaacctttttcggcatttccaagttaggaaattcatagacagatcttttgcctataagagtagagaaattcatagtagtgccaatcctgacgaccacaatatgaagttacatttacaagagagcttcctctctgaaattctaaggatgccgaacataaagatagatcatctaggtgtactaggagagaggctacaacaccagaaagttcttatcattattgatgatgtggatgatcaagtgatcttagattcattggtgggtaaaactcaatggtttggaaatgggagcagaatcattgtggttacaaataataaacattttttaagggctcatgggattgatcataattatgaagttagtctcccaacggaagagcaagctcttgcaatgttatgtcaatctgctttcgagaaaaaatctccacctgaaggttttgagatgcttgtagttcaagttgcaagatatgcaggtagtcttcctctgggtcttaaggttttgggttcgtatttgagtgggaaggataaggagtactggataaatatgctgccaaggcttcaaaatggtttgatcgataaaattgagggaatactaagaatcagctatgatgggttagagagtgaagatcaagcgatatttcgtcatatcgcatgtattctcaatcatatggaagtcacaaccatcaagttattgctcgcaaatagtatatatggtgctaatgttgggctgcaaaacctggttgataagtccatcattcatgtgagatggggtcatgtggagatgcatcgtttgctacaagaaatgggcagaaaaattgttcacacacagtccattgacaagccccgaaaacgagaatttctggtggatccaaatgatatttgtgatgtactcagtgaaggcattgtaagttttttgttttttatatataaaaaaaagtttaatctgtggtcttttaataagtcataactcagaatatgcgttaagataattgtattgttttctctttctcattgatattatatttnnnnnnnnnnnnnnnnnnnnttttaggtatatcattggagacaagtaagattgatgagttgtgtgtacatgagagtgccttcaaacggatgcgtaatctccgtttcttaaaaattggtacggatatctttggagaagaaaacagattgcaaatacctgaaaatttcgactatttgcctcctacacttaaactattgtgctggtccaaatttccaatgaggtgtatgccttttgtttttcgtcctgaaaaccttgtcaagctcgatatgaagttcagcaagctacataagctatgggaaggagatgtggtaagttttgagaataatttcttatattattttatttttttatgacaatagtgccatatgatgtgtaatttctgttgagctatgtgtttgatttttgttggatacagccacttacatgtctaaaggaaatggatctgggcggatcattaaacctgaaagtaattccagatctttccaaggctactaatctcgaaatacttaatcttgagtattgccacagtttagtcgagctcccgtcctctatacgaaatctcaataagctgttgaacttgtacatgcgaaactgcaaaagtctgaaaattcttcctaccggattcaacctcaaatctcttgaccgcctcgatctctattattgctcaaagttgaagacttttcccaaattctcaaccaacatctcagttctcaatctaaatctaacaaacattgaagattttccttctaatttacatctccagaatcttgttgagtttagaatatcaaaagaagagagtgatgagaaacaatgggaagaagagaaggtaagtagttctacacttaacattatctccaaactcttttcctaacacttttataaaagaaaagaaaaatcattgtcgttgactcaaactttgtacacttgtatgtgaaaacttaaaaaacactaatttttatttatttatgaatattttaatttgattggaaagtaaattttggttacaaagaatgaagaagaaaatatctgatttttaaaataaataaaaaagttaaaaagagataaaaatggaaagaaaataagaaattaaagatgatatcaattgggttttttcctttgtcgtgatatcattaaaacgtaaaagaaaattatatatgggattttcttaatttattattgttacctattttctaataacatatattatgtaattaaaaaataacggttttaataaagagtagatgtgagcgtgaatggaaagttccaaacaatttattcttgtttagatttacccataatacattatattaatgctgatgagatttacccataatacattagtactgttattcttttcgtttttaaagatttattttctaaatttaactttaaaagtaatttgctactgaaaacccgtaaaacttgttatttggttcagccgcttacgcccttcctggcgatgatgttgtctcccactttgacgatcttgcatctctgtgatatgccaagtttggtggagcttccttcctcatttcagaatctcaatcaactgaagcacttgttcattgtccaatgcataaatctggagactctgcccaccggaatcaacctccaatctcttgattacctttgtttcagtggatgctcacagttgaggagctttcctgaaatctcaaccaacatctcagtgctctatctagacgaaacagcgattgaagaggttccttggtggatcgagaaattctctaacctcactgacctaagcatggacagttgcaacaggctaaaatgtgtgttcctacacatttctaaactgaaacatcttaagaaagctttcttttcaaattgtgggacattgactagagttgaattgagtggatatccaagtgggatggagatgatgaaagcagacaatattgacacagcctcctcttctcttcctaaagtcgaactcagtttcttggactgcttcaacttggatccagaaactgtccttcatcaccaagaatcaattattttcaactgcatgttatttacagggaaagaagaagtgccatcatatttcacttaccgtactactggaagctcctctctgaccattcctctacttcacgtccctttctcccaaccattcttcagatttagggttggcgcattggtaactaatgttaagcatggaaaaaatataaaggtaaaatgtgagttcaaagacagatttgggaacagcttttatatacacattgatttcaaagctaataaatagagattttatggcgaggatggctttaatataatcttcacggactgccgtatacctctaaacgaaaattatgctgctctagctcaacggaactactacgatcatgtggatataaagattgagcaattagacaaaagatatagtgatattggacaatggggtatacgactcttagaggactgttcatcagcggagactcgacttgataattattcaaacagtactcttccacatgtttctgaagccgaagaaggcaatatagggtatacacctcttcaaggacttgttaatgagattgaacacagtgaagagtctggagatatcaatgtagaaactgagagaagcacgaagcgcatgcgggtaagcattaagcaataattgtaacataatgactattcatctctcaattctttttgcattattgacaactggattcttttgcagctatatcacttcatataagtaatattagggtgtctacgtccaaactaaacggatggggtaaatacgacacttagaggactgtcatcagcgaagaaccgacatggtaatccaaacactatgcagcatgtttgtgaagctgatgaaggcagtgatggatgccattagactgatcagagcgaagagcgaggagacagtgatgaatagtgatataggtagggagagtgatcactttgaagagtgcgaatatagtgatataagcaatgagagtgattagagtgaagagcatggggatagtgacgatgatggtataagaaatgagactgatctgttcgaagagtgtggaaacagtgattaggcaatgagattgatcagaatgaagacagttgagacagagagaaccaatacacaatacaaggtaagtattaatcaagaactgaacagaatatcagatatcaggatctttaatagtatagatcaatgagttgttttcttttacttgcagattacgtgaaaaagaaatgaatctttgagatacttttatggtgatggaatgagtagttttgctgtcggttctatggaacaacaaggagaacccaagattcttcattgtcttcagggcagatgaagatgttgctgttcatgtgaatgttttaaaatgttttgtttcttttcttaggttgcacgtttgtgataagcttatttcattactataacgattcctttaatttgctgtctagcacaaagttttacagtgaacccgaattgagtttgtgatttataatagttctcttttttaatgaatagttgaaaagtgttatgtatagcatacacctattatggagagaaatcgaacgactgacttactttgtagccacacctgcaaagtttttaggcatctttcaaagtccataaaccaacttagtctatttccgaataaactatataacacaaattgtttcaaatgcaagtcgtgttgtggatacaaaaaaaaactgatggaattcacgcaaatggttttaacaaaatgaagaattctcaaaaatggcagatggaattcatttatttctttttaagtactctgtttctttcttagcatgcacatttgttatgagcttgtgttatttatattacaatttaattctgaatcctcacattatacttattttcttgtttcttacagtttgaggattatttctccataaatcctttcctaactcgagcaaggatcacctcaactacggtgtggagaattatgagctcacatcttcactagaattttgtaaataaaattgtgctcaaaaatttgttacctgatattggattaaatccgttgtttgaaactcttttggctctggattctcctctagctgaagtcaactacggtcatgttgatatacaagtttcatttaactgatgcacttcatattaaacggatttggtacaagaaatgacatcatcgtattaaacggatttggtacaagaaatgacatcggagaatttcattaacagaggttttgtagaagaaacgatatctatatatcaaaattttcaattttgcttccaatctgattaagcctatcgctatgcatgtgcctatagagacgaagctgcaactatgtagcatattaaggccaagtcccaagagtgaataaaccatattctgttgttactttcctgtgtgataccaagatgagtaatggaatttctaaaatttgattgttgaacttttaaaatttgtgtcttttagagtcatgtccagaatatttgtatcagttctacttcttgtatactacgcaaaattgtagcgtgtaacacaagaaccaaaaaacagagtaagaaaaaacaaggtaccttcttgaacacgcttccgttggaacagttaacaagcctactgaagatgaagatgaagatgaatatggaataagtagccaaaggtttatgttttatgtaaacagtaaacctaacacattcaataggactttttga

SEQ ID NO: 155591 - DNA, 2361 bp, Arabidopsis thaliana landsberg
atcttcagtgacaccagcatcagacagttatctcaaatgctactatcactaatcttcttccacatatccgaatacattctagccatcaccattcacggagcatcaaacgtaactcttagttcgcttttaatcaccaagcattacgctttagcaatgcttctgtcgcttctcgaatacctaacggagattatcctcttcccggggctgaaacaacactggtgggtcagcaactttggactcataatgatcatcgttggggaaatcatcaggaaggcagcgataataacagcgggaagatcgttcactcacctcataaagatcaactacgaagagcatcacgggcttgtgactcatggtgtgtatagactaatgaggcatccaagttactgcggttttctcatctggtcggtcgggacacaagttatgctctgtaaccccgtttcagcagttgcgttcgcggttgtcgtgtggcgttttttgctcagagaataccgtacgaggagtattttctgaatcagttttttggggtacagtatctagagtatgcagagagtgttgcctctggtgttccatttgtgaactgacacttgaattatttttgaacatatgagtttgatgtacttgacttgaggtcttaaagtcacaaaaacatacaagaccctctggctgaaagagaaggtcttgacgtggatatgaaatttaccacagcgttaattgtttatgtgacacctgtcaccggtgatgcatagctccggcgaagagtttcggagaacaagtttggtctttttaggggtttgagcagtggagtcggtaaccatgttatgcggaggctctcgcgcctccgtgcatttgtgggaccatcgtcatcctcctaggctcggtgctaaggttttgcggaaatcttcgttcatgctcagaccttgttcggctatatcgcagcagcggataaagtcgtcgtttaggtctcactgtaaaactccaagaaaaatcccagctcctctcgattgtttcaggtttttgaatctcgctgttgttttgattgtttttgtatccgaatctgattgttttatgtgaaatttcctgatgagctttaagatagagatttctgttagatgttcttcactatgttctactcaaattttcaaaattggagtctttactaaaatatttggctgtaattcttctttcaaagccagggagatgatcatcctgagctttcagctgaagggctttccccagttgcaggtatctgtttgtcattcaagtttcaactgccttccatcagtggccaacctttatatgacctttctggattatgaatttgttttgaatttgcaggaggcattgttgctctagggaagtttgatgccctgcatatcggtcatcgagagcttgcaattcaagctgcaagaattggtactccatatctactgtcgtttgttggattggctgaagtacttggttggaagcctaggtaatttctccgtctaccttcccaattaacttaacatccccttgatctaagttacttataatcattagatcatgactctactgataaagttttttttttttaatctgtatgtgcttctcacttctattgaacagagcaccgatagtagccaaatgcgacagaaaacgagtgctttcctcttgggcatcgtattgtggtagcatagcaccggtagagtttgagattgaatttgccagcgttcgacaccttaacccacaacagtttgtcgagaagttgtcaagagagcttagagtctgcggagttgtggcaggtgaattccaaaagaacatctcaaaggttcccttctttctccgaaaattctcattcctagttcttttcctttaggcgaaaattacaggtttggataccgggcttctggtgacgcctctgaacttgtgaggttatgcaaagactttggtatcagcgcttacatcattaactccgtgatggataagaaccaagtctctgtaaacacagaggaggaggactcaaagtcgaaagaaagaggtcaagtctcatccacacgagtccgtcatgctctagctgcaggagatgtgaggtatgtaacagagctcctcggcagaccacacagggtcatctctcggacaagaacacaagatataacgagcaaaagagggaggatctcgcttcagacatcttcgctactaaatttaccaccagggaatggagtttacaaagcatgctcgcttatagttggtgataagcatccaatttcgtgtaaggttattgtcgatacatcgaatctctatatagaaacagaggaagaacgtttccacaactcagatgagtctcaagagtttcaactcttagggattgagttcggttaa

SEQ ID NO: 155592 - DNA, 1127 bp, Arabidopsis thaliana landsberg
gcttgtgttgcaaatgatactttatgatacgcctggtgtattaagaagaagatgcacaggttagatacaatgatgatgaagaatgtcaaagatgctgccatcaatgcggactgcgtagtaattcttgttgatgcttgtaaaacgcctactaatgtatgcttctctgtttgatttgtttctcatgctttgttagtttagtttcctgtcctaatttctggtgttgtgtgcttagatagaagaagttttgaaagagggtttgggagaccttgaaaaaaagccacccatgttgcttgttatgaataagaaagatctgatcaaacctggtgagattgccaagaaactggaggtgagtatgctgtcgttgctatccttgaaccttggtaatactgtcctgttattaaaatcccaccattctagaatgaacttgcagtggtggaagatgcttcactataaacttgagatcaagatttggagtcatggtattgctatgttctttgcttaatagatgctgcaactccttgcagtggtatgaaaaatttacggatgttgatgaagttatacctgtaagtgcaaagtatggacatggaatagaggatgtcaaagagtggatattatccaaacttcccttcgggccaccttattatccaaaggtactatgtatgaaaattccctgcttcagtattgaattcctctccttgctatagctaaagcttatagtctaatttgcttaatattctgaggtttgtgcttcagatgcaacaattcacttacctaatgtcttacggctatttgatttctaggatattgtgagcgagcatccagagagattttttgtttctgagattgttagagagaaaatatttatgcagtaccgaaatgaagttccttatgcatgtcaggtacaatgacaagtttggtttcttttctcttgagtcctgtgaaaagccgtggccttattaatcaatcattgttaacactacaggtgaacgtgctgagctacaaaactagaccagctgcaaaagattttattcaagtggaagtagtagtggataaaaattctcagaagatcatccttataggaaaagtaagtgtataaccctcaacatcgaacgggtaatttctgattt

SEQ ID NO: 155593 - DNA, 616 bp, Arabidopsis thaliana landsberg
atgactaatataggaaaatgcatgcagggatatctcgacgaacaattcatggagttagaagagctccaagatgatgcaaaccctaattttgttgaagaagtttccgcattatacttcaaagattcagctcggttaatcaataacattgaccaagctttgtgagtattattttgttttctattatatatatatatatatatatatatatatatatatatatatatatatatatatatatttttcagttttctaatcatttttacaatgcagggaaagaggatcatttgatttcaatcggctggatagttacatgcatcagtttaagggaagcagcacgaggtaatttccccccttagtttttgactattctaattacgccttcaagaaataattttacttaaagaaatgcgaatacttaaatgtttataagataaaagaatgtaacgcaaaagtacattaaaattacttccattctcattcaggattcaatgacagaatctactttaaccagaaataattagattttatgatcgttagttatactgacaaatgttgcatttcttttttttgtagcattggggcaagtaaagtcagagctgtatgcgctacgttaagg

SEQ ID NO: 155594 - DNA, 1061 bp, Arabidopsis thaliana landsberg
ataagtttgcatgaatgcgataatgtgctcatgacatgctatgcagtcttggctggatatatacgttcagtgcaaccattagtcctactaatgatttgatcctactccaatttttgtaagccaatatgctaggaaaggtaaaaacattttcatggtcttttggaaatttcagtttgaccttttaggctctgaagctctagtttcgacaatcacatgctttgtttttctgaaaacagccttgctgtgaagttcccgtatttggttcagaagaaacttaaagaaggccaagaagttaggcgagtagcacagctagattggagagtaattgaagaagattgtgagaagccatttgtagcttcaggtttatcattcacgccacttccagtaagtttctcaaagcctctgtagaactagtgaatcatgcctcccttctgatctatttggagactcaaatcttatttattgccgtaggtgatgcatggagaagactatgtatgtcttggcttcctttttggtgaaaaatcaagagtggcttatatatccgatgtttcacggtttcctccaaacaccgagtatggtaagtcaaacatattgcttaaaaaagactgcattttggcatattcgaagaaaatgtctcaacttttgttggctttggatttaacagctatatcaaaatctggtggtggacaattggatctccttattttggatacattatataaggtaacacaaatcatcttcatgcattaaagcttgaatgtttattttaaatatgagctttatgtttttacatcgtttctctttctttttctttaccgcaactgcagacaggatcccacaacactcacttatgtttcccgcaggttagcataattttgaaagtgtgggttttattttatggtttatgtatgtatgcttacttttgttttctgtagacactagacacaatcaaaagactgagtccaaaaagggctcttctgattggaatgactcacgagtttgatcatcacaaggacaacgagtttcttgaagaatggtctaaaaggtagaaaactaagaaa

SEQ ID NO: 155595 - DNA, 2988 bp, Arabidopsis thaliana landsberg
gaatttcaagtcatattattgcaaaatttgttgctaaacatgccatagagtccgttcataacaagtaacttcctttactgtcattgcgtgtagatttagctttgtgtagcgaataatgaagaagtgttttatgttttgctggaaatagaaaagttctaagtacatatgtgaaaagtgtgttcagcctgtgataaaggactgttgctttattattcaactatgtatatgtgtaattaaagctagttcctttttgatctttcagctcaatgtgcttttctcaatttttttctgagaactgaatatgtgaatttcaaagtttccacatcgagtttattcacacgtcttgaatttcgtccatcctcgttctgttatccagctttgaactcctcccgaccctgctatggatatattaaaaaaaaagtgttttgtgggttgcatctttgttacgatctgcatcttcttctttcggctcagtgttcatgtttttgctatggtagagatgggcaatgttattgttgatggtaacagtggtatagttgatagtatcttaactaatcaattatctctttgattcaggcctctatgttgggtggaacacatgtcacttgacaatgaaactgggttggatccagctggtattagagttcgagctgtatcaggactcgtggctgctgactactttgctcctggctactttgtctgggcagtgctgattgctaaccttgcacatattggatatgaagagaaaaatatgtacatggctgcatatgactggcggctttcgtttcagaacacagaggttcttttctcatcgttctttctattattctgttccatgttacgtttctttcttcattacttaaggcttaaatatgtttcatgttgaattaataggtacgtgatcagactcttagccgtatgaaaagtaatatagagttgatggtttctaccaatggtggaaaaaaagcagttatagttccgcattccatgggggtcttgtattttctacattttatgaagtgggttgaggcaccagctcctctgggtggcgggggtgggccagattggtgtgcaaagtatattaaggcggtgatgaacattggtggaccatttcttggtgttccaaaagctgttgcagggcttttctctgctgaagcaaaggatgttgcagttgccaggtattgaatatctgcttatacttttgatgatcagaaccttggctctggaactcaaagttattctactaaatatcaattctaataacattgctatattatcgctgcaactgacattggttgattattttgctgcttatgtaactgaaactctcttgagattagacaaatgatgaattgataattcttacgcattgctctgtgatgaccagtttcttagcttcgacgataacatttgtcatactgtcttttggagggcattgaattttgctatggaaagcgctggagcttccatgcttgcattctttaccaattagcattattctgcttctttcaattttcttgtatatgcatctatggtcttttatttcttcttaattaaagactcgttggagtagttgctctattagtcgcttggttccttaatatagaactttactttcttcgaaaattgcagagcgattgccccaggattcttagacaccgatatatttagacttcagaccttgcagcatgtaatgagaatgacacgcacatgggactcaacaatgtctatgttaccgaagggaggtgacacaatatggggcgggcttgattggtcaccggagaaaggccacacctgttgtgggaaaaagcaaaagaacaacgaaactgtggtgaagcaggtgaaaacggagtttccaagaaaagtcctgttaactatggaaggatgatatcttttgggaaagaagtagcagaggctgcgccatctgagattaataatattgattttcgagtaaggacatataaatcataataaaccttgtacattttgtgattgtatgatgaatatctgtacattttatctggtgaagggtgctgtcaaaggtcagagtatcccaaatcacacctgtcgtgacgtgtggacagagtaccatgacatgggaattgctgggatcaaagctatcgctgagtataaggtctacactgctggtgaagctatagatctactacattatgttgctcctaagatgatggcgcgtggtgccgctcatttctcttatgggattgctgatgatttggatgacaccaagtatcaagatcccaaatactggtcaaatccgttagagacaaagtaagtgatttcttgattccaactgtatccttcgtcctgatgcattatcagtctttttgttttcggtcttgttggatatggttttcagctcaaagcttacaaagctgtttctgagcctttctcaaaaaggcttgctcagttatattgaggtgctaaagttgatacatgtgactcttgcttataaatcctccgtttggtttgttctgctttttcagattaccgaatgctcctgagatggaaatctactcattatacggagtggggataccaacggaacgagcatacgtatacaagcttaaccagtctcccgacagttgcatcccctttcagatattcacttctgctcacgaggaggacgaagatagctgtctgaaagcaggagtttacaatgtggatggggatgaaacagtacctgtcctaagtgccgggtacatgtgtgcaaaagcgtggcgtggcaagacaagattcaacccttccggaatcaagacttacataagagaatacaatcactctccgccggctaacctgttggaagggcgcgggacgcagagtggtgcccatgttgatatcatgggaaactttgctttgatcgaagatatcatgagggttgccgccggaggtaacgggtctgatataggacatgaccaggtccactctggcatatttgaatggtcggagcgtattgacctgaagctgtga

SEQ ID NO: 155596 - DNA, 2324 bp, Arabidopsis thaliana landsberg
gacgaagacatctatacattcttcgaatcagaaatcttgtcgcccaagttatctcatgaaacaagatcgaagtcttcttcaagtaaccactccctagagaagaaggtttcattgaacgttcttgacctcaagcaagagaattacttctctacagccataggacaagctcgcacaaaagctcgctatgtcgttgactcatctcacaatgttgtgaatttactccacaagcttgcagtagcaaatacaacaacaacaagtgtcaagaagccaaacgtttaagtatgttgactaagttgctttgaccaagtctttcgtttaattttgtttattttttttgttcataataagaaaagagtccactgctctgaaatgcatgttatatgtaaaccttattaggtcttgaatttctaatattatcagcaaataatacaaaaatctaggttttatctatcaaatgtggaacaaatgttatatgtaatattatcagctagcaaataatatttaatgaaacaaatattgatttgatgcgtattttgtagattttagggtaaaaaaatagttgtaagaaagaaagaaaatgatacaaaaaaaaactgtaagaatgaatatagatcactaaaatacaactcaaaaatgaaaattagcacatgaagacaaacatgggagcgatgactgggtctcaacgtggtgacagagtttattaccgcgttgcggtgtttagaaccattagttatgtggctggctcactctcacgcaccgcctaggggcttttccatcattctctctaatcatttcactttggtaatcttaatctatctatgcgactccaaatggtaaccacaagaaaaattaatatgatgaaagctagagatgaatcaggctctttagtctaattaatggattcagcagccaaattactttagaataaaatccaactttatgtctgtgtaatgaataattaatggttgagtgtacaaaataatgaaaattgttgtgatctccaaaaaaaaataatgaaaatatgagttctcctgataccatttatatagagtctaaaatcacaagtatatatttagaagtaaatttcaaattaatctaacaatgaaacaaaaattcatttgcgtgaaccgctttctctacttctttagactgaactttataggtgagtgtgagcagtaattgtagttctatccattatatgcacaaataataggttagatttggcttttagctttgcctacatctcttttttttcttgtttcatccaaggagaagaaagcccccatggaagccaaagaagaaaccccgtggagctctattttagttccttctgttcaggagatggtgaaggataagatgatcacgaccgttcctcccagatatgttcggtatgatcaagacaaaactgaagtcgtcgtccatgattctggcctcatatccgagatccccatcatcgacatgaatcggttgtgttcttctaccgccgtggactctgaggttgagaaactcgactttgcttgcaaagaatatggatttttccaggcaaaatctcaaacttcactttttttacaaaattatctatgttagacctaacgtggagcttattacccttgtttccatgcaagtatcagaattaaatagattacgtttgatgaaattattcagaaaaaatcgtttcttacaactatgttaaagccaaaatggagcctaaaactttccgtttcaaatttatttatttggttatgtctttgtatggtccttaacagcttggtaaccatggaatagactcaagtttcttggacaaaataaagtcagagattcaagatttcttcaaccttcccatggaagaaaagaagaagttctggcagcgaccagatgagatagaaggtttcggacaagcttttgtggtttcaggagatcagaaactagattgggcagacttgttcttccataccgtgcaaccagttgaattacgcaagcctcacttgttccccaagctacctcttccctttaggttttgttctaattcaacattttatcaactagctccacaaagtattgctctgtataatattggttttatgtttctgtagagatacactggagatgtattcttctgaagtgcagagcgtagctaagatcttaatagcgaaaatggcaagagccctagagatcaaaccagaggaactggaaaagttgtttgatgatgttgattcggttcaaagtatgaggatgaattactacccaccatgcccacaaccagatcaggttattggtctaacaccgcaaactgattcggtcggactcactgtactgatgcaagt

SEQ ID NO: 155597 - DNA, 1017 bp, Arabidopsis thaliana landsberg
ccttcatcatcatctctctctctctctttctcttccatctgacctgtgatgtgagtttgcagatattcaaacaactcaatcctcattccctttgtttcgcctctctggatttcgaagagctgagagattagggtttctcgattttcgagattagagtctaatccccaccaccagcatagctgatatcctggaggagagaatgacggattcgggtctaatgatgccggcggagattgctggaattctaaccacggcgattacgagttggtgggatgatgttaatgagtcaactcagtggcaagatgggatctttttcgctctttgtggtgcttatgctcttgtttccgccgttgctcttgtatggctttcaaatttcttcgtaatacatgaaattttttgtttgggagtgaaattagttttctaaaaatgcttgcttttaggtatatagatcaatttcttagcgtgtttgacatatctttcctcttctgtttaacaaaagaggtgacctttgttgttgagacatcgttttctatctaaatcattgagctttgaaatacttactcattgtatagtttgattgattgtttctgtagtttatttctgggtttagttagttatgttgcaatttctgaccttttgtttgaaatgggattatgattggtaggttcaactgataaggatccaaatgagagtgcctgagtatggttggactactcagaaggtgtttcatcttatgaactttgtcgtcaatggaggtgattattctgtgtttctattgaccaattgatagggtttttgtgtttgtcagcacctttgggattatgttttgttgaatttctctgttgtgtgtgtgcagttcgtgcggttctgtttggatttcacatgcaagtatttcttgttcatcccaaggtgagagtgttctcaacttagttctggtttttgcatgtttgatttggaaatggtggattttgaaagctgcatctttttaagtatctaatgattctgtgaggtaatgca

SEQ ID NO: 155598 - DNA, 8400 bp, Arabidopsis thaliana landsberg
ccatacaaccaaccaaccccactggtctaagtacaacgatagagattggggatcgtacgattcccttggttcacgatggccgaatcaagctcttagcttattggtccatccgttctccaaacgtacgcccctctggctacatggtggacgattgagccctcggcttatcgaaccatccatgtttccgttctggtcgtttaacactacgaccgcccacggtttactaaccgtttacccgtccggtctatggtggtcgataaagctttcggcttaatgatccatccatgcggtccgaacgatatccttatcacacccaagggtccgtggattcatccactggatcatcgtaggctagcccatgaaatctttcttccgtcggcctcaggtttgctcgccggtccaacatccgttttgtccatcggttcccaccatggactttcccgttggttatccgtcgagtcaccctttggtcttaccgatctctgatcggtttcaccatggctgaggagatagatacatgaaggcggccacgatgttgatcctatatggtgaatcacgttccttacccattcttggggctttctccctttatcggtaagattgcatccatgggcgacccttgggtgtgttcggatgcacttatccttgtgcttcctcgaacacttttctcgatccatcccatccgacgatcggtctgtccgacccgttccgtcagacgatcggcctgtcccatccgacccgtccgacgatcggtctgtccgatccgtctggccgatccgatccgtctgacgatcggtctggccgatccgatccaaggatcggtctaccagatccgattcgtctctaagacgaacggtctaccctctccatcctctacactccatcgaaccgttggaccgggaggtagcatgcgcatcagttcggtcgagttatactcgccgagccgcaccccctttccgaccaacaactctaggatgtgttgggactcctttaagaatgttttatggtgttttggatgttgtgagatgatgtgagattccttgggcgtcctcccttatatagggggcgaatggatgcttcctgaagcatcacatccgttctttgcacccctccgaaaggtcacatccgttccttgcatcctttcgaaaggtcacatctgttccttgcatcctttggacgatgcaaccgttcgttggtacccgctcgaccttacactttttggccgagacacctcttcacccgtgagctacgacagtccaccagctcgagtgtcagctgaccggaccacccagctgggtcagtacttgatcagctcactgagctcagtcgagctgtcggtcagctcacctagctgagctagctagtcttccagctagtttagctcacatagcttacctagctagttcatacagcttgtccagctcacctagctggtttagcttatactttctcgttcttcctacttagtattttggtccgttcctcgaccatgatctagttttctcctaaaacaaacctgcctctttatgaacgcgggacgcggtcgttacaagtctaccccccttaaactgaattcgtcctcgaattcggcgtgtgtaagatcttggttactccctaactcgggacacgggcgttacaagtctaccccccttaaactgaattcgtcctcgaattcagcgggtttaagatcttgtttactccttaatctttagtctttccgagactttagatatcacatttgatcaaatctctatttccgagtttgatcaagtttcccgatctttgtctcttacgacactcgatcaaattcctgatcctggtcctctcccggactcgatcattatttcccgatctttgtcttttcctggacttgatcaatattttccgatctttgtcctttcttggacttgatcaacgttttccaatctttgtcctttcctggacttgatcaacgttttctgatctttgtctcttccgacattcgatcaaatttttgatcctggtcctttcccggactcgatcattatttcccgatctttgtcctttcctggacttgatcaatgttttccgatctttgtctcttccgacattcgatcaaatttctgatcctggtcctttctcggactcgatcatattctcgacttaagtctttttccgactttgtcaatatttccaaccttggtccccaaaggactcggtcaatatttccgacataggtctctttccgaccttgtcgtttttccatgatcttggtcaatttccgataagatcaaaaccccagaaatagtcaaatcccgactaagtctgtacccgatcttagtcaagttccgactagatccaaattccattgatatcggtccatctccgaatatatcaactcacttttccgtcatgtttaagttttgactacaaggataatatcttggttcgtgatcgtgagttgggtaactatttccgtttccaaacacatcgatccctcaacttccttatccgccaaaaccttactataacgttttctcgagcacctatccatcctaggatcaagcatgctctgataccaacttgtgagaccccgtcccggacgtctcggcgtccggcgacgttgtactcaagttcgcgcctcttcccggccgaacctcttaatttttcgcgattcaacatagaattgcctttacgaggctaaattctataatcgctctcttattacacagcggaagtctttctaaccttggtttaattctaaccaattcttgtaccggtttcatcgtctttgttccttagacttagatcgatcctttactcggtcaagacatgcatatgttcgctaaccattctaagccaaacaatcgcatattcctttatcctactttcacggtcaattaccaaacgtctatcttaactaataagctagatcgttacataccttggtcaatatgcggatttgattccttagcccgtttgtcgccttactccattcgttcaacgactcgtcatcggtcgtgaattgatgaaccaatccctatcgttacttagccatacaaccaaccaaccccactggtctaagtacaacgatagagattggggatcgtacgattcccttggttcacgatggccgaatcaagctcttggcttattggtccattcgttctccaaacgtacgcccctccggctacatggtggacgattgagccctcggcttatcgaaccatccatgtttccgttccggtcgtttaacactacgaccgcccacggtttactaaccgtttacccgtccggtccatggtggtcgataaagctttcggcttaatgatccatccatgcggtccgaacgatatccttatcacacccaagggtccgtggattcatccactggatcatcgtaggctagcccatgaaatctttcttccgtcggccttaggtttgctcgcgggtccaacatccgttttgtccatcggttcccaccgtggactttcctgttcgttatccgtcgagtcaccctttggtcttaccgatctctaatcggtttcaccatggctgaagagatagatacatgaaggcggccacgatgttgatcctatatggtgaatcacgttccttacccattcttggtgctttctccctttatcggtaagattgcatccatgggcgacccttgggtgtgttcggatgcacttatccttgtgcttcctcgaacacttttctcgatccatcccatccgacgatcggtctgtccgacccgttccgtcagacgatcggcctgtcccatccgacccgtccgacgatcggtctgtccgatccgtctggccgatccgatccgtctgacgatcggtctggccgatccgatccaaggatcggtctaccagatccgattcgtctctaagacgaacggtctaccctctccatcctctacactccatcaaaccgttggaccgggaggtagcatgcgcatcagttcggtcgagttatactcgcccagccgcacccctttccgaccaataactctaggatgtgttgggactcctttaagaatgttttatggtgttttggatgttgtgagatgagatgagattcccaaaggccttgggcgtcctcccttatatagggggcgaatggatgcttcccgaagcatcacatccgttccttgcaccctttttaaaggtcacatccgaaaggtcacatccgttccttgcatccttccaaacggtcacatccgttccttgcatctattgggcgatgcaaccgttcgttggtacccgctcgacattacaccttttgtccgagacaccttttcacccgtgagctaccacagtccaccagctcgagtgtcagctgactggaccacccagctgggtcagtacacgatcagctcaccgagctcagtcgagctgtcggtcatctcacctagctgagctagctagtcttccagctgggtttagctcacctagcttagctagctatttcatgctagcttgtccagctcacctagctggttcagcttgaactttctcgttcttttgactaagtattttggtccgttcctcgaccatgatctagttttcccctaaaataaaccggcctctttatgaactcgggacgagagcgttacagtcaagcttagtgactctaaacaacctcactttggaggaagtcccttgtctatccttgtacatattgctttcttgttatttttaatgtttttgtttaagtgtttcaagagagaggacttttggggaattttcaggccatgctcgaccaaactactcggttgacaggccaaatttgggcttcaattgatcaaagcccaggagtagaccatacaggcccagaccactcggcccaaagtcgagtatgggcctcactgtttaaagcccaagaacatgatccacttgatcagatgtcgagtaagatgaaccccactaagcccaacactgtactcgacacgcgcgccgagtatgtcggccgagtatcgcacgtgcgaagtcaacacaattcaaattcaaatttgaattggaatctactcggccccacacatctatcctgctccccaaaggccatcaaagattcttttgcaaacagtgagagcttgtctccttgaccaaatgaagggtggagatctagagtgtttgaagagctaggatcaaatctatttgcctataaacccacctcaacaagctaagacactcactctctctctttactcaattagtttcgcaatttgctacttctctcaagaaatttcaagtttttgctctcacttctctttagaattcccagaaactgaaccataattttatactttctttccatacaaaccatttcaaaacctattaaaacatcaatttctcttctactttgacctacctttagttattttgtggtgactacctgtagtaaatcatcccaagatcatgaatcccgaagaatcaagaaggagagcctctactcgagttgtggcaagaaggtttgagatgattaatgagaaggatcagtcaaggaatcaggaagctgcgagtccaggttttactcggatgacaggccgagtacaatggccgagtatggccttggagtcctctatggctcgttctgcggctgctcgagaggaaattgcaagaggcaagagggtttgggagtccgagccggctgcaatagaggaggagtccatgctagagaaggaagcatctgaggaagatgtgcaaattgatgaagaggtcccgatagttcttacaaggagaagaagaaaccacccaaggagaaagaaagagcctaccattgaagagcactaccagtatctcatggagctgagttttgaggggacaagatatccccataaacctaccatgcaagctttggggatatgtagggatgttgactacctcatggagatggccaagttggagaccttcttctcctacaagtgtgaaggataccaaactgagagctgccaattcctagccactttgaagcttcatttctatgctgaagaaagggagagagagctgcataagggagttggctatatcacattcatggtgtttgggattcaatactccctttctattaggcagttggatgctgttttcaagttctccaccaagtatgggatccgccaaaacttcagcaaggacgagctcctagatctatggttgacaatcgccggtccactcccctacaagtaatctagggccaagagttcgttgataaggagcccggtgctaaggtatctccacctttgcattgcaagtgccttcttcccaaagaagacaatcgaccatgttaatgagagagggagaactgaagttgcttgatctcaccttatgcttcattttggggcgcacaaggaatgggatagagatggaaggggatagggctgatacatccctttcggtggtgttgattgatcacttgattggttttagggagtatgcagcgggaatccaccaatccggctatggaggaagcttatgtgctggaggagtgatcacgcccatcctaatagccgctggagttcctcttcataccccaactcacacagcaacctacatcgatatggagtatttgaagaggaagtgctacttggataggtctgctccagcggatcaactctatttcaagttcaagcactccacgctagatctctctacgctagcactcccttgcaagaagttcaccaccattaggatcactacaagaaaacaggtgataaacgacttacacgacagtcgcatagtagccgtaaaaaatgataatacgactaatcagcgactaacgacgttagtcattattacatagtcgctgaatgagatagtcgtgaattagtcgttgatcgacgactatattacgacaataacacaatcagtaaacaattgtcgttgtatagtcgtatcattttggcgactatttaacgaccatagcacgattaattgtcctgtacgaagcgtgtgaaacacgtggtcgtataatagtcgtattatattgacgactatttaacgactattggacgacaaattctatcaatgtaaggaaataattctcgtagtcatataacagtcgtataatgttttacgactattatacgtctcgtggacgattatattgtgactatgtatcttagtcggataataatcggtaactagtgtgactattagacgactattttacgtctaatttgctactaaatacgactactgagcgactacttgttttgtccgaataggaatttggtcatcgattgttgggtttcttgttttttgtttgttggttatcgattgttgttttcttgtttcttgttttctccttttttatttgaattgctaaaaagatgaaaagacttgtatatatagaaaatcaagtacaaatacacatagaattatcttgtttattacacaaacaacttattcaaataaacatatgttcaagtagagtttgggcaaagataatctaaggatcattaggtggaggacttggtagacgttctgtggttgtggtagagtgacttgccatgaagtccaagaactgcggatcggtttggcggagatacttctcgactaaagacaattgctcgagcttgtccttttgctcagctgtgactcgggatgactcagcttctcgggcagcaatctcagcatctctcttctcattatatgcagcctgctcttctattttcctttgagcttcctgcagccgttcttctagggcttgaaaggatgatgaggaaccggagtgatggcggttggcgctgcctagagtgtcttttagacatcctagtccataaggattgcctcttgaatccttttctgtggactgcaagaaatagagaagaagctcattagtgacagaatattaattggactctaagactcataattatactaaaacatcttacctcgagaaagatggctgtataatcatctagtgtgagctccggaggtcgtgaagagccatcagagacagcagaagcagacgcctctagtgctgacagcctatctctcacattctgctgataagcttgagcaatcttctccgacttctgatcaacaaatgagccatccgacttagtgtgtgtttcgatgaacacctcaccaagatggaccggtcttcccaacttctcttcctgcaaacacaaatcaatatcaacagtagtcactagacataagaactcaacatactcacaagaaaacagactatattggattgaaaacagaaaacagaaaactctaacttatgagaatctgcagaaacacttaccaattcatcttggatttcttgaaaagattttggcccagagtagtggacgtgaggaccgataccgttacggtcagagagacgagctttggaataggtccgactccttttctgtgctgcttctgtgtcccagtaagcacacattgttccccacagcgt

SEQ ID NO: 155599 - DNA, 1244 bp, Arabidopsis thaliana landsberg
acacgaataagagaggtttgatcatggggatttggaatgctcatacttctgttgggaacattactggctcgttgatcgctgctgttatgttgagatatggttggggatggtcttttgttgttcctggtgttatcattgtggtgattggtttggtgaatttcgctttcttgcctgttagtccagagaatgttggagcatagcgagacgaggttcttgattcttcgtctgagaaaatcggaaactctgttaatgagccgttactattgagctcgtcggattcggaaaccgatgacaagaaacgagctgttggattcattgaagcgtggaggattcccggagttgcgcctttcgcgctctgtctcttctttgctaagttggtcgcttacactttcctctactggctcccattttacgttagccatacaggtaatttttttgtatattattactgagtgagtacaaaccactagattacttgtcttggttgcgttactgattacaatttttgaatgatattttgcagcgattgaaggcgaatatttatcggacgaaacagcgggaaatctttcgacaatgttcgatgtaggaggtgtggttggtggaatcatggctggttacatttcagaccgaattggtgcaagagctattacggctgcgagtttcatgtactgctcaattccagctttgttcttctaccgtagctacggacatgtatcgttattagccaacgcgtctctcatgttcttgaccgggatgttggttaacggtccttacgctttgattacaacggcagtttcagctgatcttggaacacacagctcgttgaaaggaaactcgagagctttggctacggtaacagctattatcgatggaacgggatccgttggagcggcggtcggacccttactaacgggttacatatcgtcgaggggtagctggaccgcggttttcacaatgttgatgggagctgcgtttgtggctggactattgttgacgaggctggttatggccgaagtagcggagaagatagctgagtctaggccatcggaagaatgtagatctccggtggactatgtccaagatcatgtgatggaagtgtgatcaccaactttgatcgccatttttttagtagcgttttaagttgtgtttattttttcatagggaagatttcggaccagagtttaggtctgtgggaatttgtaaacatgtaatctatattgtgatgtacattgtacataattact

SEQ ID NO: 155600 - DNA, 705 bp, Arabidopsis thaliana landsberg; identical to SEQ ID NO: 26760

SEQ ID NO: 155601 - DNA, 1081 bp, Arabidopsis thaliana landsberg
ataaataatatatagtgtcgctcttcatctctaaaaccaaattcttatgaaggatcggttctccgctatcaccaatcttcatggagatcataaacaggtaatttcaaacttcaaattcatttttcaatttaggtttagaattgaatcgaattggagattttgattcaattgattagcaattacagctcaaattagggtttatcatgtgagatctacattgattggattaataagctatctaaaattaggattcttcatgatgttgtttggggaaaattgaaattctaaatagaattagaagttctacagaatcatttgatacaattgtatagttattgatgaatctctatgtattgtgtattctaaacgttgttttgctttgtgataatttgcaggcaatatttggagtctatgttggtcatggaggagttaaagcggctgagtttgcagctaagaacttagataagaacattgtagaagaagtagttggtaaaagacacgagttggagatagctgaagcggtggaaacgtagttacttgactacagacgcaacgtttcttaaggaggaaggttttaagggtggttcatcctgtgtcacggctttggttagcgaagggagccttgttgtgtcaaacgccggtgactgtcgtgctgttatgagtgtaggaggtgtagctaaagttttattttctgatcattgtccgtctagagatgatgaacggaaaagaattgaaaccacgggaggatatgttgatacgtttcacgttgtggagaatccagggatccttagttgtgccaagaggaatcggagatgctcaacttaagaaatgggttatagctgaaccagagacaaagatttcgagaatcgagcatgaccatgagtttttgatcttggcatctgatggtttatgggataaagtgagtaaccaagaagcagtagacattgctcgtcctctctgcttaggaaccgagaagccattgttgttagctgcctgtaagaagcttgtcgatttatctgcttcacgaggctcgtctgatgatatcagtgtgatgttgatccctttacgccagttcatatag

SEQ ID NO: 155602 - DNA, 898 bp, Arabidopsis thaliana landsberg
  unsure (1)..(898): unsure at all n locations
gctaaagccgttgaagagtctcaatgtcccggagttgtgtcatgtcaccatatactacgtctcgccgctagagacgtcgtcgtgctcgtaagtccactttctgaggtcaccgacgtttcatttgatttctccaagtataaatcatttactttgtgatgataacaggttggagggccagagtttaaggtggagctagggagacgagacgggctcgtgtcgaaagcgtctagagtgaccggcaagttacctgaaccagggcttgacgtgagaggtctagtccagatcttcgctagtaacgggctttcattgaccgacatgatcgctctttcaggcgcacatacaattggatcctctcactgcaaccgtttcgccaaccgtctccacaatttctcgacgttcatgccagtggaccctacgatggacccggtctacgctcagcagctgatacaagccnnnnnnnnnnnnnnnnnnnnnnnnnnnnnnnacattgacctaacgtccagagataccttcgacaatagctactaccagaacctcgtggctcggaaaggacttttcacctccgatcaagctctgtttaacgatctctcgtctcaggctacggtggtcaggtttgctaacaacgctgaagaattctacagcgcttttagctctgctatgaggaatcttggccgtgttggggttaaggttgggaatcaaggcgagattcgaagggactgctctgcttttaactagctttattgaacaaatgtctataacctaaaacatataaattatgaagcttttgatttaagcttttgctatactaaaatgtcataatccacaatggaacttctcaaattgtagtggttgacctatttttcaggattattcagattccaaaacattatttgaaaac

SEQ ID NO: 155603 - DNA, 250 bp, Arabidopsis thaliana landsberg
aggttctttggacgatgaaacaactaatccgccgtttatcgcgtgtcgcggactcaacacagtatagcctcctccggtctgaatcccaacgtggccgcaccaagaaggagaaacacaaatcttgggttcccgaggggcacgtgcctgtttacgtaggccactagatggagcggaccatggtgaatgcggagctgatcacccaccccgtggtcggagcgtacatggagcagtcgcctggagagtatggata

SEQ ID NO: 155604 - DNA, 4236 bp, Arabidopsis thaliana landsberg
  unsure (1)..(4236): unsure at all n locations
ccatgtaggattcccatctagagaagaagctcttgaaattttctgttaatatgcttttgaacaaagctctgcacctgatgctttcgagaagcttnnnnnnnnnnnnnnnnnnnnnnntggtaacctcccattgggtctctgtgtgatgggttcatctttatttgggaagaagcaggacgaatgggaatttgtagtgcataggctagaaactaatcctggtcaagaaatcgatgacgtattaagagtcggctatgaaaggttacatgaaaatgatcaaatgctatttctccacattgcaattttcttcaactacagagaccgtgatcttgtggaagccatgcttgctgatgatggtaacttggatgtcggaaactggctgaaaatcctagttaacaaatctctgatagagatatatcgcactggacaaatagtgatgcacaagttactacaacaagtgggtagacaagccattcgtagacaggagccttggaaacgacaaatcttaataaatgcccctgagatttgcgatctccttcgatatgagaaagtaagtcctctttcttcatttgctctttacaatctaaacaagtcgctttaatgacaatttgtttttgtatagggtactagctgtaatgtgtctggcatatcatttgatacatcaggaatcagtgaagtgactatatgtgatggcgctttcaaaagactgcatgatcttcgatttctccatgtttacaaaagtagagatgatgggaataacagagtgcacatacctgagaaagtggagtttccacctcgtctaaggttactgcattgggcagcatacccaagcaagagtcttcctcctacatttaatctggaatgtcttgtagaactcaatatgcgggaaagcctggtcgagaagctatgggaaggaacccaagtacgttggtgttgtacttaaaaatatatatatatgtgtacttcctcttcaggttatatgatgctctttccctcggttgttttgtggttttcttatcatttcagcaccttaaaaatctcaagtatatggatttgactgagtccaagaatttgaaggaactcccagatctttcaaatgctacaaatctggagtatttttatctggataactgtgagagtttggtagagatcccatcctcttttgcgcatctgcataaactagagtggttggagatgaataactgcataaacctacaagtcattccagctcacatgaacttgacgtccgttaagcaagtcaatatgaaaggatgctcaagattgagaaaatttccagttatttcaaggcacatcgaagcactggatatatcagacaacacagagctagaagatatgcctgcatcaattgcgtcttggtgtcatcttgtgtatctcgatatgagccacaatgaaaagctccagggattaacacaactccccacgagtttgagacatctaaacctaagctatactgatattgagagtattccagattgcatcaaagctcttcatcagttagaagagctttgtctatctgggtgcacaagactagcatcattgccagatctcccttgttcaatcaaagccctagaggctgaagattgtgaatcactggagagtgtatctagccctttatacactccaagtgcgcgcctcagtttcaccaattgctttaaattgggtggagaagcacgggaagcaataatccgacgatcatcggattctaccgggtcggttctgttaccaggaagagaagtgccagcagagtttgatcacagagcccaaggaaattctttgtccattcttctcccattgggtggtaattcccaatttatggtctgcgtcgtgatttcccctaaccatgatatcacaaaaatgagtaatgagtcggaactgttatgtcgcatcaacggcgaatcatgctcttacgacgaggagttcgatatagttgatgtctcaaactgtcgaagggaacatctatttatatttcactcaggcttgctacgtatgggccgttctgaagcaggcacagagatggtgttcgaattcagcagcgcattacaagaagacttcgacattattgaatgtggtgtcaagatctggaccccacaaagcatcagacgaggatacctagcgtttggagaagacgatgacggaacagatggagtaatatgtgacacggaagacgtcgatcagatgacggacgaaaccaagggaggcaacaatggaggatctagcgatgaagaggatggcaaaatccacatgtattcacatgaatccggagaaacgtctgaatctgaatctgaatctgagaaagaagacgaatctgaacctagagaaacgtccgaggcagacgcggacggggactacgagtctgtatccaggaagcgtgcgaagaagacgacgagtgctagtacagatcttaagttggtttctatagactacttgcggatttcaaatcttttaaaatatattttccttattttagtattgcttttaatccttgttgtacttatgtctatgcgactttttcttgcttgaaagcatgcggtctttgttttatgcatcaaattcgcctgtcccccattagcatttttttctccaaaaaggaccagcacttatgaaacatatgtaggtttttggagaagacttcaagaagtcgtttgtgttcaatcaaatcaaatatttccaattctagaagtcttaagagtttacttttcataaaaggaagaaacatgaagacgaacaaaaatttcctattccataaagaaaaaagaaattgtgtattccatttagttttaggattggaaattggtctgttgtatagcctcaacctataagtataaaataggtgctaaggcctgagaaaaacttagtttgagcgaaacttgtaagtccactagggttcctacttggtccagcgagaaaggaagaggggtttcgtctgattccgctaaatctctatctttatttaaagatgatggattccgatgatgatatgctcaatgcccacgatatggactcggtagattatgattttgacagcgccggcaccgatgatgacaacgatattgatgaaactgattacgggtttggtgaggctgacacggacgatgccgccatcatcgcctcccatcgctctcagacaaattatgttgttctcaaggaagaagatatgcgcaggcatcagaaggatgatgttgggcgagtttccgttgtcctctccataaccgatgtccaagcaagtcttttgcttcttcactatcactggagtctcagtaaagttaatgatgaatggtttgcggatgaggagagagttcgcagaactgttggcatattagagggacctgcacctgatggcagagagtttacatgtggaatatgctttgaatcctaccctcttgaggaaactatatcggtttcttgtggtcacccattctgcgctacatgttggacgggttatataagcacaagcatcaatgatggcccaggatgtttgatgctaaaatgtccctacccttgttgtcctgcggccattggtcgagatatgatcgataacttgtgttccaaggaagacaagtagaggtattatagatattttcttaggtcttatgttgaagtcaacagagagatgaagtgctgtcctgccccaggatgtgagcatgcaattagttttgctgctgggaccgaaagtaattatgatgtttcgtgcttgtgttcgcatagcttttgctggaattgcagtgaagaggctcaccgtcctgtggattgtgacacagttggaaaatggatactaaagaacagcactgaatctgaaaatatgaattggatacttgccaattcgaagccttgtccaaagtgtaagaggccaatagaaaagaatcatggatgtatgcacatgacatgcacaccaccttgtaagtttgagttttgttggctctgccttaacgcatggacaaaacacggggaaagtagtggtgggtattatgcctgcaaccggtatgaggcggctaaaaaacaagggttgtatgatgaggctgaaaggaggcgagagatggcaaaaaactcgctagagaaatacactcattactataaacgatgggcaagcaatcaagtgtcgaggcaaaaagctatgggggatctgcagaaaatgcaatcagagaagcttagtgacatacagtgcacatcagaatctcagctcaagtttatcgcagaggcttggctccagatcattgaatg

SEQ ID NO: 155605 - DNA, 1232 bp, Arabidopsis thaliana landsberg
  unsure (1)..(1232): unsure at all n locations
cgttgataatatatgatttgactatagatagatacatcaactttggtatttagctctgaagttaggtcggatctttggtggtattgaactcaaaagtggtttactagtgattcttgacttgattgttaataaaacaaccataaaattgatgtagacgaantatatatgaatcaatttattcatcatgatgctttattttttgtcttaggttacttcctctgccacaagaagctctgtgtctaatcgctgcaacagcttttacggcagagtgtcttctcttcttcttccactccacaagccacaaaggtcttgaaggttattaccatctcctcctcgtctttctcatcggtctctgcgtcatctcctcaatcgctggagcaatctgccctacaagcttcccagtagatctatgcaatggcattgcaatgactcttcaaggcctctggttttatcagacagctttcactctgtatggccctatgatgcctcaaggctgcagtttaaaacaaaactctgtagtttgcagatcagttgattcagaagtctcaggagagtttctggctaattttcagctcttttcattggctcttgctgttcttgattgcgttggggcttcatatgtttttgcggctttaacatttggagtacgtccatgctagacttaataagtccaaattatgattcatgctccctacttcttctttgtttctgaatttcagaaagaaataaagtaatagtctttttttcttcatctgcatttggaggcgtttccgtttcaagcaaccaaaacttgtgaaacacacataaaagtagtctttgtgtctgcaaataacgagccaattttgagttatttagtgtcattgctttattttctaacaaacaatatagcagaaagatgaatctcaaagaaagaggacaaagtgtttattgaaaactcactgaaaattgattatcataatattttatgctctgaagaaagaagtgacgaacaaagtgttttcacttcccattacattagaggctcaaagcaaaccatatatagaagagtacatatacgtataaccccaatgcctttaagtcttcgacttcacgtgaaagacctttaaacactgatgcaagcaaagttggaagattaacacgatagaagccacccatttcaatgtggatggatggtatgaaaagaaaagtaacctctctagaggtacttgatcataccccgaccttcaaggctc

SEQ ID NO: 155606 - DNA, 984 bp, Arabidopsis thaliana landsberg
aagtatttgtggtttcagaagagcagaaactcgattgggcagatatgttcttccttacaatgcaacctgttcgattacgcaagcctcacttgttccccaagttacctctgccctttaggtttgcctcaaatgtgtaaaaccattcttaataaatccacaagtcttctctgtttaaaacttggtttatgtttcttcagagatacactagacatgtattcgactgaagtgaaaagcattgctaagatcttacttgggaaaatagcggtagcactgaagatcaaacccgaggaaatggataggttgtttgatgatgttgattcggttcaaagtatgaggctgaattactacccgccttgtccagagcccgataaggttattggtctaactccgcattctgattctacaggactcaccatactgtgcaggctaatgaagttgaaggtctccaaatcaagaaaaatggcaagtgggtttctgtcaaacctctcccaaatgctttagttgtcaatgttggagacatcttagaggtaagttatttggatgagagagcttattcatagtatcattgtaaatagttctgatgatggtattggtaactaatgtagatcataacgaatagcacataccgaagtatagagcatcgtggagttgtgaactccgagaaagagaggctttctgtggcgtcattccataatacggggttcggtaaagaaattggtccgatgagaagtctcgtggaaaggcacaagggtgcacttttcaaaaccctgaccactgaagagtatttccatggcttgttttcccgtgagctcgatggaaaagcttaccttgatgttatgagaatctaaggaaaccatgcataaaaccattgtcttcttgtgttacatgtactctgtttcttctctgttttcatactttctgcggcaatcaccctctctctgtctgctttatatatgttaaaacaatcactaataaagaatgttt

SEQ ID NO: 155607 - DNA, 2306 bp, Arabidopsis thaliana landsberg
ctatcttagtttaaagaagatgcctcagcttgttgagttggtggaggacaacgaggtaacgatctgctaatctatttgtgaatatctgaccaaactataagcatgtcgtagatattaataacaagtttctgtctgttgcaggatatagaagaatttctgagattacccccagagaaagtcttgctcaaatggatgaacttccatctcaagaaaggtggttacaaaaaaactgttggaaatttttcatcggatctgaaggtatttccaaatagcaaatcttcttttttgtcccttcaaaagcttcattcaagagatttctagattcatcaagtagttttctccaacacgctgacgcaatatcagtttgaatagaaaaaacaacagatcactcattagttatgaaaatgtttggtattttttcttaatgttgatggttgagattgttgactatgcaggacgcacaggcctatgcttacctgcttaatgttctcgcaccagagcattgtgatccagcaactctaaatgcagaggatgatcttgaaagggctaacatggtcctcgaacacgcagagagaatgaactgcaaacggtatttgactgcagaggagatagttgaggggtcttcgtatttgaatctagcatttgtggcacagatatttcatgaaaggtcggtaaaagatcactaaagatagaatattttcttatgtactggtttcttacacactagcttctctgtaactgctgcaggaatggccttagcactgatggtagattctcctttgcggagatgatgactgaggatttacagacttgcagagacgaaagatgttaccggctatggattaacagcctcgggattgagagttacgtcaataatgtgtttgaagatgttagaaacgggtaagcatttggtatggaaaataatttataatcttttggtcctgaaacgtattataagtttttcaatactgaatatttctgatgcagatggattcttctggaagttgttcataaggtctatccaggctcagttaactggaagcatgctgccaaaccaccgattaagatgccgtttagaaaagtagagaactgcaatcaagtcataaagatcgggaaacagctaaaattctcacttgtaaatgtagctggaaatgacatagttcaagggaataagaagctcattcttggtaatcattacccgagagctcatgtttctcttagcttgatacaaaaacatgatcgccttgccttacaaactggagatttatatggttgtgtatctcaggtctcttatggcagttgatgagattccatatgctccaacttctcaagagtctcagatctcggacactaggtaaagagatgactgatgcagatatcctcagctgggccaacaggaaagtaagaaccatgggacgaaaattgcaaatcgagagtttcaaggttcctttctttacaactacttcaaacacttaccacaatagtattatataaagtatgtccacctatcaccttctagtgaatcaaattaaaattctccaggacaagagtctatcgagtgggttattcttcctcaaccttctatgggcggttgaaccaagagttgtgaactggaatcttgtcaccaagggtgaaacaggttttcactactctttttactaaggtatagttacttactccgtttacctgaatcaaagcttatttgattattatatggttattgaaacgtacagatgatgagaagaggttgaatgctacatacatagttagtgtcgcaagaaagctcggttgttcggttttcttgttacctgaagatatcgtggaggtaagaactgagagactataatgtatcatcatccgaaatagcaattgctcagatgagatgtgttttggtatgttgtgacaggtgaatcagaagatgatcctaattttaacggcaagtataatgtactggagtcttcagagacattcacgggagagttcagattcgtcgtcaactcagagcaccacaacgacgtgcaccagcacagcctcgtcccctgccccatctgtcacagaagaggaggaagtctcctcattgagcggtgaagtcacgagcttggccgttggtgatgcggtttctgaaatcaccacggtctcagaggaagcatccatcgaatagagagagcgagatcacatatatactgatatacatctcttgctatagcaaagtagctgttataatagtgacttctctgtaatcttttgtttttttgtgttcatcaactaaaattaccaaaaataataacaatgttacaaacactcaa

SEQ ID NO: 155608 - DNA, 1391 bp, Arabidopsis thaliana landsberg
gagagacttgaatgttgagtttaagagtgatttagtgaagatgattgtggaaagtcttgatgtttaacccaggaaatctttgttgttcttccggtggattgatgagtctgatctctttaagcatgatgagaaaacctataatgctatggctagggttttggggaaagagaagtttcttgatagatttcagaacattgtagtagaaatgaggagtgctggttatgaagtggaaatagagacttatgttagagtttcaacgaggttctgccagactaaattgatcaaggaagctgttgacttgtttgagattgcaatggcaggtagtagtagtaacaaacccaccctacactgcttctgtttgctgctcaagaaaattgtcactgccaagattctagatttggatttgttttcaagagctgtgaaagtttataccaaaaatggtaatgctttgacggattccttgctgaaatctgtcttaaagtccttgagaagcgtggatagggttgaacagagcaatgagctgttgaaagaaatgaagagaggaggctatgttcctagtggtgatatgcagagcatgattgcatcaagtcttagccgtaagggaaagaaagaggaagctgatgaatttgtagactttatggaagcatccggaaataatctagatgacaaggcaatggcgtctcttgttgaagggtattgtgattccggggatcttgatgaagctttagtgtgtttcgagaaaatggttggaaacgagggggcctcctatgctgattatgcatttgagaagttggttcttgcttattgcaacaagaatcaagtaagagacgcatacaagcttttgagtgcacaagtacagaaaaaacagctgaaacctcgccatagcacgtacaaaatcttggtaacgaatctgttgacgaagaagattgcaagggatggtgggtttgaagaagctatgagtcttctaccgataatgaaagatcacgggttccctcctttcattgaccctttcatgaattacttctcatcaactggaaaaagcactgaagctatcggttttttgaaggctatgacctcgaataactttccatctatgtcagtggttctgcgtgtgttcgaaactatgatgaagtctgctaggcacagtgaagcacaagatttactctctctgtgcccaaactatatccgtaataatccggatgttctagaactcttcaataccatgaaacccaacgaatctgctgtagaaaaacctctggctgcttcttcttagctccagttttagtttacattccttcaagtctttttggtttctgggcatttgattcctgctgttcccttttgtttacatgtatcacctaccagtcaccagttaactgttttcgtcaacc

SEQ ID NO: 155609 - DNA, 573 bp, Arabidopsis thaliana landsberg; identical to SEQ ID NO: 57838
  unsure (1)..(573): unsure at all n locations

SEQ ID NO: 155610 - DNA, 894 bp, Arabidopsis thaliana landsberg
atggaaaactctcgatcaactttgatcatcttctttgcttacacaacaatcatatttatcggttctatcaactgtagagacaacaacaacaacaatctggtaacaaaccaatccgctttgttcgtgtttggcgattctgtgttcgatgccggaaacaacaattacatcgatactcttcccagtttccggtctaattactggccatacggccaaaccactttcaaattccctactggaagagtctccgacggtcgtacaattcctgattttattggtaacaaaattactctgttttgtttcccggtaaattttaacggctttataaaaactaattgccgacgtggcagcggagtatgcatggttaccgttgatcccagcgtatctacaaccaagtaacggtaaaaatcaatttccctacggagttagttttgcttccgccggtgccggagctttagtcggaacctttcccggaatggtaataattatcaaacttgtttatttttattagttgaatcaatgataactgttttgactttctacactcattttttctctcatttttaccactcaaggtgatagatttgaaatctcaattaaacaattttaagaaggttgaaaaattgttaagatctacgttaggagaagcacaaggtaagagggttatttcaagagcggtttatctgtttcatatcggagtcaacgattatcaatatccattctctacaaactcttccgttttccaatccaatcctcacaagacatacgtcgattttgttgtcggtaacacaacggccgtgatcaaggtaaatcataagttgatatggttggattctcatgtgccccaggttgatgatcagttaatgtgagcttgaaaaaatgttcttagcaagtgta

SEQ ID NO: 155611 - DNA, 1307 bp, Arabidopsis thaliana landsberg
cccactaaacctaaacttttccaaaatcataccaaaaaaacatttagtaacatcaaaatttacaaaaaacaaaaaaacatgctatctctcaaactcttcctcgtaacactcttcttatctcttcaaacactcttcattgcttctcaaactcttcttccttcaaactcttcatcaaccatctgcaaaacaacacccgatccaaaattctgcaaatcagtgttcccacaaacatctcaaggcgacgttcgcgaatacggccgcttctccctccgcaaatcgctaacgcaatcgcggaaattcacacgcaccattgacaaatacctcaaacgcaacaatgcactattatctcaatccgccgttggagctctccaagactgccgttacctagcaagcctcacaacagactatctcataacatcgttcgagacggtcaatatcactacatcatccaaaacgttgtcgttttccaaagccgacgaaatccaaacacttctctccgcggctttgactaacgagcaaacatgtcttgatggaatcaacaccgccgcttcctcttcatggactatacgaaacggtgtcgcattgcctctaatcaacgacacgaagctctttagtgtctcgctcgcattattcaccaaaggttgggttccaaagaagaagaaacaagtagccagttactcttgggcccatccaaagaacactcacagtcacactaaaccattccgtctgttccgtaacggagctctaccgttaaagatgacagagaaaacaaaagcggtttacgagtcactcagcagaagaaaactcgccgacggtgacagtaacggtgatggagacgacggaagcatggttctgataagcgatatcgttaccgtgagccaagacggaacaggaaatttcaccaacatcacggcagctgtagcggcggcgccgaacaacaccgacggaagcgccggtttctttttgatctatgtgacggcgggaatctacgaagagtatatctcaatcgcgaagaacaaaaggtacatgatgatgataggtgacgggattaatcagacggtggtcaccggaaatagaagcgtcgtcgacggttggactactttcaattccgccacatttggtacgtcacacaatcacatgttattaataataatgtctcgagatctcaaagttatttttcaataatatttaaaatttctcgagtacgtaaatagttgcctttaattattgcatttaaaactttaggtcaaaaaagttagaattgaaagtggtgaacaggggacaagatgcattaataatactgagtg

SEQ ID NO: 155612 - DNA, 3333 bp, Arabidopsis thaliana landsberg
tagagccttctccactggagcatggtctcatcctttcaggaagatggaaagggtctcaggtgttgtagctaatttgggtcgtgcaaatccattgcagactctgattgatctgaggagaacgcgacagcaagtcctttataccggcaaggttggagatgctagacatccgtaagtgaaaatttccacctcccctggtatattgaaatatatcccacgtactttaactaactgatatggttgcatttactcaatgttacatgtcttcagactgttttaaagatattcatattaacctatttagtatacgatggcgatcacagtttctgcagagtctcgtcggtttataatattgagtttgtatagatgttgctgctattaagaaactttgatactgtctttcttgtttctttgtcccttggtcaatctatctgttgtcctgatgcatgtattgagattatccattttggttccttttcaatgtgagcggttacacaattaaatcgtgctgggaaactgaactatggctgcattgtttttaatgttggccacaggcatccttctcactggggcagagtatgctttttgtcaactccagatggtgaaaattgtggtcttgtgaagaacatgtctcttcttggacttgttagcactcaaggtttggagtctgtggtggaaatgctctttacttgcggaatggaagagctgatgaatgataccagcacaccattgtgtggcaaacacaaagttcttctcaatggagactgggttggattatgtgcagattctgaatcctttgtcggggagttaaaaagcaggcggcgccaaagtgaattacctctcgaggtatcttctgtttcagcaaatgttttgctatattttgatattcttgtgctacttgattatttgctttggatttttctgcttcagaaagtatcctatgtcgaatattatttacatatatgtatcacaacgttatctgcagatggaaatcaagcgagataaagatgacaatgaggtgagaattttcactgacgctggtagactactccgacctctcttggttgtggaaaatctccacaagttgaagcaagacaaacctacacagtatccttttaagcatcttcttgaccaagggattctcgagctgatcgggattgaggaagaagaagactgtactacagcatggggaatcaaacagcttctgaaggaaccaaagaattacacgcattgcgaattggacctatcattcctgttgggtgtgagctgtgcaattgtcccatttgcaaatcacgatcatgggaaaagagttctttaccagtctcagaagcattgccaacaagccatcggattctcatcaacgaaccctaacatccgctgcgatacgctgtcccagcagctgttctatccccaaaagccacttttcaagacattggcgtcagagtgtcttgaaaaagaagttctatttaatggccagaacgcaattgttgctgtgaatgttcatctcgggtacaaccaagaggactccattgtgatgaacaaggcttcattggaacgtggtatgttccgttcagagcagattagaagctacaaagcagaggttgatactaaagactcggagaagaggaagaagatggatgagcttgttcagtttggaaagacatacagcaaaatcggcaaagtagacagccttgaagatgacgggtttcctttcattggtgctaacatgagtactggcgatattgtcattggcagatgcaccgagtctggggctgatcacagtataaagctcaagcacactgagagaggaattgtgcaaaaagtggtattatcttctaatgatgaagggaagaattttgcagcggtttctctgagacaggtaagttccagatcatactgaatcgagctgtttttcagagaatgcattcttatgatgaatcaaatgttccattgattggcttttacatcttgcaggttcgttctccatgccttggagataagttttccagtatgcatggccagaagggtgttttaggctatctagaggaacagcagaattttcctttcacgatccaaggcatagttcctgatattgtgataaacccgcacgctttcccttctaggcagacaccaggtcaactcttggaggctgctctctccaaaggaatcgcttgtcctatacaaaagaaggagggtagctctgctgcatacaccaaattgacacgtcatgccactcctttctccactccgggtgtcactgaaatcaccgagcagcttcacaggtacattcttcacattgtcacttggtttttagctcgtaaaacagaatattgaattatatgcaatacagattgacatttggttcctagggagtacagatggatgatatcattaagggtaggaactaattattaataatgttgcctggttggagatgtttgaactttgggactttggctcaaaagctgatatgatatgcataataccagcaaatcgagctaatatactgcacaaggcactaagctagatttgagcaccttacttgaaacatgtcatagtggatctttgttttgtttcctagtaccagaagtgagcatgatttatatgacgggcaaatatctctgtaagaccaaaaaaactaagaagttggatgttctctggttgattaaattgtgcctgcaaaacgtctagaggatacacagaatgggctcaaaagccatgtatcagtatataattagttagaggattgatgctgtgagccttgtgattatgtatgattcgttgaacctttcttagatcattgttgattgccaatggtaaatatttgtggttagggccggcttttcaagatggggaaacgaaagggtctacaatggtagatcgggtgagatgatgcgctctctgatattcatgggcccaactttctaccagcgacttgtccacatgtcagaggacaaagtcaagttcaggaacaccggaccagtccacccgctcacacgccagccagtcgcagaccggaagaggtttggcgggataagatttggagaaatggagcgagactgcctaatagctcacggtgcatccgctaatctgcacgagcggctcttcactctaagtgactcttctcagatgcacatctgcagaaaatgcaagacctatgcgaatgtgatcgagaggactccaagcagtggaagaaagatcagagggccatattgcagagtgtgcgcatcctccgaccatgtggttagggtctatgttccttatggagctaagcttctttgtcaggagctgttcagcatgggcattactctcaacttcgacaccaagctctgctga

SEQ ID NO: 155613 - DNA, 1493 bp, Arabidopsis thaliana landsberg; identical to SEQ ID NO: 25807
  unsure (1)..(1493): unsure at all n locations

SEQ ID NO: 155614 - DNA, 289 bp, Arabidopsis thaliana landsberg
acacttcttgctttattcctctcataccgttttctctctctcctccgtcgtctctgcagaatcactctctcgccggagtttttcacctgcagagctctcgattttttctctcgagcatcatcattttcgtcggatcaatcaccaagagatggcgtcgagaaactccgtcaccggattcgcgttgttcagttttgtattcgccgtcatcttatctctcgcaggcgctcaatcgctggctccagctcctgctcccaacagcgatggtaagctctctacttctctctctctc

SEQ ID NO: 155615 - DNA, 1883 bp, Arabidopsis thaliana landsberg
ctcgactcgatatatagatccaaccagtagcctctcttattcacacctaatcttcatcttcatcttcgcattcatagtctctacgatcaggtaatccccctctctctatctatctttcatatatgtgtgtatgtgtaaactatctatattctgaaaatagatcaatcaattgatcttttcctatctcattatttttcacaaccatcagtttgacttttgatcgtttaaggctcgagagaattatcattcactgtagtaaagatagtttataccaacaaacccatttggtgttgaccagctttcaacataagtatgagttagagctagaaccggattagtattaatgttacttgtacctgttcatagtactaaccaaaaatgatccaaaaaaatgaaaataacaaataaaccatttatggttatcacagatagataaaagaagtcaacaacgatgtcttgggacgatggatcacacgcaaaggtgaagaaagtgcagctaaccttcgatgagatcatctactcaatccaggtcacgtacgacggagctaccgctcttcaatcccagcttcgcggctccgttggtcccaaatctgctgaggtttgtggaaaaaaaaaactacgatcactttttttacagttataatgtgtaattctttttgttaaagttaattaactttaatgtcatatatgtacatacataatcagttcactttggctccggacgagtacataacggccctttctgcttacggcaaatcgttgagtacgcaagaagttattacggcgttgactttcacaaccaacaagacttcttatggaccttacggtaccaaatccggtttccagatttctgctccggaggccaccggtaaacagatctccggtttccttggtaccagcggcaatgttatcaacaccatcgacgttcactattctcccatacctactggaggaactggcaccggaggaactggcaccggaactggcaccggaactggcactggaactggcactggcaccggaactggcactggaactggcaccggaggaactggcactggaactggcaccgaaggaactggcactggaactggtaccggaggaaccggcactgggaccggcactggaactggcactggaaccggcaccggaggaactggaactggcactggaaccggtactggaggaactggtaccggaggaacgggtacaggaggaactggtaccggttcaggtgctcagaagttggaagcacaaggcaacaatgcaggaggtacatcatgggacgatggatccgattacgatggcgtaaccaagatatacgcaagctccggtagagatggtatccaatacgtcaagttcgactatgtgaaaggtggagtaacaaaacaaggagttctacacggtagacaagctagaggaaatcacaagaggtaagcttacaacattctttcaaggtttcgaactatttatacaaagattactgacactgtgaacctattttgttttggggcagtttgtgattaaccatccagatgagtatcttgtatccgttgagggttggtatgaaaccgtcatgctaggaatccagttcaaaaccaacttgaacacttatgagatcaaaatgtatgatttcactcctagtactgatactaaatttactcttcaagttcaagacaagaagatcattggatttcacggtttcgccggcgagtatctcaattccattggagcttatttcgttccaaaatcctccaccactcctgttccttcaacccctttgaagctgaccgcagaaggtggtgagaccaggaactgtatgggacgatgggctcgcacgatgctgttaaaaaagccctatgtaggacaaggccaagatggtg

SEQ ID NO: 155616 - DNA, 1242 bp, Arabidopsis thaliana landsberg
aaggtggtggtagtgataggaaattttgcgagtggagctgatatcagcagggacataacgggagtggctaaagaagtccatatcgcgtctagatggaatccatctaagacatactcaaaacttcccgggtcaaacaatctatggcttcactctatggtaaataacaattaacaaattgagagattttggtcatactagatggtcactgattcaatttttgcagatagaaagtgtacacgaagatgggacgattgtttttcagaacggtaaggttgtacaagctgataccattgtgcattgcactggttacaaatatcacttcccatttctcaacaccaatggctatattactgttgaggataactgtgttggaccgctttacgaacatgtctttccgcctgcgcttgctcccgggctttccttcatcggtttaccctggatggttaagtctctcattcaatctttactttggttggctttttcggattttttcatcgtctaatcatatttttatatatgatatcagacactgcaattctttatgtttgagctccaaagcaagtgggtggctgcagctttgtctggccgggtcacacttccttcagaagagaaaatgatggaagacgttaccgcctactatgcaaagcgtgaggctttcgggcaacctaagagatacacacatcgacttggtggaggtcaggttgattaccttaattggatagcagagcaaattggtgcaccgcccggtgaacaatggagatatcaggaaataaatggcggatactacagacttgctacacaatcagacactttccgtgataagtgggacgatgatcatctcatagttgaggcttatgaggatttcttgagacagaagctgattagtagtcttccttctcagttattggaatcttgaagatcatgaataattccttgaacaaatgattgacctgtctgtgtgttgttgtattgttctttgttgttgtgttaaataaaagccgtcaaggtttcattgtctttttttttttatctttgaatgtttggaaaaaaaaacaaggttttatacaaaatgaaatcatcactaagcaagttgtacattttcttgttgacgccatctctgcaactcactttccaccattctctttgcagcttctgcagattctgctgacttctgagccaattccgttgcttgcttcatctcctctatcgctttcaggttcgcttctaacttattatccgctt

SEQ ID NO: 155617 - DNA, 1305 bp, Arabidopsis thaliana landsberg
  unsure (1)..(1305): unsure at all n locations
acttttgtgacgtaagcgacttctctgaaggtttatatttaactctctccctgaatntgagtttctggttgaaagctttcttagtctgtttccaatccatggaaaatgttcctttgtgcaggttgtgtgaacggatatcttgagtgcgtagcatatgatacaatcccatctaggattctggtctatgaagctgtcgcggaagatccagtgtacagtggttacagatcagccgttcaatctacaagccaagaagacaccctggtaagattcttttaacacataagaacagcaacaacattatcaaaagaccagcttacttgagatcctcacatctttttcttgttgttggtgtgattgtgaagatgagttttgcatcatgggagccaccacacggaccgtacaaatcctttagatacccatgggcactgtatgtgaaagtaggtggtgcattgaggcattgtgctatcatggtcatggcgttacatggctgcattctctcagagatccaggtactttccaatctttaagtcagaaacattctataatcttcagatcttaagagagatttgagacaagagtatgcaaagtaattgcaggctgcagaggatagaagacgagaatttcgtaatgagcttcaaagagtgggaatcgaaggagcaaaagtactaagatacattggggaaagcctgaagaagatggagaagctaaaccctatagaagacatactctacgagattcaccaagcagcagaagaactacagagcaaaatcgacaagaaatcataccttctcgtgaacgccaagaattgggaaatcgggaaccggcctagggttagggatttgactgatgaacaaaaaatctcgaatctcgactctgatctaagtcggatcttggctcataaatctcagagtgaagccactcttcgtccaccgaagaattgggatgatgttacaactgcagctaacttgagttcggcgacgatgcttccttacctgcaatcaaggacgatgatacataaacagccgtcgtggcctagccggatctctattacgccgggaagtatgttacagccaccactgggagagccgggaaaaatgtacgagagcgcgagtaatctttctctagctacgttcgcttcgctactgatcgaattcgtcgcgaggcttgagaatctcgtgaatgcgtacgatgagctcagtgtcaaagctaatttcaaagaagctgtctctgagtgaaaaagaggacgacaagtgtatgctttgtatttgtcgaattaaataattattatattgaattgtgtatcaa

SEQ ID NO: 155618 - DNA, 570 bp, Arabidopsis thaliana landsberg; identical to SEQ ID NO: 74955

SEQ ID NO: 155619 - DNA, 1112 bp, Arabidopsis thaliana landsberg
gtgtgcttttaagttgggctctattcctcgtgaataccaatttacatacaaatatgtgttttggcagttaaattaaaagagcctctagactttgcgatgagactacggattgctttaggttcagccaagggaatcttgtatttacacacggaagctaatcccccgatatttcatcgcgatatcaaagcaagcaacatattgttggactccagattcaccgcaaaggttgcagattttggactctcaagacttgccccagtacctgatatggaaggcatctcacctcagcacgtgtctactgttgtaaaagggactcctgtaagatctcattcctgcattgcttctctaaagtttttttctcaaactcatgactgagagttatttgtcgacttgcagggttaccttgacccggaatatttcttgactcatcaattgacggacaaaagtgatgtatatagtctaggcgtagtgttgttagagctctttactggaatgcagccaatcacacatggcaagaacattgtgcgagaggtaattctgagtagataataagagcgtgtgttttccttttaggcgttatataaattgtgtggaatgtttgtttctgtcagatcaacattgcctacgagtctggttcgatattatcaaccgtggataagagaatgagctcagttccagacgaatgcctcgaaaagtttgcaactttagcgctgcgatgctgcagagaggagacagatgcgaggccttcaatggcagaagttgtaagagaactagaaatcatatgggaactgatgccggaatctcatgtagccaagacagcggatctctctgagacaatgactcatccatcatcgtcatcgaattcttcaatcatgaagcatcattatacatcgatggatgtctccggctctgacctcgtcagtggagttgctccctcagttgcacctagatagaaactttcttcgactcatacaccatacactgtttctttgattattcagtgtgattttgttgttgttctttctttgtacaggaaaaatgattgtaagcgatgtaacggtatatgttgcagacattttaatatgtctgcctttgtgagttatctgttccgc

SEQ ID NO: 155620 - DNA, 3782 bp, Arabidopsis thaliana landsberg
agtggatcatccattggcaatccatggaatttgttcccctgaatcatcgagatgagaccactcttaatctcgaaattgttgttctggatagcaggaggtgcaattcctttcctcttttcctctgacggtgatcacgtggtgcatatccagcaccaatgttggtagggccattttgttgattctgttcgtcagccatttcgagtggttgctgtgttatttggttgactgtggttctcctttttctgagttcgcgagctgtgcggttgatgttattgttgaaaaagaggttctggttgcctgttgatcgagtttgcatacagtagaggtgtacctggatcaagaagacaacaagaaaaacacacagttagtaactgaaaagaaaattgaaaaagaacttgatctaagcaagtctgaaatctcaaatgtaacaaacaaacacccaattggcaacggcgccaaattgataataggttttttagtcaattatcctaaaacacaaatcatatcattgtagtattttaggttttcaatccaaatgggtgtgatactaacaatcaagatgtgatcagaagtcactaagtcaagccaagcaataacaggttttggtgtgttctagcagttctaagtgaacatgcagaaaatagaaattcaagcagaaacaataaaacactcgaccaacacagctctttgcaaagcactgggtgaggtcgagtgacaggtcgagtaacagaaagaaaataaaacacagatactcgactgcacagtctgttgccagacaactgggtggtcgagtacgaggtcgagtaacaagaaagaattgcagaaattaagcgacagataacaggatgcactaaacaacaatagagtaaacaaaaaattcaatcagataaagaattcccaaggatggggtaattgagtagtttcgtttcctcagtttacaggtgattgacatgctcaataaattaaccctagacaacaagttcattaaccaaatctaagtgccaccgcaacagagactctcaagttaagctagtcccagactcaatcaccattgacgagagctaacctaacaggcattacgaatcaacaagttaaagcagcgatcaagttatggtcaggagatactcgacttccaggttgaatgacgaggtcgagtagtggtatggcaatgaaggtgaagacactcgacctcggggtcgagtgatgtggtgaagtagtgatgtcctctactcgaccagggggtcgagtgatctgttgagatcttgaagctcctactcgacctcggggtcgagtggtttgacatgatcaggtccgcttcttccagatagctcgtcaacagctccaaatcacctgaaatcaacgcaaatatgcaacatgcatgcaaatctatcctaaacatgtaattaaagtgatgacaaatgatgagaaatggtataaaacagtgatgatatgatgctaaagtgatgacaaatggatgctcaaaacatgcaaaatacacacttatcagggacaagtatctagctccattgagattgctaaaaagatatctgaattgcaccaaaagctagactgcagctacaatgacctgaatgcaaaagttgaggcgttgaattccaaagtcagatagttggaaggacaatccgcatctacctcttctcccaaagttacgggacttccagggaagtcaattcagaatcccaaggagtatgttaatgttcacgctatcaccataaggagcggaagagagttatccactagagagagacccaagtcagtcgctacggatagtgcataccaagatggggaggatttcagtctcaataaagatcaagttgacaaacaactcgagcagccactcgaccagccactcgagcagccacttgaccaagatactcgaccaaccttccgagcaacatcaccaactgctctgaaaccagttgctgtcaaaaacaatgaaaaggtcttcattcctcctctttacaagcccccacttccatttcgtggtcgacacaagaaagagttagaagataagtacagagctatgtttgccaaaaacatcaaggaagtcgaattaaggatacatcttgctgatgctctaacgcgtatcccggattcccaaaagttcctcaaagacttgatcatggagagaattcaagaggttcagaaaacaacaattctgagccatgagtgcagtgccatcatacatgagaacgatgtctcagaaaagctaggagaccctggttcattgactcttccatgctccctaggttcattgactttcaataaatgcctttgtgacctaggagcataagtaaatctcatgccactctcagtagctgagagattgggttttaacatgtataaatactgcaatatctccttaatcttggttgataggtctgttaaactacctcatgtgttattagaagatttgcctatcaagattggaaatgtggaggtgcctacagacttcgtagtgctaaacacggatgaagaaccaaaagatcccttgatattaggaaggccctttttggctacagctggagcaatcatagatgttaagcaaggaaagattgatcttaatctagggaagaattttgaaatgaagtttgatatcaatgatgttatgaagaagcccacaatagaagaacagaccttcttagttaaggaagtgggtcggctagctggtgaactccaagtggaacttgaagaagcaaataactcaaaaactgttttgaccaagagtggtaaagttgggtatctccctagtgaaactttgagttttgagaagtcattagactcacacaagtcagcagttggctcagaagtttacaagggcttgatggggtctgacacaaaggttatgaaagctaatgaagtaagttcaacacatgctcgaccaactgattccaccaacaactcgaagaagcctccaacttgtcctgaaacctcatgctcgaccaaacaactcaagacgttagatgattggttagaactcaaggagagctctaaatggcaggacaaagccatacaagagctaacacatattgtgaaagagctaaaggatcaaatcaaggagctcaatggaaaagcaaaccaagtactactcaacatcaagaacgcccctgacgatggagccactatacttgtcagcaaagaaggatgtgaattcacgtcggaatggtctagaggagaagactatcttgataaaaaagaagcttactgtgaggacatggccactgagtacccaattgcagacctgtcaagaaaccctaatgagtatgatgatcactctactaaagaaggagaggagacctcatttcctctctacaacccaccctaagcctaatgagtatgagaagtcaagcttagagacttaaaacaagctcacgtgggagcaaatcccatgtctatctttgtacatatctttatttttccttgttgtttttgatgcatttggttagtgttttcaggagataagtataaagagatgagtgaagtggattctagctctgagagtacaacactatactcgaccacagagcaatgaaggatactcgaccatgttttagcttatccacggcaggagatcactcgactgcggtgctggccgcagcagaagaatggaggtcgagtatactcatggcggtgctggccgccatagaggcactgaggtcgagtacccacatgctggagctgagatagaacagggcggttcgtctatggcctgggagcaatcacaggcagccattgacgagcaactacgttcattcttcgactga

SEQ ID NO: 155621 - DNA, 2015 bp, Arabidopsis thaliana landsberg
atgaaaggtaagagctacaaattttcatcttttgattggttcaaactgttgatgactatctattattggttgtatcaaagacatgaaagtgacacaatgtttctatatgaggccaaccgttgcatggtttatttggaagaaagttggaatttttaagattcaattctttgggttcaacttgtaataaagttgttttataaacaaggtttaagttgattgtgaataaagtaatagaatcttggaagatgggtgctgtggtcaacactgtttagagaattattgtctattaagtacttgagtttgttttcgtggattactttctcttgcactaatctgaagaagattgttcttggagacacaaggagcacacatgatgacgaggtttgcttgtttgcacctctttaccatgttcttgtttaccttgctctcaggttcaagttctgcagttataacgacagaaagtcctttgtcaatgggacaaactctcagctccgctaatgaggtttatgaattggggttcttcagtcctaataacacccaagatcagtatgttggaatctagttcaaggataccattccccgggttgttgtgtgggtggccaatagagagaagcctgttacagactctacggcatatctagctataagcagcagtggaagtcttctgttacttaatggcaaacatggcactgtgtggtctagtggagtaactttttcctctagcgggtgtcgtgcagagctttcagatagcggaaatcttaaggtcatagataatgtttcggaaagagctctgtggcaaagctttgatcatcttggggatacactgctacatacctcatccctgacgtataacctcgccaccgctgagaagcgggtgttgacttcttggaaaagttacaccgatccatcacctggcgactttttgggccagattacacctcaagtgccatcacaggggttcgttatgagagggtcaacgccttactggagaagcggtccatgggctaaaacaaggttcactgggataccgtttatggatgaatcatatactagtccattcagcctacatcaggatgtaaatgggtcaggatacttttcgtattttgaaagagcctacaagctttcacgtataatgttaacatcacacggatcaatgaaggtgttcgtgtataatggattggactggaaatcaagctacgagggtccagccaattcatgtgatatttacggcgtatgtgggccttttggtttttgtgttatctcagatcctccaaagtgtaaatgcttcaaaggttttgttcctaaatccattgaggaatggaaaagaggaaactggacaagtggttgtgcgaggcgtaccgaactacattgtcaaggaaactctactggcaaagatgcaaacgtcttccatactgttccaaacataaagcctccagacttttatgaatatgcaaattctgtggatgctgaaggatgctaccaaagttgcctccacaattgttcttgcttggccttcgcttatattcctggaatagggtgcttaatgtggagcaaagacctaatggacacaatgcaattttctgcaggaggagaaattctttccattcgtcttgcacattctgagctgggtatgaattagaagataattcaaggaccttttgtatcttttgtaattatatcttctacttctttgatattgatgttttcgatagaagcatgacttattgttcaattcttgttctaaatttttcagatgtaaataagcgcaagatgaccattgttgctagtacagtgagcctgaccctattcgtgatctttggatttgctgcatttggtttctggagatgcagagtggaacataatggtaacacattgatgactttactatcgaacaatctctcactgttcatctaatcatttggttgtcaataaaattgctctgttacatttgttataagatatcgttaaataaaaaggtgttttttccactactacttgactccttgtatattttt

SEQ ID NO: 155622 - DNA, 879 bp, Arabidopsis thaliana landsberg
atgcctttaactcgtcaacaatggcgacctaaattttctaattccagaaagtaagcaactttaagcttcctcctcctctttttcaattacattaccattttttggtgtagctttttaaatcagtgcatcagaatcgaatctcacaccttttttgttccttcctcttaacccatcttttgatttcacaaaactccagatctgactgatttcatcgaagaaacaaatccgtgggtcattagaaaaatccgattttttgattaaaagatgtggtcggtgatgggtttagtgagacgtacggctatgtcctccaccgtgaataaagcttctccggttaggtctttgcttggtgggtttagatgtctcaacgttgagtctaaggaagaagatgagaaaaaggatatgactgtgttagaagctaagaagttaatgagattagtgaatgttgaagatatgaagaagaagcttattggtatgggtgataaagaaatggttacttacaacacacttattgaatcatctcaaggtttaggtatcgctagatctcttgatgaagctcatgcttttgctcgtgttcttgatgatgcgggtgttattttgatctttcgtgataaagtctatcttcatcctcataaggtttgtgaaatcttacaaaaacgcatctgttttgaaaaccctaatctctttgtttctattaatgagactctgtttcttgtaggtggttgatttgattagaaaggcagtacctttaggtttgaatccagatgatgagttgattagagaagagtttgataagatgagaagtactcaagccccagattgatgtgttagctcatcaaaaagtgaaaaagattctatgggctggtcttggttactcagtgg

SEQ ID NO: 155623 - DNA, 572 bp, Arabidopsis thaliana landsberg
cacatcaatatatatctctctttctctctcttcatttgatagatttgaagatttgagaggagagagaggaagaaaaaatgggagagatgaagagtatgcaaatgggtgtgattggagcattgtttctatcagttgcatcttctgtctccattgtcatttgcaacaaagctttgatgaccaatcttggtttcccttttggtaattactagtacttttcttctgttgctttgtgagaatatattttgtaagatctttatcaaaaacccgattattcgtcttaggattgatcgcatttgtgctatggttttgatacagcatcaacacttactagatgtgcattgatggtaacatattgcacacttcacgtggcatataaactaaacttctatagaataaaccaatagacatgagaactgtggttctctttggcctcctgaacggcatttccattggtcttctcaatctcagcctcggctttaattccatcggcttttatcaagtatatatctatgacatactttagatcattgaacacttatatgactcacccatttgatgtttgaccattacta

SEQ ID NO: 155624 - DNA, 1525 bp, Arabidopsis thaliana landsberg
ttttaagcatttatgtgtgagaaaacttctatgagccatactgatgttgtcttttttcttggatctttctaaggaatgtcgtgaagctgttggaggccaaggtttgaaaacagaaaaccgagtaggtcatttaaaaggagaatatgatgtgcagactacatttgagggtgacaataatgtactcatgcagctggtaggctaaggaatataatcaaaggtgaactttctttgttttgacaatacaatttgacttatccattcttatggggaacttaggtgagcaaggcactttttgctgaatatgtatcgtgtaagaagagaaataaacctttcaaaggattgggattggagcacatgaacagtccacgtcctgtattgccgactcaactcacatcatctacactaagatgcagccagttccaggtcagaaatactttcactctcatcgtttattttagatgagcttaactttttgttgaacatctcttgtaatttgtccctgccagaaaagtgtgttttgcttaagagagcgagatcttctagaacggtttacttctgaagttgcagagcttcaagggagaggagaaagcagagagttcttattccttttggttagcatttcttctcacataacctttgtttccggtttctcatatagtaatggtttttttgcttctcctctgcatctcctccagaatcatcaactttctgaagacttaagtaaagctttcacagaaaaagcaatactgcaaaccgttttggatgctgaggccaaattgcctcctggctcagttaaggtaaatatgattactgtcaattagttgaatgatggttgtttttcttctagctaagggtcactgaagaattcagttaattagtttccacatcatgtgatttactgtggaataactgattatagtcaagaaaatgtagcaaatgtgattgaaatccagggcaacaccaggtgattgaaaatgattctataaacctgctgcatctttctttacagggctgatttgtagactctaagagtgaagactactacaggaggaactaaaccaaactaataataaccttcatgtttgcattttgatgacaggatgtgttgggtcttgtaagatcaatgtacgcattgatcagcttggaagaagatccatcgctgctaagatatggtcacctctcaagggataatgttggagatgtgaggaaagaagtttcaaagctctgtggagagcttagaccacacgcgcttgcactcgtcacttcattcggcattccagactccttcttgagtccaattgcattcaactgggtcgaagccaatgcttggtcttcagtttagttacctgctagtaacaatctcttccataattcccatatatctcttataaaagttatgtttccacaatatctacagaaactgttgtaagctcgtcataataaaagggtatatatgatatgtatccagggtttattctttacttaaactggtccaaacaaaaatgtttggtaataatttcaaatt

SEQ ID NO: 155625 - DNA, 930 bp, Arabidopsis thaliana landsberg
ggttttttcgagaaaccgataaagcttctggtcaagctagaggctttcacagctgtaatacagaattctccagttccattgaagtcggagatcgtaccgtcaccggaatctgatttcaggtaagcttctcttcttattggaatcgagatttgataacacaaatccgaccaaagattcgaaatttcgagatttgtctggttttagtgtccagggtctttgtgggtttttgaagaacgagattaaagtttggttatttgtagaaattgaaaagtctctgttttgatgaagggctcaggttaagatgagtttaagtagagcaaaggatttgagacttccgttgatgaatttggttagacttaaaggtacaccaattttggagcaacttcatttagaagaaaggcttcttagaacatcttctgataattggtgcattgttaatgatggaaccaatgttcctaccattgtgatgggaatgtcagggtaaagaatgaatcatcttttcatcaattctattcgaaatcgtttgcgcaaaatgttaacttttgtgtgttgttgtttataggaagccttctcagcttcttgaggttggaccagttatggaagatcgaataccggtgattaaacgatttacgggaggaggaactgtgattgtggataagagtactttgtttgtgagtttgatttgtaacaaggatgatgtaccaaatgttcagccttatcctcgttctgttatggcttggagtggttcgttgtatgatgaagtgtttaagagtgttaatggtttccaactacgtgagaatggtgtgtgtgtgtgtgtgtgtgtactcaggcttgattcttcttctttgtccacaatgaaaatgttttaatgtcatttggatttgcagattatgtgtttggtgatcgtaagttcggtgggaatgctcaatc

SEQ ID NO: 155626 - DNA, 1307 bp, Arabidopsis thaliana landsberg
aagacatgtcgccggcagctacggagacggagcgatggtgcgttgtaactggtggtagaggattcgctgcaagacatcttgtagaaatgctcgtacgctaccaaatgttccacgttcgtatcgccgatttagctcctgcgatagtgcttgatcctcacgaggaaactggaattctcggtgaagcaattagatccggtagagttcaatacgtctccgctgatcttcggaacaaaactcaagttgtcaaaggtatttttgcttcgaattcaatttagttcagtgattcgtcgaattcgtttttgtatctgaagatatagtgaaacaggttttcaaggagcagaagtggtgtttcatatggcagctccagattcatcgattaacaatcaccagcttcagtactcagttaatgttcaaggtttgaagaaacttcaatttttgcacatttcgtttctgtcaaactgatgaattcagttagttcttgtgtttatgggatttttaatgtacagggacacaaaatgtgattgatgcttgtgttgatgttggagtaaagaggcttatttacactagctctcctagtgttgtgtttgatggtgttcatggtattttgaacggtactgaatcaatggcttacccaattaaggtattaattacgcttttggtgtgaactttgaatttgatgttttgtctttctattgttgtacagaactatggctttgagatgattctttgcttgttttggagtttggttactaatattttcttcattctattcagcacaatgactcatattcagcaactaaagctgaaggagaagagttgatcatgaaggctaatggtagaaatggactactcacttgttgcatacgtccaagcagtatttttggtcccggtgatagattattggttccgtcgcttgttgctgctgctagggctgggaaatctaaggttggattgttttctttgtttaccgttttgctcctctatgtgctgtctgccttcctttttaccttttttacctttcctcttctctcttctcttgatacttttgttactctcacgaaggtagctgccctttattgacattattatctaaacgtgtttgaaagtcatgaccatgctgtgcatttggtagatagttctgtactatgaagtttttctcagaagttatgattaactctttggaaacacacagattgattcacagggaatggagaatttttttttaccattaaagccataactgtgaaatcgtttggtgacagtagagcggagagacaacaatttatgtttgttttacgcaaaatata

SEQ ID NO: 155627 - DNA, 1953 bp, Arabidopsis thaliana landsberg
acttgtactattacaatgggaagaactgtctttttgccgcggctcaaattggtcaagcctttagaaatgaggtaatgtattactttgcttgatgtatgggatgtcttcatctcaatcttctttaagaaattcttttctgcattatgtctgggttttaataagtagcatattactcgcagatatctcctcgacaagggcttcttagagttcgtgaattcacgctggcagagattgagcacttcgttgatcctgagaataagtcacatcctaagttctctgacgtagcaaaattggaattccttatgttcccaagggaagaacaaatgtctggccaatctgccaaaaaactttgccttggtgaagctgttgctaaagttagtatttgtaatcatattcgcctacttaattctactaagaactcgcacacacccatttttatatcttattgatgcctgacactgaaatcctattcgtatagggtactgtgaacaatgaaactctaggatacttcattgggagagtgtatcttttccttactcgtcttggcattgacaaggaacggctgcgcttccgtcagcatctagcaaatgaaatggcccactatgcagcagattgttgggatgctgaaattgaaagttcatatgggtggattgaatgtgttgggattgcagataggtctgcttacgacttacgtgctcactctgtaagaacctcaccttttacttctattttcatcatttcgttttacagctagataattaatgatcaaaacccgtaagtgttcctgtttaaattcactaaagtatattgttgatcaactgttgcgcgacaggacaaaagtggtactcctcttgtggctgaagagaaatttgcagaacctaaagaagtagaggtattttagtgaacagattcattcatctctgtctttattacttgtccttaacatggttatcttttatatcagaaacttgtgataactcctgtgaagaaagaactgggtcttgcattcaagggaaatcaaaagaatgtggttgaatctttggaggttgaactcttaactgttttactgaataacttttttttttaataatatggtgatggtttagaataaatatcatgcttcgtgtaatgttttgttaggcgatgaatgaggaagaagctatggagatgaaagcaaccctggaatccaaaggggaagtggagttttacgtgtgtaccctaaagaaaagcgtgaacatcaagaaaaacatggtgtctatatcaaaggagaagaagaaagagcaccagcgggttttcactccatcagtgattgaaccatcgtttgggattggtcggatcatatattgtctgtatgagcattgtttcagcacaaggccaagcaaggcaggggatgagcagttgaacttgttccgtttctctcctcttgtagcacctatcaagtgcaagattttcccgcttgttaaaaaccaacagttcgaggaagcaaccaaattcatttccaaggaacttaaatctaatggcatcaaacaggatgttgacatcactggtacgttaaacatattgaaacttaactttataattttaaaatggtccaaaccgagtaagaaattgtgtatgtgtatgtgaacaggtacatcgataggaaagagatacgcgagatctgatgagattggtgtgccatttgcgataacagtggactcagagacatcagtgacaatcagagaaagagatagcaaagaccaagtccgagtcagcttgaaagaggcagcttccgtcgtgacctccatggctgaagagaagatgacgtggcaagacgtttgggcaagcttcccactccactcttctgctgctgcagacgagtagctagctatcttggcctatatatatgatgagggtctttcatgtttatgttatttatcttcaaacaattaattattgcagatatgtaacatg

SEQ ID NO: 155628 - DNA, 677 bp, Arabidopsis thaliana landsberg
  unsure (1)..(677): unsure at all n locations
gggacttgatgggaagatatgtgtgttgaagaagatcttgaagggtcttggagtttgttgagtcattgttcgaatccatccatagagaagtagtagaagaagtttcaaacaagcaggaagctggagaaattgatggagagacggctaaagagaaggagatctctgctctgctctatgcacttcacttgaatatgaggtggaagaagtatctgattgtgtttgatgatgtccgggagatcgataactgggacgagaaacnnnnnnnnnnnnnnnnnnagggtgaaaaatggggaaaatatctttcagatggattccctaaagggtctggtgggagggtcatatacacgaccagagatgagaatctggcgaagaaccttgttgttcagaaacatgagatccatcgtctttggccgctatctgatcatcagagtgtctggaagatatatgatgcagtggttcaagataaaaagaaagagtcaccaaggaacgacaggaaatgtatagatgagctgatgaataagtctcgtggtcttcctctggctgctagacttttggctgagcttgatcccgtgttgtttgacgatgaaaaggctgaccagaacggttctaaagatggaaaaaccgactcagtcgacaaccccaattcagaagagagtaaaactactcaacctctgtag

SEQ ID NO: 155629 - DNA, 1369 bp, Arabidopsis thaliana landsberg
  unsure (1)..(1369): unsure at all n locations
aatggttctttggtctggtcctaacacgtttatgggatggctcgttgtgttgcagaaatgggaagatgagcaaggtcttgagtttttgaagtcggtgcctatgtggttgaagatttgtgggattccgattcagtatctttgtgatgggacggttcgtgagattgcttcgtctatgggtgaggtaatggaagttgaattagatgatggaatggttgatttgagttctgtgcgtgctcgtgtgaatgtttgtgtggatacacgtttgtgttttaagaaagtggcgaggtttgattctggagaggttaagattgtgagttttaggtatgaggatattggtatgagtaaagcgaggtttaagttctgttttaattgtggggatatgaatcattaggctaggaattgtttgatcccttgggttgatgttcctgatccttatgaacgttctctttcaccaccgcctcatgagtctaactctgatggttctgctgagggcaactgtggtgatggtggaacttcttctggtactttggagctgctcgaattggtggatgcggttcaggactttcctgttggggatggtgagcagctcgaattggcgggtgtggttcaggacttgcctgttggggatggtgagcannnnnnnnnnnnnnnnnnnnnnnnnnnggaagctaatgctacgcaggtggattctgaaatggttggaatttcatctgaggggtctaaaaggaagtttgatgcggtggagcagggtgatggaaatccggaaaagcggcttagaggaatcactgatgcaactgagggaggaagcactgacgcaactcagggaggaagcactgatgcaactgaggagggtttaggggttagccttaagccacttcaaggagaatgatcatatgaaagttaggactgttagggctctgggttataaagacgtttcctaacagtgtttaatgtcttatagggttatccgaaaggcatagtttgttctgaaacagtatgtataaaagggtactacgtaggtcgtcggtagtgtttctaggttctgcaatcgttttggtccacagcggagatgagatcgtaatgtagtcaatgctgggtatagtgatttggtgtatgccggattgctgggtttagagtttcattttgaaagcattatggtctgctcttgctgtcttactgtttttctctagatttctgtaagacttcagtttctgcaaactctttacttgacttaatgtataattaagttattaagtagtttgttttctctcgtttgccgcaatcactactcttaactgattccaactttcccagtacacagtgttacttataaaaaaatttttataacttatataagcacaaaaatttg

SEQ ID NO: 155630 - DNA, 1329 bp, Arabidopsis thaliana landsberg; identical to SEQ ID NO: 11997
  unsure (1)..(1329): unsure at all n locations

SEQ ID NO: 155631 - DNA, 3941 bp, Arabidopsis thaliana landsberg
atgcaggaagagaaggaaaagaggttagaagagctttttgagtctgagattgataatgcagcagatgacaggcatggacccatggaggaaattccagaggaaggtgttgcagcattagctggcaagaagacgatagatgttctatcagctgctgattcaattatagatgctctggaagtagcagaagatgaaacaaagcgtcatgctgcttatgaggtgggaatcgttactttgtttgtttatctatacatatcgacatgacatccccctagttggtacttcgtttttggctaatttggagttgaatttaacacaaaatggttatgccaatatctacggttgctactttgtttcctacttgttctttgcatcgtgatttttctttcttccaatcttcaggaggagaaaacaaagggaaaagttcctgaatacctacccaacgctgtgatgttcgggctttctccgtccgaatatgttctcagggccatctcaaatgtgagaacaaatgatcttgagcagactttgctggtaggttgcctttcttccatcaaaccatcgttttactagttacttggttgcacccaactcgtactagatccatggttatgttaatcaataccctttcctcttttgggttttatgtaggctctaccattctcagattctttgaagtttctttgctacatgaaagactggagtttaattcccgaaaaggtaaattatatactccttttgtgtcgtagattctagattttagctctgaagggcttatagatatagcgtcgtgttgtaaagtagaatgtactcgatctgggtcatcaacctgttatattcttacaacagattatagatccatccttctcgtcttagaatatctctaatgtttgttaccaaatcctgcaggtagagttggttagcagaatcgcaaccattatattacagacacatcacaaccagttggtaacaacaccatctgccagaccaatcttaagcgttctcagggacattctttactcagaaatcaaggttagcaaagaggaaaaatgttgttgagttgtatatctttttatttctgaattggttttgatatgaatctggaacttatcaggcatgcaaagatacaatcggtttcaatttggccgccatggatcatgtcaaggtaaaaacatttcgcactttggattatgttcatttttagcattttatctcatctttgtgggtatttaaagtgaagctgtggtgttttgcagcaaatgatggatgcaagttctgatgctcccttcaaagatgcaaaggccaagctattggagataaggtcacagcaagcaaaacgtatggcatcacgaggagatacaaagatggagaaaaagagaaagaagaagcagaagaaattagaggaaggacaacatggccatgctttgttctgaggatgtaacttttaaagatggttaatttaaatccaattttgcctgttgtaacctttttttttcttccatttaatgttttactaaatcacttcgtggaaatgtcaaatgtggctcaaatgtggaaatgtcaaatgtcaaacgtgaaattcatatacgaaagggtcaaaatataaattttcgtttacaaagggtcaaaattgtacatttcttaaaattaaagggccattcgtgaataaatgatatgtttgtggtttaagactgattaaaccagtctggtttaattccgagctccactaatttccggttaacgtaaaggtctttgcaatggcggaacagtgatgacggcgacggtgatcgaatggtgagtttcgtcggacaccgtcgcttttacttgattctcgcgcctacctcaaggtctctttctctgctccgtatatacaatatacatatacacacaaaacgatcgagattatgagcattacacgaatttttttcttacaatttggatttcgatttctgaaaatattctcactcatatagtgaaataaaagcgtgtgaaatgggtttatgataaaggaaataaaaatttcatcttgggtcaattttacagaaacaaaccccttgcaatatatcatcaagtgattattgttcattcctgagttacacaagctttgaattttatgttttgcaatttcttgtggaggattactactttcagttgtttgtgttaagagttctgcttcaatgcaagtgactatgcctcattccattatgtctcttgattacacagagaaagatgactactcttcttcctggaatgcacaatttagtagacctgatggtggtaagttaaacctctgacactaagtacatggaagtgacacttgagatatttgcttttgttttcagttgaagccggagtcagaatttgcatatgtatttttggctaaggtctcaattttgacattttgttgctctagttgtttggcgttacaggtctttcctagtacccatgatgaatgatactgatccgctaaaccaggaaattaatatcatgtttcaatagtctcatcaagttcttcgataagtttttagcatccttcctcctgcttaaggtttgcttgaaaatatcattcaagagcatgccaaactgagtggaaatttttttggtcccagggttggtaatttgtttgataaagtcaagtaatagcttgtttatatattaatattttaatcataaaatatggtactctatctacacatgcacaatctaaacccttcacagaagtcaagttgtgtacagaatatattttttttttgtcagttttctgtttaacctacttgggagaatttcgtggagatggttgatcaacaggtaaggttttggttccttgttgttctttctttctctggtagcaggtttacattgtttgacattttagaatagagttaattaacgctcaacaaaaaatagagttattatcctctattcaccaaatttggagcagttggctcattgctttctcttcataaatacttttaatcatctcatctcttcattgatatgatattatagtcttgttgtttgtttaattgtctcatgaaaagttcaaatctttgttttgaaagctctcaaagtgttaatcttttgtagctgtttccattttttgaagcagaataacagagagattacatgttgtgtgtgtttagaaggaagcttggttgccttttttcaagacttagatgggttatcaagaaacgggtgagggctagagttatagtcaggaggttcaggaaagcaaggtggagagctcgaagaaaagagagtccggaatctgaagtttcttctatccatctgagctcaaactctggaagacatattcgggttgcaacgtttaacgtggctatgttctcacttgcgcctgttgtgcaaaccatggaggaaacagcttttcttggtcatctagatagcagcaacatcacatgcccttctccaaaagggattctgaagcagtctccattacattcttctgcagtcaggaaaccaaaggtttgcattaatctcccagacaatgagatttccttagcacagagctacagctttctgagtatggtagagaatgataacgacgggaaggaaaacagaggaagtctctcgatgagatctcccgtgtgtcttccctcttgttggtgggaccaagaaagctttaacggatacagcagcagaagaagcatagctgaattgttaagagagttggatgcagacatcttggctttacaagacgtgaaagcagaggaagagacacttatgaaaccattatcagatttggcttccgccttaggtatgaaatacgtgtttgcagagagctgggcgcctgagtatggaaacgccatactatcaaaatggcccataaagaagtggagagttcagagaattgctgatgtagatgattttaggtaatacaaaaaatctcttttgcttatcttacattgattttcctcttccccctattc

SEQ ID NO: 155632 - DNA, 472 bp, Arabidopsis thaliana landsberg
taccttaaaaaccaagaggctttgtcttgaaaccattatgtgaatcaagaaaacttgttgctcatcttgtgatcaattttgtagaatgttgtgctttgtaagatatatagaaaagctacttcattgaaagtattggagcaaagggcagagatggaagctaagatgaatcaaacatgtcctaactctcctctttcgtcttccgagacgatttctttcgttggtaaagaagaaaacatgatgacttcgttccgtgctcctcaagtaatagctatggaagaagcaaacaagatccaaatgcatcaagaaaatgcgaaaaccgaagaggaacaaagagaaacagaaaccaaagaaccttcttcatcactgaagctaccgtttggaagtttaccagagctacccctaccaaaaccaggagtagaatggaacaaaatgttgaatataagcccatggctccagaatcttacaccgatag

SEQ ID NO: 155633 - DNA, 1261 bp, Arabidopsis thaliana landsberg
  unsure (1)..(1261): unsure at all n locations
caaaactcaataaaaaccatggcatttggttattctccttcctattgttcgttttggcgcacccttctcgggttatattgtttatttacannnnnnnnnnnnnnnnnnnnnnnnccacccgaagatcctgttaaatgtgtgtcaggaaacacgaactgtatagtcaccaactcattaggagccttcccagaccgctccacgtgtagagccgccaacgtggcttacccaacaactgaagccgagcttgtatctatcgtcgctgcagctactaaagccggacggaaaatgcgtgtaaccactcgatattcccatagcatccctaagctcacgtgcactgatggaaacgacggattgttcattagcacaaagtttctaaaccacacggtgcaagccgatgcgaaggccatgactttgacggttgagagtggcgtgacgcttaggcaattaatcgctgaagcagctaaagttggattggcgttgccttatgcaccgtattggtggggtctaaccgtgggtggtatgatggggaccggtgctcacgggagctcattgtggggtaaaggaagtgcggtccatgattacgtgaccgagatcaggattgttagtcctggttcggtcaatgacggctttgcaaaggttagagttttaagagagactacaacgcctaatgaatttaacgccgctaaggtttctcttggcgttcttggggttatctctcaggttagatcaattaaaaattcatattttgttcttattacgtaacaatatcagtcatagctctaacactttttttttactcaaaaaaggtaacccttaaattgcaaccgatgtttaagagatcgttaaggtatgtcatgagaaatgattcggattttggggatcaagccgtaacatttgggatgaaacatgagtttgcggatttcatatggttaccaagccaaggcaaagtggtgtatcgaatggacgaccgagtagcggtcaacacatcaggcaacggtttgctcgatttcatgccgttccgttcgcaactttctgccgcattagccatcataagatcctcaggtacttctcgtatatcctttttctaagggttcgcgttgacttttaaaaactgaacgtaaaggtacaatcttgttcgtataaaaacaaagaaaaaagggggtgaacataaattccttctggggtgtccccccccccataaagtttatctttaaatcaaagaaaaacattatccgatccagactcccattttgtatgaaat

SEQ ID NO: 155634 - DNA, 4337 bp, Arabidopsis thaliana landsberg
ctgtggatgttgagacagaaagttgtaagagctcagttgtttccgtaacagaagcacaatcatctcagtacgttgaaagaaaagatcataagcacagtgatgtacgtgcaccttcaaaatattttgaagtgaaagctgaggtttctgacttttctgtccagacacgacccggattcaaagatacaaaaattggaattgctgaaaatattcccaagcaaagacctgtcagtcaacctgataaacaagatttatctgatgtttcacctatgcaagagactaccaaagtggagaaagaacctgaatcacttaagaaagaaaatctggcagagtctactgaacatacatcaaaatctggaaaaccagagataaagggtgtttcattaactgaattgttcactcctgaacaagtgagagaacatatccgtggtctccgtcagtgggttgggcaggtttgtggtttctgtaacttttgaggtttacacaataatgtgattaattactagtattcgctttatatgcggcttgtttgattagttttccctttttacatgtactagatgactcatctgcagtatgaggcttgattgagctgttccgttaaacacatttttccatattttatctaaatagatatttgattaatgattgtccttcatgtgcttgcagagtaaagccaaagcagaaaagaatcaggcaatggagcattcaatgagtgagaattcctgccaactatgtgcagtggagaagcttacctttgagccaccacctatttattgtaccccttgtggtgctcgcatcaagagaaatgctatgtactacaccgtaggagctggtgacactcgtcattacttttgtattccatgttataatgaatcccgcggcgacactatactcgctgaagggacccctatgcctaaggcaagactcgagaaaaagaaaaatgatgaagagactgaagaatgggtaaaagcctatccactctgtagacttattttgtgtttgtctcccgtctttgtatgtttttttagttcatgctatattttgtttctatgtatgatttttgcagtgggtccaatgtgataaatgtgaggcgtggcagcttcagatatgtgctttatttaatgggagaaggaatgacggagggcaggctgagtatacctgcccatattgctttatagcaaaagtggagcaaagtaagaggaagcctttacctcagagtgctgttcttggagctaaagacttaccgcgaacaattctcagtgaccatatagagcagcggttgtttaagaggctgaagcaggaaagaacagagagagccagggctcaaggaaaaagttatgatgaggtaatttaatggtggagtttgttaacgtttatttctttcatttattttcacatctgcaagctctttatttttatttttctatttgtttgatctagtgattctttgttagaaacagtatattgaagctgactttgttttttctttgacttgatacgaacagattcccactgccgagtcccttgtgattagagttgtttcatctgttgacaagaagctggaagtcaaacctcgatttcttgaaatttttcgggaggacagttacccaacagaatttgcatacaagtccaaggtaagaatgatcaaggcgtattgttgttactgtatttactgcatatctgcgttatttttctggagttcctctcgtacaattatccttctcactcccttgccattttatttttccaggtagttctgttgtttcaaaagattgaaggcgtagaagtatgcttatttgggatgtacgtccaagaattcggttctgaatgcgcatttcccaatcaacgccgagtttatctctcgtatttggattctgtcaagtacttcagacccgaggttagatcttataacggagaagctctgcgtacttttgtttaccacgaaattctggtaagtccttgtcttctgaaaccttggtgtttaaccaatatctgtgctttttactttctacactgtatggaggatctaagagtataatctgatcctttttatagatcggctacctagaatactgcaagttgcgtggtttcacgagctgctacatatgggcttgtccgccgctgaagggcgaggattatatcttatattgtcatccagaaattcagaagacgccaaaatctgataaactacgagagtggtcagttcatttacctttttgggatgaacttcgtaaactttcatatgaaaaagtcatttacatcatccaactgcccacgttgttattcgcaggtacttagcaatgttgagaaaagcttcaaaggagggcattgttgcagaaactatcaatctatatgaccattttttcatgcaaactggtgaatgtagagctaaggttacagcagctaggctcccgtattttgacggtgactactggccaggtgcagcagaggatcttatataccaaatgagtcaagaagaagatggaagaaagggaaataagaaaggaatgctcaagaaaaccattactaaaagggctctaaaagcttctggtcagactgatctatctgggaatgcttccaaggatctgcttctaatgcatagagtaatattttctttctatgcactagtcctttcctgcatatcagcttaagtaattcgtttttttttttttttttgcctttgtgttcgtgttaatattatttctgtttgtgtttagcttggtgagaccattcatccaatgaaggaggattttatcatggttcacttgcagcatagttgcacacattgctgtacgctgatggtaactggaaatcgttgggtttgcagccaatgcaaagatttccagttatgtgatgggtaagaattgtcctttcacttctggtgtttatttttttttccgctcgttttggcgcttttgttattgtgaattggtttgtataacttggaagcgtttgtggttatctttgtggaagaaacttattggtaaccctttgtgttatttttatacctttcagatgttatgaggctgagcagaaacgagaagacagagaaagacatcctgttaatcagaaagataaacataatatttttcctgtaagttgcattggcttgttttgggtcaggaactgtgacgaggttatgtcgctaagtctcattcgtttttctattttattgtatcgcaaaagataaggtgtgtgatattgtaggttgagatcgccgatattcctacggatactaaggacagagatgagatacttgaaagtgaattctttgatacaaggcaagcattcctgagtctatgtcaagggaaccattatcagtatgatacactgaggcgggcaaaacattcttccatgatggtgctttatcatctgcataatcctactgctcctgcctttgtgacaacatgtaacgtatgtcacctcgatattgaaagtggtctaggctggcgctgtgaagtttgcccagactatgatgtgtgcaatgcttgttacaagaaagagggttgtattaatcatcctcataagttaacaactcatccatctctagctgatcaaaacgctcagaataaagaagctaggcaattgcgagtcttgcaggtactgtaatattcagttttttgttgttgttgttgtgcatggtagatcctcttgaaaaaactgcctcttcttctcttgctttaggcttcttctgatttgagaaaaccattgggctttgttaggtcatatagctcccacaatgtatctgaagtgctaaagttttcatttatctaaaatatgcagctcaggaaaatgctcgatcttctggtgcatgcgtcgcaatgccgttctccagtttgtctatatcccaactgccgcaaagtgaaggggctattccgacatggtctccgctgcaaagtacgtgcttcaggaggttgtgttctatgcaagaaaatgtggtatctgttgcaactccacgctcgggcctgcaaggaatccgagtgtgatgtacctcgatgcgggtaatctctttaacttctgtccctgtctaacattttgcaatcgatctcttaacgggatcattcagtatttgccttttctttcaacaagtaaaaacgtaaaattgaaagtaaaaacgacatttttggatatattagaaccggggcataacatatggcaaagcttttttgaaaaaaatggtccgcatgatttgtattgatcattgtaaatcttctcaattcagggacctaaaggaacatctgagaaggttacaacagcaatcagattctaggcggagagctgccgtcatggagatgatgagacagagagctgcagaagtcgctggaacctcgggttga

SEQ ID NO: 155635 - DNA, 2424 bp, Arabidopsis thaliana landsberg; identical to SEQ ID NO: 3665

SEQ ID NO: 155636 - DNA, 988 bp, Arabidopsis thaliana landsberg
  unsure (1)..(988): unsure at all n locations
gagaaaacaaatacataatttgataaatacagattacagagagcgagagagatcgacggcgaagctctttacccggaaaccattgaaatcggacggtttagtgaaaatggaggatcaagttgggtttgggttccgtccgaacgacgaggagctcgttggtcactatctccgtaacaaaatcgaaggaaacactagccgcgacgttgaagtagccannnnnnnnnnnnnnnnnnnnnnctacgatccttggaacttgcgctgtaagttccgaattttctgaatttcatttgcaagtaatcgatttaggtttttgattttagggtttttttttgttttgaacagtccagtcaaagtacaaatcgagagatgctatgtggtacttcttctctcgtagagaaaacaacaaagggaatcgtcagagcaggccaacggtttctggtaaatggaagcttaccggagaatctgttgaggtcaaggaccagtggggattttgtagtgagggctttcgtggtaagattggtcataaaagggttttggtgttcctcgatggaagataccctgacaaaaccaaatctgattgggttatccacgagttccactacgacctcttaccagaacatcaggttttcttctattcatatatatatatatatatatatgtggatatatatatatgtggtttctgctgattcatagttagaatttgagttatgcaaattagaaactatgtaatgtaactctatttaggttcagcagctattttaggcttagcttactctcaccaatgttttatactgatgaacttatgtgcttacctccggaaattttacagaggacatatgtcatctgcagacttgagtacaagggtgatgatgcggacattctatctgcttatgcaatagatcccactcccgcttttgtccccaatatgactagtagtgcaagttctgtggtgagtctttctccatatacacttagctntgagtag

SEQ ID NO: 155637 - DNA, 1548 bp, Arabidopsis thaliana landsberg
  unsure (1)..(1548): unsure at all n locations
tatatcatttgagttcatcctgatttaaagattgcgtcagtttcatcatagcaatgctatatgatgagtgttctcttgtcttcagtacccaatattggagacgtttgatggcattacatctgagacaatgctgctcttatggaccatgagggaaaagcataacctggactcgaaattcaaaccatactttgactctctgcaagagaatttttgtaccggtaaaattgtttggagaactaaatattcaattcttgtagcagtgtttgtttcaaagagacaacaaacattgattctctcattgcaggtttgagttttggggttgatgcaatcatggagcttgatggtacattgcttttagatgaaataatgcaagctaaagaggtgtgacttgatcccatctcttatcttttggttctgtgatttgtattatgttcttgattccattggcaattgtttgtatatctgcagcttttgcgtgagaggtatgatgaattgattcctcttttatcgaaccaccgggaagtatttccaccggagctctatacatgggaacattacttatgggcttgtgagttgtattactcaaatagcatgcaaatcaaattcccagatggaaagctgaagacttgcttgattcctgtcgccggttttctcaaccattctgtatgtgtcttctctcgttctgcctctggtatactaagtaattcctatcactatccggaatatgataatttggcgggttttgcagatatacccacacatagtgaaatatggaaaagtagacattgagacgagttccttgaagttcccagtctcaaggccttgcaacaaaggggaacaatgttttcttagctacggaaactactctagttcgcatctgttaacattttacggatttctaccaaaaggggataacccgtatgatgtcattcccttaggtagtttaaccttacctcattctgagatcactcaggctggcatgctttttttgctttaagttgtatctcttcctcgcagattttgatgtcnnnnnnnnnnnnnnnnnngagaccgagttttcttggacaactcacatgttacgcgggacttggctatcgagtaatcacaacatcttccactacggcttgcctactccattgttgaactacttgcgcaaagctcatggtcttgttcatcattctgaaacagatgtatatattcttcatcaccttcgtataactacatctatatctctatgaatctaacacttaagatatttttctcatttcttgattcttttaagttatggaagaacttggaagttgagataggagtacttgagaatctccaatccacattcgacgacatgatgcaaaatcttggcgatgcagattctatcgacaggtatcagtagttgtcttgtcatgatatacaaaagctgaaacagagtgaccaattacttagtaatccgtctggtctttacccttttacagagaaaacgcggattgggatgttaaaatagcgatggagttcaaagagcggcagagaaagattgtctggatccagtct

SEQ ID NO: 155638 - DNA, 3902 bp, Arabidopsis thaliana landsberg
ggttggctttctagaatttgaaatattattttgtgggatccaaggtttcacagatcatgctgccttgaagtatttgatgcaaaagaaggatgctaagccaagacatttgagatggattttgcatcttcaggaatttgacatcgaggtaagagataagaaagggattgagaatggtgtagcagatcatttgtcacgcattaggatcgatgatgatgtccctattaacgatttcttgcctgaggagaacatatacatgattgatacagctggagaagatgactgcaaatgtgataagttgcagaatcgaactttagtgtcgatcgacaccccttctatgtcgatcgacactcacatttcagaggaagttgacattcgtagttgcgcgatggtgttgatcgacactggaactgtcgatcgacacccttctgaatcaacaaaaaattggtcaccaactgagaattgcgccgtcacagcggtcgagaaggactacccatggtatgctgatgttgttaattacctagctgcatatgtggaacctataatttcacagattactacaagaagagattcctaagagagattaggcgatattattgggataaaccttatctttataagcattgttctgatggagtttataggagatgcattgctgcaacagaggttcctcatatactatcgcattgtcacagctctaactatgatggtcattttgcaaccttcaagacagtatccaaagttcttcaagcaggcttttggtggcttacaatgtttcgggatgctcagaagttcatatcgcaatgtgacccgtgtcagagaaggggaaagatcagcaagcgtaatgagatgcctcagaaatttatcctcgaagtcgaagtcttcgattgttggggtatagatttcatgggacccttcccaccttccaacaagaatctctacatcctagtagctgtggattatgtccccaaatgggtagaagttatagctagtctgaagaacaattcagcggttgtcatgaaactcttcaactctatcatcttccctcattttggagtgccatgcatagtcattagtgatggaggtaagcatttcaataacaagattcttgcaaaattgcttttacagtatggagttcaacatcgagttgctactccttaccatccacaaacgagcggtcaagttgaagtttccaacacacaaatcaaagagattcttgagaaaacagtgggtaaagcgaaaaaggagtggtcttacaagttagatgatgcattgtgggtttacaggacagctttcaaaactccgcttgggatcacaccttttcatcttctatatggtaaagcttgtcatcttctagtggaattagagcacaaagtagcttggacagtcaagatgatgaatttcgacatcaaataagctggagaaaggagacttattcagttgaatgagcttaatgaaatacgaattcacgcttataacaactcgacgctctacaaagaacgaacaaaagcctaccacgacatgaagattcttactcggacctttgagcctaatgaccaggtacttctttatgattctagactgacaatatttcctggcaaattgtcttctcgttggacaggtccctacacagtccactcggttaggccatatggaacaatcattctcaaaaacaacaattgcgaaccatctggtgtgaatggacagagagtcaaacactactaggctgaagctgagattccagtagaaaagcctttggatctctaggacccaccggttgattaagcaactgcaaagtcaagctattgactataaacaagagcttagtgggcggcaaccaactggtaagtatttctccttttattcatttcattcatttgatttctaacttaggattttttattttataagaatattcagacaaaaaaaaaacaaaaaaaaaaaaagcgtgtcgaccaaaaacacgaaagtgtcgatcgacaccatcatggtatcgatcgacaccactctcaggtggcaactcacgtgttctaactttttaacttttgactatttctctttcgattcctctagcttaataactctggggacagtgctatctaagtcttggtgagtcagttaataacttcatcttttcttttcttatgagtcagttgtgtcattttaacttagatagtcattttattgagtcaaaactttcgtctgaaattatgatctatatctcgagtttattgcctgaattgtttaagtattgcagattcaaatcaatccgactaatgaaaaatccataaggccaatcaacaaacttaaggacatccattcctaacataatccacaaaggctggagctaatctcactgctcttccttttacctcatcaaaatggttagtgctcataggacttgactccttattcatacctgataaatcgactaatgtgtcaaaaagaaaatatttctctcccaaaaaaaaataatatataataataataaataacgatagattgagaagactttcagatagtgtataggggtaggaatgtttcctatgacccattattatacattatttggaacgatcaattacaaaggttggaaaaatgccgagggtgtcgatccaatatgcgagttcccctttgtttactctctaaaaagaataagtatgggagagagaaagaacaccgaaaaagaaaaaaaaatataaagaacggtcaatttatcatggtataatacagaatgagtctagaaggatcttgaatgttggcttgtttgatgagacccatcgatgaaagcttggtggatataattgtggaacttaggtatggaatcaagaatgttttgtaagcttgcagaaaagtacatgttggttaggatttgattagacttgttaggcatatggacttagtttgaatgatcatggcaataggttagagaatgttgggagttcctttgttttcaaaacctcttccacgggttcgacttatgtgttttgcttgagggcaagcaaaagctaagtctgggggagttgatatatcctggttttcactgattttatctatgatttaggtataggatcttgagtccttatgttatttctcgaggctttttagtgtcttttcaggtactctatgcagtgggacaacaatggagataaggagacattttcgagcaagagctaaggaaaaggaagctaaggacgattttggattcaggaatcagcgaggagtgtcgatcgacacactcttggtgtcgattgacaccagtttcggcccagcaaaagttctagacgcttttgagtttacagaagaggaaattttccccagaagatttctctatttgcattattagtccctggacgtttttagggtttatatacaatttttatacctaagtttttatcatccagtttttatcatcaagtttctttcaggttctattgaagcttttgcaaaccctgttactgagagacttaagctatgcatcgattgtttttagagattcatacagttcttaataaagtgaagagatcccttcttttcccttctatatttgctgtgtttatgctttcatactcaaatatgttgcttgcttcaatcaatatgtctcaataatctgctggttaggaatagggtttctcattagggattcatatgggttgctaggttatctgaagaatcggcctatctactaacatgaataatcgaacttgttaataatgcatatttaggttgataatttctcggcttctccggttattcttagcaatagatatagggagtttcgccgaacgccaccggttcttccataattagagtttgagtttgagaatggttcgataacaacctagctttcattagatctactaaccaatagtttcctgagaataccatgttcctaactctttatt

SEQ ID NO: 155639 - DNA, 761 bp, Arabidopsis thaliana landsberg
gagctttgatggtattaacactgaaagtgatttcgtgttcgataaactacaacgatggaatgttgaaagaagaaggtctacgtgaggctcagaagaagaaccgtttgattcagatgccttctcttattgagtactttggttattgcctctgttgtggaagccatttcgctggcccggttttcgaaatgaaagattatctcgaatggactgaagagaaaggagtaagtgtttttctctctcgttcttcggtctatgtacttgtcgaaaaagtgaggttcttgattgtcttgtgtgtgggtttcagatttgggctgtttctgaaaaaggaaagagaccatcgccttatggagcaatgattcgagctgtgtttcaagctgcgatttgtatggctctctatctctatttagtacctcagtttccgttaactcggttcacttttccagtgtaccaagaatggggattcttgaagagatttggttaccaatacatggcgggtttcacggctcgttggaagtattactttatatggtctatctcagaggcttctattattatctctggtttgggtttcagtggttggactgatgaaactcagacaaaggctaaatgggaccgcgctaagaatgtcgatattttgggggttgagcttgccaagagtgcggttcagattccgcttttctggaacatacaagtcagcacatggtttcgtcactgtgagtattgatgcttatgaggagaacctagagaatgccatatcttat

SEQ ID NO: 155640 - DNA, 302 bp, Arabidopsis thaliana landsberg
caaatcactcttcaatggcgatttcttcttcttcctcctctatatgtttcaaccccactcgatttcacacagctcgacatatttcatctccgtcgcgtctcttcccagtcaccagcttctcccctcgctctctccgtttctccgacagacgatctctcctatcttcctccgcctctcgcctccgtctttctcctctatgcgttcgtgattctcgaggtacatatactgatttactttcattgattgcctatctttagttctggtttaagaatgataatacttgtgtggcaaatttgggaatg

SEQ ID NO: 155641 - DNA, 589 bp, Arabidopsis thaliana landsberg
agagagacattaaactaacctttaattccaccgatgaacctttgaaccactccaagagcaaccacaccttcagatccgacaaagaggaagccaaatacggcggaataaaatggatgttggctcaaacaaaccatcacccgcaattagccatttaggatccggccaaagatccactgctaacccctttgcaaattggcgaacccaccaatccatggctcaacttccgccgctcgccggagctacaattcacaaaccaccgaaccgtgagaaacaaaatccaatccactggagtccataaaccagcagagcacatgaaccgtttctctggctgtcgtgaaggagagctgccgtctagcatcgagccatggacctaacacgcctcacaccaccggagaagagagacgctcaccaccacttaactctacagcccatcaactatctttgaagatcttcaatcggaaaaaaaaagcaaaaaaagtagatttaacatctagttttcaagagagagaagagaggttttttttcgggaacgattggcccttttcaagtggaatacgattttcatagctatgtcaagtgtgggtggtta

SEQ ID NO: 155642 - DNA, 5334 bp, Arabidopsis thaliana landsberg
atggtgatggaagaaagatcttgtcatactgctaacagagttggggatgtccaaatgggtaatggtcataagcgtggaagaagcgaagattcatccagcaacaatgttagtataggtgtggagactgataaacaggatatgttgtcaaacaaagcccaaaagaagtgggtctttggaaaatgtgtcaatctttcagctgtggatgccccatgtttcaaagaaatgatgactgtagatggtggtcagatggggcttgagagctctgattgtcatgatttaaacggatggaggcttcaagatgcattagaggaagtacaagatcgtgtggagaagattaaagaatcgtgggcgatcacaggatgcagcatcttgttggatgcttgggttgaccagaaaggccgtgatcttgttacttttgttgcagattgtccagcgggtttagtgtatctgatatcatttgatgtttcagattttaaagacgatgtcactgccttactatcgctagtaaatgggcttgttgaggaagttggagtgcgtaatgtgactcaaattattgcatgttcaacctctggttgggttggtgaattgggtgagctatttgcgggtcatgacagggaagttttctggtctgtgagtgtatcccattgtttcgagcttatgctggtgaagattagcaaaatacgttcatttggagacatatttgacaaagtcaataacatctggttgttcatcaacaacaatccctcagttctgaacattttcagagatcagtgtcatggaatagacataacagtctcctcctctgagtttgagtttgtgacgccatatctaattctagagagtattttcaaggcgaagaaaaacttgacagccatgtttgcctcatctaattggaataacgaacagtgcatagcaatatcaaatttggtgagtgactcctctttttgggaaacagttgaaagtgttctgaaatgtacatctcctctgattcacggtctgctcttgttttcaactgccaacaatcagcatcttggatatgtttatgacactatggacagcataaaggagagtatcgcgagagaattcaatcacaagccacaattttacaagccgttatgggatgtgatagatgatgtttggaacaagcatcttcacaatcctcttcatgctgctggttactttctgaacccgactgctttctactcaacaaatttccatcttgatatagaagttgtcactggtcttatctcctctctgattcatatggtagaagattgtcacgttcaattcaaaatttccacacagattgatatgtacagactcggtaaagattgctttaacgaggcgagtcaagctgatcagatcactggaatctctccaggtgagtgaacttcttgaatttcgatatagctgtttcgtttgcagacacttgtgtggttgaagttgaaccagtgatcaaaaggttctgtggttttaaatctatttgcagctgaatggtgggctcataaggcgagccagtacccagaactgcagagcttggccattaaaattctgagccagacatgtgaaggtgcttcaaagtacaagctgaagagaagcttagcagagaagttgttgctcagtgaaggaatgagcaatcgtgagagagagcatctggatgagttggtattcgttcaatacaatcttcatctacaaagctacaaagccaaattaagtgaagagattgatgtttataaggactgacccattttagtttgtatattcatcaaagctcacacctttagaatcaatgcttggtgaaacagagcagctatgcacatcattatttattccttgttattttgtgatcttttattttgggccagaactctccattagcagcctatttttgttttattggtcatcttttattttgggccaaaacgagatgatggcccaatagcccaaatattagaataatgagaaagagggagtcaaaacaagttcttccacattccctctcttttgggtggaagaaggagaaacaaggggttagctgtgtcctgttttccgaccgactttgtttattcaggtatttcctttattcaggagaaacaaggggttagcagcaaagaataataggttttgtttttagtttgagttttgttcttctgtaaaaaagttgtttgctttgttctttatggaggcgatttctcttaaagatgatgattaattttggttaatttatatggtcgagtttgggtcaattgttgggtttaaagtttcgtttttttcttctctccatgaacttggaatgatttcaattactctgagatatcaagttggtcaattctgtttcgaaatatacgccattcaatattttgattttgatgcatattcctgtttgtttctctaatagtgatattgggttgcagttacaggtaatctgagttgtgagaatcgaaaaatgcttccaagtctgattcattatctgtgttttgtgaattaaacgaaactcttaaaatggctggtactgtcgttgatgttagtgagcatggaatttgtgtggacaagaagaaatcgcgggttaaatgcaattactgtgggaaagaaatgaattcctttcatcgtcttaaacaccacttgggtgctgttggtactgatgttactcactgtgaccaagtttcacttactcttagagagacgtttcgaacgatgcttatggaggataaatctggttatactactcctaagactaagagagttgggaaattccaaatggctgattcgcgtaagcgtcggaagaccgaagattcatcaagcaaaagtgtttctccggagcaggggaatgtagctgtggaagttgacaatcaggatttgttgtcaagcaaagcccaaaagtgcattggtcggttcttttatgaacattgcgtcgacctttcagctgtggattccccatgtttcaaagaaatgatgatggcactaggtgttggtcagaagatccctgattctcatgatttaaacggccggttgcttcaagaagcaatgaaggaagtgcaggattatgtgaagaatattaaagattcctggaagatcaccggttgcagcatcttgttggatgcttggattgacccgaaaggccacgatcttgtttcctttgttgctgactgtccagcgggtccagtgtatcttaaatccatagatgtttcggttgtaaaaaacgatgtcactgccttactatcgctagtaaatgggctcgttgaggaagttggtgtgcataacgtgactcaaattattgcatgttcgacctctggttgggttggtgagttaggcaaactcttttcgggtcatgacagggaagttttctggtctgtgagtttatcccattgtttcgagcttatgctggtgaagattgggaaaatgcgttcctttggagacatacttgataaggtcaataccatttgggagttcatcaacaacaatccctcagctttgaaaatttacagagatcaaagtcatggaaaagacataacagtctcctcctccgagtttgagtttgttaagccgtatctaattctaaagagtgttttcaaggcgaagaaaaacttggcagccatgtttgcttcatctgtttggaaaaaagaagaaggcaaatcagtatcaaatttggtaaatgattcctcgttttgggaggctgttgaagaaattctgaaatgtacatctcctctgactgacggtctgcgcttgttttcaaatgccgacaacaatcagcatgtcggatatatctatgacactttggacggcataaagctgagtatcaagaaggaattcaatgacgagaaaaaacattaccttacattatgggatgtgatagatgatgtctggaacaagcacctccacaatcctcttcatgctgctggttactatctgaatccaacttctttctactcaactgatttccatcttgatccagaagtttccagcggtctcacccactctctggttcatgtggcaaaagaaggtcaaattaaaattgcctcacagcttgataggtacagactcggtaaagattgttttaacgaggccagtcaacctgatcagatctcgggaatatctccaagtgagtgaacttgttgactttcgatatagttgttttgtttgtagagatacttgtgttgttgaatcagtgagcaaaacattatgttgtcttaaaatttatttgcagttgattggtggactgaaaaggcgagccagcacccagagctgcagagtttcgccattaagattctgagccagacatgtgaaggtgcttcaaggtacaagctgaagagaagcttagcagagaagttgttgctaactgaaggaatgagccactgtgaacgaaagcatctggaagagttggcgttcgttcattacaatcttcatctacaaagctgcaaagcctaactaagctaagagcagtgaagagattgtgatgcaaatgtggactgacccgttcagcttttagtcattgtgcagatttagttttggagtttgtattttcttttgttcattacaatttccatcaatgctggtgaatatatacatgaaaatgttaatgcacttattttggttaattataatgagatttgtccttgtaattagatgttcgcaggtgtaggaatgtcttctcttacctttttatcttttacttagactccatgtgctgagaaaaaccactgtcaaatctccaaattcttgtgcttagtagacaaccaaattggtctttttctctaagtgttatattatcacatgtattatgtgatttatgcagggattatgtaatttaaatcttttgtacttaagaaaagaagctgaagtacatttgttggagaagtttaacttgtgagaatgtatgactctcacgttttgaaatctaaagttaggattaccattttttgcatctccttactagttgactgaatttgtttccatttcagaaactaactccagattttacctgttgaatgaatatatgcagttcttggaaaaataacctgagtttggttgcttaatttgtacagggcagaattattcttcttccttaagatatatgaatcattcagaatccgacttgcatcaatcagcagaagacagtccatatcaagaccaaacagtccaacaccaagaatcttcatctgaatcatctccagcagagtcaaactgttgaggtattaactgatattcttccttcttttgtacctttaggatggtctttttaaaagaatcagtttacatgaaagaaaaaatgtatctgcatactaaaccagaaagcattggacccaagtaatcactttcttgaaaggaggctaatga

SEQ ID NO: 155643 - DNA, 1358 bp, Arabidopsis thaliana landsberg
taaaaactcaagttcggatggcaatagcttcttcttctccttcttctcctttttcgtcttcgtcttcttctcatgtatcagtgatcccaacgggacctcaagtgttcatcagttttaggggaaaagagctacgcaaaggcttcagcagttttcttgtgcctgccgtgaagaaaggtaacatcatcgtctttatagatgagcacgaggtgaggggtaaagacctaatcagcctgtttagtaggataggtgagtcaaaaatcgcgttggttatcttctctgagggatacgccgagtcaaaatggtgtttggacgagctggtacagatcaagaaatgcgttgatcaaaagataatcatagcgattcccatcttctacaagcttgatcccgcagtggtcaagggtcttaaaggaaaattcggcgataaattcagggatctgattgagagatatcatcatgaaccagaaagataccagaaatggacggaagctttgacttctgtttcccgaacgtttgcattgtgcttaccagaacacaggttacgatttttcaatcataaaaattgtctgtttcttgtagcacaagataccaagtaagtgtaaaggaaagctactaaacccattaatcttcttttcttttacacatcaaagtgataaatctgagaaggatttcataaggtcaatcatcaaggaagttaagaaagccctgtcaaatatctccagagaaagaaatggagatagagaagaaattgacgactgtttcgtggtttctgaaaggaaactcactaccgatatgtacgatacaccagagtaagagcctttttttcatatagttaaaacattaattagaccatttctcatactacagtttcattcactcgtatatgatatgaataatataagggtaacaaaataatcaaatgatcgtccgtataacatatgttttacatgtaatagagtttcgacgtcgacgatgaggaaggtctcctccaacaatggagtcggagtcggtacgtttaagtcacagaaaccaaatttcgacgatgaagatgacgacggagactcccttttaaaagcgttgattgcgaagatcttcgctagtacaacttccattaaagctgcttacgcagagcttcagagggctcaaagtccgtacgatagcgacgctatacaagcggcggatacggtggtagttgatgttaaaactttatcggagcttatacggagtagtaacggaggaggtggtggaagtggcagtggaagcggtagctcccttgagaatcagccgaggagatcaaaggtgaggaagcaagtgtgggctggagttctcggcatctcatccgactccaccatcatattaga

SEQ ID NO: 155644 - DNA, 489 bp, Arabidopsis thaliana landsberg
ataatagttgttagcttcattggtcatggatgatgaatataccggagaagcaacgggatcttcggaagcaaaggttcacatcatgtacacggaggagacgtacggatgaagaacctaaaacctatcatatcagaaccctttcctgtgctctaggcaggtctgtaatcaaattgctactttggatttcatgggttatagatgcaatttgtattgaatgagattttttttgggtttgatcgctttgattttagggttttgtttctgtaaaatgggggatttttcaatttagtagctgaaattgttttaaagaagagatattgttgtctgattacggattgtctcactttatgtttatagtttggattgctccaacattgattctgtgtgtggatgtgtttgttcttatgttactgattattatacagtgaggaagctgcaaaagatgctttgatttacagttacaaggaagctgcttctggtttttcagct

SEQ ID NO: 155645 - DNA, 750 bp, Arabidopsis thaliana landsberg
tcgtttgggaaattcctcacatctcagatgaactccaatcgcttcgagaaactctaattcctcgggagttttcgatagcatcatcgagaaattgttttcccgttgaacaatggatggtaacaaagatgacgcgttgaaatgcctaaaaatcggcaaggatgctataaaagcaggagatagatctcgcgctttgaaatttcttgagaaagcttgtcgtcttgatccaaatcttctgatcgatgatcttgtttcggatctgaagaagcaatcggatgaaccagcggcggaggaggattcgcctggatctggcgccaacgagtcttctaagccgtcggatcgaccttctcttcgtcaacgtggatcttcgtcatcagccgcgggatcgtcatcatcttcgtcttccacggaagaacaacgaacgatcgtgagggagataaagtcgaagaaggattactatgagatccttggattgaaaagaaactgttcagtggaagatttgaggaaatcttatcggaaactctcgttgaaagttcatcccgataagaataaagctcctgcttctgaagaagcttttaaattcgtctctaaagctttccaatgcttaaagcaacaaagacactagccgaaagtacgacgtcagtggttccgatgagcctgcttatcaatcatgtcgagctgcgagaagaaacaacggattcaacggtttctgtgatgatgaatttgatgctgatgagattttaagaagcttct

SEQ ID NO: 155646 - DNA, 381 bp, Arabidopsis thaliana landsberg
cttagagctctctctcaggcaaaacaatggcgtcttcttcagcgacgctctctctttgctctactttctctgctcattgcaatgtcaattctcgccgttcgagcactatcctctgttctctctctaaaccttcgcttaatttggctaaacctctgactggatttctttctccttccactgcgtcaacatctcgaaccgcattcaccgtcactccgaaattcgcggaatcagtcgttgaagctgaaccggagactaccgatatcgaagctgtggtggttttcgatgtttcggaggttactgaggagaaagctaaacgggaagagatttcgctgttattatggtgagcttgttgaatcaaacgaaataacaaattctcaattt

SEQ ID NO: 155647 - DNA, 868 bp, Arabidopsis thaliana landsberg; identical to SEQ ID NO: 21837

SEQ ID NO: 155648 - DNA, 1797 bp, Arabidopsis thaliana landsberg
ctctcagtgaatccaatcttttacttagttaaagttttggatgaaattatgaatattaacagtaatttctaatttgcagtgagattatgcatgctatgtggaaaccacagaagtttaagtacatttacttgatggcgacgttatacgtgttcacgctaacgattccgtcagctgccgccgtttactgggctttcggagacgcacttctcgaccactccaacgctttctctcttatgcccaagaacgcgtggcgtgacgccgctgttatcctcatgctcattcatcaggtatacacatataacatttttgttctttcttttttaataaattttgatcatgagagattaatgcaacgtgttcttgttcgtgcagtttataacgttcgggttcgcttgtacacctttgtactttgtgtgggagaaagtgattgggatgcatgacacaaagagcatttgcttaagggctttggctagattgcctgtggtcatacctatttggttcttagctattatcttcccctttttcggtccaatcaattccgctgtcggtgctcttcttgttagcttcaccgtctatatcatcccatccctcgctcacatgctcacttaccgatctgcctccgctcgtcaggtataacatctttactagctcactctcttttagcgtttcaaaactcgaacttaacctaaaatacattgagttaccaataattttttagaaatgaaatgaagagtcggtggaggaatattatagttggggggtagggttgtgaaattggagggcaaaaacgtcttttgtggaagatagatggggttcagtgttccgtatcttacggaagataggatcatcacccacattccttactggcgtcccctccaaataatatattattgagttggtttcagccatttctttatttggttacatttagaagaaaaatacaatatccggttaggttagtattagtaattgaccatgatttctttttctttctctctttcaaaacagtgtatattaaatttacgtaagataaaagtagaggaaaataggggagaggaataggtaagagtcataatcagaaatgaaaaggagctgtacaatagggactctatgcctaacattaatctaaagtgagagtctgagtatgacaaatcacaatcatatctctctctctctctctctatctcatgggtcaacaaagctttggattttgtccattactatacgaccaaaactctaaaacacttacacactctctatttctttaatggttctctgattatttttgtgttttggatctttcttgtagaatgcggcggagaagccaccgttctttatgccgagctggacggcgatgtacgtgttgaatgctttcgtggtggtttgggttcttatagtcggatttgggttcggtggatgggctagtgtaaccaactttgttcgtcaagtcgacacttttggtctctttgccaagtgttaccaatgtaaaccagctgcagccgccgcacatgccccggtctccgctttacaccaccgtctttgagagatcgagtcagggttcttctaatgcgtttgtggagggttcttaaaattatttgttcttcttttgtgttttgtgttcgtatacgtgaagggagtaaaagtcacgaaaatagtgtactttttacacacccctttaaatgcgtgctaagctcttaattatttttttctcttttggggttttgtatttttgttttcactccttagttttttttttaaaattgaatagtcgataatatgtagtgtgtgatttcttaa

SEQ ID NO: 155649 - DNA, 1383 bp, Arabidopsis thaliana landsberg
  unsure (1)..(1383): unsure at all n locations
agagtaacacattcttctccgacgagaagatcgaaaatcacaaatcgtcaccggactcttgcaatcgagaaccatctgtcgcctttttatactcgaatacgagctcgtgatcaatggcgaaagctttggaatcaaactcgaaatcaaggaaagaaaccatcttgatcaaatacgccatcttctcgcgacttctcgttctcttcttaaccattttgtggcggagcttactccaaccgtacgatacatccgctgcactgaatcctccttgcttgtatcacaaagaagattcttttccgtttctagtagccaatgcagcttcgagatcccttgagaacagtgttgtctgggacagtgtttattttctccgaatcacagagtgtggctatgagtatgagcagacttacgccttcttgcctctgcttcctttcttcatctcgcttctctctcgcacaggttttgtaatttagacatctacccacttgattccttactttggttgtatcattccggtagtaactgattctttttggattcagtttttgcgcctttggttccattgattggtcttcgagctgtgatggtgttgtctggtttcactgttagtaacttggcgttcatatttgctgctatctatctatttaggtacttctttgacattcatcctaaatcgattattgtgtctagaaataagtcaagtcaagagtcttttgagctctacaagctaatgctgtttgctattcaccgtgtcttacaccagtcgttgctaacagggtttcagttattatcttgaaggatactgaagcatcattcagagcttcgattatcttctgtttcaatccggcgtccatattttattcgtcaatgtaatgtgtttaagccaatgatctcttaagttcatttgctgaaagtaaatatgttcagtcttatcagaatggtaactaactgaagaccaaactgtttctttgtgactttcagatattcagaaagtttgtatgctcttttctctattggaggagtgtatcacttgttatctggtaccagcaatgtaggcgttnnnnnnnnnnnnnnnnnnnnnnnnnnnnnnnnnaatggaattcttaatgctggttatatctgtttccagacaatgcatcgagcatatgaagctttatatcagaaacggcgtgcttatgtaagttatacatatttcattcaaatttcagaactattgctgcaattcaaactccggattttttcggtagtatgcttaatctgaaacattctatttcctacaattaagatctttttagaagatagaaaaggacccactcccccagatttttagttgctttgttaaatatataaatatctgatggattcctacttaactgttatgatggtatg

SEQ ID NO: 155650 - DNA, 397 bp, Arabidopsis thaliana landsberg
tgtgtttatttccctgttatgcagagctaccgactcatggagtagcggccggtttaggagctattgaaggagtagtgatggagattgtgggacctttgctctggtctacacagtctacgccacagcggctgatccaaagaaaggttcactcgggaccattgctccaattgctatcggtttcatcgttggtgccaacatcctcgcagcgggtccctttagcggtggttccatgaacccggccaggtcatttggaccagctgttgtcagtggtgacttctctcagatatggatctactgggtgggtccactagtcggtggtgcacttgccggactcatctacggagacgtcttcatcggatcctacgctccagctcccaccacagaaagctacccttga

SEQ ID NO: 155651 - DNA, 1412 bp, Arabidopsis thaliana landsberg
ctgatggctaagagctttgcatatgtacctatgctttcacgaactcatgggcaggtaatgtccaaagagaagtattattttcagttctatctttatctttgttgaagcaatggtcatgaattataatgcagccagcttcacctacaactttggggaaagaaatggcgatttttgctgtgaggttaagtgaagaaaggagatatctttcagaaactaagattaaggggaaatttgcgggtgctgttgggaactacaacgcgcatatttccgcatactctaatatcgagtggcctcatgttgcagaggagtttgttacttctcttggattaacatttaacccatacgtgactcaggtatatatatagtttctcttgatcaaaattttcctggtggaatgatttgtaaagttcctcactggtggtttttgcagattgaaccacatgactatatggctagactttttaatacaattagccaattcaacaatgtcttgattgattttgacagagatatatggagttacatatctctaggttactttaagcaggcaagtattaacaaaagtatgtccgagtcatttgaaaaggaatgggaaaatctgtctcattgtttgaaattttgatgcagataactaaagcgggtgaaatcggatcatcgacaatgcctcacaaagtgaatcctattgactttgagaacagcgaagggaatctaggtaaagcaaatgcagagcttgcttttctcagcatgaagcttcccatttcacgaatgcaggtttgagcatttttttcatactccactagattctgctaacagtaatggtgaagaagtaagtaagcctgaaattgaaatgtacatatctgcagcgtgatttaacagattcaactgtcttgagaaacatgggtggagctttaggacactctcttctggcatacaagagcgcgatacagggaattgggaagcttcaggtattattatttccgttgccctaagaaagaaaggtcttcacttgtcatagactaaggatgttcttgatataggttaatgaagctcggttaaaagacgatttggatcatacttgggaagtcctcgctgaaccgatacaaactgtaaatttctcgaaactttctagtcttattataatgatcaagttattattccatgtacattggtaactgaaggaataaaaaaaacaggtgatgaggagatatggtgttccagagccgtatgagaagctgaaggagctaacaagaggaagagctgtgaatgaagaaagcattagaaagtttattaaaagtttggaattgcctgaagaagcaaaagaccaacttttgaagctaactccacacacatatgttggcgctgctgctgcattggcactagccgtggatgatgctgtgcacttgggacattaa

SEQ ID NO: 155652 - DNA, 987 bp, Arabidopsis thaliana landsberg
gttccgggacagtacgttgatgtcactgggatcactcgaggaaaaggtttttcaggtgaaaccattctcaggggctctaaagttttatcttttctttgcgatgataagttgaatagtctagtgacaatgtggcagatatatagaatggagtgcggatgaaatagtgtttgtgcaaagtaatggctgtgttattgatgtcttttgctgtgtaatttgcagggatgcatgaaaagacatggtttcagtggaatgccggcatcacatggtgcttcattgtcccatcgaagcgggggttccacagggcaaagagatgctcctggaaaggtatgtgtcaaattgctaagattcttgggaatttttctccaaagcaaatgacactactgacttgataaatacacttgagtaggtgttcaagggcagaaagatggctgggagaatgggtgcagatcagaggacagtaaagaacgtttgggtctacaagatcgatcctgcgaggaacctcatgtgggtgagaggacaagtaagtatctcaatcccagttccagtctttggctaggatctgtctgtcacaaaacatgagctccatttctcttctcttattagtaggtcatgattgtgatttggtgttgttgcaggttcctggtgcagaaggaaactttgtgttcataaaagatgcatggtgcaagaaaccagacatctcaaagcttccgtttccaacttacttagctccagaagatgaagatccatcagaattagaaccgttggttgcagatcttggagaagttgacccatttatgttggcagagtgatgaaaacagcatgatcttgatctttatttgggcttttacaatgattagagaccagaaagaagctgtggaagtgaaggaatcacagagctaaagctttttgcagatgaatttgtctttttcttattttagttgtttggatgtatgatttgaaaacgattaaatagaggaatttaggctt

SEQ ID NO: 155653 - DNA, 520 bp, Arabidopsis thaliana landsberg
ccaattcaaaaaaagaaataacctaaacgtgttcacacagaggtaagctcgctcctactcgccgcctcatctgagtcaactccgagtcagctatttttccccaccggattctcacttttgttcctctctgtgacagatctcgagatgaaagataaccaaacggaagttgaatcgaggagcactgatgataggtatctttatatttatccgtaatctcgattcttagattcaatttgtttccgtagttttgaaatcgtcttttatgattctcagattgaaagttagagggaacaaagttggaaagaaaacaaaggatccaaacaggcctaagaaaccaccaagtcctttcttcgtcttcctgtaaataaaaatcactaatctctcttcttcttttttcttcactaatttgattacagtaattaatatgctctaaatcattaccctctcggattgattaacctggacaatttccatggggggatagtggcctaccatggtggtaacaaataccttggtaatg

SEQ ID NO: 155654 - DNA, 1437 bp, Arabidopsis thaliana landsberg
tgcctccgcttccaccgtctccgccgctcgtccggctctccttctcaagcctaccgtcgccatctctgctcctgttcttggtaaaaaagccttccttgatctttctcagatctcatcttttagtagaaattcattctggttatgtgcaaagtgaagaagatctttgtttgcttatatttgttgagtggttttgaaaacatgtatagagataagtctagtttggtggtgaatcaacaagaagtcaagaaacaattttgatctaaaggtttgattgtagtcagaaccaaacattaataatagaagtattgtgtaaatgagagtgtgattttagaccaaactttagtttagtggagaatcaacaataaacaaatgttgattgtaaccagtttaactattgtttgctcaggtttgcctccaatgggtaagaagaagggaggagtgagatgttcaatggagacaaagcaaggaaacgtctcagtcatgggggctggagtttcagctgcagcaacagctgctttgacggcggtgatgagcaatcccgcgatggctttggttgatgagaggatgtcaacagaaggaacaggattaccctttggtctaagcaacaacctcttgggttggattctgtttggagtctttggtttgatctggactttcttcttcgtctacacttcatctctcgaggaggatgaagaatctggtctttcactctgaaggaagaatcaatctttcgtcttctcatttccattttcatgtgagaacatgaatcaaaagtgttcacccttctagtttcttgtaattgttaagtaaagactaaaaactattttcatgtgtgtttactttcccccattctctttatcttgtcataacattgataaggaggagattatgtgattattaaatatcatgcatgacatgttcatcaaaaccaaacaattgaaatggatgtattcaaaagcccatccataatggtcagtgagaaccaaattgataaattaatcttacatttacatttcaatcactgattattacacaagttttagagtctcttgatgaatacacatatagttaacatggggtaagacaataaagcaaattatcatttattcattcattacataatatatttggtagtaaaccatcttcactccattctccatagatgatcaataaagaccaaactcactttttaccatgcaaattatcaaagtaacctttaggatcactctcaaagttatctcttgaaatgtaagaagatccattgctccctggtgctaccatgtagccacctccgcccccaccaccaccgcttttccctcctccaccgcaaccacctttcgctcctccaccgccgccgccgcctcttcctcctccactgccaccaccaccaccaccttttcctcctccaccgctaccgctaccgccttttcctcccat

SEQ ID NO: 155655 - DNA, 1056 bp, Arabidopsis thaliana landsberg
tgatcattactgactcttgcattttgattcttatgcagttgacataccctctatatgttttgagattgaggttggctgtcgaacctgggtatcgaacaatgtctcaggtgaaatggtttttcatttatatcatttcctgttcatgcatttattgataggcattgtgcaatgtaatctcgtgcaggttgctttgagtatgctccgtgatgaaggaatcgcatctttctattacggtctaggaccttctctagtggggatagctccatatattgctgtaaacttttgtattttcgatctgtgagtctttcaaactttctttctatctgttttaagtacctgtacggaaacaaaatttgaaccgggcttaatattgttttggcaacagggtgaagaagtctttaccggaggaatatagaaagaaggcacaatcgtctctattaacagctgttctctcagctggtattgcaacactgacatgttaccctctagacactgtgagacggcaaatgcaaatgagaggaaactccatacaaatcaattccggaggcatttgctggtaaagttaatatatttcatcatgcaactcattagagcaagatcttcatccaaatctgattgggtctatttacttacaactcgtgttgtgttttgagcaaaatacttgagattttaactgagtcatctttacattgtggctatgcaggaattatagaccgtgatgggcttataggcttgtaccgcggctttttacccaatgcattgaaaactctaccaaacagcaggttagactcttaataaacataggaatagctttctccatgcatttgttaactactgagatgtatcatgtacaaaacacaattatgaacatgcatttagattatttagtcacaattgccaataagaacaagcctactaaatatccattgccgtttatgtttgttttgcagtattaggcttacaaccttcgacatggtaaagcgccttatcgccacaagtgagaagcagcttcaaaagatcagcgatgataatcggaatcgagaccaagctcaataa

SEQ ID NO: 155656 - DNA, 1592 bp, Arabidopsis thaliana landsberg
cttatagtgcaggtggttcagcgagagtcttgggagcggataaaagatgatgacattaagaaagctttcacatcatttcgtggagaaatgaggcaagttacaccgatgttctctgcgataaaagtgagcattgctcaatcttatatacttgctttatcgtgtatcattcttttctaacgccttaactgtcatttctgcttaggttggaggtgagaagatgtacgagaaggcaagaagaggagaaaccgtagagctttctccaagaagaatttcaattttccagtttgacattgaacgcagtttagatgacaggtttatccattttctgtatagtgcagaagcagtttgaatacaatgttttttggttaggcctcactaaacatctctcgtttctcttttgcagacaaaatctgatattccgggttatatgctctaagggtacatacataagatctctctgtgcagatcttgcgaaagctcttggaaggtgaaacaaagttttatcctttgattactaacagatccaaaaaaaggaatttactaatatatcattccttttgctgcagttgtgctcacctcactgctctccggcgagattcaattggtacgttcattcacaagtcagcttatcaattttgtttttcttcaaaatcattcaaagcttgattcactcttaatattttctttttggggttcaggtgaatattctgctaatgatgcttgggaattcaatgagttagaagcagcaatcactaaaaactacttctagaaggaaacaacttctggtttgctagacgcctccatagatgatagtagaagatccaccaactgtgaattctttgcgacaaacaactcaaaaaggttacacaggattgcatagatcattgattgttccttaaaacacttacattattgccctaagagtctaaggatcaaatctttatttcggttcatctagcgcttctactaaatctcattgtctataacaagctcgggttattggaactggagggtctgtgagcaaaccatttagagtacggtcagccacatgcttgtttgcagcttccgtatagtgaactccatcccagctcacagccattgccgggttgggacaagagccaccgtagatttcggtattgttcactttccctttgtttccacaccagatgtgatcatacttctcatggtagccgcaacataccttcaaggggtttgcaaatcctgcaaaaacaagtaatgagaacgctaaaactttctacagaataggtacttaacaacaaattgaattgcgatggaccagtttgtcgtttacctagtttcttgggattgctcatcatttcatatttcgcagtgtagacatcaacatatgtaatggctgcttgagtgagttcttttctgagattgattactgtttccttgagctttctgttgaactccatcgccatttcattttgagccttcacgcagccagatttgtccaagtagcccggtgcaggagtgcccatgtaaaacatgttcacgggtaaacaaccgaaaggacccgtgttgtgtacccaaaatgttcttcctccttgctgatatatgttctgtga

SEQ ID NO: 155657 - DNA, 1208 bp, Arabidopsis thaliana landsberg
  unsure (1)..(1208): unsure at all n locations
aacgcaaaaataaccctggatttattgtacgaaaggtctatgataccgttgaaaagaagctgtggaagctgactgacaaagactatgaagactcaaaacaacgtgaaattgatgttcttgtcaaaaagaccatgaaggtattgggtgatctcccggaccttgaatctgaggatatgcttgttgaccaggaaaatgtgttgnnnnnnnnnnnnnnnnnnnnnnnnnnnnnnnnnnnnnnngtggatgttagaagggaggaagacgcctctttaaaggctgaaactctggaagtggtgcgggtatttcatcagagcattatgctatcttagagaagtttgattcactaacaggtgatgctcatcgtgacaaggtgtttggggaagcttctggaggcagtccagcacatatgttatatccctgagaacaaacaggctggcgacgaacaaaggtgggttcagaggatctcatcttgaacaggatgagaaagacacaaagccggaaaatggaaaggtcttagctaaacgtttcaatcatttttatcacgctaaatattctcccttttcatacagtcacctttcacatttcttcctaccaaaattgaccaaattacctgctatttagaattcagtaattggtggaataactcttttgtttaaactgattgacaggatgagaaatttctctggccagatgctgctgttcctcaagtgtgtgctcttgagaatgcttcacatgcttctcttgcatcggattttcagaaatataaccaaaagatgaggacactggttttcaatctcaaggttatagaatctgcattcatgccattacattactttttcccctaattttctactcttgattctttgatcatacagtttgtgcctgtatgctccgtttttaagacagttgatatatgaatttcatgagacatggtaaaatttgaataccttaggaatggtttattactggaggttctcagtttgtctatatttgtgagcctgtgtgaaggttctcagtttgttgtaaaaatcacttcagcgtttcttccaagtattttattgtaatttcatttggttttgtctgcagaacactgcactgctggctaaacgactgctcaatggcgagttagagcctgcaacgtatttgaacatgtcacccactgagttaacggcgaagaacctgctatgttacatcactgcagccaaagc

SEQ ID NO: 155658 - DNA, 797 bp, Arabidopsis thaliana landsberg
tagatataacttggcgatgtcgataatgccggtgaagggtacgggaaagtgtacctacgctggttgcgtaagcgacctgaaccggatgtgcccggttggtctacaagtccgttcacgtgacgggacacaggtagtagcctgtaaaagcgcatgctctgcgtttaactcaccacgctattgctgtaccggcttgttcggtaacccacagtcatgcaagccaacggcttactctaagatcttcaaggtagcttgccctaaggcttactcatacgcctacgatgacccaactagcattgcgacatgttctaaagctaattatgtcgtcactttttgccctcaccgcggccgttgattaaagggattgacatctatgaataattttgcttgactatttagtacgagatcttctttttgagttatcgagccgtttttttgttttggaatttagtgatttcatcgatttgttacaaagaacatgcattatttatgcgtcttttaaaaaattagtgatgtctaattcgtttgttaagtactgcactttataataaaacaagaaaactgatttataaaaggaaaaaaaaaacatatttcgggttaaataccgtattaaaaccgaatagttcaaccaatcttaaatttttttccaagaaatataatttgaagatacatttagttaagaatcaaaattcaaaaggaactataggtttaagtttaactagctcaactcatgcttctatgtcatttagaataaaatctcaaaagtattagacagaaaacgagatttggacacgctctag

SEQ ID NO: 155659 - DNA, 886 bp, Arabidopsis thaliana landsberg
ttcgtcactgcatttcaacaacaagaaccactataagggtgaaacgaatgaaactccaaagttgatacatgaggatctaaaggcgagtggtccaccaatcatacacatagtcaatagttgttttctggagaacaaatggactctcactgccaatatagaggatgcttccagagaagtcatgttttctgaatcaagaattggcaagtttgagagatgttctgctgaaagtctcacttatgaagtgttccatatccagaggccaccagagctgttagtagcagagagatggttctgttcctttcaccacctttaggacaaggtgattcttcatcgggggagtattgataggttatggattcccattacctttataaagaagaagaagaagctggtgtgagactaagtgtcgaagaatgagacaagggagaaagactcttattgtaagagagggtcttagctactatctttattttagaactatgtcgctttaggcttgtgggtgtatttaagcactgcttccgcattattagggtttttatcttatgaagatcaatcaaataaactttctaaaatctctcttatctctcttcttctccaccttaaaggtgcaatacttctctccctccatttctttctgttcttttcatatcagataagctccagggcttatcagttgctttcgccggaggtagccatcaaagtagtcggaatctgagtttgattttgacatcgaaaggcaagctccatcttctccatgtcgagaacaagagagctcggtggggaaaggaggagacgatggctgacggggaaaaagtcgtatgttcgccggaggtcgttggagtccggcagtggtgttggtttcacgagatgagaaagagatgacgtt

SEQ ID NO: 155660 - DNA, 1061 bp, Arabidopsis thaliana landsberg
aaagaaataaaagagtgtgatgagatcctcaagaacaatgggattaatgaattgcatggtttatgttgtggtcctaagtgctattgcggctacagtgacatcatacccttactcatctcctcataccccagcttacgattctcccagctatgaacacaaaggcccaaagtacgcaccacatccgaaaccatatgtttacagttctccaccaccaccatactatactccatcaccaaaggtaaactataaatctccaccaccaccatacgtctataattctccacctacaccgtactactctccttcaccaaaggtttactacaagtccccaccaccaccatacgtttacagttccccaccaccaccgtactattctccttctccaaaggtttactacaagtccccacctccaccatacgtctacagctccccacccccaccgtactactctccatctccaaaggtatactacaagtccccaccaccaccgtacgtctacagttctccaccaccaccgtactactctccttctccaaaggtttactacaagtctccacctccaccatacgtctacagctccccaccaccaccgtactactctccttctcctaaggtatactacaagtccccaccaccaccgtacgtctacagttccccaccaccaccgtactactctccttctccaaaggttgactacaagtctccaccaccaccatatgtctacagctccccacctccaccgtactactccccttctccaaatgtcgactacaaatctcccccaccaccatatgtctacagctcaccacccacaccatactactctccttcttctaaagtcacttacaagtctcccccaccaccatatgtctactagatgccatactatcgaatttgaattgtttcattaacaggaaacatgattgtaatattttcattttatgatctcttttcatttgattcttctgattttgttcttttgttcaactatcttattatgttttttttaattaataaattttgtcgacctttatacatgtatttcttagttgatatttgtt

SEQ ID NO: 155661 - DNA, 3498 bp, Arabidopsis thaliana landsberg
ggagatcaagtggcgcttttgtctgcctttgcagaaatgggactgaagctgcggctagacatgccagatcaagcaatgagtgtggcaggtctcttctttcgatcttcaactccatcaagcgaggctatggtaagtaaatttaattctttctttcatgcctcgctttctctactggggtaactataatggatccgctcttacagattcctctctttaatagaaaacgtttaaaaccctgaacgatcaaagagtgcaaaatatgaaagttatacaggagaagatgcagctcaaccagaaagaagttaaacgcttcaatccggtaagcacaaatttctttcaaatatagccttctcagtgaccatttatatctcaatgaaaacatttgatgcagatagatgcatttcctggtgatattgttatttttgcgagggtcattaatttactcagaggtataatttatgaatcatactactttacctcattatgtcaaaggatttgctcaatcatagtactttactttttctttacttatttattttgtcgactatttaggactttcatctactatgaatgttcggattgtttatctggacatcatgagaccatttgccgaatctgttctgttagggtaagcacccttggaatttggcagctcattttattatctctttgtgatatatcacgtacgaccataatgtgggttttcaggagtattagtcgaggaccaactgtggatgctcattggatacatgactcgccaatccattctgatgtagagtccaaagtgaggaagctgctcgctgaacttgggagtatccagaaaatacttggaattcaggtgggcaacactttttttattgtttggcttgcagtcagctttcgtttcattttacatttggtttaacatggccatgttcgtttaggtgtgtgcatataaagatgggaaagtcataattgacactgctgctggagtgcttggaagatatgaccctcgtccagttcaacccgatagtttatttcctgttttctctgtgacaaagggtgtcactgctggaatgatacattggcttgttgacaaaaggtgagtaacaacattttaagctttcaaaaaatttcatgtattcatttcacacaccctgatactttgaatcggctccaatcttacatattggtctcattgttaattccatgatcccatttgcagaacacatgcttagtcatattgagtaatatttattcaatgatacaggaaactccaactcgaccagactgtggcaaatatgtggccagggttcggatcaaatggaaaagataccataaaggtataaggagctacactgtcacttaaccatttcgcaatctattgcccttcattttaatacctcggttttgtatttcaggtccatcatgtgcttaaccatacatctgggatgcaaaattcctttgaccctgtaggagaaaatcctctgcttatttgtgactgggatgaatgtttgaaacggattgctaattcatcacctgaaacagagcctggcagtcagcagtcctatcactatctcacgtttggatggctatgtggtggaatcctcgaggtaaactaattatatcattcattgtttaagcataaaaactatgcaagtcgtcaagttgtaattttttctcttacctctactacgttaatgccaatcttgctttcatcaatcttgaacagtatgcttctggaaagaaactccaggagatccttgaagagtccattgttaaacccctaaatattgatggagaactgtacattggaattcccccaggtaaatagtaacagtcacagacattgtgaattagtaaattacgctatgagcgttattaataattatctaacatcttaattataggtgttgaatctaggcttgccacattgacgttcgacactgatgaaatgagcaagctttcgtccattgccagccaacctgagcttccttccacatttcagcctgacaagatcatacaaatggcaaccaacttgccagtcttatttaacacattgaatgtgcgcagagccataatccctgcggctaatggacattgctctgctcgtgcacttgcaaggtactatgcaaccctagcagatggtggcctagtgccacctccacattcctctttatcccagccaccactaggtagccacacccatgttccgaaattcacgtcgttgaaagacacaacaaaaaagaaaaagggtaaggagatggcagctacagaaaagcgtaaatcaaaagatcatcaagagaggaagctttatgatgagaaacagtttatgagtgctagtagcagcagagagtcaaatacagaaagtttagccaggctagttgatactaacagttctgctggcaaaactgagatcaatagcgatgatcatcaacatgatattcataatatgtttagcaacccgaggatccatgatgctttcatgggtgctggagactacagtggcttagtagtgcctgatggaaagtttgggcttggttttaagcgcgccatttctcaagatgggtctctggttggctttggacattcagggttaggaggatcaacaggcttctgtgacatcaacaacagattttccattgcagtaacactgaacaagatgtctatgggaggtgtaacggctaatattgtgaagcttgtttgctcggaattaaatatcccattgcctaaggacttcacaactgatataggtgcagattcgcagatgggtacgcctctaatcaactgaggttggttttcgacgtaagttttgtctgctcatgttacaacatgcatagctgtcgccttaaatagctaatagaaattgctggaaagtaaagtgtaatggatcagtgtttttgtttgtttgtctgtatacttacttaagcgaacacatttaagcaatttccttggggaatgtaatttattggcctatacatgcttcagtttccagattaccatctgcaggatttggagcaataaagtatatgttgacgaaacttgagtttatttaacgaacatgctgctttcattatatgtgtctagttctatagtgaaacacatacaggaaattcgctgagtgatcattacatgttctgaagaaagagagtcatggccagatgtctgagacgcagctaacagcttcactggatacattaccaagtccagggcttgagttctgtccagaaagtgtcattccagggaacaaagattggtcactgtggactgtaatggcgggcgaggtatttcccgtgtagtgcagactgctgatggagtgtgatggtggacttagatgagtttgtagaagttgattcaagctgctagtgagtgaccctctcgctaccaaatcttctgctagtttcacctatatagaatttacttaacttagcacattccggttattactttcccaaattaaaaagagcaagtgatagatgataccttgactctcagagtttcaacatctgatttgagaac

SEQ ID NO: 155662 - DNA, 822 bp, Arabidopsis thaliana landsberg
caaactcaactgctctcccataaccgaaaccgagagaaaatatagaaaaagatgattgagacggttaaacacctgatcggctccggtggtcccagcggattcgggtcaagatccaccgccgatcatgtcacttgtaattctgatctccgttctctaactgccatcatcactggttagtcataaacttaaagttacttcttctttttcaacttaaccgagtcgcaaaatgagtttcctaactaatagtctctctgtttcttttctactaggcgcaacgtcggggataggagctgagacggcgcgtgttcttgctaagcgtggcgcaagacttgtgcttccggctaggagcgtcaaaaccgccgaggaaacaaaggctcgtatactgtcggagtttcctgatgcggagatcatcgttatgcatcttgatctcagctcacttacatctgttcgtcgattcgtggacgatttcgaatctctcaatctcccactcaacatcctcatgtaatttaaactctctcttcacaattcttatatagcgaaaatgttttcttctaaattttttgtaatctttttggtttgtttttgtaacagaaacaatgccgggaaatacgcgcataagcatgccctctctgaggacggtgtggagatgaccttcgccactaattatctcggtaattaagttttcataaatccatcattgacttataatatatcattcattgatttatatgttctctaatagtaattcatggtgtgtttaggccattttaagctgactaaactgctgttaaagaagatgattaaacggcggcgcaaaccggc

SEQ ID NO: 155663 - DNA, 1470 bp, Arabidopsis thaliana landsberg
  unsure (1)..(1470): unsure at all n locations
ctgaaatgttataatcagaatctaacatgtttttttttttttgacatgacttgtgtgatataatgaagctgagctacttggatttgataactacattcctgcgtatagtactgtgagtggccaagagatacttcaaggagtcaactacgcatctgcagctgctggaatcagagaagaaaccggtgcacaattggtaacaaagacaacactttgataattctcatgacctctcagttctgtttaagactagaaaaatattgttttaactttttcttgtttttttgctttgctttcggtaatgaagggacaaaggataacatttagtgggcaagtagagaattataagaacacagtggcacaagtggtggagaatcttggagacgagtacactgcagcagattaccttaagagatgcatttactctgttggtatgggaagcaatgactatcttaataactacttcatgcctcagttctactccactagcagacagtacactcccgaacagtatgctgacgatcttatcagtcgttacagggaccagcttaatgtaagtttttctgtttaattcgatggaaaactatggggtaatttgggagtcctctgtttttttttgtatccttgattctcattttgggatgatctattttatgatatgatctttagcagtaattttaagtttagtttcaattgaacgttacttatttcacaatctttcttattttgcgtgtgtatgaaggcactgtacaactatggagctagaaagtttgcattggtaggaattggagccattggatgtagtccgaatgcgctcgcacagggcagcgaagacggaacaacttgtgtggagcgtatcaactcggccaaccgaatcttcaacaacaggctcatatctatggtccancanctaancaacgctantaccgatgctagattcacttacatcaatgcttatggcgcttttcaggatataatcgccaatccctctgcttatggtataatagagatatcttcatgaaacttaagcctatgattaaataaatattctcttatactttatggtaaaaagaatctaatctatatattgggttctctgaatgaatgtttttagggtttacgaatacgaacactgcgtgttgcggaattggaaggaacggaggtcagctaacatgtttaccgggagaacccccgtgcttgaaccgagatgagtacgtgttttgggatgcatttcatccttcggctgctgcaaacacggccattgcaaaaagatcttacaatgcacaaagatcttccgacgtttatccgattgatatctcgcaattagcacagctttgaaaggacagagaataggagagttttacaacaattgtatgcttttcaggttataaattgaattattggaaatgattctgaagttatgtgtgtacccaaagtgttcaactttataaaaaaaaaatagggattgcatta

SEQ ID NO: 155664 - DNA, 3778 bp, Arabidopsis thaliana landsberg
atgaacaagcagtcaagtcctatgaacactaaccgttttgatgaggtaaaaggaagagcaatgagattagctccagcctctgtggattatgttgggaatggatgtccttaagtttgttgattggctttctggattttccattagtcggattgatttgaatctgcagtacttaaaccatccatgcaataaactcgagagatagatcataatttcagacaaaagttttaactcaataaaacgactatctaagttagaatgacacaactgactcataagaaaagaaaagatgaagttagtaactgactcccccagacttagataacattgtccccagagtcattaagcaagaggaatcgaaagaaaaataatcaaaagttaaaagttagagaaacgtgagttgccacctgagagtggtgtcgatcgattataggttggtgtcgatcgacactcaggtcatttttgcatcgctttgcgaattcagctcatcgttgtagagctttggttagtgttttcaaatggatcctcgagttagactgttaaattactaaaacacacatcaatagttccaacaaagcataggaaaataagtgcaacaagttccaatacaaataacaaatagtctgaaataaagcaaaaacaaaatcagaaaacaaagcaagatagggaggatggctagtcctcatgctctgagccggaggtgggtgcgggagagcgacgacggcgacgagtggaagcaacacaaccgtatcgagagagtgtagctatggcgttccagacgctcttgaagttgtcgacgatgtattgttgaaagacatatggctccatcgggataggaggaggagaaggcagctcatatggtagagctaaagaagaagatccaactctcggaccccagtagggttaatgaactcatcctcagtctgagtcggtgcggatcctgaacctgaacgtctttgtgtcctggagcatggtgcggaatgcagacgagaaggatcatgatgaaaaccaatctcctcatgctctcctgtaatctctgtaagtgcagggcaaggtaactgaatcatatggtgtcgtgtctcatctctgaaacaccaaaggaagttgcctttcagcctgtgaaagtttttaagattactttcatccattgtgaatctcgtggtgttgacctcttctccttcaaagttgatgcgaaaatgctcaaatataggagtgagaagactgccaactctcttagatttcctccctttacgtgtaaagggcttggtcttgagtgagaccaagtgatgagcaaacacaccgccaaagttgacatcgcggtcaacctcctcaactccaaagctgtcaggaaagaaatcatgaacaacatcgtttctttgttattgtttttaagcatgttgtgtgagtagtgattaggatttctgaggatgggatagagtagttgtggaacccctagtcgaatatgttggttaagtgtagatatcttgaatcccttctcgattagttgtgtttactgcttattcgtttctgatcaactggaatccgatcccagacgttccagcgcccagaaggcgtttaatggaacgttggatctactaattccagtgataatcgtctctatcccaagggattggccgtttagaacggttattggctttaacagtcggttcttattgcctgcttagttagagatcgctaatggaaattaggtctgtgtctagctatgcttgaggatttctatcacgggagtgaattaatctgttgttgaacctgttgtctagggataacttaattgagatttgttaaccaactgaattgatcagggagaccacacgattcgattactccatccttaggaatttctcatccaattgatttctctgtttacttacctgcttcattcagttgctattgaattttagtatttttctgttttcaaccgttctactcgatcacaccagtctactaacagtgagactgcctgatagagtaaactgatccatttctgcattttcactctttgtcatcctgttgtactcgatcacagggtcccttctggcagtcgacccagcgatcgagtatatcagtcatctctgtgactttttactgttttctgcatcaacactaggactattagaaaaccaaccaaattctgcctggcttgacttagcaacttctgatcatatctcatctgtctacatcacacccatttggattgacacctaaaatactacaacgataggatagtgttttaggattaattgacaaaaaaaacctactatcatgcagcagggctcggtgtcgaccaacacaccctgggtgtcgatcgacaccatcaggagcagcacgcggatgcaatcggtgtcgaacgacacaacaatggtgtcgatcgacaccaacactagattcctgcaactattcctccagatgcggaacacgtcgtactcttggggatttcaacagatcagacctgttctatgcaattcgatcagcgattgtacccccaccattctagagaaacgactatgagctgaagcctggctactttgctttagttggccagcatcctttccatgacttatctcatgagcagccaatggatcatatcgagcgatttgaggatcttattttgagcatcaaggctaatggagtctcagaggactacctactgtgcaagtttttcccttattcacttgctggggaagcagcttctttggtgaaacaacttaaagcagggtccctcaagacttggagaagcatcaagatagcctttttgaacaatttctttgatgatgctaagtctgaggagctgagaaacaagttgtctaccttcacacaaggtcccgttgaggacttcaaagccgcatgggttagattcaaggagtatcaacgggactgcccacatcatggcttcaatgaggtacaacttcttggtacgtttttcaatggagttgattagagataccaaatggctctagatgcagcgagcaatggtaacttcaacacgagatatccagttgatgctactgctctgatagagaacctagcttgtagtaagagcaccaagaatgctgactttgagaggaaaaagattgctggagctgtttcaggtaatcaaattgcagaggtacatgctaagctggattcagttcacaacctgcttacagggaagaagcatgtctaccttgcagctaaagatgagaccattgagccttagattgagtcagaagaaggagtcttctacatagatggtcagggatacaggaagtttgggcagccacagggcaacttcagtggcaacaggtttacagggaactagggttctttcaactacactccaaagcctgctttccaaaagacctttcctcaaagcatctttcaaaggaactatggtaattcaacttaccaagccccccctccaccctcagcagagacaagaatggaatcgatgcttgagcagattctagagagccagactaagcttgttgtggagtttaatggcaagtttgatgctgtctacatagatcttaatgggaagatcgataatcagagctctcacttgaagaagctagatgtacaagaagctcaaactgcacaatctatcaagagacaagagggttttcttcctggtaatcctgatgctaacccaaggaagaaccgcaatgccatcttgatcagagaaggagatgatgtgtgggaggaattggacactgaagacgagttggagctcgcagttgcagagatggtgttgaccgacaccctcctgtgtcgatcgagaccc

SEQ ID NO: 155665 - DNA, 507 bp, Arabidopsis thaliana landsberg
aattcttcacccacctaaaaaatcaaagaaaccatcataaataccatcaccagagattcacatgattcatgcatatacacttctgagtctgtcactttcttcttcattgtttgtgttttgtctttttgatttatttttgttgaagatggagaactaaaagcaatgtctgcaaggtctttatattaatgctagagtcagtctcgcttattgtcaagttgttttctttatcagttacttgacatttaaggaacaaaggagatcatgaacagttcaggaggttcttgttcgtctttaatggatgtggtggcttatgatcatcatcttcatcatggtcatgatgaagagcttcatgttttagctgtagatgataatcttattgaccgtaaactcgttgagaggttgctcaagatctcttgttgcaaaggttcaatcattttaccaatcatgttttataatcaatcattactttatgcaatctttgtctctaaaatgtggaaatttgcagtg

SEQ ID NO: 155666 - DNA, 568 bp, Arabidopsis thaliana landsberg
actctgcgtcagcctgctgcatccggtggagttgttagtttacgtggtcagtttgagatcttgtctatgtgtggggcttttcttcctacgtctggctctcctgctgcagccgctggtttaaccatttacttagctggagctcaaggtcaagttgtgggaggtggagttgctggcccgcttattgcctctggacccgttattgtgatagctgctacgttttgcaatgccacttatgagaggttaccgattgaggaagaacaacagcaagagcagccgcttcaactagaagatgggaagaagcagaaagaagagaatgatgataacgagagtgggaataacggaaacgaaggatcgatgcagccgccgatgtataatatgcctcctaattttatcccaaatggtcatcaaatggctcaacacgacgtgtattggggtggtcctccgcctcgtgctcctccttcgtattgattagttagataggcggtggttggtgcgttctttttactggaatgattatattttccattaggatggttaggcttttgtttattaaagctatcaagtttct

SEQ ID NO: 155667 - DNA, 1450 bp, Arabidopsis thaliana landsberg
gcgtcttcataacaatagcttatctggagaaattccaaggtctttgactgctctgccgctggatgttctgtgagtataacttttattctcctgaattatatatggtgcaatcttgagttatgacaaaaatgttatcatcctgaaatgcaggatatctaaaacaatcggctcagtggagatattcctgttaatggttccttttcgcagttcacttctatgaggtttttcttcttattcttagtttcattcttgatggagtggtcagaataaattacttattgcctgaaagttatctgcagttttgccaataataaattcaggccgcgacctgcatctccttcaccatcaccttcaggttttcattttattttatgtgtatcttgtcgagtttcgttccacatttttttatttaatggttgggtgcttgtaaagtatggcattttcacattaaggtttgtcatgtctctgctaagattgataaactgcttattaaaaaaaaaggcaacattttgatatcattttccattggttggtgttgaataagacaagtgagacattcagttgaactcgccagtctgctgaagcagaacaatgatgaactcgccagtttggtaaagtaacaagggttaattgacactgtaagaaaagaaagtgtttacggaaattatgtgggtaacatgggacatgaagatatatttgacacttttgaaggtctttgatctgaaaaatgtattagctctttcacttttgctcaaacattccacttggttgatgcatcagtaatttgtcccttgaaaacttttcaatatatcacacaagtgtgaataatttctgtgctaagaagctttgtgtttatctcaggaacgtctgcagcaatagtagtgggagttgctgcgggtgcagcacttctatttgcgcttgcttggtggctgagaagaaaactgcagggtcactttcttgatgtacctggttagtcaactctcttcatttattttcccattgaagcttcttcggctgattttaatctcgtggtgaaccaaattttgcagctgaagaagacccagaggtttatttaggacaatttaaaaggttctccttgcgtgaactgctagttgctacagagaaatttagcaaaagaaatgtattgggcaaaggacgttttggtatattgtataaaggacgtttagctgatggcactctagtggctgtgaaaaggctaaaagaagaacgtaccaagggtggggaactgcagtttcaaaccgaagttgagatgatcagtatggccgttcataggaacttgcttcggcttcgtggcttttgcatgactccaactgaaagattaattgtttatccctacatggctaatggaagtgttgcttctagtttcagaggtaccgcattctttgtcctatagttttgttgactggtttttattggtcagttggtaagt

SEQ ID NO: 155668 - DNA, 588 bp, Arabidopsis thaliana landsberg; identical to SEQ ID NO: 32448

SEQ ID NO: 155669 - DNA, 1469 bp, Arabidopsis thaliana landsberg
  unsure (1)..(1469): unsure at all n locations
gaagatttattggcatccattcactataacttcgagcagcaacttagagaaagatacattaagtgttgtatttttaagacagggaagttggactcaaaagctttacacacatctctcttcttccattgattctctcgaagtttctactgagggtccgtatggccctaactcttttgatgtctcaaggtacaaaactcaaaggtgttatttcagtttcatacttaattactttatcttaagttagtctaattatattgtctccatcattttcgtctnnnnnnnnnnnnnnnnnnnnnnnnnnnnnnnnnnnngaagcggaattacacccttcatttcggttatcagagaactcatatctcagagccaaaacaagagcacaaagctaccagatgttcttcttgtttgttcttttaaacattaccatgatcttgcgtttttagacctaatcttcccactggatatgtcagcctctgacatttctaggctgaatctccgaattgaggcctatattacaagagaagacaagaagcccgagacaactgatgaccacagacttcttcaaacaaaatggtttaaaccgcagcctctagactctcctatctcacctgttcttggaccaaacaacttcctctggctcggagttgtgatcttatcatcattcgtcatgtttctcttgctcatagggatcgtcacacgttactatatataccctgttgaccataatacaggatccatctacaatttctcatatagagggctttgggacatgtttctaggaagtgcgtgcattttcatctcttccagcgtagttttcttatggcgcaagaaacagaacaaagaaggggataaggagttcaagaatcaggtacaaagcgtagagtttcagacacccacttcttctccaggttcatggttccacggccacgagagagagctcgagagtgttccctatcaatctatagtacaagccacttcagtccacttcggctccaaacctaatctgaaaagtaagtaatctattaccactatattcgacatgatagcatcacttacattacataaatggtgtaagtgaaattacatatgcatgaatctgatactttaaccttgtcgctttgcagagattctacttgaggctgagggttcagaagacgttggggtgatggtttgcggaccaagaaagatgagacatgaagttgcaaagatatgttcatctggtttggctaagaaccttcactttgaggcaattagtttcaactggtgatgtattccatgttctaactatgtgtgtttatattcatcgtaataacttttgatgttttagatggtttgctgtttgattttctatttttaatacaatttaaaatggaatgttaatgtatatgttatcctgcaccttcattattatcaatttctaatcatcattaatcctattgagcccattatagacttagtgagtgttttttctt

SEQ ID NO: 155670 - DNA, 555 bp, Arabidopsis thaliana landsberg; identical to SEQ ID NO: 69262

SEQ ID NO: 155671 - DNA, 993 bp, Arabidopsis thaliana landsberg
gtctttgcttttgcgttctcaggagttactatagatgtgccagctcgaaaggttgttttgctagaaaacaagtcgaacgtagccgcactgatccaaatgttttagtaattactcacatctctgagcataaccatgccattccccactctacgcaatactcttgccggctccactcgttcctcttcctccaaatgctcagatgtaactacttctgcctcatcgacagtctcccaagacaaagaaggaccggataaatcccatttgccttcctcccctgcttctcctccttatgcggccatggtggttaaggaggaggacatggagcaatgggacaatatggagttcgatgttgacgttgaagaagatactttcatacccgaattatttccagaggataccttcgctgatatggacaagcttgaggaaaattctcagactatgtttctctctcgcagaagcagcggaggcaacatggaagcccaagggaagaactctagtgatgatagggaggtcaatttacctagtaaaattctgaatagatagttactattatgcaatgttaataataatctgtttgattttttaacatttgttcggacatccaaacctgtgggacacaatttattactttaaagataatatatcaaacagagagtgcaatggataatatcaaacagataaaaggaaaaaaaaaaaaaatctttgagatgagacttgttctctctggtgcctcttctttcacctccaaccttttttgttcctcccaacaggttctctatttctttctctctatgtaaacattttgttaagataatggtttcatacatgaacgtgagtttgtatctattgttcgaaaggtcaatggaagaggaaaagaactgaaaaacccactttctctaaaccacaacaaagatttggactttctgttaaagaagttagctccgccactcacggcggctttacttgctgtttcacccatctgtttccctccag

SEQ ID NO: 155672 - DNA, 1237 bp, Arabidopsis thaliana landsberg
taactttttggttttctaatggtgcgggattgatacctttgttgtattttactgatctgcaggtttccgccgactgcagctactgttagctctgctcttggtctgggtatctgtggtctacctgataccattttccgcgtaagcatttcaagagttgtgaatcttagatgatagtatatgacatctcttgttttgggctcatttatttttgacatttttacataatgattagaatgctgtggacatggctttggcggattcttcttgtgcagggcttgaaaccactgaatctcgactctcttgctttttcaataaggttgatcttcttatcccttatctgtttatccacttccagatctttgctgcttaaaagctttttttgcccttattactgatgagaaaagtgcaggctattgtcaacgtaggtggcgatcttgtcaaactcgttccaggtcgagtttctactgaagtggatgcacgtcttgcttatgacacaaacggcattatccgcaaggtagttactacaccatatatataagataatttgattatatgtctcctgtatcttcaaatcactaacttgtgatgtgattctgtgtgtaggttcatgatctgctgagactatacaacgaaatcgatgtaccacacgagcggctcctattcaaaatccctgcaacttggcaagtaagattattttcagcaaataacaaagctttaccttttactggtctcttagtattgtgcttatccctctcatagggtattgaagctgcaagattgttggaatctgagggaatccaaacgcatatcacctttgtttacaggtaccagaaaacagaccttttgactctcttattttagaattgtctatccatctgattagtgttctttataatttcgttttgcattcatcaacagctttgctcaagctgcagcagctgctcaagccggtgcatctgtcattcagattttcgtcggtcgcctcagggtaaccattttttaaacagatgctgctaagtgatttcagtgatatgccaaagttaatatcttaaaatcttcaggattgggcgcgtaatcattcaggggataacgagattgaatctgctattaaatctggagaagatcccggtttggccttggtcaaaagatcatataactacattcacaagtatggttacaagtccaagcttatggctgctgctgtccggaacaaacaagatttgttcagtcttctcgg

SEQ ID NO: 155673 - DNA, 3085 bp, Arabidopsis thaliana landsberg
cttcatagtctgctttgacaagccagatccagacttttgaacattaattctcattccttcccatgcactgcttcaatttcgcgagaaacatcttgcataagcctatgtcccaaaactttcttcaagttctcaaacaacatgcactgcagctttctcgaattccacctcacaacagaacttgttttttgtcattttgatctcctctaagctaaatttaaacttgaatttccaagctttagggaacttcatatggttcatgtctctgacatactgcattattctcattttgcacctactgttccagcttcccttgagtctttttatgttgttcttggtatagccctctgcaaatacgcatgcttgtaattttgtcaggctactttttttcttcatctcgttgacaaatctataacagattctgttaaagtgtctgtctttcgttcgtaagatcattacgttcatataacaatatctttgatgcttgttttgttattcccaattgtcttgattaacgaagaaaaaaacgaatccttttaattttttctcctctgtttgttaatccgctactgctctgttagtctaatgtcaaagaaaccacgttgcttttgaacaacaatacatctgtattgggaaatctatgaatacttgacttctatatttaggaaaaccacaactcactttgcactgaaacgtcaacgttttgtttctttactttttttggttacaataacagagtcttcctattattcacttttttttatcttctttcacttatttccccatctccttcctcttgaatctttctcaagaaaaccatggatcagaaaagtgattcatttctctctgtttcatcgatttcattttcatattcttcttcaacagacaaagactttgatctgatatgcatgattagtcccatcgtacttctctacatcactctcctctccatcatcttctttgtagctgctttgattcaccttctggtcaaattcttacatagaccccaaactcgacttgacgacgcctatgatggcattacagagagttctactgctctgcaaggtcggtatcaaacacggtttaatctccatgacgcagaaattgaccaatcattcattgatgcattgcccttgttacattacaagaccatgattggtcttcgacacgacctctctgattgcgccgtttgtctcagagagttcacagccgaagacgagctccggctcttaccaaaatgcagccatgcattccatgtggagtgcatcgacacgtggctcctcacaaactcaacatgtcctctctgcagggacaacctcctcctccttggcctcactggcactgcttcgtcttccactattgtccttgtgcatgaatctgatggtgacaattcccaagactccgattcgtcgttcatgttaaccgatcttgatgatgtcgagtcaaaatgaggcctaagtggctgctgatttcttgactgggaagttaatggcattaaactctagataggcctaattgggtcaacgtgaagcctgtattcttataaccgtccggcccattttcttttgccatcaactcatatacgtgtacatgtattggttaaatcctaccaaacgaaccatgttggaattgaaacaacaataatggcataaagtatgcataaatgaggaccacaacagatacattgaacattagacattgcaagattggattggcagagacaggttcagtggtgatggccttgatatgggttccttgtctctttttactctgtcaaaacatttttcagacaacttgtttccttccatatcgttgtcatctttacagtttctctatatatatggctttatatcttagcttggagtgcaagaagtgatgaagatggtgaagtgtaagaaggttaggcaccgcggtcgcaaaggacaaaaggagaaacccaagtttcgagaaacttgtatgcaaagaaacctcgggatccttcgcaggattgtaccaggctgtgaagagatcgaagacgaggaagccttgtttctcaagtcaattcagcatctcttgcttctcaaatctcaggttaatttacttaaaaagctagctgatgtatgtggagtctaattaaaagaacgtaagttctcaagttgtttatgcattacattataagatcaagcgagagagacataagaaaacagaggaggggataaagtaaaattacacagagaaaaacgatgaacaaggcgatgaatttttttagtttttgttgtagaaagtgagagcgtaatttgtacttaaggaggaagaagagagagtgagcatgtgttggatcgttgtgacccatgtcttgtaacgattgtaatcgtcggccatgtctaacttgatagctcctctgttcgtcctcaggacaatgagataacaagtgtcctctatgttgttgtcttcgctatctgaatctttgtaaagttccacatgaacattcgtcacaatacctaaacacaaaacacatacaaaacaatgttttaaatcatagcttgaaggttaagtaacctaaaacaaaaaaaaaagattgagaagctagctgcatactttctttcttagtcctgagtagattatgtttcttcattttaagaatcacctgtggagatcaaacacaagatcatcgattagtagacgtcattggttaagagtaagagggattagagccaagtttaggacctttccatctttgtttaagaccatagaaaccgtcctagccttgaaatcccctgttttaatccaaagatctctttagtctctctacaaaacaaaggagttcaacaagaaaaacagaggatttatataccatctggtgtctcgacgaagagatctgttcccttagcaagaacagatgtgttcttatcgaattcaggaggcaaataagaagagtcttcaataggcaacacaggtgcagagccattcaatctattaatcttgcaacctcttcttgctttcagcgtcgcggcacctctcaacgcttattttaccaagcaccaatgtctcagaaacagagcattcttatagaaacaaaaacaaaaaacaatcttcttacaagttgtag

SEQ ID NO: 155674 - DNA, 1268 bp, Arabidopsis thaliana landsberg; identical to SEQ ID NO: 8631

SEQ ID NO: 155675 - DNA, 1228 bp, Arabidopsis thaliana landsberg
aggttgtcattggaatggatgttgccgcttcagagttctactcagaagacaagacctacgacttgaacttcaaagaagaggtgaaatttctttttccttagtaacagcttgtcaggatagagtgtgagaaacctgttcttaacttgtagctgttgcgctctttgtttctctgcagaacaacaatggctctcagaagatttctggtgatgctctaaaggacctgtacaagtcctttgtcgctgagtacccaatcgtgtccattgaggacccatttgaccaagatgactgggagcactatgctaagatgaccactgagtgtggaaccgaggttcagattgtcggtgatgatttgttggtcactaaccccaaggtttgtttttatttgccagtgttcttaccagtttttttttgttgtctgccctctcttaaaatgctcacatctctcttatactcttttcttattccagagagttgctaaggcaatcgcagagaagtcttgcaatgctcttcttttgaaggttaaccaaatcggatctgtaaccgagagtatcgaggcagttaagatgtcgaagaaagcaggttggggagtgatgaccagccacagaagtggtgaaaccgaggacacattcattgctgacttagccgttggcttgtccactgtaagttgaaaccattgcaagcatttaactagcaatctcatgctatatcttttgtcggactctcatttggatctttctgtctatacagggacataatcaaaaccggtgctccttgcagatcgaagcgtcttgccaagtacagccaggataatcatctcagtccactagtaaatacgtaatgtttgtcaaccaaagtacattgtctaatatgtgtcacgtttctcatcagcttctgcgtattcaggataagatggaatcaaagacaatttacgctggagtcaacttccgtaaacctgtgcacccttcagtaatgaagcttttagaagcaaagtggttttctttgtgacaaggacaagatgacctgagtttgatcattcgatttaattaaatacagcgttctgaggatgtttcttctgagttcggtttgtgacgtcctttgttgaaccctttttgggaaaagttattcatttttgcaagggaaacatgagaatgttctgccttaaaaaaggatggtagcccctaatttcaatgaaatttcggctttactgtgtaatcttctaaagtcattg

SEQ ID NO: 155676 - DNA, 449 bp, Arabidopsis thaliana landsberg
caccggtccggataaagttatctcgacggagggaagaagagttggtatcaagaaagctttggtgttttacattggaaaagctccaaaaggaaccaaaaccaattggattatgcatgagtaccgtctcatcgaaccctctcgtcgaaatggaagcaccaaggtataaatttagttaaatacatgatgtatccaaaaagataagtatatagtaattgtaattatactgttcaacgaataacatattttaaactgtttttatgttcagcttgatgattgggttttatgtcgaatatacaaaaagcaaacaagcgcacaaaaacaagcttacaataatctaatgacgagtggtcgtgaccacagcaccaatggttcgtcgacatcttctatcgtctcatcaatacgacgacgttctcgagtcgttgcatgagattggaacataagtttaggtt

SEQ ID NO: 155677 - DNA, 1330 bp, Arabidopsis thaliana landsberg
atgccggaaatatcgccggctgagctcgccaaggtttcttcctcgtcttcttcttcttcttcctcaagttccggcagagcgtcggtgaaaatcgaagagattgaaggcggtgctgctgctagtggcgtcgtcattgtttctgaagaacttgagaccaatcccaaaactgttgttgcctccattgctgatgaaactgtcgctgaatcttcaggtttcattttatcctcttcttgcaattgaaaagacagttttggttaattgttgattcctttgtctggtttggattcattctcgtttggatgattttcaggtactggcaataaaagcttttctcgagtatggacaatgccattggagggttcatcgagcagtgatagggctgaatcatcatcaacaaaccaacctaggttagataaatcaaagactgagaggcagcaaaaagttactcacattcttgctgaggatgctgctaagattttcgatgacaaaatctctgcagggaagaaggtactgtacttctatttttggtttgttttttttctatcttgtccttcttctatttttagttatctgttatatatgaaatctctttgactttgaatcatgtgtgcacttccttttatgattcctacttttatggtcaacgttactctccgtgacactagtcgtttttggaaatgttatatatctgcagcttaaattgctgaaccgtatagctactgtgaaacatgatgggactgttgagtttgaagttccagcagatgctatccctcaacctattgttgttgatcgtggagaatcgaaaaacggtgtttgcgctgatgagtctattgatggggttgaccttcagtatatccctcctatgcaaattgtgatgttaattgttggaacacgtggagatgttcaaccttttgttgcaatagccaaacggcttcaggttggctcctatcttcatttgcacaatattatgaacctaaattggttgggagagagtaattgactgttttggttatgtaggactatggccatcgagttagacttgcaactcatgcaaattttaaagagtttgttatgactgctggattacagatttatcctatcggtgcaaatccaaaagggttcatcgagtgtatgtatgtaccaaacaatcccattttttcttcatccttgctagtatgatcagatatatctatgaaagttaaaatcaatatactggtgaccatgatcttttatggacacaccttgcacagaacatgggctttttgacttctggtcctggagagattccaattcaacaagaccaaatgacggacataatatatcctctact

SEQ ID NO: 155678 - DNA, 566 bp, Arabidopsis thaliana landsberg
ccaagggcacgtggctctcaccgtctgaaatagccgttagtctcccaaacaaacccactaacccggaggcgccggtattactggaccggatgctgcgattacttgtaagccactcgatcttgaagtgttgtatggttgaaagcagagaaaatggtcaaaccggaaagatcgagagagtatatgcagctgaaccgatttgcaagtatttcttgaaagatagtgacggctctggttctctctcgtccttgttattgttgctccatagccaagtcattctcaaaacttggtaagtgaacataaaacgtaaatgaacatttgaagatattttttttgaaaaaattccatatataggacaaatctcaaggatgtgatactagaaggaaaagatgcattcagctctgcccacgacatgagacttttcgaatacattagttcggatgaccagttctctgagttgtttcaccgcgccatgtcggaatcttccacaatggccatgaagaaggttctacaagaatacaaaggaaatgaaggtgttaacactttggtccatgtaggaggagggattg

SEQ ID NO: 155679 - DNA, 392 bp, Arabidopsis thaliana landsberg
acgatacttaagaatcacaaatacaatctcctacatacttcgtaatattaaatgttatggtgtgtatataaaaagttcaacgaaaggagactaaaagttcgatttcattgtgattcatattcttatatataaccaggtttttgacgctggaagaagaacgtggtcaaagaggggcgaagacctagaagaagcgcaacaagagttcatagagatattgaaagtattagaaatagagcttggagatatggtctacttcggtggaaacgacaacgtttcgatggtggactcggttctcatctcctactacccttggttccacacatgggagactattggtggttttagtgtcgaggaccacactcccaagctaatggactggatccgtgaatgct

SEQ ID NO: 155680 - DNA, 309 bp, Arabidopsis thaliana landsberg
ggtaatgtgagtgtaacagttgtggtattactaattctttttgcggtgttgtattcctctttcagcacactatccgttgatcataaaggcgctcccttcgggtaatcttgttttccatgaatcatatcacaatgtgttttcttgctttgacattattgagatctcaatggtctctatttgcaggaatgttgtatcgtttagtgatggtttacccgagaaaggtaacggtataccctacctttacttaacaacacttgatccaactgaaagaaacgcacttaaagaccagagagcttcacttgcaattag

SEQ ID NO: 155681 - DNA, 1243 bp, Arabidopsis thaliana landsberg
  unsure (1)..(1243): unsure at all n locations
aactagcttctcatggattagtagagtctgataacttttgagctcgacataggaacgatggggaaaagaggaagggcttgtgtagtggtacttggagatcttggtcgaagtcctcggatgcaatatcacgctctttctcttgctcgtcaggttttgtccccatgttttgcgttgggtctggtttcctcttgaattgcgttagttcctctaatgccttgaacctgcaggcatcatttcaagtggacattgttgcatatgtgggtacggattccttgataaattttcttgtgaatcacacaatgcattgctgaagtgtttttaaaaaaaaatcatgaacaggttctataccccatgaagctgttctaaatcacccatcaatccacatccataccatggtatgctacgatgaaatcttctatataaactactagcaactctgtagatttatgatcatcactttctaattcttttggggggtgctaaaacaggctcagcctcgattcattcagtactttccaaagatactttatcctgtaactctcttgctcaaggcatttattcagtttacaatgcttctctggtttcttttcgttaaagtaccagcgcctgacattttcctggtccaggtaaaaagtctttattcttgtcactttgaaatttacagtaaattctgttttcttgcgaaatatgcacaagttacacctagttatatttctacagaatcctccttccgacacaactctaattgctgttaagtgggcgagttcatggagacgtgcagcgtttgttgtagattggcataattttggatatacgttgttggcattgtctttaggaagaaacaatttgcttgtatccttataccgctggtaagtatattaaccagtggcttgataatggcttaaaactacctgtaggacctttttatttaagggtgaaatattagcatttgcatgattttaggtttgagaatcattatggaaagatggcaacaggttcgctnnnnnnnnnnnnnnnnnnnnnnnnnnnnnnnnnnnnnnnnnnnnnnnngaggtgagatgaaatttctcatagataataacctgttacattttgattctgaactaaagaaagtgatgtgattctgatttcgtatgcattaatgttctgaattggaaaaacagagccaaagcgttccatgatcagcctcctgagtttttccgtccaactttgcttgaagaaaggcatgaggttagcattgtgt

SEQ ID NO: 155682 - DNA, 928 bp, Arabidopsis thaliana landsberg
aaggttttgctaattcgtcgccttaatttcgttcaagcttctacaaaagtcccagatttgttcacctttttcggtattgaatcatgatgaattcaatcttcggaaagcgaaaaactcccgcaggttattatcctcctttctctcaatttcgtctcttgtcggatctgtgttgcttattaagtttgtaattagtgaaatattcgatgatcgcaagttttgatcttgtaatttttatacttgatttgaaattagatcaatttaggtttgattctgaggaatatgatctcttcgttgattatgagttcattaggttacatgttgcgcaattgtttttataggttatatgtggttttgaatcatgtatagctcagtgtaagtaaaatggtttggagttataaagcatttgattgatttgatgattatgagttcatttgttttcatgtgcatagatcattaggttacatgtagtgcaattgtttgtgtagctttaagtgtggttttgaatcatgtatagagtaaaatgattttgtcggttgcagaacttctgcgggagaacaagcggatgctggataagtctatcagagagatagagagggagagacaaggccttcaaacacaagaaaagaaactcattaacgagattaaaaagaccgcaaagcaaggccaaatggttcgtttctctttcgtagcgtatataggtaccatgtataggattacttctcattcttgaatagttggacatcttcttgaatacatttgttggatactttctctcacagggagctgttaaagtgatggcataggatcttataagaacgcggcaccagattgaagatgttttacaagcttaaatctcaacttcaaggtgtatctctcaggatccaaggttgctttatttttaccaagagtcgaattggtttatttattt

SEQ ID NO: 155683 - DNA, 1255 bp, Arabidopsis thaliana landsberg
tcccgatttacgttatttacggcagcatcgtgaccatcagcgaatcagatttaacggagattgcttggggtctaagaatcagcgaccaacccttcttgttggtcgtacgggttggttcagtccgtggcagagaatggatcgagacaatcccggaagagatcatggaaaagcttaatgagaagggaaatatagtgaaatgggcaccgcaaccagacattctaaaacatagagccattgggggattcttgacccataatggttggagctcgactgttgagagtgtttgtgaagcagtccctatgatctgtttgccttttcgttgggaccaaatgctaaatgcaagatttgttagcgatgtgtggatggtcggtataaatctagaggatcgggttgagaggaatgagatcgagggagcgataaggagattattggtggaacctgaaggaaaagcaatccgagaaaggatagaacttcttaaagaaaaagtagcaagatcgtttaaacaaaacggttccgcatatgaatctctacaaaatttgattaattatatatcatctttctagctagccatatgacatgttgtttctttgtgttttagcttttcaaccgataaaattgttttgtgtatcagaaatttcttcctttgtgtgttttgcattgttgaaataaaatcatcttctcaagttgaaatatacatatgtacttaccattggctatattataaggcctattgttatcgtgcaaactactagaacaacggatcgtgtcttttgatttatgtctcttaattaattaaaatcaaataaaattagacaactctcgacaaatctggtctttctttatatgacctagagggaaaacgaatctggtctttctttattagcacaacatgacgcgtatagtttgtctcactctctgacgtgataacaatatatagatacatggtatcaaaagggaaataataacagcttttggaaagaagatcaaatggagaaaggttcaatggataagagtaatggcctacgagtgattctgtttccacttccattacaaggctgcatcaaccccatgattcagctagctaagatcctccactcaagaggtttctccatcactgtgatccacacgcgcttcaatgcgccaaaagcttcaaaccatcctctcttcaccttcttgcagatcgaagatggcttgtctgaaacagagacaagaactcacgacgtcacacttctactgacgcttcttaaccgaggca

SEQ ID NO: 155684 - DNA, 2886 bp, Arabidopsis thaliana landsberg
ttgcatgctcaccctttttctctacgcagttagtttttaatgcgttagtcacaatgaccgtttttctacaagttggtgcgacgacggattctcttcatgggaattatctgatgggttctctattcactgctctctttagacttcttgccgatgggcttccagaactcactcttactatctccagacttggtgtgttctgcaaacagaaagatttgtacttctatcctgcttgggcatatgcgattccttcaattatcttaaagatacctctatcggttctcgattcattcatctggacattactgacatattatgtcattggttacagccccgaggtcaaaaggtaaacaacatttttgaagataccttcaatgattaatccaaattcagtaagtaaactacttctaatggtaagtgttactttccttcaggttcttcctgcagttccttatcttatctacattcaacctttcttgtgtatcaatgtttcgcgctattgcggcaatctttcgcacaattattgcttccacaatcactggagctatttccatattggttctctcattatttggtggcttcgttattccaaaatgtaagtttccggaactttcttatatcaagttatacttctgcaattttattattataataatccacttgtgaggattggtaggcatctagtttagactatttctaaaaatgctcatctttcagcatcaatgcctgcttggctgggatggggattctggctttctcccttgtcatatgccgagattggtctaaccgcaaatgaatttttctctccacgatggagcaaggtaataactcttcagaaggctttcacacaagtctagtaactctagtctactgatccgctttatattttgcaataggtaatctctagcaagactacggctggggaacaaatgttagatattcgtgggttgaatttcggtaggcactcttactggacagcttttggtgctttagtcggctttgtcttgtttttcaatgccctctacgtgttggccataacgtatcagaatagtaagttcatcacacatgacaataaataactctatgaagtgttttccatctaacatatgataagattatctttgcaagttaagatccccaaagatcccgtgctatcatctcacatgaaaagtactctcggcccatagaagaagattttaaaccctgccctaaaatcacttctcgagctaaaacaggtatctctttttgtcagctattccatcttttctatgttttactaggtcagtggcttgcgtaatgacaagatatcttttcacatctttcgtctctttttcataggaaaaattatcttgccttttaagccactcactgtcacatttcaaaacgtgcagtattatattgaaactcctcaggtaaactcattgtttaagatcagtgtgaatgttttgagatactaaattctcaaacaaagcacaagtttacatgtgagtcacgttcctcttagggaaagacgcgacaacttctctctgatataacaggcgcgttgaagcccggagttctcacatctctgatgggtgtcagtggagcagggaaaacgactcttcttgatgtcctttcgggaagaaaaactcgcggtatcatcaaaggagagatcaaagtaggcgggtatcctaaggttcaagaaacatttgcacgagtatcaggttactgtgaacagtttgatattcattctcctaatataactgtggaagagtctttgaaatattctgcatggcttcgactcccctataacatagattcaaagacaaagaacgtacgtaattacactctcaaaacgaatcgacttaaagaaattgtcagaacctttatctgactatatctgggatctggcttcaggaactcgtcaaagaagtcctcgagacagttgagcttgatgacatcaaagattccgtggtgggacttcctggaataagtggtttatctacagagcaacgcaaaaggctgacaatagccgtggaacttgtttctaacccttccatcatatttctggatgaacctacaacagggctggatgcaagagccgcagccattgttatgagagctgtgaaaaatgttgctgagactgggagaacagttgtttgcacgatccaccagcctagcatagatatctttgagacatttgatgaggtaaaatggctgaaatcattgatttaaccgcattaatctaaactttgatccccctagcagcttcttattcccttaattgcagctgatcctgatgaaagatgggggacagcttgtctactatggtcctcttggaaaacattcaagtaaggttatcaaatactttgaggtcagtttgtctacaatactagactagtttcatctcgcctgggttcttagaaaaaaaactaacacttagagttctatttattaacagagcatccctggagttccaaaagtccaaaagaattgtaatccagccacttggatgttagatattacttgtaaatctgcagagcacagacttggaatggattttgcacaagcatacaaggattcaactctgtacaagtgagtctttatgcagcaatcctcataatgtttgtatgtgtgcgtcaaactatcgttcttagtgcctggtttggtctttttgtgcagggagaacaaaatggtggttgaacaactgagttctgcgtctctgggatcagaagctctgagctttccttcacgttattcacaaacaggttgggggcaactaaaggcttgcctttggaaacaacattgctcgtattggagaaacccttcacataatctcactcgcatagtcttcatattactcaattctctgttatgtagccttctcttctggcaaaaagctaaggacat

SEQ ID NO: 155685 - DNA, 543 bp, Arabidopsis thaliana landsberg; identical to SEQ ID NO: 63748
  unsure (1)..(543): unsure at all n locations

SEQ ID NO: 155686 - DNA, 2608 bp, Arabidopsis thaliana landsberg; identical to SEQ ID NO: 6298

SEQ ID NO: 155687 - DNA, 2320 bp, Arabidopsis thaliana landsberg
gaagaacgtttttcagaagctggtgtcgatcgacaccacacctgtgtcaatcgacactcttattgctgccaagggaattctcgttttctaccaagtctttgagaagccctgaagtttttcttatttgcaaaatagtccctgcacgtttttagagttaaatacctaattgttttgtcattattagacctagtttttgttcttagacttttgttacactttagagaaacagaatccaatccctaaagagaggatctgaactgctttgctattattcttaattcatcaatgaaaactattcagattatgatttgtgtttttattgtcaagtctgagtaatcaccttattgggtccagggagtctcaatagggatttagatggattagtagatcgaaaaccccttaggattattcttagagttcttcatcttgattatccttaatgctagttttagattgatcacttagaacttgatattagataataggtattcccaccataggtatttgttactagaaccatcatagatgagcctaggcatctaagaaagaacaggtaggctcatagaagggctcttgtttagatactaggtgaactaatcaagcttattaataatgcatgctttagtataagatctctcggcttctccggttatcttagttgtaagtatcgagagtttcgcggaacgccaccggttactctagaattatagtttgagtttgagaacggtgcaataacaatcctgatattagctagatctacaatttatctatctctcgagacaattccttagacctgacgccttaatcacttgaatctacaactcatttacttgcttagttgtctttaatattcaattacttcatttagcttatcaaacaacatcataagtctattgtgtgcacatcgagagctcagtggaattcgacccttaagtgctaacgacgatctcttatttgagggagtaagcttaaggcaatttgagctatatcaaatttggtgctgttgccgaagttctcttttagttcaccattagactaggtgtcattttaggtctagatacttcttttctatcacctacttacgtgtttctttgtcttctggtctcttgtgtttcaggtaccttcagattgagaatcacgtttcaatggcagattttcacgatagtgtataccgacaccatcctggtgtcgatcgacaccctctgcaaaaccagacggctacaataggcgacttcaacagaactgatctcttctacaccaaccgatcatcattcaagctacctccatttgaaagagaagactttgctatacaccctgcctattatgatcttgtatcaagagtttagaggagctcccgatgaatcaccattagatcatttggaagtcttcgaaggcatagtgtcctctatcaaagcggaaggtgtaccagctgattaccttctttgcaaactcttcccccactctctcgcaagcagaggaacatcatggttgcgtcaactagaaccaggttcattaaccaattggactgatacaaagaatgcattcatgaatcacttcgtcgataaatccgtgacagaggcaattcatttgcaaatctcttcgttcactcaggctccagccgagtcccttatagcatcttggctccgtttcaggtcttatcagcgtgaatgtccccaacatggcttccaagagaggccaactcatcaacctattctacaaaggaatagacaagccataccggaatcaacttgatgcagcgagctactgtaacttcatgacaagaactactagtgaagcattactcctcatcaccaatgctttaccttgttttcgacgcagggatttgacaaagaacgaagaatttcagctaagatagccaccgcgagcaaagagactcctgtttcaacaattttcgctcctatccaagcccccccccctctaccctcatcagagaccagaatgtagtctatgcttgcgcaaattcttgcaggccaaacaaagcttgataccaaatatgattctctctccatagatctcaatagcaagattgacactctacgctcccaattctccaatctctcacctacttcagcttctatcaatgtagtcacactacgcagcggaaagcaggtcaacccaatacttcagcgcaaacgatcagctctgccttcatcatttccaattgcagaaaacgaatcagtgttgatcaatacaccagggtgtcgatcgacacaattactcttgacgactctgttttcatttgtcgagtggaatcgataattttgcagaggaggaggaaactattcccgatggtgttgat

SEQ ID NO: 155688 - DNA, 649 bp, Arabidopsis thaliana landsberg; identical to SEQ ID NO: 47083

SEQ ID NO: 155689 - DNA, 1235 bp, Arabidopsis thaliana landsberg
tgaaacattttttgtgtgactttgttttgttttttcaaggagtttctgattcagaaagtgaagtcacttgaagaatacaaagagcatgctgatagtttcatttgctctgttatacctggagcatcctcttcccaatatacaccaggtttttgcatatataccactcatcttctcattgaaatttaaaaatcaaggaatttatgatatatgtgtatacatatttataggtgggctattgttcaagatgggtgagagcaacatgcaatacgtgacgtctacatcgttcttgctcttgacctacgccaaatacttaacctctgctcgcaccgtcgcttattgcggtggctccgtcgtcacccctgcccgcctccgctccatcgcaaagaaacaggtttgtttcaaaaccaatgtatattgactctggtatactttggatgtcaaaatcaaacttgactatcaagtaaattttcagttaatgcacataataaatgtgacaccatctgcaagactacagcataccaataaaagaattaagaatctatactttattataatgataattagcaaaaatgaaataaattttgtattttgctaaagcatgaattaattaatatcccaatataaaatggaaagagtagtatttgcttaattaattgattcatgtgatatatgcttcaggtggattatctacttggaggcaacccgttgaagatgtcatacatggttggttatggtctgaaatatccacgtcggattcaccaccgtggctcatctctcccctccgttgcagtccacccgaccaggatccagtgccacgacggcttctccttgtttacctctcaatctcctaatcctaacgacctagtcggtgcagtagtcggtggtccggaccagaacgatcaattccctgacgaacggtccgactacggacggtcagagccagcaacttacattaacgctccacttgttggagctttggcttatcttgctcgatcctaaggccaactttaactaagcttaaaccgcatttaattgttggtttacaatgttaattagtagtaatgattttataaatgaatggccaagattgtccgatccggctgaatgaatgttttagatgatgtggtatttgattttaattttctaattaaaaaaaaaagtagcatttagaagtgggaatgggtctatgaaatgagattacgtcaatatgagtgaaattgataaattatccaatc

SEQ ID NO: 155690 - DNA, 1072 bp, Arabidopsis thaliana landsberg
tagctccttttttctctatctcgctttctctgtttcaccacagtcatggcgagtcggcgaatcttatcatcgcttctccgttcttcttcgagtagatctacttctaaatcctccttgatcgggagccgaaacccgaggcttttatcccccggtcccgcgcatcgagccgctccatgtgggactctccttggccgagtcgccgagtattcgacttcttctccggctaattcggctgcgccatcttctgctcctgctaaagatgagggaaagaagacctatgattacggtggcaaaggcgcgatcgggcgtgtgtgtcaggttattggtgccattgttatgtgagattcgaagacgaggagggattgcctcagtcatgacatctctcgaggtacaggatcatccaacaaggttggtccttgaggtgtctcatcacttgggtcaaaatgtcgttaggaccattgctatggatggtactgagggtctcgtccgtggaaggaaggttctcaacactggtgctccaatcactgtaagtagatccgagatcatgtcacaagttgggacattttcgccatttgatatattggtctagatctgaggatccgtttatggcaactcaattcgtttggtttctctagtttcttatcgttgactttgttcaaagtttcctttcctctgaaagtctctttctttccgattgattttatgttatgttgtggtgaatttgtctatctactcaggttcctgttggaagggccacccttggacgtatcatgaacgttcttggagaacctattgacgagagaggcgaaattagtaagcagtctaagccatacttaaacaatgtctcacgttcgatggacctatcaggacaattaattcttgctctttgtggcttttgattgctccaacagagaccgagcattacttacccattcacagagaccctgcagctgtcggtgacttggccaccggatcaagagatcctcgctactggttttgaggaagatcatctacctacctatcgggctaatgcacaggacacatgtggtcgctatcatgaactgagctcttt

SEQ ID NO: 155691 - DNA, 1069 bp, Arabidopsis thaliana landsberg
agttactagatatgcataattaattgaatgcggaagcaggatggacgaccaagtacatgtgatagagagggacttgaaagagccccaaagattcatggaaaagctgatgcaagcgggaggccgcttcatgttagcccagcttggcctcgaaggtctctttcttcactcacctttaattttgttgctacacattgcttgatcttggtaccacacaagcatataatcatattgtatgtgcgttattaatttgcaattttggggttctatatgtattagattgtttggaggagatagacgctcaagaagccaagtccttagccatttacaaggatggaaaacacgcgacattgccttttccagataataagaagtttcctcatgaaccagtcggtagacttttacgtaatggtcgtctggtacaacgtctacgccaaaaagcagcttctcttaccaagtacgtacataaattatataattttatttattttgtatccaaaatcaaaactatttcttgtataacttgtagtcaagatcattcatctagtggaaattattgcagctttgttgcgaaacatgtatatgatggttctttacccatctataattgttttgagtctaatatgtgtcaaagttttaatgagctctaaaatattacatggcttttcatctcaaaatcaattgtaaatgaatagaacaatcttaagacttatatacttgattttcagtttcatcttttttaataaaatgcaatgaaccttggcagtgttcaattagaagaaggaacagtgaagtctttaattgaagaaaaaggagtggtcaaaggagtgacatacaaaaatagcgcaggcgaagaaataacggcctttgcacctcttactgtcgtatgcgatggttgttattcgaaccttcgtcggtcactcgtggataatactgtgagtacatagttatcttttaaacattgtagacttttattcttcgctataaactataacaaaagattggtctcgttaactacttagtttaaggatcataatcatatatttatttatacaggaggaagtgctgtcct

SEQ ID NO: 155692 - DNA, 2250 bp, Arabidopsis thaliana landsberg; identical to SEQ ID NO: 36922

SEQ ID NO: 155693 - DNA, 676 bp, Arabidopsis thaliana landsberg
agctgcgaatctcgatgtcatacagagggttgaatacgtcaagcaagaagcaaagattgtttaccttctggagtgtctgcagaaaaccactccaccggttttaatattctgtgagaacaaagctgatgttgatgatattcacgagtacttgttactgaaaggagtggaagcagtggctatccatggaggaaaagatcaagaagacagagattacgcaatatctttgttcaaagctgggaaaaaagacgttttggtcgcgaccgatgttgcttcaaagggtttagatttccctgatatacaacatgtaatcaactacgacatgcctggggagattgagaactacgtgcataggataggaagaacaggtcgctgtgggaaaactgggatagcaactacgtttataaacaagaaccaaagcgaaatcacgctgctcgatttgaaacacttgttgcaagaagctaaacagaggattccacctgtccttgctgagcttaatgatccaatggaagaaacagaaaccattgctaatgcaagcggtgtcaagggttgtgcttattgtggtggtctcgggcatcggattctacagtgtccaaaatttgaacatcagaagagtgtagctatatctagttctaggaaagaccattttggctctgatggatacagaggagaggtgtaa

SEQ ID NO: 155694 - DNA, 1126 bp, Arabidopsis thaliana landsberg
catctacgaggttctagaaatcacgtttttgctttttgtaaaacctctttcgactcttcttttatggttaggagaatatctacttgtcgttcctatattcttgcaactgatatttttttaaaaatcttcagcttccggaaccattcagtttcattttcacatggttcgctgcggtgcctgcaattgtatatctggcgctatcactcaccaaactgatcctcaaagacttcctgatcttgaaggtaaaacattaatcatctttcaagatcagttcatgaagtggaaaaataaaaagttatagaactaaatcttgttttctcagtatgaaaaatgcttaaacaagagattacacttgagataataatctattgtgcgcttagtatagggccaaatcctacaagttgtatgcgattattatgaaaagcttttaattttcgtggaacctatctttcacaggggccttgcccaaactgtggaacagagaatgtatccttctttggaacgatattatccatccccaatgatagtaacaccaacaatgtcaagtgttcagggtgagcttgtcagctgtagactcgagtcgatcacaaaaattgtctacaacatttcttgaagtcttatgattcttctggtttttagctgtggaacggagatggtctatgactcaggttctcgtttgatcacattaccagaaggagggaaagcttaaatctaagagccaaggtttaattcttatcttaactttgatttctgatgaaatctttctagattcaatggaaaattcaagattctaggtttttctttttctcagggaaatgtggaagtgtatgtaaaattaatactaacaaatgaagaaggtggagaaattgaagaagaagaaggagaaaaagcaaaagagtgagtttgtgtgctgttttgtataatcttcatatcttttcatgtagctctcatagtcattggcttgtgttgtgtttgtaagtaagtgtgaggcacattgaaagaaaaacagcatatgattacttccttgagaaactttgctctcattaggaaagtaaaataattcaagaaataagcacatttttgttataattcttgaatgtgttccataattttgcatagaaaatat

SEQ ID NO: 155695 - DNA, 841 bp, Arabidopsis thaliana landsberg
ccctagtgttaaatttcctttatttgattccaaaatttgttattgtgaaacaggcaatcgataggcttccattggttcctggtgttcttgaacttgtaggcatcggttacacaggagtgagtttcttcttctctttgtatcacttgaaccaaagctctcatgaacctgttttgaggatatagatgattcatcacttcacttttggatttaggattagttctctgaatttagaatccgaacatctgcaattcatatggagatatgatatcagaaattgattgctgcttctcgctagtgtttcaatcttaaaagacgtgtgtagtttgtttcaattgtgtgatggaccttattaacatttggtttttctatggcagtggttcacttacaagaacctggtcttcaaaccagacaggttaaccaattctctctttaactctgtgtttggttgcatgtaatactgagaatggaagactcaaattctcgaggaaattgtttgttatctgtttcagggaggctttgtttgagaaggtcaagagcacatacaaagacatattagggagcagctgaatcaaaggaggaagaagaagaagaagagcctttttgaggccattcatgaattggaatgaaggatatcaaaagaatctaacacaaaggccacgtccttccttcaatctttccttcttgtaactaaataattttcatcctttctctctctctgtctctggtcttttttagctcaaagtatcatccatttatgtcaaagtgttgtaaattcctcaagactatatatgagatgttttgtttcattttccaaaatttcaaactttgtccccatttagtc

SEQ ID NO: 155696 - DNA, 442 bp, Arabidopsis thaliana landsberg
aaccgctctaaacctgaaacaggaaacgaatctccttggtgctctaaccaaagccggtacgttttaatttcaaattaccttttacttttcccggtttggatctcattggtctaactattggtttattatgtaatagggattaatccggatgggaattcttactctttggagagcataagagattcgtttatagattcaattggtttcactccttgggttgagtgttatagagatggttctggtaatagccaattgtaccaagtctatctttgtgttgaccggtctggttccggtttaatcgaatgtccggttttccctcatggaaaatgtggagctgagatcgaattcccttctttttagtttccaatttctaatttcacactctcttgaaccgaaaccgatcttttgttcatggagattagtttggtttaagagaagagat

SEQ ID NO: 155697 - DNA, 2389 bp, Arabidopsis thaliana landsberg
gcattgttgtgttttctctaggctatgcacaaggcatcaatacttgggatggatatccaggatatgctactactacccctgaagccatgcatgtgccaccggttagtatgactttccctatttatgttctatcttcctcttgctacttaattaagttagttattctttatcctcaggttgtctacaatgtcaattcatctcttatgtaccaatatcctggttatggatttaacccttatccttctgtaatgttggagggacaaattccagtctccccagcttattaccctcaaccttttggtgcaccttctgcaatgcattatttaccctcagatattgacccaacatctgctgcttatatgattccttacgggcaatatggtgtagggaattattccggaaatcaaggggacatctctttaacatctcatataccttatcctcaaacgatgggtatacttgggccatacgaccataatgcttcacaggttaatactcttccctctttagttttaactattatgggcttatgtacataacctttatttggtttggttcggtaaacatttgcttactaggaataaaactgcataaaagtgccactggttattagtatcactagttttttgtgagtccatctctttagctttgtcgtgcaagataatgaatacatgctgacacactggaagagccatgatattttctcatatatgattgaactttcagttttgttcttccctgtaatggttttggggaatagaggtgtctttggcatacgccttggattcaaatcagttcactgttttattggctgatcacatttctttggcaccttttatcaggtagcgttgcatgggagcggggttgcttcaagctcttctttgggaggttattatcatgtaggatcttaccagaatcctagctctaccccctcatattatggagttgataatcgagtcagattaacccctgacataggtaaaagacgagagaaggatcagggctctatatctagcaccagtgatctgtatggtaatcgaggaccacgggcatcaagcagggtaaagagcaagaacagctccaaaccttgctctactattggtgattcagcaagcgattcaagtacagctggaccaaatcccagtttgtacaaccatccagaatttgtgacagattataagaatgccaaattctttatcgtcaagtcatttagtgaagacaatgtccacagaagtatcaagtacaatgtctgggccagtacaccgcatggcaacaaaaaattagacactgcttatcgggatgctgagaagatgggaggaaagtgtccaatctttctgttcttttcggtatggcttttccactgtccaatctctctgttttctttctgtatggttttttttcgatgtagtagtatatataattcctgggaataaccaaaagcgtaattgataagctgcttcaaggaaacagtaagcttaaccaaagtttaaaatcttgcaggtaaatgctagtggacaattctgtggggtgtcagaaatggttggacctgtagattttgaaaaggatgctggttactggcagcaagacaggtggagtgggcagttcccagtgaaatggcatattgtgaaagatataccgaataaccgattttgtcatattcttttacaaaacaatgacaacaagccggtaacgcacagccgagattctcaggaggtgggcattacttatttttttgtcttatgatcattgattcaatgctctcttggttgcggtgccatagtgatatttgtcttggtgtcactgtgttaggttttatgtggacaagtcttgggcaatttcacattatcatgtatgactaggtgtatatacccagtaatagggaaatccttgcatatgtgtattaggtcaaacgttaatagttggtatagggatttggaagctacttaattatgaggtacttgaaagttatactttatagtctcccagggaattaaagcttgcactttttgcgttgggttttcttgagtgggatattaagcaaaaaatggaacatagaagagtaagtttttgtggtagggagagagatttggaacgcattaattggatgttgcatggatttataactaaattgattgatgaactgtaacaggtgaagctacgccaggggattgagatgcttagaattttcaaagaatacgaggcacacacatcaatccttgatgatttcggctactatgatgagttagaggggcaaaaggtgggagaagatggaacaaggaaaaaagctggggaagaagagacctccgtggagcaattatcacagcgccttcaagctgtcaaagtagaagatgggaaggaggaggaaaaaaaagagttaatagctgattga

SEQ ID NO: 155698 - DNA, 964 bp, Arabidopsis thaliana landsberg
caaaaaaaggtcacaaccggtttctttgtgcggatgaagaacacactcttgcgtagacggttagtgtctggctatgatccttgtacggagagttatgcagagaagtattttaaccgtcccgatgttcagagagccatgcacgctaatgttactggaattcgctataaatggacagcttgcaggtaaacagttcgcttcaccacctaatgatgactatgtaatgacactttgcatataactgatcctgaaagaaatggtttcttgtttgggttgaggcagtgatgttctgatcaagacctggaaagattcggacaagaccatgttgcccatatacaaggaacttgcagcgtccggtttgaggatctggattttcaggtaaactatggtccaatgtaactcgggatcatagacataggcggattcctaaccgtggatcaacatataaaccacagagccaaatcaggatcgaacctaaaccctaaaataatcaaatatagactaaatcagggtctagcttaatatggccaattattctttaggcttgtaatgaacctagcaaaactcaagactcactattttgggatttggctactaaccaaactgtggtttacactatcatatgcagcggtgatacagactcggtggttccagtgaccgcgacacggttttccctcagccatcttaatctcccggtgaaaactcgttggtatccttggtacactgataaccaggtacgatatacatacacatactgcatatatatatgtacatggatatgtattatgtaaaaggtattgatgtttacctgtggtcacaggtgggaggatggacagaggtttacaagggactgacctttgcaacggtacgaggggcaggccacgaggtgcctttatttgaaccaaagcgtgctctcattcttttcagatcattcttggccgggaaggaactcccaagatcttattag

SEQ ID NO: 155699 - DNA, 858 bp, Arabidopsis thaliana landsberg
taagcggctctctttggttttacaatggtcacttgaacaaacaaaaatttgaacaaacaagagaagacatatataatgatattatcttgactttgtcagggacacctttatataattgatgtttctcaatctgtggatctggaccatcctcttgcactcaactttctacgggaagattgtgaccatgtctcggtaagtgtcctgttttagcaatgcttaatttgactggaacgaggtgtctgatgtgtggaatatttcgacaatcacacgcaggattttttcaaaaaacatggtgtggctgtcatgacaatacgggagctatttgacttcatagttgacccggcaattacagacgaaaatgttgatagctatttggaagaggtaatgtataactttttatatggattgtcctttgaatcaatgtgcagcttcaaattaatgaattatgtaacaatgggcaggtccaacgaaaagttatagagcgaggagagatatcggtagaggatgaaatcgcggattcagtattcatgaaggttagttaagagtgtatccagttgtgtgaagttgtctgtagaatcatcttaatcttactggtttgttattgatgttcagtcatacataccgaaatctctggatgctgtgaacaaccctgaggccgacgtggcgaagataacaagcgggcaggacacaggagacatgctataccaaacgataacggggcttaaggatgctcttcctaaaatagaagagcagaaaatagaggtgaatgatgaagagaaagaagaggaagaagacgacggagaaagtgaagaaggaagtgaggaagaagagagtgaagaagaattgggtcctgaagac

SEQ ID NO: 155700 - DNA, 618 bp, Arabidopsis thaliana landsberg
gtgttcttgctctggactagattcctcttttttctgaatcatatgttttaccaggaagcattgcgaacatatgggttgaacgatgatacgacttgtgtaggcgtagacatagtgccatctggtcatctttgcttggctccagcacccatgaagaaacagaacccatttacctcatttctttcaaggaaaaaccatatggataccaacaacaaaaatggcaacaagctttctgctgttggagttgtagaagaattgtttgaagaaggttctgctgtgcttgcagataggtaatcttctagccatgagttgatattgtcaaactcttatccaacccgttaagtaactgaaacttcagatcctgactatcagtctttgtttgctcgtgttttgaaatgtagattgggaaaggatcttctctcaaatacggaaactgggctcttaaaatgtgctgtatgccaaatagatgaatctccgagtgaagatttatcaagcaatgggggttccatcatttcctcagcatctaaacgatgggaaggtcccttcctatgcacaatatgcaagaaaaagaaagacgccatggaaggaaaaagaccaagcaaaggttcagtgactacttga

SEQ ID NO: 155701 - DNA, 853 bp, Arabidopsis thaliana landsberg
  unsure (1)..(853): unsure at all n locations
gttggtgttttaaaaatggataagagttgggtatggctgccaaggaatagcattgagtacgagaaaggagcaacaacttttgtttacgcatcatcgagacgtttgggagatccttctgaaatattttgtccatgtacggattgccggaatctgtatcatcaaccaattgatactgttttggagcatctagttactaagcaaatggatcataaatacaagagaaatggatgttggagtaagcatggggagatacgggctgataagttagaagctgagcctagtagtgaatttggagcttatgagctgataagaacaacttattttgatggagaagaccattctgattctcaaaatcagaatgaagatgatagtaaggagccatcaactaaagaagaatctgactttagagagaagttgaaggattctgaaactccattatattatgggtgtcccannnnnnnnnnnnnnnnnnnnnnnnnnnnnnnnnnnnnnattaaagtaaagagtgggatgtcagagaattactttgatcaacttttgagtttagtgcacgacatcttactaggagagaatgtgcttccaacttcaacaaatgagatcaaaaaattcttgaagatgtttggttttgggtatgatatcattcacggttgtccgaatgatcgcatcttatacagaaaggagtatgaagatcagtcaaaccgccctagatgtagtgcttcgagatgggaattacgataaacacacaagagaagaaaagaaagggattccggctaaagacattagatatttcccaataaggatagattcggaagaatgtttagatcaaaaagaatgtctaagatcgcaggggcat

SEQ ID NO: 155702 - DNA, 1578 bp, Arabidopsis thaliana landsberg
atgacttcctacaataactcctccggcagtctcgccctggccgttgctcttctatttgccggcgccttatatatctacttctcatcacgttcagcttctgatcccatctccggtctcctacaaaatgtcaacactgtaagttgattcatataatatatatggaattctagagtacaaataaaggaagatttgaaatatattttgaaatggtacgtgacagagattgatacagtatccggtggacgagctagagacggtgctggacaaggcgtcgacaggaaacaacaagacggtgataatagcaatggtgaacaaagcttacgtggaggaggatggaggagggaggacgatgctggatctgtttttggagagtttttgggaaggagaggggacacgcccgcttcttaaccatctgatggtggttgcagcggatcagacggcctacgatcgctgcctcttcaggaggctccattgctacaagatggatacggaaggggttgacttggagggagagaaagtatacatgtcaaaagatttcatagagatgatgtggaggaggactcgcttgctcctagacgtcctcagccgcggctaccatattattttcacggttaggtccgtcccttgattttgtaacatatataacaaaacacttaatttgttgctcaaacaagtagtgtatatacaatgttaggatacggacgtgatgtggctaaggagtcccttgtcccggctaaacgtgagcttggatatgcatataagcgtggacagaaataacgtgagaggacaattgatcaacacgggattctaccatgcccggtccaacaacaagaccatctccctcttccagaaatggtacgacatgaggctcaagtctttgggcatgaaggaacaagacgtcctcaagaatctcctagactctggcttctttaaccagcttggtctcaacgttggcttcctcagtacggccgaattcagcggtttctgccaagacagccctgacatgggggctgtcacaaccgtccacgccaactgttgcgtccacatccctgctaagatctctgatctcagtcttgctcttcgtgactggaaacgctacaaagcctcccgtgtcaacagcaggtggagcccccatgttgagtgcaggcgttcatggaaggacgttcattatgtccccaagctctgactttcttcgttcatataagcaaattaatgagattgctaaactaccattaagggtaacacatgacatatgcctcaaccttaaaacataactatatcaactatatcaaacgctgtcgttttatcaaatacatcaaacgttgtcgtttgaccgacttctctctctctcgttctttgcattttggaaagttcgaaacagagcctctgtaaattacgcgtaaagtttcaatctttattcacacaattcacacagctaatgtaagcatgagaatcttcagattcacgtcaatctcaccgcggattttgccgtcgaatcattacaaaacattaccgttgaaacaaaacgtgtcttctctctcaccggcgaaatacattgcgggagctttacaagaacat

SEQ ID NO: 155703 - DNA, 623 bp, Arabidopsis thaliana landsberg
ctctctgaaccatagaactccaagcttgaactgtactctactcgtcgttgatatcttactcttttgattcctcttaccagaaaaaataaataaacagcaattttttcatttttcgactcaaatcatgcaaaccatttcgcctgcgttctcgtgcgatctcaaatccgtaattcaaccgaatctaacggctaagaaagcgcgttactctcacgtaaatggaaagcgcgtgtctgttcgttgcagttacaggtctgagtcgtttagcttccctaacggtgttggctcaagccgagccgattggcaaagctcatgcgccatcttagccagtaaagtagtttcggctgagaattcaagctccgtcgccgtcgttaacggacacagtaacggctccgttgatttaagccttgttccgtcaaagtcgcagcacaacggaaagcctggattgattcagccgttaacgataacagatctatctcccgcgccgtctcatggatctactcttcgtgtcgcgtatcaaggagttccgggagcgtactccgaagcggccgccggaaaagcttacccaaactccgaagctattccttgtgatcaattcgatgttgcgtttcaagcgggggagcttt

SEQ ID NO: 155704 - DNA, 1127 bp, Arabidopsis thaliana landsberg
agaaagaataggtaggctcatagaagggctctggtttagatactaggtgaactaatcaagcttattaataatgcatgctttagcataagatctctcggcttctccggttatcttagttgtaagtatcgagagtttcgcggaacgccaccggttactctagaattatagtttgagtttgagaacggtgcaataacaatcctgatattagctagatctacaatttatctatatcccgagacaattccttagacctgacgccttaatcacttgaatctacaactcatttactttcttatttgcctttaatattcaattactttatttagcttattaaacaacatcataagtctattgtgtgaacatcgagagctcagtggaattcgacccttaagtgctaacgacgatctcttaattgagggagtaagcttaaggcaatttgaggtatatcaacctctttatccagattgcacaaacaacagtaatctctactattgtttcactctttaggctaaagactcagggtggttggtctacttgagtccttgtcaaatatgctacccaagggtaatgtcttgcacatatccttgtacgaggtgaagaagttttttaaaacttttgatatgggttatgaaaagatacatgcatgtgtaaatgactgctgtttattcagaaatcagtttcaggagcttgacacttgtcctaaatgcaattcttcacgatggaagattaacacgcgaactggtgaggtgaagaaaggtaatccatagaaactacttaggtactttctgatcattcttagtctcaagaggatgttcatatcagaggacatgaccaaagacttacagtggcatttcactaacaagagcaccggtggaaaaatgtgtcatccggtagattctgtgacatgggatcaaatgaatcagaagtatcactcatttgctgcagaagaaaggaatattaggcttggactctccacatatgcggttaagcctttcaacatgacgaatgttaactatagtgcatggcctgttttgctactcaactacaacatgccacatgacccgtgtatgaaagaggagaatatcatgttggagataaagattcttggtccaaaccaacctgaaatc

SEQ ID NO: 155705 - DNA, 314 bp, Arabidopsis thaliana landsberg; identical to SEQ ID NO: 61604

SEQ ID NO: 155706 - DNA, 413 bp, Arabidopsis thaliana landsberg; identical to SEQ ID NO: 58601
  unsure (1)..(413): unsure at all n locations

SEQ ID NO: 155707 - DNA, 990 bp, Arabidopsis thaliana landsberg
ttggttcaattaggggcgggttggtgttcttcatctggatgattctcaccaaagcaaaaacttcacattcaaatgccacagagatggaaatgatatatattctgtcaactctctgaatttccacccggtaagctctatctatagttatactcttatactcgtatgtattctttgaagccttcagcatatgttgagcgatgaaaatgattgtttgagttgttgtgaatttaaggtacatggcacttttgcaactgctgggtcagatggtgctttcaatttctgggacaaagatagtaaacaaagactcaaggtattttcctcctgcattgattttttattttgttaaccaagtaattatctaacagttttgtattctgtgtccccacaggccatgtcgaggtgcaatcagccaattccatgcagctcgttcaaccacgatggatcgatatatgcatatgcggtatgatataaatcttatttggtttcactttatttgtacatgctcatgttatatgttgcaaaatcgagatggtcttttacttggaatctaaaaccatcattgtgttgaaaaacctttgagagcatacatgaatgctttctaacatgtattgttatataggcttgctatgactggagcaaaggtgcagaaaatcacaacccggcgactgcaaaaagcagcattttcttgcacctgccacaggtgtgtgcgcgtcacagacaatagtaatatcatcatgtttcctaaacattagtgtctgtatctaacggacggaatttgttttaaatgaaattgcaggaaagcgaggttaaggccaagccaagagttggagcaaccggcagaaaatgagcgttgcttagtctgatttcttcgctagtgattttttttttttttttagcttgtggacttcgttgggctttgttatctactttagttcatgacattttgaatatacattaggagtcttgtctaaaagactaaaagtaaatctc

SEQ ID NO: 155708 - DNA, 268 bp, Arabidopsis thaliana landsberg
aacatgcccttttggtcgtctctctcttatccccaagccggccctggacctgtcccatcaaagcacagagattgtctcttccatagaaagctctaatggaggaggagcttcaactcaaccagattcccagtcagcagccgaagcaataagtcacaccgatgatgtcgaagaaggtaaccgacatagtcaagaggtctctaaggagacggaacagaatgccctaaacagagtagggacatctgatggttgttgtacttgtagacttggt

SEQ ID NO: 155709 - DNA, 445 bp, Arabidopsis thaliana landsberg
ataaagcctgatcctgagtcattgaaacgatggattcatgcattttgcattatgaggtttgatcttgagcaagggcagctcttagaagagtgttatcccccagattgtctctcacaagaagaggaaattgaggtttcttttaactctttcccggattctgtctcacagcatcataatcgttcaagcatacatgactgcattttctttttccggtttcgtagaccaaagaagaacactgatgagagagatggtagtgagaggtacttgtatggttatgtatttaataggcagaggcatgatgaaagattgaaaaggggaggtgaacagaagtctgtggtgatattatcgcatacgccttactcgagtgtgtttaggcctttgttgcaaatcattggtcctttgtttttgatgttggaaataaggctaatgaacatattgctggtat

SEQ ID NO: 155710 - DNA, 960 bp, Arabidopsis thaliana landsberg
ataagtcacaagatcaatagacttacttatggagactactttcctggcgtcgttaaccctcttgacaagtaaataaccattctggtctattccattcacacactatttattttttcatactctctaacgtacttgaaattgcagagtcgagtggagtcaagacacacctaatgctatgtaccaatactttatcaaggtttgttccaagacaaacactgtatcatatacttcaaattcgtctataaaatacccgcgatgactctattctgctttgtctgctttcaataggttgtaccaacagtatacacagatatcagaggacacacaattcaatcgaatcaggtgaaccaaggcttttaactgttcgacctcattatctattcattctcttacgcgtactatcttaacttaaatgtaaaattggcagttctcagtgaccgaacatgtaaagagctcagaagcaggtcaactgcaatctttacctggagttttcatcttctatgatctctctccaatcaaggtgagtgtatttgtgtgttttacctgcagttttagagcgtatttatagtcataatcctaactaaaatgtgtcgtttccgtaggtaacatttacggaggaacacatatcattcttgcacttcttgacgaatgtttgcgccatagttggaggtatctctctaatctctatataccataacaacacttgttggttaacgcacattaaaatccgaaatgaaacatgtaaaaatgcgcaggtgtcttcacagtgtccgggataatagacgcgtttatataccatggtcaaaaagctatcaagaagaagatggaaattggtaaatttagctaaatcctttaagcctttttggggttttcgtctctctttttgttttgcggataatacgattcatgctccaaatgtaatatggtgtcatttatttaattctttttgttaagctgact

SEQ ID NO: 155711 - DNA, 706 bp, Arabidopsis thaliana landsberg
ccccttttgaaattgtaggaccaggtgctcagaaagcgggcagtgctacgagtgagaaagctcagagagctttcagtatgcaacagagaaaggaaaagaagctggaaatatgacagctgaacaggcggcgagagcaaaagactatgctctgcagaaagctgttgaagctaaagagactgcggcggagaaagctcagagagcttccgagtatatgaaggaaacaggaagcacagcggctgaacaggctgcgagagctaaagattacactcttcagaaagctgtggaagctaaagatgttgcagctgagaaagctcagagagcttcagaatacatgacagagacaggaaaacaagccggaaatgttgcagctcagaaagggcaagaggcagcttcaatgacagcaaaagctaaagattatactgttcagaaagccggtgaagcagctgggtacataaaagaaacgacagtggaaggaggaaaaggagctgcacattatgcaggagtggcagctgagaaagccgctgcggttgggtggacagcgtcacatttcaccagggagaaagtggtgcaagggacgaaagcggttgcaggtacagtggaatgtgctgtggggtacccagggcataaagcgggggaagtagaactaaggcaatggacttgactaaagagaaagctggagtggctgctgataccggggttgggtata

SEQ ID NO: 155712 - DNA, 902 bp, Arabidopsis thaliana landsberg
  unsure (1)..(902): unsure at all n locations
caccaatgtcgcgataaataggattccaaggtgaactttccaaatctaagtaacctaagccccactcgaatgtgcttcaaaagctgatttcttgctttgttttagagttccagaaatcatgcctttatatgacatattgaacgaattccagaaaggactcagccacatggctgttgttgtaagacagtgtgacaaaatccacccattaccttctaaaaatggtaaactgcttcattaatcgacaaaacaatgtcttgctgagttacaagtattgagaatctttgctttggtttctaatagggagtgttaaggaagcccgagtggatgtggatagtgagggaactcctactcctcaggagagaatgttaaggacaaaaagatcgcttcaaaagtggaagagctttccgaatcgagcaagttcgtttaaaggagggtcaaagagcaagaagtggtcaaaagacaatgatgcagacatcctgcaattgaatggcaatccgctgcctaaacttgctgaggaagaagaagcagtcggaatcattacgatggagaatgaaattgaagaacttctgcaggtaaggaatcttatataagttaaaaacaaaaattctttttcacggattaattattgcttggcttgtggttgcaggaggagatctttgacgaaactgatcaccattttgaagactcctaacacagagtgcatgaccactnnnnnnnnnnnnnnnnnnnnnnnnnnnngtctttgttttcaactttcaaactgtcacttgtccggcgaatgtgtatcaatgtaggcatgaacaacaactttttctatggtttcaagatgttttctctctatatatatatcattggtctctaagatatgtcgctctctcctttcttcaaagagttttaccaaa

SEQ ID NO: 155713 - DNA, 1259 bp, Arabidopsis thaliana landsberg
gagagagagataaatgtccaagcaaaggcaaagtttcatataattttatgttattaaatttgctttttttttgttaaagtgttacatacatcgatcgacttgttaggtcaaagaatcagtttaactccactgagccatcatgggtcgatctcaagaacaaggacagggacagggtccggttcacagcatccggttatctaccgtaggtgcgacccggccgacagagacgggtacaacccacgaaccaaccggtttagacctagccatgaagctccactacctcaaggcggcttacatctactcagccgagacagcacgtgacttaaccgtgagacacctgaaggaggccatgttcatgttgttcgaccagatcgcttggaccacaggcaggttctcaaggagagactcgggccgtccgtacatcaagtgcaacgactgcggcacacgtttcgtggaaggtcaatgcaatctcactgtggaggagtggcttagtaaaccggaccggtcagttgatgagtttctggtttatcatcatcctattggaccggagttgacgttctctcctctgatctacgttcaggtataatctgactacaccaagtttatcatcttaatttagtttgttatattccttatttagttacgttcacacatgcataatattgttctatctaaatatcatacacaaatttaataatggtactgagacaaatttgactatacaaaagtgctaaaaatggttatatatacatgatatggtatcggtatgcattattcaatcttgaaccctgtaccaaaaagagaattattcaatctttaatatatatttgacagaaaaaaggacacaccatgttgatggggtctgatttatagagtcggaaaaaaaggcaaattattagctaaactaggttagaaatctatattgggtttcacttgtctttcgaaccatatgccctaatcaagaaagacaaagaacatattaaaccatttaatgcatgtacagtcacatcaaaatttaatacacgaaagatcctgttcgtaccattaacttgcatgaaaacacactgcctctgagtaggtgtaccaaaatttaataaaacattcggacttttcaatgttgtattgccaactagattgggacagatttgttggacccaagtttgaaatatgtaccagatggatcagtgacatcccaataagctgatccaaaaaaacaagaaaaataatagaaaatgtggaagttaaaaagtaatgtgtca

SEQ ID NO: 155714 - DNA, 421 bp, Arabidopsis thaliana landsberg
  unsure (1)..(421): unsure at all n locations
taatctttaagagtttggcttctacatgaaacaggtggtgggttcgaatccaaggacgcntacggatcaggtctctttgaaatgagaatcaaagtgccttcaggaaatactggcggcatcgtcaccgctttttacgtttgtattcttgattagttacataaattcgtagactaatccaaaactcgtatcgataagttgtctatatgtgtaaataattatacagttgacgtcgaaaggaggtggtcacgacgagattgacttcgagtttctagggaacaacaacggaaaaccgataacgttacagacaaatctttttctaaatggagaaggaaacagagaagagaggtttttgctttggttcaatccaaccaaacactaccacacttatgggcttctttggaacccttaccaaattgtgtac

SEQ ID NO: 155715 - DNA, 1286 bp, Arabidopsis thaliana landsberg
tggacaagatccaggaagttactctcaagtcggtcccatgcctcggacggaaagtacatcctgttgaactcgtcctcaaagtccttgaaggtctcgacacgctcacccttgcgtttatcaaccgcaagccaccagttatgcgcatcgccctccaacaggtggatcgctatgtccttcttgtagtcctccgggaaacttgacgtcacatcaactcacacaactcttaaggtaacttctctcctcctttattatttactgcgctttgttttgtagaagtagaaaaatcacgtttttgttttttttgctatctccttcgtttctctgttattccctctttctcgatctgccttctttgctttttttcttcacctctctcgtccttctccgtcgaaacccaaagatgagcgacttcgaagattctcagaacaaaagcaaccacagttacggcgacgattcaagttcgtccgagacgaggtcggcggcgtcaccgccgcgagtacaaagacgcggcataaccctaggcggaatgggtccaattcgtctgccgtcaatcagagccgacaaaccgaagaagaaaaaggctgccaagcaagggagaggcacgtagatgacgaatgacgacctggtcgacctccggaggagatgccaggtttcggtggaggtacatatgatactcccaaggccgccgctgcatcctgagaacgtgccggtcgggtggtgctgcgcttatgccaatttcttcgagaaatgcggcctattttttccaattccggcgtgtatcctcaagatgctctactgtcttggcctcgcctttcccagatgtgtccgaacttcgtccgccgtgtgctggcgttattcacccaggctcgaaaataaatagagaattcagctgccaagacctgcttcagctctgccaggtcaagaccaatgctaggagtgaccaagggacgtactacatcagtgcacgtcccggatctctggtccttggcggtttgaaagcctgtcgagaaaccaatgggcgatccaagtacttcttcttcagagtagatcgtcattcagtcggtagttttgatcccacaaggatgacgaggacctggtctaccaacttgggtcagatggagacctgagtctcttgattttttttgttgtttctgtcgaattcttgactgcttttgctgaactgttagtatcgatactaatgttatttttctttcgatggtttgcagcaagaaccaaggaggttactctctcggagacggaactcgagctgttaacccttctccgat

SEQ ID NO: 155716 - DNA, 679 bp, Arabidopsis thaliana landsberg
gtatatggctacggtggtgttagtatggtagtcgaggtcttaacagacaaaattaatcgatcagtggcagctattagatcggttgttaaggattatgggggaaaaatggctgattcaggatctgtcatgttcaagtttaaaagagttagggtagtgaatataaaggtcaccgaagctgacaaagatcagctccttattattgctttagatgctggagcagaggatgttattgaacccccaacttatgaagatgatactgatgaagacagggaagagaggtatataaccaatataatgtctttccgcatttcttttcttcttgtcagtattacatttattattttctgttgctggtgaatcctaagttagggaagatagagatagtcgactcacttattcaaatgcgttagaaatttctttcaagattgaattgaaaaagtaatcaagcgactgaaggtagacctagtgtattttcttctcataaacagctaaattgcaataaaagtttcacaccaaacgatttgaaataagaaatccatcttgccaatctaagacgagatgatacctaggtgactcataactattatgctctttttttgtttcatcagcttcttgtctctatatctgttcaggtactacaaaattgtaacttttaatgagaactacctaacaatattat

SEQ ID NO: 155717 - DNA, 2190 bp, Arabidopsis thaliana landsberg
gtttaaagcaaatgaactctacttcttcctgcaggttttaaataagattgaccttccaggcgctgagccagagaaagttctcagggagattgaggaggttggtgattatgttcattgtgttacccattttatgatgttcgtattcaatagcaatcatacaatgcaaccagtaataatttgaacagtattcctttttgggtgtctgcaaaaactcttcagtcttttatttttctgttgtcaatatgttatcttgacattttacaaggttctagcttctagtattagatattatgttgattattgcggtacattcttttatgctttaaacattttctttgtgatattatgatccagtctcatgttcctcgaatggggtaattgtctcattgctgcaatttcagagacatcagcctttatgtgaacactgattgataattcatattgtttgtaggttattgggttagattgtagcaaagcgatattctgttcggcaaaggttagattttaaaattgttttgctattctgctacccaaaaattaagacgtgtggctttctatccattcaattacaatttttggggaataatatatacacgcaggagggaattggtattaccgagattttggatgcaattgttcaaaggatacctgcacctctcgatactgcaggaaagcccttaagagctttaatttttgacaggtttgcacttgttgtttttattcataacgatttttgccttttctagagaaaacagtatgaaattgagtcttggagtcgaagttgtattcgtatataatgattggactgatcattggcatgtcaagtcagtaccagttaatcactggtgaactaaaaatgagtgtgaaatactcgtgtttgttttgcttgattagtctacaagtgtgcagtttttatatgtgaactactttatatttttcgtccaaaattcattttgctgcagttattatgatccatatcgtggtgtcattgtatactttcgagttatcgatgggaaagtgaagaaaggcgacagaatttttttcatggcaagcggaaaggtttatctcttttactctactgtactgtctttctatttaatcgagatagctttccatttgccaataatgaattgaatgtaatttgtgcatgagataggttttcgcggtctatttgaataaagcgatgtgaagtgttattctataattctttcaggaaaaatttgagaatgtttaagcttttaagaacgcttacttgtgtttcactagtatccttcatgttctcagttttgcatcaattgcaggattattttgcggatgaagtcggagttctatctccaaatcaaattcaagtggatgaattatatgcgggtgaggtagtgtactcttttgaacataatattttgtttgttttgtttactttcctgtgcatccatgtcccattttcttgttgaatttttttctttcagcagaaaccttggtattatgaaatgaaaatgtcagtattcttttgcagtttccgccgttctattccaacacatgttaataggaaaactaaaagcgtttgtaaatggaaggattttcttagcatttccttgtagcagctttggcagaagatagagttgtggttaataacaatttgaatgcaatgaaacaaatatgttttcacttttcttggttggctatatttgagaagaaatggttagttgcatcttcccttgctcaagttctaatagctagaaagatgtttttagcactgattgatgctgctggtgtatatcagatatgcctgaatatcatgccacatttcttgcacatattttaaaggttactgtccttaaatacaggtaggatatattgcggcttctgtaagatctgttgcagatgccagggtaggagatacaataacacattatagcagaaaggcagaaagctctttacctggttacgaggaagctacccctatggtgttctgtggtctttttccagttgacgctgaccagtactgagtttttgtttttcattgttgactttttgctttttcattttgtatttttttttttcacacctggtctatgatggcaggtttcccgatcttcgcgatgcattggaaaaactgcaactcaatgatgctgcattgaacgtatagctgaataaaatgacagaaacaacatttttctttcatctgttacc

SEQ ID NO: 155718 - DNA, 863 bp, Arabidopsis thaliana landsberg
tgaatcatgttctccgttttatgaagttatgacttttaaatgttttcacacatatgactttttcatgaaattagatgttttcacacacgatttctatttctgaattcatacaaaacattttaacatttggaaacatttctggtacagggtttcatttccgtctcatctgtgacgtagtaggaagacgagtgtgtaccagctgcaagatccggcttgagcacactgtacagagaatcggccaaggcactacgtcgtctggtggtttctcgtgtgggtaaccaaaaggtattgccttggatggtgtcctcgacagcagcgattcggtgcgacgacaaagtatcgctcagccagaaagtgtcacatgcaccgtcacgccaaaagtccacataggcctccatgtcttcctctgggactcctctgccacggcagatttctcctcgccaccaaggagtagcagcggtgggactcacttgttgtttagtaacgaaacgctggattccacggagttcccacggtatggtgaggttttaccgccacgacaagtcggagacagacaggtgatgccgttaccggatgaagatgtgtttaggtttgaacgtgaaaatgccggtaatgcttcatttaaattccaagagattcctttcaccaacgagtctttgtgatggaaatctacttttgcttttttcgttatattatattttgggagatatgttttgatacgtgcatgtaaagtaattggaacactcgaggagatgaactaagggtaagttagttatatttctatatttagtttgctccggtgatagatcatggatgcttgttcagttgttcctttctttgtaatggaaggatttgttatcttc

SEQ ID NO: 155719 - DNA, 604 bp, Arabidopsis thaliana landsberg; identical to SEQ ID NO: 70987

SEQ ID NO: 155720 - DNA, 1305 bp, Arabidopsis thaliana landsberg
gcaaagagaagaagatctcgttgacgccccaaaaaataaccagaggtaatggttccgcttccatgggagctagaggaagatatactgtctcggcttgcagcccaatctcttgttcgattcagatccgtttgcaaacgatggaattatcttttcgatgaaaagagtttcatcaaaaaccacttcgctcgtgcttgtcctcagttcatcttcatgaccgattccaatatttattcgatagagatcatcggtctcgacggcgttgatccaacgattaagttacgtgtgctagactcctctggtatcccttaccgtgactggaaatttgcttacataaccatcactgcttgcgatgggttcttgttttgtaactcttgggctagtcctaaggggacagctttttggaatccgtggttgaaacaggttaaatgtgtcgccctgaagatgggagctcttacgtataccaacagagagttgcgatctacgactgtgcctctcacgcgttcaagtttattgaaatatcgaacaaggactggttcctaaccgatgttacacgattcagtgtgtctttgaacggaaatctctattggctttctcctattcccaacaagccgaaccgacccatttgggttgagataaatacaaccgaattgtttgagtcttagattgggtttggtttggatcggttagagttcggttgagtcgggtcggttcggttggttcggttaaaacgcccaggcctaagattttgctcttatataagagacaaaatacctcttaaaaaaaaaaaactcttatcaaaactcttaacttcaaaataaattataaaattattgttaagaacatttgctaacagcccaccaatgtgaatgctctcatatcttcatcattgttttccttgtctgcatggcgtttactttagatatgctccttacaactcataaattctttccggtcaaacgaagccaatggcttttcccatgtcctctcataacagctttcagttcgggatcagtctctgcattgtacaactcatatccggtaaaagtccatggactctctattctcaagctgagtcgaattcaagaatgccaattttttctcgaaatccttctccaactctgtacagtcacaagtcattactctcttcctatacacagtcgaaacagagtcctatgtaaccacacaaagcagagtttaaatcaaattaagcaatataacgcacgaatcaagtgagtcagcaaaatgagataaaatatgtgcaatctagaaattcaggagattgatagatccaccgtcttacacatt

SEQ ID NO: 155721 - DNA, 772 bp, Arabidopsis thaliana landsberg
cactctcacacttcgatatctccgccttcattcttctcagagccaactgtcctgagatttcgatttctccaatctctcttcctccgtcgccggcgaaactatgtctcagtctatccaattctccagtccttcacacactcctcaccttctccatctccctcactcacaattcaaccgtcctctctcctctatctccttccgtcgcttccctctaacaaccatcaaatacacttccatcagagcctcctcgtcaccatctccttcaccggatctcgattcatcgtcctcatcatcatcctcgcaagtacttctctcacctaacggtactggtgctgtgaagtctgatgagagatccgttgtcgctacggcggttacgactgatacgtctgggattgaggttgatactgtgacggaagcggagcttaaggagaatggatttagaagtacgaggaggacgaagctgatctgtacgatcggaccggcgacttgtggatttgagcagcttgaggcgcttgctgtgggaggtatgaatgtggcgaggcttaatatgtgtcacggtacgcgtgattggcatcgcggtgtgattcgtagtgttcggaggcttaatgaggagaaaggctttgcggttgctattatgatggatactgaaggtagtgagattcatatgggagatcttggtggtgaagcttcagctaaagcagaggttgtttaatctcttcttatttcgattcgagcttgatgtagacattgttgtgtttgtgatttagatgtt

SEQ ID NO: 155722 - DNA, 3015 bp, Arabidopsis thaliana landsberg
  unsure (1)..(3015): unsure at all n locations
ttcctgaccttccccattattctattaactcgcgaccacgtacgatgtcgacctcagaagattgcttctaggactccttcaaattcaacgggaaactccgagctaggtttgtaccaatctgcaataggagaaaaggttgtgagaatttaatcaaaatcaaaacaactttttaccttatctatttaaaagaaatttaccaggagcctctgtccacatcctcttccttcccgagaacgaacgctcataagactcgaagtcaaccctaacgtagaagtaatattcttcccagttcttgaaattgctgactttaggaccgggaagaaaattatatttagggcggttattcattacccaaaatgcaggcgacctgatggctttcagcgtcgtcatttcttcgaaacaatggacgttcaccaggtaaccttcttcagcgccgaaagttaaagcagcaacaaaattgcagatcgccatgcgacgacgagttagaaaagcaaggatcaggaatgggataggaaaccagagatggcattgtctgaagtaggcctcgtacaaacagacatatcctcgaggaggattccaaggacgctcgtcttctccaggaatcatgtaagtgagcgggcgatctccataaccgcaaagggcaaataattctgcaacagactaggatgtcgaaagggtcctggtcgcagcaatctcggtgttccaatcaacgatcggatcgaggtcaaactcgacggtatctacagggatcaacctcacctcaacttcagcttctctatatcccggatgtgtattataagtatcttccagatcgatgagggggtcgaattgatctaggtagtccactggttcttcatgagcagctgggtttccatcggaatcttcccgatctggctcatcacgcaacgttggaattttgatctgatttgatcgactagattgagcctcgtctctaggattcccggcgaaccgagagttgtggcaaactaacattgtttcgctctcggaagaagaagaggacggagagacaagaacaaccttacccattatcggacaaatcgataaaagaaccgagagtacaaaataattcgcagaggagagagcgagagctaccttagattcttcttgcaagcggcggagggtgaggggccgagggtttaatctaatataaatagagtcgaatgggcggcaaacctacgaggtcatcattaaacccacgagacgcttcggttcctgagcttcacgcgcgcgtacagacgcggtgatttgacacgtgtcagatacgttcgaaatacgaatcgattcggaaatctaatgattaattcacgctttccaagatttaaatcgaatattcaatttctaagttcggaaatttcgaattaagcaactcggattctccgaactgggggggggactannnnnnnnnnnnnnnnnnnnnnnnnnnnacaataccaatttaaaccaaggaataacgtgaataaaatcgagaattcgattgaaccggggaatcccggctagcccgttaatgggcctaagtcatgagctcgccagaagatttgggtcgacaatcgagatcctcataggcggcttctcaggtcgtgtaaagggaaaacttccatttaaggaggatctcatgaagaatggaagtaatgaagatttagacctaggataattagaagtttatcatattttgatacgttcaacccattgtataaatagggggggtcaaagtccccaaggatcatctttaaccgaatacaagagactacaattatagagcaaaccccagctttttattcaagcaactttgttctctccctttgattatttgtgagctaagagaggagtgaatttgtctaaatcccttagtacaaattcattgtttggtttacggaatcaacaattggcgcgccaggtaggggggaatataaacaaattctctttacgctcttttcgaaactcccgcaagaagaaacgttgctaccgatcgatgaccccatcatccctccaatcaacggcgacggtacagagtcaaccctccttaacggagaacatccctcttcgccgcagctgaattagctgccaaggcagccgaacatcgaatggctcaggaggcgaatcctgtcaccccaaccatcgctccaccaactttctctctggaggacctcaaagccatcttcgccaccgtgactaaagatctctccgatgctgtcatataaaccaaccgccgattcaccttcgacttcacggacgcacagtccaacagggtcaacaccatgttcccagggctacaccatcatgtcagtcagcacgggagaccacccatgccccccccatgtcgaccggtcacacctctagacctgcaaacttggaccacggtgggcagataaacgatatctttttgaaactccgagagattgggtctcaagtccataaggctgtcagcttggccccgaagatcgatcggatgattgaagaaacccagaagacttctttcacagatgggattacacgcacacgaattcctcaggtaaaactcaggattccgatctatgagggaggaagcgacccaaacagttcatgacttctttcatgacaacaatcgctaaagctcacttcttggatgaataaagagacatcggctgttgccaactctttgtggaaggtcttgttgggaacgccttaacctggttttccagattagaggcaaactcaattgacaacttcacccagttgtcaactgccttcttgaaacaatagagggtatttattcaaccaggtgcctctagttccgacctttggagcatgactcaagaaaatggcgaaacactgaacgactatcttggtcgtttcaaagaaatactgtctagagttaccatcacggatgaagccgaggtggctgcttttaggaagggactgctccaaggatccccgctgagaaaagaccgcaataagagaaccgcgaaaaaacgacgcattggtcgtcgaactggtaatggagagatttcgacctag

SEQ ID NO: 155723 - DNA, 1344 bp, Arabidopsis thaliana landsberg
gtaaacgctggattcctattctgaataggtctagagcttcaggaacaagtttgtctgagcttgaaattcatggtaactagttattttggtgtgtcatgttcctgttttcactgctcatacttttctggcgattaatgttcttctccgataaatatctttcaacaggtattaaacctgaagaattcgatgaggatatacaagtatggagatcagcccttaaaaactattggtccttgcttacacctttgattttctcagaccacccaaaaagacctggcgatgaagatcctgtcccacctttttacatgatacgcaatgctatggacatgaatgcccgttatgggaatctgaatcaggccttacttaaccaagggaaatcagtttgggtgatgaatgttgtcccagtcaaagcacgtaatactcttcctataatacttgatcgaggttttaccggcgctctacatgactggtgagtgtgtttcccttagattccaaaaaagagttcgaaggtgttgtgcatcacatttatcttcatttcgcttaaaacatttgagctccaaaaaagaattgtttcttgtccattaattgatgtgcaggtgtgaaccattccctacctatcctcgaacatatgacatgcttcatgccaatgaacttctcacacatcttagctcagaacggtgcagcctaatggacttgttcttggaaatggaccggattctccgccctgaggttctttttttatacactccgaccatttgtcatatgatcctaattaggggtaaatcataagctgagagagacttagcgttttctggttgattgatagggatgggttgtgctaagtgataagcttggagtgatagagatggcgcgtacacttgctgctcgtgtacgctgggaagcaagagtcatcgatattcaagacggtagtgaccaacggctccttgtttgtcaaaaaccattattaaaaaaataactcaaaagaaaagaagcaaaattagcaaactgtcaacgagtttgcttctctgcaccatcgacactaagtacagtttttttaataggtaatctctcgctctctctctttctctttctcttttctctgagctttgaaaacttaaagaacacacaaatatcttaatctttatacattgagggtatctctgcgtaattcattagattgaatcagagtttcactttagtttacagatccaagtactgatgcttgcagattctggagagaaatcaagacgatgaaaatgggagacttctgcgactttcttagcagtgcaacggttattcaaattacgacattctttatattttttctgtttgcaaacaagaaat

SEQ ID NO: 155724 - DNA, 674 bp, Arabidopsis thaliana landsberg; identical to SEQ ID NO: 14150

SEQ ID NO: 155725 - DNA, 610 bp, Arabidopsis thaliana landsberg
cctgtaaatgtttccaccttaaaagatagatatgtacttggagaacagttaggctggggtcagtttggtgtgataagagtatgttctgataagttaactggagagaggcttgcttgtaagtctatatctaaagacagactggtaacacaagatgacatgaagagtatcaaactcgagattgcgataatggccaagttagctgggcacccaaatgtggtgaatctcaaagcagtttacgaggagaaagattctgtgcatcttgtgatggaactatgcgcagtcggtgagctttttcacaagctcgagaaatatggaaggtattctgaggttcgtgatagggtgctcttcaagcacttgatgcaagtggtcaagatttgtcatgataccggtattgttcacaaagattggaagccggacaacattcttatggccacaatgtcttcttcgtctcctatcaaattggctgattgtggactggcaacctatataaagcctggtaagatcaataggcgtggctcgttatcagtcatccaatccaaagagtgggagtgtgtattctaagaaatgggttttcgtgtgggcaggtaaaaaactgatcggaacagttggt

SEQ ID NO: 155726 - DNA, 1479 bp, Arabidopsis thaliana landsberg
  unsure (1)..(1479): unsure at all n locations
atcaggcggcaacatattgattgatttcaaatttgaagcaaaggtacgatttatctttctttcttttttaagtttccattaagacattgtgattatatgtaacttggtacgattattttcgtcaggaaacctttgtgttttgtgtctttattctatcttttaggttgctgattttggtctcgccaagattgctttggatacaaacactcatgtatctacacgtgttatgggaacctttgggtaaagatcatcttgaatctactaaatatgtacatttatgctcattttgtacttatttttgtgatccttatatcatcgtagaaattactgaaacttatggttatgggattttaggtatttggctccggaatatgctgcaagtggaaagcttactgaaaagtctgatgtttactcattcggcgttgtacttttggagctaataacgngacgtcgccctgttgatgcaaacaatgtctatgcggatgacagcttggttgattgggtaataaatataactgcaaataatttagccttcacatgattttaccatttgactgttgaaaatgatgcaaatgctacgtgtgcatggaagtaggcacgaccattgcttgtacaagcacttgaagaaagtaactttgaaggtttggctgatataaagctgaataatgagtatgatagagaagagatggctcgcatggttgcttgtgctgcagcttgtgtccgctatacagctcgccgaagacctcgcatggaccaggtaacttaattagtctttaattttcttagcaaaaaaaaaaaaactgtctttgttttaggggttgacatttggtttttcagttttgaaatatgtaaacggtagaaccaaaatatgttcagtttttgttttggttggttatgaatacaaaaattaccaagacataaatcagattttagttttaaccaatatttatatatcttataataaaatatatttatagtatagagctagtgtataccaaaaatatgattttgattttggtcattttggttggttcggtgtttatgcctatatgtattttgttgtatacatagtataatatatttaaacaacattacttgaataaaactgacatgaccgaaaagtggggcacatgtcttcctagccggaatgttttgttcagtttgcaaaataggagtcaattaagatgttaataatgcgaacggctaattggtgtaaaaaaatgagcaggttgtgcgtgtgctataaggaaacatatcgccgtcagatctgaatcaagggataacacccggtcacagcaatgtatacagttcatagaggaagcacatattatgatacgagaacaatgtagacgtacacgaggaagtttcggataaaattggggcacggtgggcgagtacagtaatccaactagtgactatagactgtatccgtccggctggacgctcgagcagtgagggtcaagccacacggggaaatgg

SEQ ID NO: 155727 - DNA, 484 bp, Arabidopsis thaliana landsberg
  unsure (1)..(484): unsure at all n locations
gttcaaccagggctccgacgatcgnatgtctaaattccatctagaggactccgatatgaaactcccgacggcgaagaccgacggcgagatgggagcaaggaggatgaacgcattcgacatcatctcaggatctccagggttcaatctctccggtcttttcggagacgccagaaagtacgaccgagtggaacggttcgtgtcggcgtggacggcggagagggtggtggagaggctggaggagatcgtgtcggcggagaatctgacggtggcgaagaaggaaacatgggggatgaagatcgaggggcaaaaaggtaacttcgcaatggtggttgagataaaccagctaacggacgagctggttatgatagaggtgaggaagagacaaagagccgctgcatctggacgagatttatggacagatacactcaggcctttcttcgtcgagcttgtgcacgaatcagaccaaacggacccagaaccaact

SEQ ID NO: 155728 - DNA, 596 bp, Arabidopsis thaliana landsberg
cgttgaacaaacagttcaattcggtccatgctcgaatggaaaattctgggctggaacagttatttctcagcgttctggttcaaaatcatctaatttctggtacattttgcttttaagcttattgaatttcattgaaagcatgagtgtgttatagattaatcaaagttgacaacttttcaggattccgattatattcgaaggagatttagctaaaattgcagttcaacatgtaaagaaagaagatcggattcatgtttccgggaagctgtttattgattcgcctcctccaaatgtgacatattctcaatccaatgttcaggtgacacacttcttacaatgtaatctgtttcatgttcctttgattcattgataacatgtgaaggttgttcataacaggttatggttcagaatcttaacttcgtacaagctgctacttctacgactaagacgatctcaccacctgaaaaagaagtaaccagcatcaagaaaaagcccggtaggtctctaatgtccttttcttaatgttatgcgagaaaaaaatacctccagagagagcctattttctactcagtgtgattccttttggcaatatctct

SEQ ID NO: 155729 - DNA, 2931 bp, Arabidopsis thaliana landsberg
ataatatgagtgaaaagttggtggactccgtttgcgaaatgtttacagattttttaccagaaggaaaccaggctaccacttcacattaccagaccgagaagttgatgcgcaatttaggacttccatatcatacgattgatatttgtcagaacaattgtatgctattttggaaagaagacgaaaaagaagatcaatgtcgattttgtggcgcacaaagatggaagcctaaggacgaccgtcgaagccagattatagagatggttggtttctagtaacaatcctaggtcaggattcaaacaacgaaaatgagaactttaaaagcctttctcgatcattgggtcgagtaaaaccaacatgtaacaaatttaagaactaaaatgcaatcaacaagtaacacaaataacagttaaatagaagtgcaatgagggggtgaatacaaataaatctaagaagaatagaagtcctaaggatggattcattgataagggcaactctagggttcatcaagtggctaacaggtgaaaggcacataccctagacgatagattcaaaaaccgggtcaatccactcgcgtgacagagaccctcataactctactacttcctaatcttaactctcattgatgaaacatagcagagcagggtttaagcaacaatctaccaaagtcattaagcagtctaaacatccaatctcttcgaatagaatctacaaatctctggaattcgtagatcatgcatccatttgaacgtcttttggacgctggatacctatggtcgaattcccacattagccagcaaaaactgcataggggccaacgaatccagaagggatctaacctaatcttaaccacctgactaacctagagattaccctaatctaatccatcgtcaagaaccctaatcactactcaagcaacataactaagaacacaaacctagaaattactgaaatcataccaaaatgtagatctaaacaagataaacaactttacttaaagaactaaatgcaaaaacaaaatagattaagagtaattaaggtttcaagattttaaaacacaaagaaaaactaagagataaaagctttgtcctttggacaaatcccaaagtgacctatttatactaaagtctcaaaaaccctagattccctagaagaaaagagacttcaggcggtttggatggattctcgatcttggggatcgagtaaagagggtgctgcaaagtctgagcctttgtgtatatgctccgagtgatcaattggtcgagtagatgcgttttcctctcctattcttatgctcagatgtctggttgagtggggaacggggaggatctgaagacgctgtgatagatcaacaagtcttgtagagtaggttgcccttgatcgagtagaggatcgagtaaaagggtcgagtagattgatctgctgcctccaatgtagctgcctggatcgagtaagtgggtcgagtgaatttctctgctgtttccctcctggtttgatagagtagagggtcgagtagattccttgtaagctccttctgcacctgaaaacacaccaaaacatgcaatatgtatgcaagatgatcctaaatgcctaggtgtgcaaaataagctaaatgtgatgcaaaatgatatgatacaatgagtgatcacttagctaaatgatgataaatacatgcctaaaatgagtaaaatacagtgttatcaactcccccaaacttatttcttgcttgcccacaagcaaacaaaaaatcttgagttgaaaaagaggtttgaaggtggggattcaaaaactgaagcatgcatatagagcgggtgagatcaatgtccaggtaggtaattctaggttgcaaggtgataggtccttacttaaaaacttaagccatactcgtcacaatgcaacctatcacccgccttaatctattcaaacattcatatcaaccttttttccttcaacatttattaagcacgaatagtggatcaagcaatgcaatgattacgaactcatttggtttcgggcttaggctaagagacaaaaatggtccctctaatgaattggtcgagtaacaggggactctcatagaaaagattgagctttaccagaatgctagaatgctaaaggtaagaaccaacggacacatacaaaaggagactcccatatacccaatgatatatagtatgatagctcagaagatgatcccagtcccttagatgtcctaactctacccttattctcattctttctctcttttggttcaagttctcaagggtgcttctttaaaatgattcaagagtctagcgggtttggttttaaactttggtaaacttaaggcttttcttctaaacttatagcatagagggcgttttacccttttctttgaatcacaatgcctaacttcttactctcttttttttttcttttcttttcattcctattccctttcccattcaatccatacacaatcctaatcccaaatacaagtctccacctagtcctagctaacccaaaaagcgtgggctaggtctacatgaatgactgctcttgtcggctcatacgtaacacgttataccaagctcaatcgaaaaagacctcacaatcacacacaaattatctttggcttgaaataaggctaggctcagggtatgggaaactgctctaaaaatgagagtcagctacttggattaacagggggtggtgaagtaaataagataatccaaatatgtatatgttagccatgagttcacaaacaatgcatagacatgataattgcaaattcagtttagcttctaatagatatggaatggcatcagctaagcaagtttcgaatcaaagcagtatagtcaagttacaaattcaaagcagggtgtagtcttacttcatagatacaatcggttatgcaaccgagaactaacaacctgggcattgaacttacttcat

SEQ ID NO: 155730 - DNA, 1263 bp, Arabidopsis thaliana landsberg
gtttttgaagggagcttcaagcattgatcagcatttccagtccacaccgttcgagaagaatatacctgtgagtgctttattttgataatcactaagagtaacctgaagtcatcatttaacaaagaattactcttccaagaagttgcttatactcaggatagcaagcatttacattaactctccatagggatttctgtaagttagtttaattagtgtagtcacgccagagtgagaggttgatttggtgacttttgacgatttcaggtgcttttagggttgttgagtgtatggaatgtatcatttcttggatatcctgctagggtaagaatcgactcctttatcagaaagctgaagttttcatctcagtttaagatattcagcctccatcaacatcttttttgttttctcaggccatcttaccttattcgcaagcccttgagaaatttgctccacacattcaacaggtatgtgaactgggtttcccttttgtctccttaatctttgcttcttcatatctatttttgacataaaagtcttaaaattgtttacgggaatattaacggagcaattggttgatctcaggttagtatggagagtaatggaaagggagtctcaattgatggtctacctctcccgttcgagactggtgagattgattttggtgaacctggaacaaatggtcaacacagcttttaccaactcattcaccaggtacttgctacctataatttgagtttactggaaatttggatctagattttagcaagttctcatcacatgataagctaatgaggaaagcactaaatcttttgaaatgatgttttagggacgcgtaatcccttgtgatttcattggcattgtgaagagtcagcaacctgtgtaccttaagggtaggcttccattcctgctactgttaatttgacttgagctgttttatgcattctctttcgaaaataagataagttctgcattggattaacaggagaggtggtcagtaaccacgacgagctcatgtcaaacttttttgcacagcctgatgctcttgcatatggaaaagtaagacattacatttggtcatggcagtaaagagactgatgcatttactaaggttccatgctgaaacaaactctttgttcttttaccttctgtagactcctgaacagctgcagaaagagaatgtttcaaaaaatctcattccccataaggtaaaaactagtcttggatcgatgttgaaaaaacaaaacttctatgtttttcagtata

SEQ ID NO: 155731 - DNA, 1016 bp, Arabidopsis thaliana landsberg; identical to SEQ ID NO: 51824
  unsure (1)..(1016): unsure at all n locations

SEQ ID NO: 155732 - DNA, 330 bp, Arabidopsis thaliana landsberg
ggtacttatggaaagtgaaaagtcctgaaacgatgtcggtttatgttgataagaggaaagtgttttcggtaaaaaagcttaagtggaactttagagggaatcaaaccatgtttttcgatggaatgcttatagacatgatgtgggatttacacgactggttctacaaagaaacgttgtcgtctgtttcgactagttcatcgtctaaaacggcgtcgtcgtcatcgtcttcttcaacttcatcgtctactcctccgtgtgctgtgtttatgtttaggaggaggagtggtttggatagtatattatggattgctgaagctgaacgaaagcgtt

SEQ ID NO: 155733 - DNA, 266 bp, Arabidopsis thaliana landsberg
tgtagttattttgattcagcgagctctatagtagtagcctttagggatcgatctgtaaatgtatgtgttgtgattggtagtatcatttttggtgtggtgaaggtaggtatttgaaatggccacagttccaggacagttgatctgggagatcgtgaagagaaacaactgtttcttggtgaagcaattcggtagaggtaatgccaaggttcagttcagcaaagagagcaacaacctcaccaacatcaactcttacaagcactctggta

SEQ ID NO: 155734 - DNA, 532 bp, Arabidopsis thaliana landsberg
atggattcctctccatcagaagtaaagattatctcaaaatgcttcgtcaaacccaaaaccatacctgaaaaatggaaagagccataccatttttcaccaatggatcatgtaatactctcaatccattacatccaaaagggtcttctctttctcaaaccatcgatttctgaatctgtcacaccaaaagagttcatggagactttgctgcagaagcttaaagactctctagccatagcacttgtccatttctatccgcttgcaggtcgcatctcgactttgaaaaccaacgactcaagatctcactcggtgtttgtggattgtaataacagtcctgctggatttatccatgctgaatcagatctaagtgtatcagacattcttggttccaaatatgttcctttggttgttcaatctttctttgaccatcacaaagcattgagtcgtgatggtgacaccatgactctcttatcagtcaaggtacactttcttcatcttgctatatcatattattcaaatatgtcagcacatttgt

SEQ ID NO: 155735 - DNA, 526 bp, Arabidopsis thaliana landsberg
ctttttggtgaagttctcccttttacaaattctcttggagtattagtgatttcgctctcctagaacagaatgattgcgtatccaaaacctttcacatgggagaaaaagattggtgagttttttttgttctgatagatattgttgtatgtgtgcaatagtggtaacttgctaacaagtggatggttatgtacttatgtttcaaaggactctaaagttgtatccaaagggggactctgaggcatatgacaagttatcccagcatttgcatttagctgacggggaaactttatccaagggtgagctgattttcgtgcgagtgaacctgcaggttctagacccgcgtggatccaatcaccttaaaggatggcgtaagtcaaaaactattgatgttacgatttctcatgggataaattaggagctgatgacattttcaatagacgttcttaacttgtgatgtcaaatgtcatactcctttacatacatttcttgttttgtagttaaggttggttatgaactcgaacaagag

SEQ ID NO: 155736 - DNA, 640 bp, Arabidopsis thaliana landsberg; identical to SEQ ID NO: 20711

SEQ ID NO: 155737 - DNA, 1269 bp, Arabidopsis thaliana landsberg
  unsure (1)..(1269): unsure at all n locations
agttgttcttagagtgtctctccactgtcactgcagaggctgtcaaggcaaagtgaagaaacatctatcctaaatgcaaggtgaatcctctgttctcactgttcttaccctctattgttacagtatttacttttcttttacttgcttttcttatcaaaaacagcaatacatattttacttaggttagtataagagatcaaattatctaactatgagcaagttttagtgcaaacacattttttggttttaagttgggtacgggacctatagccttaatgggtaataatgcattgncactatacgtgcaagtgtgtaaccgatctgatcatgtttctacaattatctctttcatattcaaaaaaggtgaaaaatgatatttctgatataatacttttgttaaagtttctataaaatatcaaaaatataatattatttacaatatcttgaagatattatatatgataatttaaggtaaagtaaaatagatattttgggcttggtgatacccatatgatctgggccaagtccatagattttatctatgaaatagtttgtaaatggatttagttaaagttcatgctaatggttttttttttttttttttggcaataagtaggtgtgacatccttcaacatagattttgcatcaaagaaggtaactgtgactggagacatcactcctttggaagtattgggttgcctctcaaaggtcaaaaatgcccaattctggacaccacctccaccatcaatcccaagggcaaatccggaaacctaaaagaaccactcacttttgtgtatttgtgttgtcttcctagctcttatttgcttgaatcagatcaatcgtaaaatgtggactttcctacttttatgattaaactgtcattacagggacacatgcttctttatgataaaattgtcattacatactgcattatcctggtgttttttttttgtttccttcccttaaactatgtaacaaagagattatttaactttctagaagattgcacctaccacaagctctgttatgagttcatctgtcagcattacctcaatctctctacctatgatttcaatgtcatcttctaaactcagccactgcaactccttctcctccacatcatatttgcttggtttctcgtcttttcttgtgaccaaatctcgcagagtctcttgtatcttgtttgcatcccatttcgggcatacctttgtggatttaacccaagggtgtggatccgacaactgctttaacatatgtagtacttctctg

SEQ ID NO: 155738 - DNA, 1666 bp, Arabidopsis thaliana landsberg
tacccaaacttcggctccacgcaactcaaattccccaagttagccgagccacgcgtccttggcgtggtcaaatggcggtcaacgcccggcggtgcaaacttcgcccacggctcacctgttcttgcccaaacttgctcattcatgctcattcttgcccaaacttgccctttgatagtctattatgttttgggtacctagggtcaattgaccatgcattcgggcaactttctaaaatttggattcatgctcgtgcctgatgtccttacgcgggtcactacataatccctaaaccctttttaagttttattcatttttttgttacggtttactcaacccaactattgattagctcctttgccatgatcgagtagatctctagttgggtttgagggggtttcaaaggggaattcatggggactaatagatcaaatgtctaggttggccgtttctatggtcttgtttgatcgtttacactattctttctagttgatttgaatcttaatgcttgtatgtctggaacgtcacctagtacctgaccttaggtatttcattctttggtaaaatctcgtttgaatgcttgagctagctcaactgaataaataaccataactgttgcacacccgccgagttatagggacttatggactagaatcaaatttgaacttaatgcgttgatcttgtattttcgaaccatgttagcacctactaaccgatagggcaactgagtacgcaagatatttgtgataatagccggctttcacctactaaccgttagggttggctggtcttgatagagtttcgtatgtccgagaatttggaagtaaacaaacctaactatttatcatctagattgagatctataccttatttattgaaccatgacatccggagaaacccccgaagacctaatgcttctctcttattgcttaccgtttagtttaattacttgtcttttattttggttacttattgcatacaacaactgtaacgcctctggatcgctgatatagctcaaattgccttaagcttactccctcaattaagagatcgtcgttagcacttaagggtcgaattccactgagctctcgatgtgcacacaatagacttatgatgttgtttgataagctaaatgaagtaattgaatattaaaggcaactaagcaagtaaatgagttgtagattcaagtgattaaggcgtcaggtctaaggaattgtctcgagagatagataaattgtagatctagctaatatcaggattgttattgcaccgttctcaaactcaaactataattctagagtaaccggtggcgttccgcgaaactctcgatacttacaactaagataaccggagaagccgagagatcttatactaaagcatgcattattaataagcttgattagttcacctagtatctaaacaagagcccttctatgagcctacctgttctttcttagatgcataggctcatctatgatagttcaataacaagtacctatggtgggtatacctattatctaatatcaagtgctgtttagctactctagaactagcattaagaacaatcaagaagaagaatcctacagataacctagcaagggggcaatctactaaatcatctaaatccctaatgagaaaccctaaacctaaccaaaaagctactcaaaca

SEQ ID NO: 155739 - DNA, 703 bp, Arabidopsis thaliana landsberg
caggtgggatgaacaatgacaaagtagagtttctttgggcatcagacgaaataaatggcaaggggagtaagtattggcctcttgtgatggacattgctcgtagaaacaacctacgtcgaatcttgaggtaattaattcccaatgcttggtttatgtataattgcaatgacaacggatctgaatgaaatatgtcacctttccttacaggtgtgggcagattatgggacgtagtgagactgaggtgctgagtgcagctcaaattctttacccctgtatgcagtgtgcggatattttcttacttgaggtactcttaaatgcagttttggattatataatacatatacacttctatgattgttattgatatttgatacttgttctttgacctgtgtaggctgatatttgccagctcgggatggatcagcgaaaagtaaacatgctagcaagagaatactgtgctgacattaagaggaaaaataaacccatcatcttgtcccaccgtatgtctctttgcattttctgttctttccagtgctgtcatcatcttgagctgtttttaatagcttattggctttgcagatatgcttcctggtctccaacaaggacaagaaaagatgtccaaaagtgatccatcatctgcaatatttatgaaagatgaggaggtaaactagtagctataaagttgcagaacagagtagagctt

SEQ ID NO: 155740 - DNA, 557 bp, Arabidopsis thaliana landsberg; identical to SEQ ID NO: 39602
  unsure (1)..(557): unsure at all n locations

SEQ ID NO: 155741 - DNA, 643 bp, Arabidopsis thaliana landsberg
cgcctcctcgaaacctgtgaaattgttcttgatggtttgattagcgtttgtccataaagctagagactttttgtattcttaccatatcggacatgtgtaatggttttgtgatgcaggtagtagaagacgggtatgagtttttcgcaaaacggagattagtcacgatattctcagctccaaactatggtggggagtttgacaacgctggtgcgttattaagcgttgacgagtctcttgtatgttcctttgagattatgaaaccagccccagcttcaagcagtcatcctctcaagaaggttagtttctaccaaagatatatagatttaagcccatcttataacacaattcttctgtaagaacaaactgaaacttgaaaccttctgaaaaaccttataggactttcacaacagaaccttaggttataatttgagtgcttagcatggacttcaaagtgtacaatcttaagcagtggaagcactattgcaatttggttaggccacaaagagttaacgctccttatgtttccgcacacgataacacctattttctctacatttctctttatcaggtaccgaaaaaggggaagtcttgaatatctagtcctctctatgtcaatatcacggttccacagctcaagataggc

SEQ ID NO: 155742 - DNA, 800 bp, Arabidopsis thaliana landsberg
gtcgactctagaggatcccctcagcgattgtgtgcctttgagaatccgaatgcaggcatcggcgggttttgtgagtgcaagtgctcttggaatggcttgtggccctgcgcttgccggtttactccaaatcaaattcaagttttacaagtttacatttaaccaatctactttgccgggatgggttatggctgtggcttggctgttctatttggtatggctatgcatttcattcagagagccgttgcgtgacacagaggatggagaaaaaaccaatcgaaatgaaacaacatcaggtcattattaatagtaaaagctgtttttcttttctgtctgtaacaattattaaagagtattgaacggattcttggttgatgcagcgacagatagagtagaaagtagcagagtcgaggaaggtcttcgattgccgttgctgatcaattcaggaatcaagccagaagatgaagaggaatgcgatgaaagtgaagaatccccagaagattctcacaaacctgcaaattctttcatagaagcataccgactccttactccatctgttaaggtatcattcatcacttttcttacccatctgttaagacattgatgaattcgtgataaaaagttctcggaatatttcctttaaagttttatctggctgaaagctgtgttgtgcggttctggtcggcaggttcaactgttgatctacttcatgctcaaatattcgatggccctattaccgtcagaatcaagtgtcattactaaatactaaattagttggacaacaagctctgttgccatcttcc

SEQ ID NO: 155743 - DNA, 2673 bp, Arabidopsis thaliana landsberg
aacatcctctgggatggaaccaaggtatgctcattcaaattacatattcgttttactctttctgataaggtcgtcatattgttacctatctttcctgtaattctgtgttttgctgtattgttttcagctgcttccaaacctacggatactagatgtaacaggatcgaggaatctcagagaacttccagaactttcgaccgcagtaaatcttgaagagttgatattggaaagctgtacgagcctggtgcaaatcccagagtctattaatagattatatctgaggaaactaaatatgatgtactgtgatggtcttgagggagtgatactcgtcaatgaccttcaagaagccagcctcagccgctggggcctcaaacggattatactgaaccttcctcattcaggggcgacactgagttctctgacagatctagctatccaggggaaaatattcattaagttgtcgggtctctcgggtacgggagaccatctgtcttttagttctgtgcagaagaccgctcatcaatcagtaacacatctacttaactctggtttctttggtttgaaatcactcgacatcaagcggttcagttacaggttggatcctgttaatttcagctgtcttagctttgcagactttccatgtctgaccgagctaaagctgataaacttaaacattgaagacatccctgaagacatatgtcagttgcagctcctagagacactggacctcggtggaaatgatttcgtgtatctacccacatccatgggacaacttgccatgttaaagtacctcagcctcagtaactgtcgcagacttacggcactgccacaactttctcaggtggagagactcgtactttctggctgtgtgaagctcggatcattgatgggaattcttggtgcaggcagatacaatttgcttgatttttgcgttgaaaaatgcaagagtcttggatcattgatgggaattcttagtgtggaaaaatcagctccaggcagaaacgagttgcttgagcttagccttgaaaactgtaagagtcttgtgtcattatcagaggagcttagtcatttcaccaagttaacatatctagatctcagcagcctcgagtttaggagaatcccaacaagcatcagagagttatcctttatgagaactctctacctcaacaactgcaacaaaatcttttcactgacagatcttccagagagcctcaagtatctctatgcacatgggtgcgaatctctggagcgtgttaacttctcttcgaatcattctttcaaccacttggactttagccattgcatcagtctagaatgtattagcgatctggttcgtgactttatgaacgaggaatattctcaagaggtaaggctctttctctataatctgttccctttaaccccctcataagctatatttttaagttgtgacttgattgattctcattttgcacgtaggctccatttcgacttgtttgtataacgaaatactcaattgcttctaccaacaatatgcgaacctcatggagggaacctatgaggatcaaactacctaagattaaagctgcccccaagcttgtgggattctttgtccaaatcatggttgtttgcgaaaagcccttccatctacagtttccagcgttttcttataattgggactgtgaaggtagcaggttatatcggattaacctcaaaccaaatctctatcaatcatcagagatgatggaggacaacaataatagaccatataaatggcatcacctggtcattgtccaaatcccaactggcatcatcagcgcagaaattgatgaggtgcaattcgaatcccatatccaagttccggagccgggcgacgagataattttgtgtggagttgaacacgttgggttcgttttaaagtagctggtgcggagatcaattcttaagatgatgatggatctgcagatttctaaacacaaggatttgtaccaattttcgttttggaactaaataaattactacccatgtaacctcgtgtcggtttgcttttataatcggtttggtatttttcggtttaattgtgacttgattttatttttttccttttaagagaaccaattttttctttctgctttgtactcgatgtctgccctttttgctcaacaagctttaccagattgtattctggtatttcatcaggctagaaatggagaaagaaaagttggagctgccaaacccacaggagttgtgttctcactggaaatgttacattaaatatcattgcaaaacaactactaatacattgaatctcctttgattttggtccaaagaaaggtgaataacttttgattttggtgcatatgggatgatgacggactgatgagtacccaatatccagtgcccacgtgtcctaattcttatggatcaatcaagggcttaaaagcccataaacattaaacagagggaataaaggaatgctaaaaactaattaagaaaacatcaagtaacaattattatgttttggttgttacttgttacttccaaggataaaggagggattcctatgcttgacttgcactagagctttatttcattgcaaaaaaggttaggtacttgattaagaacccaacctaagttttagtattatacaatcctttttcccatctcattttacatgcttacactttcattaaa

SEQ ID NO: 155744 - DNA, 554 bp, Arabidopsis thaliana landsberg
cattcattggtgtgtttttgcagactgataaagcttcgattttagacgaagccatagattatttgaaatcacttcagttacagcttcaagtgatgtggatggggagtggaatggcggcggcggcggcttcggctccgatgatgttccccggagttcaacctcagcagttcatacgtcagatacagagcccggtacagttacctcgatttccggttatggatcagtctgcaattcagaacaatcccggtttagtttgccaaaacccggtacaaaaccagatcatctccgaccggtttgctagatacatcggtgggttcccacacatgcaggccgcgactcaggtaaggccaatacgaagccgtgtttattaaacgacgattttggtaaaatgttttttgggtttactacattaatacgagataagaaaaaatgttaaaccgacgtagttttagttgacacgttgtgtggttttttattagatgcagccgatggagatgttgagatttagttcaccggcgggacagcaaagtcaacaaccgcgtctgtgccgacga

SEQ ID NO: 155745 - DNA, 1128 bp, Arabidopsis thaliana landsberg; identical to SEQ ID NO: 63250

SEQ ID NO: 155746 - DNA, 525 bp, Arabidopsis thaliana landsberg
gatcactcaatctttgtgaatatgttttcagctttaaaagacggtattcttatggaatgtttggtcgatatgagaaagaatctcatgaaaccaggattgaatcttcttattagaagtggtaaaccagaagagattcttccttctcttgctaaagactttggagctcgtacagttaagttctgtttattgcttgtgttgaagaaatttatcagagctttctgagggaatatgaaaatgtgattagtttgttttattaggtttttgcgcataaaggaacgtgtagtgagaaggcatatgttgaaacaccttgtgaatcaaggtatgcaaagggttggatatagtactaagcatgagctcatttggggaagcactatgtatctcaaagatgatcttccttttgatgtttttgacttgcctgatgtctacactcagtttcgtaaggtaatgttcgtgtttcggaaaagtgtgtttcttgacgcattaggagtgagtatatgaaatcctgacaggtttatatattagaac

SEQ ID NO: 155747 - DNA, 531 bp, Arabidopsis thaliana landsberg
agaaatttactggccagggatctatccaggattcttcaagctctttacgcattgataccttatttcatattttcaccccaagaaggttgtagaagttctgtattctcggccacagatcctcagattccagagtactgggaaacactaaaaaacgatgattggcctgtttgcccattcatctctcaagattgccgccctgcaaatccttccgaagaagcacacaacacagaaactgcacagagagtgtgggaaaagacgttagagctggtgggtcttcctctcgatgcagttgagaagctcatagaaggggaaaatatccaatgccggtatggagcacaacacgaatagtctttcaaaattaccacagcgttaagtgacccattacagatcaaagggtaggtaattgagaaaatatcttttttttttgtttccttgtattaatctacacgatacagtggggaatgaatcccccaggcatgtagtttgcttgagaatgtttgattgttggataaaagtcaagctttagctacc

SEQ ID NO: 155748 - DNA, 482 bp, Arabidopsis thaliana landsberg
cgcgcgtagcgctccaccggtataagctaacggaggatataaaaactctttaactcattattgtcctaaaatctcaattttatccattttcacggaaaaaacataaaatctgttcttcttcttcggctgagagacaatggcggaggagcaaaagacgagtaaggttgacgtagaatctccggctgttttagctccggcgaaggaaccgactcctgctccggtggaagtcgcggatgagaaaattcataatccacctcccgtcgagtccaaagctcttgccgttgtagaaagtaagctttctatttacatacgtgtgtgttttatatatgttaatcttctacttaggaggattcattcatgtttacgatgaattattatagtatgtaattcagaattcttacgtttggaactaaggtttcaatttacaattaacaaatggattttcttaagatgcctaaggtttttgtagttcttttgcatat

SEQ ID NO: 155749 - DNA, 503 bp, Arabidopsis thaliana landsberg
ataaaaagaaaaatggcgtttgcgatatcaaagcgaaacgcaaccttgtttcttgtaacgctactactaatctccgttccattgtcttcctccacgctacaacaagatttcgtgaagtgccttgtcgacaactccgacgtctccttccccataacggcgtcgtttttctcaccggaccaaaacgctactttgtttaaagaggagcttgaatcaacggcacagaatctccgttacttgatgccttcaaatcctaagccagagttcattttcgagccgctttacgaaacgcacgttcaggccgccgttctttgcgccaagaagctgaagcttcacttgcggttaagaagcggtggtcatgactacgaaggcctctcttacgtctcggagatggaaacggcgtttgtgatcgtcgacttgtccaagcttagacagatcagtgttgatatagaaagtaacagcgcgtgggttcacgctggtgcttctattggagaggtttattacag

SEQ ID NO: 155750 - DNA, 742 bp, Arabidopsis thaliana landsberg; identical to SEQ ID NO: 6871

SEQ ID NO: 155751 - DNA, 1186 bp, Arabidopsis thaliana landsberg
  unsure (1)..(1186): unsure at all n locations
agataatggatcaaaaaagtaaaacgattggagaacaatggtggaggtcaaatccaacgtttaaaccgcctgaaacgccattagattctatggagtttttgtcacgtacttggagtgcttccgctactgaagtttcaagagctgtcgtcgcgtctccaccgacttctcaaccgccgcaaatgcgtttctcggagatccaaaacggttcttctgacgtcactttggtgccggaagatgaagaaaacggcatcgttcttggaaatactttttcttttgcttcttcagaaacttctttaatggtcatggaacgtatcatggctcagtcagtaagtaatctaaagatatatacgtatttatatttaggaagaaataaatcaaagttttattacttattttccaaatgacagttttagtaatcttactaacaaatattgtcacgttgaatcataatttttgtctatgttactatgtattaagatagtgaaaatcattaacttttttttttcggattttaatttgttttgttttttgtgctagccggagatttcatcgccacgaacatcagggagactttctcatagctcattcaccgacagttctccgatctctccctccgacatcgacgactttaaggtcagttttattcttgaactggttttagaaaatactaaacaggagctaaaaaatcttgtgggaaaaaataaattatttgaaatatttcttaattagtaattgatcagtccctttctttatcagtggattattctgacttctgatcctctggtttgttaaaagttacactagtgtgatagaattaagattaggtgggttaaatctatgagatgaataaaaaagctgggtctataatctaaattaaaaaaaacacgttgacaaaacgaaaaggctgtctaagtaagtagaagcagtagagtaagaaaaacagagaggaaacacaaaactcaggctttctcttcttcccaagcctctgtcacttactatcagtttagcagtatttgtctcttatccatttatttttaatttctatttttgtatttatgttattaatttcattagagaaacgcattcgatttagtaattaatttaggaaaaagaatatagttgtgtttgtagcatttatgattttggacccaaatattgctggcttatattncacggtgctatctcc

SEQ ID NO: 155752 - DNA, 4165 bp, Arabidopsis thaliana landsberg
  unsure (1)..(4165): unsure at all n locations
gggatttgctgactccatttttggtctaactgtggtttatgctggccttatcatgtatgatgcccaggtaaaatagtctatagagaaaagcttaggctggcttttgttcaataggtctttgttggttattctcaaattctcaatgtctgattctagtgttatcttaatgtctcactgattgtaacattgcagggggtgaggagagaagttggaaaacatgccaaagtgttgaacaaactaacagctaatgctcgtagaagtgaagtaatgagtttaaagggcaacgaatctaacaaagctttgacatcagaagagatcagtgaggagattgctcctccattgaaagaatcaataggacacactgaagttgaagtcatagcaggggctttgttcggtttcttagttaccctcagtgtttattccctgatgtaaaaaagctcccaactttataaaaactatatattttttgtgttgataagaaagaaagagaatttaataatgtgcaaactgcaataaaacagagaatcagtggtaatgtcaaatcaagttttatggatctgagaatttttgttctgtttgagttggttgtaaaccccacaaacacaacaattttgataatttgtctgacaccaaaaaagtagaaagctttttcctttagggtttcctttatcgatcgaatggcacatcgtcaattgtatagcttacgcccttcaaccttcttatgctgctgctgcctccaccgtatctccagctcctcctccgccgcaacaaccactgccgccaaaaaccggtctttcttctctctacggttcttctgctgaccattactttccggataccacgtatcgtttcttagctcgtgatggatccgaagctttgagcaactattcagggactcttgcatcgtcttcctctatgtaccatcatttgcctaacacgacggcatcgcatttggcgtatcctcagctgcttcagcatcaggaagttgcttggccacctggtgtggaggttcccggtgctgcttccgccgtcgagccacttcctcctggtgtcaaacgcacctctgaaggtaggctctttgtttaccttactatttatgggatctgcatcattttcttatttattgcttggagaactatgccgcataacttgaaaagttaaagacttcagctttcccttttctctgctcatcgtgatactctagttctgtagcggaaattagtgtttttgattgtttgtttcttcaattgcagcataaaaaactcagctttagtcatggtctctagcctgattctttctaggatagattttaatttacatttgctcaagcacaatgatgttggtttgtattcctctgtgctttctcgttagctgaaatagaggttggattggtttggccaattgctttgttttgagtctggacaacgcgaagcttgaaagttagaatcatctttcaggagatgcttagggattgcatctataaactatatagcttatggtagtgttcttgattaagtctttgttgctttaggattgcctaacgataattgtttttagttttgaccttaatgtttattggaacacttggtgattttgcagaattgattgatgatttatgttttgttgtaactctatggtttccaatagattttcagacatgattgtatgtaagccagaatttcttactgtaagtttaactaaagatacaattgattattgatgctatatcttggtttttgctatagtatctcccaaatttattttcaaattatacttatagtcagtatatatcttctcatttcgttgtatattattgtttattatgtaatttagcgctctactatccgactctgttgggtgcccataatacaattggtcaaaccgaagcttggtatactacnnnnnnnnnnnnnnnnnnnnnnnagttggagagtacaagccatttgcctatatatccacagagggcaggagagaaagattgtacccactatatgcaaacaagaacatgtaaatttggagaaagctgcaggtttgatcatcctatttgggttcctgagggcggaatcccagattggaaagaggtgatcgtttactactatctaagtatttcttatgccctcatatgatttttacattattatgataacgtttttctatattctgttatgtacttatatgttttatactgtgggagtttgtgcctaattactttgtaactatatatattgtttttgtttggtatacgaggttatagaattactacattatcatgatagtgtaggtataggtatgacaaatggtatcttattgttattcaagatttgagcttcccgacttctgcaaccgtgtttgttatccttgcttttccctttgtcagatcattccttgacttggaagagacatcatactcattgtctaggcattacatgataaaatgatatgattgctggcgcttatgaatatctcggtaattcaggcaccagttgtggcaaatgaagagtgtcctgagagaccaggagaaccagattgtcctgtaagctgttcgggaaaacttctagagctattgtattggtgtttcgcctgaagacctgagactatctttcttttattttcactgttatccagtactatattaaaacacaacgctgcaaatatggttcaaagtgcaaatttaatcatccaagagaagaggctgcagtaagtgaattttccttttccaaataaaattatccctcgggttgtgtatttgcctgcagacactcgcataaaatcttgtgcttgtaatatgtactgctttagttttttcttgggctgtgcatgcacctagaagcttgatgctcttctttatttcaggttagtgttgaaactcaagattcattgcctgagaggccttctgaacctatgtgcacagtaagatataaacataattgattgacctatcctatttttataaatgctcttacatatgaaactaatatcgattattaatttggcatttctactctgcatcagttctacatgaagactggaaaatgtaaatttggtttgtcatgcaaattccaccatccaaaggatatccagctaccatcatcgagtcaagatattggtagcagtgtggggttaaccagtgagcctgatgccacaaacaatccgcatgtcacatttaccccagcattgtatcacaactcaaaaggactacctgttagatcggtaatgaattcatcttcactttgcataagactgacttataatcatataggcacaatttgtgactttctactatcttattggcactatacttagaactgattatggtttgctagcattgtatgctgacctgttctgacgtctgagaatgaagtttcactaattagattgtagctttttcagggtgaagtggactgcccattctatctcaaaacgggaaggtgaatatctcttgtataatactattttgttgtttagaacattgaaacaaagaacgtgacattaacgttctaacttgttttccttttccataatcagctgcaagtatggagccacttgtcgctacaatcatcctgagaggactggtttgtgatcatgccaaaattttgtggtttttagaacctttaacgtattacttttatccctaaattctcataatgtgcgatgttttgattctgtgcacagcattcattccccaagctgctggggtaaactattctctagtttcatcgaacactgcgaatttgaaccttgggctggttacaccagctacctctttctatcagactcttactcaacccacggtaaaagcctttattcatgttgtgagaaatattcaagagcgcttccttagttgataggggtttaattagagtggaaattgtttcagcttggagtgatttcagcaacttatccccaaagacctggacaatcagaatgtgacgttagtatccttgtttcttttagagattgctgagctttttctcccacatgttagttgaaattttataccaaaagctctgtctttcaatattacagtactacatgaagacaggggagtgcaagtttggagagagatgcaaattccatcacccagcagataggttaagtgcaatgaccaaacaagctcctaaacaaccaaatgtaaagctgagtcttgcagggtatcccagaagag

SEQ ID NO: 155753 - DNA, 1095 bp, Arabidopsis thaliana landsberg
tggctaagcaagcatcaagagttttcctccaacccattctatgtcgccggtgattcttattccggtatggttgttccagctaccgttcaagaaatctccaaaggtatatatggtaatgatatcattctccaaaaccttagtatcttctaagtgaagaaccatgatgatgcaggaaattatcaatgctgcagtcctccgataaatcttcaggttcatcggtgtttctttgcttctatatatagtacacaccttgtgatgataagcattaaaaatagatagttgaggtgaataggtgattaggtagataggaaagaaaaatattatattgagaaaacaagaaccaagaggagaatgtgcaaaactgagatcaacgggaaataacatgcatagtagactagtagtaaccaaatattatgttatttaattgtgtgaccatatttgctatatatctaccatgcatgtgatttcccgttttatttgtttgacattctatttgtttaattattgtgcgtaaataaacattatactatgacattctgtttgctatatgtctgacaaacattatattacgtgcgtaattttcgtaagtagttaattaactattttaatatgttgcaaaattagacaaaaatatgatatattaatggataattcacgtaccgttcataagttcttatatattgtaccaattattttttagtattatttgggaattccattgatagtttttcgtccttgatatacactgacttacagggttatttgctcggtaacccaataacagactgcaaaattgatggtaacagccaaattccgtatgctcatggaatggcactgatatctgatgaactctacgaggtatgaaattaatgaaatgcttttatttcttgtccccgcaatgaaaactcaataaaacaagctgtttaaaaactctaatttgttttcgtatagtcgctaaagagaatctgcaaaggagaatatgaacatgttgatccattgaacacagaatgcttgaaacaaattgaagaatttaatgaggtatatataccgtatacgtacactcgtggaatcttaattgatgttgttcttgtgtct

SEQ ID NO: 155754 - DNA, 567 bp, Arabidopsis thaliana landsberg
  unsure (1)..(567): unsure at all n locations
atctagaggtgatccattaattaattatctcanaatatcaccaataggttttgtttccctttttacaatgatcaacaggttatggagatcgacctttttaaagtgttgaggaacaatctaggtgaagacaatttgaatgccttggtgcgggaaaaaattgtgccggttccaggtgatatatcgatcgataatttgggattgaaagacaccgatctcatacaacgtatgtggagggagattgatatcataatcaacatcgcagccacaacaaatttcgatgaaaggtatttacgaaaataattgatgatatatcacatttactttgtataataataatatacaaatgtaacttgattttcattgttctgtttttaataaaaataaaagatatgatattggtcttggcatcaacacatttggagccctgaatgttctcaacttcgccaaaaagtgtgttaaaggacaattgcttctccatgtctcaaccggtgagtttgaattattcacttacaaaaacaaccaatatatatactgatgcttactagagaaatgtatgtattcttttag

SEQ ID NO: 155755 - DNA, 388 bp, Arabidopsis thaliana landsberg
tgttgaagaaactgtgactctatctagtgttagagataagaaacttgcagtgttatttcagccatgtagtgcatctaccgtgaagatatggattagtcgcaagatcgagcccaatgcagtgtcgtggaggaaggttttcttagcggttgatatgaaaccactcactggttttcagtttgacattaacgctgcaagtttctttgttgacgagaagaaaaaggtcgcaatggttcttgataaagataggttcagttataaattaactcgcaacatagcttacatcattgggaagaaggggtatttcgaaaaagtggatcttggagaatctacagtttcaagttgtgcctcacttgtgtgctcttacgttccaagctcagtaaaaatctag

SEQ ID NO: 155756 - DNA, 562 bp, Arabidopsis thaliana landsberg
  unsure (1)..(562): unsure at all n locations
taagtcattatatgactattttttgtaataatctcggtttatcaatttatgaactaacacaaaatgaatttgctggtggcacattataaggtgttagaagctgttatgatgaaggaaaacgtgttgccgagactcttatgtttgattnnnnnnnnnnnnnnnnnnttggtaaaattaatcactcttttaccattttcttgaaaactttgatttaagcttattggctgattagttattacttctattgtctggccattgtagagatacgcatagcgaggatattcaacacatatggtcctcgtatgaacattgatgatggtcgcgttgtgagcaacttcattgctcaggctctcaggtgaaactaatctccatcaagttcttgaatttatcctttttttttttttttttttttgaaaaaatagccgagtaattttgagtcgaatcctagactaattataaagcctttttgtttgatnnnnttgttttgggtatgatggggaaaagctctgactgttcagaaaccgggaacacaaacccgcagtttctgttatgattcggacat

SEQ ID NO: 155757 - DNA, 1329 bp, Arabidopsis thaliana landsberg
tcaccaaacccttcatcttcttcgtttcagctttcttttctctcatgtttctcgtcttcttctaaacttttgtgaccacccaaaaaaaaaacgtaacggaacaaaaaaaaaaatgctccgatcacggaattgtaagatctccgccgcgaacgaagccgttatttctaatcgtctttcaatttctaatctcaaagttttattcgtttttgaatcctcgccattgaataatttgattaatcgtttttccgataagcttcgtcgttgaacttatctccgatctctgcaaattttctctcaaatctctccgatcttcctaattgattagaaacttctccatcgtttgctcaattatttcggattttttctctgtttctttccaacaaaatcttcaatggataagaagaagaattcgtttccagataatcttcctgaaggtattgttgttttcttcctgaattttgtaagattatgcattcctatttcaaaatcgtgtgatagatttaagaattacttatcgtttgaaatcagatcttggtgaattgaacaatgttgcatggtagaggaatctgattctaattttttatgagatcttgatatttgtatagcggaagaattatggattctaatatgttttgaatctttgaatcaggcacaatctctgagcttatgcagaagcagaacaatgtgcagccttctgttattgtgattggtagtggtatatcaggtcttgctgctgctaggaatctctctgaagcatctttcaaggtaatgatacgtttaacttatttttgtgacatataactttgaggtgtgtttctctatatgatcatgatttatattgttggatgctgtttgtttgtgtaggtgactgttcttgaatcacgcgataggattggtggtcgtatccatacggattattcctttggttgtcctgttgatatgggagcttcatggtgagttttatcacctttgtttgttggtttcgtttatacttctttcaaatgttattatagtttggatgattagagaagtaggcaacagcggtagtctttgtttattggagattcctaagaagaatgaagatgagatgcaaatttcttaacttattgaaatgtggtgtgtgttacatggagtctctgatgagaatcccttagctcccattatacgccgtttaggactgactttataccgaactagcggggatgactccatcttggatgatcatgatctggagaggcaaccctctcttgcctttactgttctataattttgatcagaatgctatgggtctctgtgctataagagtgactgcgatggtgcggaagaagt

SEQ ID NO: 155758 - DNA, 1667 bp, Arabidopsis thaliana landsberg
cgtgggatcaacatgactcgacatcatcccttagcctaagctgcaaacgcctccgtcctctcgcccctaagctctccggcagccctccctcccctccttcttcttcctccggcgtcacttcagccacttttgaccttaaaaacttcattagagctgatcaagtcggtccgacaaaatttgtgcgcgagcgagaccctcctcatcgagtcagttccattattgtacttcgtacattttacatcgtttctttcgtttgatgaaagaagaagtattccctgtagaagaattttgataagtgcggcatacttaatactttggcatttataaattatatcgactggagtggttcctttatattattaatcttatttattgattttaatgtatgattcctatcaaatgtaatgaaataatgtgtgggttcagttggagacgcacccgggagggacaaggtggaacccgactcaagaacagatagggatacttgagatgttgtacaaaggtggaatgcgtactcctaatgctcaacagattgagcatatcacactgcaactcggtaagtacgggaaaatcgaagggaaaaatgtgttctattggttccagaaccacaaagcccgcgagagacagaagcagaagaggaacaacctcatcagcctaagttgccaaagcagcttcacgaccactggtgtctttaatccgagtgtaactatgaagacaagaacatcatcgtcactagacattatggtaggaatttaaggattttgtatagttttgtggttttgatcaactatatttaaggataatttttatgattgtgtagagagaaccaatggtggagaaggaggagttagtggaagagaatgagtacaagaggacatgtaggagctggggatttgagaacttggagatagagaacaggagaaacaaaaatagtagtactatggcaactacttttaataaaatcattgacaatgtaaccctcgagctttttcctctccatcctgaagggagatgaagtcatgaaggtgaggcagaaaattgtggaattcttatgtagatctggtttaggttcagaggaatcaattggtatctagaaattcaaaataaaaataaaaataggaataagtctctaaaactacaaaatctacttaagaattcccttattaatctgcgagtttgatgtatcctatgtagattatttttgcgatgtaatcttaattatgaatgctcagtttagctcatccttttttcgcctttattcttgacaaattcactagtgatcagttgtactctcttctgatttggccatctaagtatttctctagatcgttggtatgtaggaatgtttcatttagagaaatttctgaataaagacacatttgatgttgttaaaataatatctctgtcttaattcctacgtacgtacaagagcaagaagttaaaaggaaataataatagcatttcccgttgaaaagggggtagacctagtatatttctataaacaaacattgaaatctaaaactttttgtactgttatatacttatattaaaactcttagtaaaacaggtgactcaataatatttatattaaatttttatttctgataaatatatactaaataagtttatgagatgattacaagaagaatcttttcaagaatttgata

SEQ ID NO: 155759 - DNA, 1433 bp, Arabidopsis thaliana landsberg
atctatcgagctgaatcatcatcatcactgagttacccgaaagcaaagactgagagaaccaaagctcctaactaacaatgaggaataggacgctcgtgtccgttttgttccttttctcgcttctgtttcttcttccagatcaaggtacgtttcgatgtatatatgtgttgattttgagtagatagatataagtgttgcttaggattcatatgctgatgatggcgatatttctgtggtgtttatcataggaagaaagttacacgcgaatgcagaagagagttccgatgatgttacagatccaccaaaagttgaggagaaaattggtggtcacggtggtttatcgacggattccgatgtagttcataggttagtgttctgttagtttcacggtagaactttcgcttggattgcttgaatcttgccttattcgaattcgtttgatcgacagagagtctgagtcgatgtcaaagaagacgcttcgcagtaacgcggagaagtttgagttccaagctgaggtttctcggcttatggacattattatcaactctctatacagtaacaaggacattttcttaagagagttgatctccaatgcttctgatgtaagcagcttcgtgtacattgttttagtgagtttttgggatacctcgttaaataggggaactaataagtgtctgtgttggtgattttcaggccttggacaaaattaggttccttgcactcactgacaaagacgttttgggtgaaggtgacactgctaagcttgagatccaggttagctacatgtttctcaatatgatttttatgcttgagagtgttgaaaatagagtttcatcgatttgttttatcaaatgctgatctcagtaaatttagcctttcgttggaattgtgtctagtgtaagcttttttcttacctccgtaactatgctatggtatgcagattaagctagacaaagccaagaagattctttctattcgagaccggggaattggtatgactaaggaagacttaatcaagaaccttggtaccatagcaaaatctggaacgtcaggtacgttacttatgtggtgatacgttgtcctgcataatagtatggatcaataaattccatatttctaagatcttgcctttcgcagcttttgttgagaaaatgcaatcaagtggggatttgaaccttattggacaatttggagttggattctactctgcctatcttgttgctgactacattgaagtcattagcaagcacaatgatgacagccagtaagttgatttagagggctttgtttggcaatatacttgtgggcatgtaaaatcattgaaaagcttttctgataacttcttttccgatttcaggtatgtatgggaatcaaaggctgacggttaaattgctgttttcgaggatacatggaatgagccttttggacgtgga

SEQ ID NO: 155760 - DNA, 346 bp, Arabidopsis thaliana landsberg; identical to SEQ ID NO: 19662

SEQ ID NO: 155761 - DNA, 611 bp, Arabidopsis thaliana landsberg; identical to SEQ ID NO: 48523

SEQ ID NO: 155762 - DNA, 1168 bp, Arabidopsis thaliana landsberg
agctctgttttttctctgtagatgagagtcctctacctccaatctagagcatttactgaccattttcctctcttattctaccacatatgcgatacaacgcgcttagctttatctttcttcaagtgaaggaactgtcttggttacagtggcatcctttcagtgtttcatcaagtcctctagatgggaaccatcatgttgcggttcttataaaagttcttggtggatggactgcaaagcttagggatcaattgtcaactctatatgaggcagaaaatcaagaccagcttatttctcctgagtcatatcccaaaatcacaacttgtgtggagggaccttatggccatgaatctccataccacttagcgtaatgcatttcgtctacatgaattgtttcaatacagtaagctttagctttactcaagaaagctttatttgcgagtgcaggtatgagaacctggtattagtagcaggaggaatcgggattacgcctttttttgccatcttaagcgatatcctacaccgtaaaagagatgggaaagattgtttacctggtaaggttttagttgtatgggccattaaaaactcagacgagctctctctgctctcagcaattgacataccttccatttgccatttcttgtctaagaaactaaaccttgagattcacatatatgtcactcgacaatccgagccttgcatggtaagtcttacataactcttttgggagctgcaataggccttacttagtttttgaactcttcaatgttccatggttatacagaaagatgggatggttcacaaggtggtgcatccttctgtcaaaacaccatggaccaacggatgttccatgtcggttttagttggtacaggggataacatatggtctggactctatctaattatctccaccattgggtttattgcaatgatcacattggtggacatcttttacataaacaagtacaacataacaacatggtggtacaagggacttctgtttgttgtttgtatggttgcaagtgtgttgatttttggaggtcttgtggttgttttctggcatcgctgggaacacaaaaccggtgaagtggaagcaaatggcaacgacaaggtagatttgaatggagaagaaacccataatccatctgcagcagagcttaagggcttggca

SEQ ID NO: 155763 - DNA, 5494 bp, Arabidopsis thaliana landsberg
agatgttgaagaaggatgggagctggtagagaacttggctcagttggatggcaactataatgaagattatgacagaagcatccgcaccaattctgattctgatgagaagcaccgtagggaaatgaaagctatgaatgacaaactgaacaagctactccttgtgcaacagaagcacattcattttctgggtgatgatgagacgttccaagttcaggatggggagactctgcagtcagaagaggtcaccaaggaagttaccagggtcctttgttccatacaaccaaggtcaggggtatgttcttaagcagcagtaccagggcaactatcagcagcaacttccaccacctgagtttgcacagaagcactaacaacctgtttcaacaactccagattcagacttgaagaacatgttacatcagattctccaaggacaagcaacaggagcaatggatttgtccaaaaggatggcagaaattcataaaaaggttgactgcagttacaatgatatcaatatcaaggttgaagcactgacatctaagatcagatacatagaaggccaaaatgggtcgaccgcagctacctttgtctagggataacttgattgcgcttgtcaaccattcgattaggctaagataccactctattcgattaccccatccttaggaaattctcgtttgtctgattactctgttttatcgttatcgcttaatcgttctcattgcctgtttcttcgttttgcaattactcgaccaacttaatcgaccacacccagtgtctggcaacagactgtgcagtcgagtacaattgtcttgtttcctgtctgttactcgaccagtatactcgaccacacccagtgtctggcaacagactgtgcagtcgagtatagctgtttcatatcctgtctgttactcgacctgttactcgaccacatcctacttctggcatcagcctgttgtggtttagtgattttagtaattctgttattgcttatattttctgcatgtttgcttaggactgttagaaaccccaaaactgtttttgcttggcttgacttaatgacttctgatcacatctcatctgcttgcatcacacccatttggattgacacctaaaatactacaacgacatgattggtgttttaggataattgactaaaaacctattatcaaactgcttctaagcaattgtttgttggttttagcctcttatgggacaaaatgggtataagtgttgtataaacactcctaatctatctctatctcttttaattagtcaaatgcattagattgtgacacattttgaccatagaaacactaacaaagctattgactgcttctaagcaatattttgttggttttagcatcttttgggagaaaatggatataaatgttgtctaaacattcctactacatctctaactcttatgattagtcaaatgtattagattgtgagacatttttaccatagaaatactaacaaagttatttactgcttctaagcaattttttattggttttagcttcttttagacaaaatgggtgttagtgttgtctaaacactcctaatctatatctatctcttataattagccaaatgcattagattgtgacacattttgaccatagaaacactcacaaagctattgattgcttcgaagcaatatttttttggttttagcatcttttgggagaaaatgggtataagtgttgtctaaacactgctactttatctctaactcttatgattagtcaaatgaattggattgtgacacattttgaccatagaaacattaaaaaagcgtttacagcttctaatcagtttttagttggttttagcctcttttgggtgaaaatggatataaatgttgtctaaacactgctactctattgatataacccgattttcaccgattttatctatgttttaggtataggattttgtgtctttatgttatttctcgagtctttttagtgtcttttcaggtattctatgcaatgggacaacaatggagataaggagacattttggagcaaaagctaaggaaaagaaagctaaggcgatttttggactcaagaatcaagaggagtgtcgatcgacacactcctggtgtcgatcgacactagtttcggcccagcaaagtccatgacgttttcaagtttacagaagaggaaatttgccccaaaagaattccctatttgcattattactccctagacgttttatagggtttatatacattgttctacaccctagttttctcttatcaagctttttgcaaaaccctattgtgagagacataagctattcatccattgttcttgagagattcattccagttcttaatacagagaagagatcccttctttctcattttctatttgctgtgtttatgctttcatactctattatggtgtttgcttcaatcaatatgtctgagtaatctgcttgttaggaatagggtttctcattagggattcatatggtttagtagattgccccctttgctaggttatctatagatttcttcatctttaattatgcttaatgctggatctagagtaattaactagatcttgaatcgagacaattgatatgcccgccataggtatctgtagattgatttattatttgatgagtctggtttataggtgtgtaataagaatcggcctatctactaagatgaacaattgaactcgctaagaatgcatatttaggttgatagtttctcggcttctccggttattattagctatagatatagggagtttcgcggtacgcccaccggttattcgagtttgagtttaagaatggttcgataacaacctagctttcattagatctactgaccaatagtttccagagaataccctgttcctagctctttattaaatcgttcacaacacaatcatcccgctgtctttttactttgtttacttactattttcactattacccggctagcttaatctcgacatttaactcattgtttgaacaaaagaactttgagaattcgatcctaaaatactgcaattgatctcttatttgagagagtagttctaggtaatttgaaccatatcacacgcgtgtaacacccccgaaccgtcctaaaactatggacaaattcggaagcgtcacgttagacccccgtagctagtcaaccaagtgcccggaacacgaccattcacatagtcgaccaaccatgagaatcttttcctcgttttcatggcctaaggcttttcaacccgttccgagaacacgagttgtgttagtcttggactagactaataatatcattggttcaaccatctatttcattaaagctttgagtctttacattatatatatacgaataaaacgttaccaaaactcgtatatagggcggatccttattaattttcataggaaatcatatataataaacattatcagtatttgcaagagctgtaaaatctaagctggttggcctaatgatcatcgcgccgtttatagattccccgctaaggtttcgtgtaaacaaaaaggtagcatcatgagtaacctagtattactcaattagaccgggatctctagggtttcacctataccgctatcggaacacctaactataccaagcaatttacaatcaacaagcaagactcaatcgacaatgttgtcagaacttgcgtagcacaacgtttatactacactttaacattatgcaatcacaacaaaagacaatgcatcacacaataattatcacttagtatgatttactaacctcctaggcaattataagtaaataaaattaaacacctaaacatgtgctacttcacatgtccgagacttactggtgatccacgcatcctcgggaaacggccatacctaccccctcgaatccattggttccttctcttactcggttatctagcaatccacaacctaactctattaagtactaatcggcggttactaaaagcaactaaggtcggaaaacttaccgacttccaaattgggtcttttcgcgggttctcctcgggtttactagtggccgaaggtacttatagtgggtttttattcgaggtgtaagttctaaggatcaggaatgagggctatttataggttttcggggaagttggttagctaaggtgcttggggagacttgttacggtcgtcaccaccaagccacgctcgataggcgacccacggactggacacgctgtgggagcgacacccagccgtgagtcaccggagtctcgccactaatcgcatcctgcccggcgacacatggcgctgagtcaccacccaagacactcagcacatcccgctagtcgacagccgtccatgggctactcaaggggcgacaaccggccctgattcatcacccacctgtcgtccaaccggatcctgctcggtggccgctccgcagccacagaattttggcagatcgacatggtcgattctcagccacaaaacaccaagcagcttacccacctgctcgcagccttaagcaggtcgatgacatggtccatggtccagcacacgcccatctcggccaaacttaggccagcgcgagtcgctcacactgcctactgcgggcacactgcaggcgtaccacgggcatactacgggcacactgcgggcacactacgggcgaactggggtatactggggcaaactgcgggcgcatcacgggcaaagtcatactcaaggtgagggtcattacaacgcgattgatcagttaattgtcgagtgtgctcaagactatggtccgaatggggaagaaggaggagaaaatgggaacgatgggggtgattcctagtcggactcatttgaatccttaacgccagaacctaagagtccgagtgtgatcaacatctccttggacagtttgaaagctatcttgataatattgaaccctagcgaggcggattcatgctgggaggatgaaatgtttaaagggaatgaaccgagtgatgatgaaggaaatgggaggtgggatccgatgctacttgaaaaggaactgaatcagaagtctttgatgaatcgtctaagacttgataaagaaaggtcaaaaggaaagatggttgataaggtgggagaagatgagaggcagaagggaaagagagcgaaagaattggaaatgggatcggagaaggctaaggaccagcgaatcgttggagtaaacccgcatccacttgggatcaaatatgggattaactccaaggttaagcccagaatatgggcaacagcgaggaagtcagttgggaagacgttggccacaccggctaagcgtacttgcgagatatgtggtcataccgatcattcggccgaagagtgcttgtatccaccatcgactatgtcctctatggatgacaataccaactgctattgttgcggaggagtggggcatgtgtccatgtactgcccgtatgttgtgcctatatgcggacgaaggatcttcgagaggagtggggccattaaagactgcggcggcggaggagaagtgtttgaatga

SEQ ID NO: 155764 - DNA, 583 bp, Arabidopsis thaliana landsberg
ccatatgaacctcatttccatctctgagaactatcatgccgtaattttagtgaccgtgagtccccgaaccttttctatatgacatttataaaaatccgaaaattgcaggtgcatccaaacgttccttgcatgctgttcactccaatctgcccacattccctgtcgttcagaccagttatacttccagattctgcaaaactcgagttaaaggtaaagactttaaatacatccgcaactcagtacttttaacctgtagaaccacactcttttcctgtaagtagtaaaaaccacccaagaagagctctaagctcatgagtagaggactacatgatggtttcagtgttaagctgtttgaaatgctgactaattctctttaaacaaaaacagattccagatgatgctcgaagcaatgcatgggtttcgtttgatggaaagagaagacaacaactttcaaggggagattcggtgagaatatacatgagccaacatccactcccaactgtcaacaaatctgatcaaaccggtgattggtttagaagctaaatccgttgcttaaactggaacgagcgtcttgatcaaaagg

SEQ ID NO: 155765 - DNA, 461 bp, Arabidopsis thaliana landsberg
tcctgaaaaaataaggaggcgatcgacaatttaaggcggatttgatggataaagaaacagaactttagatcgttttttatgagaacgagacattgaagtcagatatccacaagagcgagacagatgtacaagacgcgttcctgaagctagggattgcaatggaagaggctgacaagagtagcaagaaagcggttagagtcaccgagcaactagaggctactcaagcttcaaactcagaaatggaaacagaactcaggaagctcaaagttcaatcaaaccaatggagaaaagctgctgaagcagctactgccatgctctctgctggaaacaacgggaaattcgctgagaactataatcaaacgaactccccgtactctgaggatatcgatgatgaactgacaaagaagaaaaatgggaatgtgctcaagaagattggagttttgtggaagaagcctcagaaa

SEQ ID NO: 155766 - DNA, 745 bp, Arabidopsis thaliana landsberg
accactttattgcgccgaaaaattcaagaagccaaacacaagaaaagaaataaaacatcaacgttgaatttgatgagtcactcgtacaatgaatattgtttattgaccaacgaacatgtgagagatccaaattcggagggggattcgtaatttgcttgctctccagatctacacttcactatccttgctcgttgaagatccaatcatcatcaatcgtttccggtaaatgatttcaatcatcttcgagctcgattttgtggagaaccttattagttagatatttgattttgggtttaaggatataattctgtttattatccatgggtttaatcaaatttcctgatttggttatgttttctgatttggatgaattcggattgaagaagaaaccatccttaaaactatacaaaattcaattgctagaatttgggattttgattgttaaaacaaagaggaaacctttttcttttgtctttgaatgattcaacgactgacaagattttgttacactatctgacaggtctttcttaggatcttgaacttaacaacatagcaaggagctttctttgttgagagagttgatgttatctctaagatgtttggtggaaaaagtcatatactcagagggagtgtatcactggccttgatcgtccttattcttttggtcattatactcctggtttctgaggaaaacccgcttcgtgattctctctttgaagtaaaacgtcagttttcatcttcttct

SEQ ID NO: 155767 - DNA, 447 bp, Arabidopsis thaliana landsberg
ccggccttggccttgtttgttggtgaagctcttgttggaaacgatgcagtagacctgctctcgaagttcaatcaggtttgggttcttacccgcattagactcctgttaggtgtttaactgagccttattgacgttgcttttttctgaaatcagaaactttcggatctctcgacttctgggaacccaagactgatcgatggaatcttacttacaaagtttgataccattgacgacaaggtacagtaaaatgatagttggagttagtgttggtttgaatcatataaatgaatgttaacgagactgtttgggatctgtttgtaggtcggagcagcgttgtctatggtttacatatcgggatcaccggttatgttcgtgggttgtggccagtcttacactgacctgaagaagcttaatgtcaaagccatagtcaagacacttctcaagtga

SEQ ID NO: 155768 - DNA, 488 bp, Arabidopsis thaliana landsberg
gttcagtcacgccatagattagcacgcgtatgtggttatgcacacttcgcagattatgctcttgatcgtaggatgtcaaagacatcaatgagggtttgtgaaagaacctttaagtgattaatctaacattcttcatgactcctttgtactgacgcccttcttatgccaggtgatcaggttcctggaggacatttcttccagtttaactgacttggctattagagagttttccattttggaagacttgaaggtaatctaatgttggtattatataattacaggttatgcctttctcactacttaacttgctgagttttaatatcagaggaaagaagaaggggagattccatttggcgtagaagatcttttatactacataaagagggtagaggagttgcagtttgatcttgattttggagatatccggcaatattttcctgtcaacttggtcctttccgggatctttaaaatatgtcacgacctttttg

SEQ ID NO: 155769 - DNA, 853 bp, Arabidopsis thaliana landsberg
atctcgataagtctctatccgagttgggtttgtttgatagacaagcacttgtagtggttccgcgaaaaagagcaaccgtctatcaaagaggaccatcttactctgagtctaactacaacacagaccctaacagtggcggttactttgcttatgttagaagagtactgtcttatgcaaacctgttttcatactttggtggtggtactgccaacgcatcaagctctgttccagaccgtcaaacaaatatgcgggagtatggtgagttcataaaatccattctaatgcagaaagttatgtaattgctaatctgattctctcctttttttatgtctataggaccaaatacggagctgagaaacaatctggggcaagtaggttcctcctttcaagatccatcagaaggtaggagcaacgttaggaataggagaccaaccacttctcggattggaagtaacatccatacgctgatcaacattaagtcatatatatcaatcatcaaaattatctcatgtacataaccctctcaatcataggcactacaagaaaacagtcaatttgcgaggaagcgttgcgagggaaggcattactcgcagtttttgcgaaggtattgcgagtaacatgctacataccagacgtgcgtagcaactccgtcgcaaaacttgcgagggatcgcaaaacttgcgaggcaaggcttcctcgcaaatttgcgagggaagtacgatggtttcgcaagaaagatattatccatcgcaaatcccaagcagatacatcgcaaatctttaccctaaaccctaaaatacataaaagtgttttgcgatctttgattatcatttataaatgtgaatctaagtga

SEQ ID NO: 155770 - DNA, 375 bp, Arabidopsis thaliana landsberg
gatgaagctggaacagcagctgtcaagacagttgaacttgatgcagctcttggaggccgagctgtccaatatcgtgaaattcaaggtcatgaatctgacaaattcttgtcttacttcaagccttgcattataccactagagggtggtgttgcgtctggatttaaaaaaccggaggaggaggagtttgaaacccggctgtatacctgcaaaggataacgtgctgtccacttgaagcaggttttctttgctgcagatttttagaagtgttacactctcttcgcatgagtgtttaatatgtatatacctgtctcttgtcctatgtaggatcgataggtccgctcatcgttgatttgtgttgatgtgtgttgattgaac

SEQ ID NO: 155771 - DNA, 664 bp, Arabidopsis thaliana landsberg
gacgcagatcaaattataaggacagacatgggagaactgtatgatatggatattaaaggaagacctctcgcgtatactcctttttgtgacaacaacagggaaatggatggctataaattttggaaacaggtaaacattaatctttttgttttgcttgtagaggtagttttggtttccatactcttacattttcaattgctttgaacagggtttctggaaagaacatttacgtggtaggccataccatatcaggtaaaaaaacctacttgaacctcagtaagttgttgcttttcccattcttaatgtgccttgttctatctgtagtgctctatacgttgttgacttggttaagttccgagagacagcggcaggagataatctaagagtattctatgagacgcttagcaaggatccaaacagtttgtccaacctagatcaggcaagttgtataatatggttctctatacttagggctgtaacctttctttggtggtcacactatcttttactttatttgaaaggcttttgcatttgactcttaccatacaccatgctctgaatctttagagttccaggttcaaacatattgatggcatgtcattatttttgttcaagatcttcctaattatgctcagcatactgttcctatattttcactttccca

SEQ ID NO: 155772 - DNA, 454 bp, Arabidopsis thaliana landsberg
atggtgctgtcgaacaagaagctgaagcagaggattcgacaagatttggctgaatcactatctgtctctgtatccgaaacaaatccacaatctcagtctctgaaattgctccttgattcatctagccacaaacccagattgtcgaagagagagaaacgaagaaattgcgaaactttcgctagagaagacgacgaaatcagagagaatgaagttgggaatggtgggtcaagcgagaagactgatacgaagattaaaaagaagagaaagagagacgatgctgtggaagtcgacgagttagaaggagatgaaggaactaaggaagagcaaaaaccccagaagaagaaaaataagaagaagaagaagaagagaaaggtaaacaaaacgccaaagaaggcggaggaaggcaatgtagaagagaaggtgaaggtagaagagatcaagttcctccagacaa

SEQ ID NO: 155773 - DNA, 1336 bp, Arabidopsis thaliana landsberg
atgtgtcatgggatcattgtaagaagtaagaacaccgcatccaacacaataattaagcgaaagtatagtagaagggctcatatcaagtgtaacttggaaggtccgtcacctagggaaaggtatgaaagaaagaaccctaaatcaaaaaagggaaaaaaaaccattttattaaatgtatttctccttggatttcgatttgaattttttcctccatcccatgagagttttgttcacactcacctctcgaacctctctctttttaatcatcgcccacaaatattttaaattccagaaaaaaactcattcaaaacaaaatttcagattcatttttcgggaaagcatatacagaagaaaatcacatgaagatgaaggcgacttaagcgtataaatataagatgggtttagggttttgaagagcccattcttgatgggctgtattcggattatcaaaccggtttaggatctacttagtgagacccggtttgtcctatcgcaactttggataaggctattccatcatcctaacacaggcttctcttctgaaaagttcgtctcatcgtctcatcgtctcttcgtctctgtctctcttacacagctctctgaatttcggaatcggatttgatcggaaacttggaatgttcaataagtttggttcgacgtcggagactcttagcaaagcttcagctgggttgcttcggatcggcactgacgctcatctttatgatgatccggaagacgtcaacattgctccacttctcgatagcaagttcgaatctgagaaatgtgaagctcttaagcgtctccttgctcttatcgctcaaggctttgatgtctccaatttctttcctcaggtgtttgccttattttgtttgatccctttgatcctagaattgttgctccgattttgaaacaatttttggacgaattttaatggcaggtggtgaagaatgtggcgtcacagtcatcggaagtgaagaagcttgtttacttgtatttgctacaatatgcagaaaagtatgtgaattcaattcagcaaatgtctttttgtttgggcatctacatgattagcttctattgattgtgtaggcgtccaaatgaagcattgctatcgatcaactattttcaaaaggacttgggggatccaaatccattggttagggcttgggctcttcgtacaatggctgggattcgcttacatgttattgcacctcttgcacttgcagctgtgagtaaatgtgctagagatccagctgtttatgttcggagatgtgctgcaaacgctcttccgaagttgaatgataaacggctggaagaacatgcttctgcgattgaagag

SEQ ID NO: 155774 - DNA, 206 bp, Arabidopsis thaliana landsberg
atggtaagacttatcaatttatcattagttttagtctgctctacttaggctagccctgctaaatattcataacctttcacccacatttcaattatttttctatttgtgattcaggtattgcaaactagacagaagctatcgattattggccgcaaaatttctagaggtttatctgatgttgccattacaagtgatgaggattcgag

SEQ ID NO: 155775 - DNA, 464 bp, Arabidopsis thaliana landsberg
ttccggagtccctccaactaaatgatatgactcctgttgaattacccttagtattaatctgatctttctcactctctcttggtgttgtgagttttaaatgtccttcttttcataagagtaacagtatttgccattacattgaacttaaaaactggctcagtaatgaatgtcctatttcctgtaacatcaagttctttggttaattgagaatctttccctagtaatgtgaattacatctgggtgtcctatggagatgattgaccttggtactattcttctttcaggcagagaagggagctcctacaattccgtctaagtcaaaaagtgagtcgaaagatagggacaggaaacataagaaacacaaggacagggataaagacaaagatagagagcataagaagcacaagcacaaacataaagatagaagcaaagataaagataaagacaaggaccgtgacagatag

SEQ ID NO: 155776 - DNA, 300 bp, Arabidopsis thaliana landsberg
aatcatcactgaggaagaataaaacatttggggagtttcttcgctaatccttcaaggtgtgacctgagaatcacaacacaaaacaatctcactcgaaattcctttgactcatcatcatcaccatgtggagaagaatcgtctcctctcagctcaaaaccctagccgccgatgtcgtcgctgcttctcctcgtcgatcgatagccgccaccaccagacctgtcggtttctatctcgccgccaatcgatcagccatttccgcatcttctttcgttatccctcgtcgtttcagctccgattcag

SEQ ID NO: 155777 - DNA, 465 bp, Arabidopsis thaliana landsberg
atagcctttgggaaattttgtagaagtacacaatattcaattatttttctcataaaactctttaatctgctcaggaatgcagtatcgaagaaatttctgatgatgaaggagaaaaatcaaagagctcgaaagataagaaatcaaatggaccggattcaaaaggaccaggccttgtatttaagataacttgcagggttccatataagactgtacttaaaggtatgtcaagcgattatcaaaatttactgcttgaccctctttttactcttttatatgagcaaatcctcatatgctcttatatggcagctcacaatgcgttggttctcaaggccgagagcatggttgataagaatgaatggattaataagctgcaaaaggttatccaggcccgaggaggccaagtgggtagcgcttccatgagacaaagtctttcagaaggctcacttgtaagtaatgcaaggaaac

SEQ ID NO: 155778 - DNA, 462 bp, Arabidopsis thaliana landsberg
gtcaagggcaagactttcatgcttcggcctactgaaaaattgtagagacggtatgagttattgcaccaacctggcgatcactccctcagagaatctcagaacaggtctttacttagactctcgcatattagtttttattattcggattgacgctagttttcttctgacatattaatttgtgtgtttgtttctacaggtcgtgtgacaccagaaagtgtgatgtacagttatggaactctgttgcttgatcttcttagcggaaaacacattcctccaagtcatgtaagcttatgattaagatactatatctatcagtcttcaccggatcattgctgagtatatatcaaatctctttctggctaaaactttacttgttatgtgtattatttgttaggctctggacctcatacgggacaggaacattcaaatgttgatcgactcatgcttggagggtcgattttc

SEQ ID NO: 155779 - DNA, 4293 bp, Arabidopsis thaliana landsberg
  unsure (1)..(4293): unsure at all n locations
atggaggctgttgagaggaaacgatccagaggaggttttctaaatatgtttgattggcctggtaaatcccgtaagaagctcttctcctctagcagcagcagctcgaaactctccggtaatgtctactttaatgctctatcagttttggtttaagttcaaatggttcttgtcttgaagcccttggttggtttctacttgatatgtagaattttttggtgtgtgtgatctttgatgcattgtcctgtatatatctacgtggataaagatagtccacttcttattcagaagaacttcactttttatcgactttgggttcttgttcaatagactcaaactcttgtcttctttgtttgtatcagaaggatcaaagcgagagaaacaaaatgctcaaaacccctcaaagtcatggccctctctggtaaggcttctcaatgatttcagtgagtgacaggatccaattgtgttttatctgatcttttgtttaacagattgagggagatgagattggaaagaattcaacttacaatcccagaagtgactcgagttgttcaacatccactcccactagtgatgatggacaaggttccaaagctccaagtgttgttgcgaggctcatgggtttagagtctatacctgtaccaaatgccttggagccccggcgaaatcctgattttgatccatacttcctcagatcctcacgcaaggcaagcacatgggatgcatatgagaatttgggttatgtaaatctccgcagtgactatgatggtatttcttgggaccatttggattcaagaatgaacaaggagtgtaaccggcctatcgaccgctttcaaaccgaaacgttacctccaaggtcggctaaaccaatccctgtcacccacaataggctcttgtctcctatccggagtcctgggtttgttcagtccaggaaccctgcttctgtaatggaagcagcttcaagaatgattgaaccaagtcctcgggtagttgctagaacacggttttcatcatcgaattctccttcatcagttcctatgaggattcaagatttaagagagaaattagaagctgcacaganagtgtctagccgtcaaaactccaatgataccttcaaccttaagtacccaagtggaaagcacaacgagaagagaattacaacatcactcacgacaccgtcaactagtaagttcatggggaaaagcagtactgatggtttgaagggtaaagtgaagccatcttatgtatccgcacaagcaaaggccaatactattcacaagcgagacagttcaatgctctcaaatagctacagagaccaaaagaagaaggtggaaactaagaaccgcatagtaaaaagtggtcttaaagaatcttctgctagcactaggaaaaccgttgataagccaaataaccagaaacagaaccaatttgctgaaacgtctgtttcaaatcagagaggcagaaaagtgatgaagaaagtaaacaaagttttggtggaaaacggaactacaactaagaagcctggttttacagcaacatcagcggaaaagagcacttcttcatctttgtcccgcaaaaagaatctttcccgcagcaaaaaaccggcaaatggggtgcaagaagctggagttaacagtgataaacggatcaaaaagggtgagaaggtgataaaatgtaacatcaccgtcgatggcgggttgaagacaggggacgatgatcgaaagaaggacatggatgtgatttcgttcactttctcatccccgatcaaaggtttatcatcagattcgcaatactttttaaaaaagaatgatcaagatgcagagtcagcactttgtttcaataagatagatagtgattctctaaattttctgttggagaaaaagctcagagaactaacctctaagatggagtcatcttgcagtagtctgacccaagaagaagagtcttcgggttccattacaaaggattgggtgaatgggacaagatcattgccgtcagatgatcaggataacggtttatcagaaagcgaatctgattctgactatagtagttcattctacaaaaagaaaatattccaggttagttagtcatatggcaaattcctttctccgcacaaggatatgtctacttttagtagcttatcaatgttctataattcgctatatatgtttcccgtaaggttttctgactccactgacctttgaaaatttcatattttctatgacgcaggcagaagatgatgaggaagttaacagtttcagcactgccgaaaatctccaaatctcctgcagcacgagtttctcaagttcacgcaatgattatcaccataacattgaagaaaccgaactctcagaatctgttgctttatcagaagctgaagaaggtcatgactgggagctcgagtacataacggagatcattgcctctggccaactgatgattaaagaattctccttggggatggctactgatatattacctctgagcttattcgatgaaaccgaaggcaagagagatgctcggggaaagatcgagagaaaaacactgtttgacttggtgaatcagtggttaacactcaaatgcgagcagatgttcatgggaacctgcaaaggagtgttggggaaacaagacatttttcttgaaaggagagagattttggcagaccaagtgttgaaagaggctcagggattgaagaagatgagagagatgatgatggatgagctagttgacaatgacatgagtagttgtgaagggaaatggcttgattacatgagagagacttacgaagaaggaattgagattgaagaagagattgtgtccgaattagttgatgacttaattaatgatcttatcatgtgttgttgacaccaatcctttggttttcttctctccaacatgagagtgaaattgttttctataggataaaaacaagattaggctgaactaaattctgtcacaggctgaactaaatttttatctctgaaatcgaaaatacttaaaagtcttctgatagcacatgaacataaaagtgtcttatactaaaaataaaaaaagatggggtgttccgagaatcgaactcgggacctcgcgcacccgaagcgcgaatcataccactagaccaaacacccgatttgttaaatcgatagaggtaaacatatttatacggataacatatcaccaccgtctttatagggagagactctagttgtttgttcatcggagacggaagaaaattcgaatcatcagtgtttgtttcctcctctcttaaagcttagcccttctcaggtcattgttcttcatggcttcgagcaacacggtaagcatacggtagtttctctagttttacttagggtttattgggatacgaatctgagattgctttctgtgtttttgtagactactggggttgataatacgtttagaaagaagtttgatgtggaagagtttaaggagcgtgctcgtgaacgcgaaaagaaggtttcactctctccaatttcacaatctctgatctgttaatttttcgattttgaaagctaaaatctgttttattccatgatgcaggaatcggatcggtctaaatctcggtgtagggtttctacttatctgattttaagcttatctagatgaaatttaagtagggtgttgtttttgcagccaaaggtcctcctgtgcaaagagcccctttgaagcatagagattatcatgtagacctagaatctcgtctgggcaagacacaggtatcatttgctctcttttcattgaatagaaatttgcaagcttttctttaagacagagaatttgtgaaagtaaatttggtctacttgttcttggacatggatgatgtttctatctgggtcccttctacattacaggtctactttttaagcattgcacttttggtttgtttaatctcaagtgtgttaaaattatgcgattcatatatcaatcctgcttgataatatgctagtacctggttctttattaggttttataaacgtttggaatctcagttaaacagatgaaccattgtgaataccttactatatagcaaacggcattgatgttttttttttttatatattgcacgattagtttttttttattccaatcttttctaccattcttttgatatggattagtctttccacctgaggtttcttcaaagaatctaacgttcgtgtttatattaccaggtcgttacaccggtagcgcctctaagtcagcaggtaatggctcttatttacctctactgctaatatgaacttaagcaaaaacttgtaatcacatgagaatcga

SEQ ID NO: 155780 - DNA, 1274 bp, Arabidopsis thaliana landsberg; identical to SEQ ID NO: 11548
  unsure (1)..(1274): unsure at all n locations

SEQ ID NO: 155781 - DNA, 1285 bp, Arabidopsis thaliana landsberg
taagaaactaaacacacatataactcttgatcttctcgtgaccatctaagccttcctttcgcagtttcaccaaggatggaagaacgtgacaaagcacctggtgtttcatgagcactatatcatcaatcataatcttaatatataaagaacgcacagactcaggcaaacacatcaaatcgaggagagatcttaacctgcataattatggatgctattatttgtggactgagcccaagctggaagagcgaaagcttgatctctgctccaaactcacccagttcctctatcaaaaacataaaatgttaactacaaatacatagaaatgtcaaccaaacaagggactataagactcaaatgacatgagaacactcaccaacagaacccgagacaaagctaaggtaatcttgaggtattaatcttctgtcgaatccaggtaaaggtataaaatatccaacacggctaagtacaagcaaaacagccgttacaaacaacctccttcttatctcgctcttaaagaatctttctgctgcagtattgagtactgaacttatccgaacaaaatcaagaaacctatttctaaaagactttggcctatcatcctgtagtgtgttggagacagcagagttctgtgaattacgaatgtcctgtgaatctggcggaataatctccacatccaaagcatctgtatgcatctcctcgctactcatagaatcatctctgaacttatcggaataatttatcgaaaaactcttcctttctttcataagaagatgtcttctgttcatttgtatagaatgcccttgtctcgttcttgacatattcaaattcgtagtaaggcattttctgggttgagaacacagaaatgggtctcctgcaaaaacattatcaaggtcaaaacacatgcctcaacaattgtttctgttcataaagttggatactttgagagaatttccgggttaagagaactagtctaagagatagtatcagtgaaaaagttatcaactttgcaggaacagtgaaaaacccaggtcagtgcttttgaaatagggtttaatcaattcgaagcaacgaaactctaacgattgtatcctgaactagtctaggtaacaacaatctcttaaaatttcgattcccaagcacttaatttggggaaggaaaacttacgtttcgagaggaaagcataggagggatgcgaaagcgagattggtctaagaggaaaatggaagaagcaagcttgtgaggaattcatcgagaggatgaggagagaaaacgcggcgctgagcta

SEQ ID NO: 155782 - DNA, 547 bp, Arabidopsis thaliana landsberg
gttcgattctcgacgaagaatactcgacgagaaaatccagatcgggaatcaacttagagaagaagaagaacaaaaaaagagaacttctaaagatgaatttagggttcttagttggagttttcggagttctgattctctcccatgccgcttattcaacaatccaatgtatgtctactcttcccaatccaattccagttccaattgagtcagatctactttaatttttgagccaggatcttgatttgggtttctcttgtttgtttcagatagaggattgctgaagattatggaggaagagttttctcgaccaccgattaatgtgagtatatatatatgattttcttttcctcaattgtgtttgaatttttttcagcagtgattatgatttgatatgtctcatgattggatttcttaaggttattctggagttgataattggactagctctgtgtatgtgggctgctttccctttccctgggaaatttctctcgatccataaagaaactgatgaaaacaggtttgtgatcatgtttctctcgaactctct

SEQ ID NO: 155783 - DNA, 570 bp, Arabidopsis thaliana landsberg
tgtttgtgtgtgtctctcagtttctggatttttgattcagttttcattggatgattataaggcaaaaaatgattactttgagttctgtgactgaaattattataaacttatctcttggattgaggttaaaaaggactacttttgatttttaattagtatgaatcttcttgctgtagctgagagactctgcagtcagttcaaatgcgaaaccagaggtaccagttacagttcctgcaccggtttcttcttcgggtaagccggtttcttcttcgggattgaactatgtaactctcggaacattcagctgggatcaagacaatgacaaagtcaaggtaaaccattcagagttttcctcaatcaatactcaattatgttaataaccatatgcttgcgtgtggttatgtaatggtgttttcttattgatgcattatttttttgtttatcagatgtacatatccttggaaggtgttgatgaggacaaggttcaagctgagttcaagccaatgtctttagacatcaagatccatgatgtacaaggaaaaaattacccctgccccatcccgaagttgt

SEQ ID NO: 155784 - DNA, 1217 bp, Arabidopsis thaliana landsberg
aaatcgacaataaatctcaacaagtttctgcaagtaagtctctatctatgaacatatgcaatttagcaatgctatgtgaggctctttctgcatttatgataaaaaaatttcgatcagtcttctcataatatctccattgtgttctacatgggtatattttaggtgctttgagacattctctgcaagatagacttagcaaaggagcctcagggaagaatcgtgatgaaataaacttaaaacttcgtaccagcacaggtaagcccctttttacttgcacaatcataagtggcaagcctatatctactcttcaaatagcacatccttagctaacctaagttgggtgtatgaatttatctttgatacccgtgaactggtcagctgtaatatcttgctatccttatatactatctagtacactagtttagagcttctagctttactttggtgggtatcagattaaatatctaacggagctttaacataaacagtacacactcttttgaacatgagttatgacatatgacatatgaccgacagtttcgtagtattaaattttctttgaccatcataacctgttacgtttaccctttacattgcagctccaccattgaaattagttgataagcctggactggaccagagaattgtggacgagtcaatggtgaggcttggaactacttaatgccattgtcatatccttaacttgcctgacaaccacgaaacaaaagattttgactatttttatcggtttcctactgaagtgataatatagattcattatcatgtttatccttttgaaattgttgtttgtttcttgggtctctttgcaagattgctgaatacgcgcaacacaatgatgccatactgctggttatagtgcctgctagccaggcatctgaaatttcatcatcccgagccctgaagattgcaaaggagtatgatccagagagtgagtacatctgtatttccgatctgtcttatcttaatattgtttattatttgtatacctgataagaactgttgatttacctacctattatcacttcagtttgcttaaaatactcattagctaacatcactcctccctacttataggtactaggacaataggcattattggaaaaattgaccaggcagcagagaactcgaaagcccttgcagctgttcaggctcttctttcaaatcaaggacctccaaaaacaactgacattccatgg

SEQ ID NO: 155785 - DNA, 1144 bp, Arabidopsis thaliana landsberg
tgcctgtcacagttaaaaactctttatgcggaaggtatagaaggatgctctctggagtttgctgcgtacagtctactctatattactctacactctaacaacaaccgagaactgctatcatccatgtccaggttagtagttgtaaagtcccatctctgggctccttttaagcatgatgcattcatggttcatgggaattttttttataaattaaggttttgtagaaatatcagaatatggtttgctacacaatttctttgagttagtaatggaattattaatgttctgtccacctacctgatagttgagtttttgtaacatctcttcctaccagtgcaaagaggttactactacctctttgaattgggtttgtatgcatgagattgagtaattttgtgacctctgttttgaagattatccgaagaagataagaaggatgaagcagttagacatgctctttcagttcgtgcagctgtcacatcagggaattatgttatgttcttcagactctacaagactgcaccaaacatgaatagttgcctcatgggtaagggtcatatgatacatgaaaactctcttgatatatttaaacaattgaatgagtagatatgtaaagatatggtgaaattgttatgtttgcagatctctatgtggagaagatgcgttacaaggctgtgaattttatgtctcgtagttgtcgtcctacaatcccggtctcatacatagtccaagtgttgggatttactggtgctgcaagcgaaggtactgatgaaaaggagaccgatggtatggaggactgtttggaatggctaaaaactcatggtgctaacatcattactgacagcaacggagatatgcttcttgataccaaggtaagtcttcttttgcatttgccatatgtttgttatgaaacttgtagatccttattttcaagatatggattgagaactggttgtgttattccttgtgcaggagacatcaacgagtctcttcatgccagaacccgaagacgcagttgctcatggagatggaaatctagatgtcaatgattttttacacggtacatgatggaatatttttaatgtttgttatagtctgatggaaacagaaaaagcaaaatcgaagttcatcatatcttttgatc

SEQ ID NO: 155786 - DNA, 250 bp, Arabidopsis thaliana landsberg
ttaatcgatgagatcgtgatcgtctaagcgataaaatcagttatagaagattaatctgggtgtggaggtcacaagtactcgccgtcgacgacgatgaatcgacgatataacaaccggtgaatacggggaactcgtgaatatgcgaattcacttatacactaaaacgatgccgtatagtccccacttatgttcctccggtctaaatgtcattaatccacattttggttcacgctatatcggtttgatgcgg

SEQ ID NO: 155787 - DNA, 276 bp, Arabidopsis thaliana landsberg
ggcctttttttgttgataaattgacaaagacatttaaaagaagaattttcgaagaaaaattagagagagtagaagaagcagctgcagcaatggtacgagcttcatcggcgtagaaaggaggatcaataggaggagacagagtcgacgccaagttaaaacagaggaggagattaaaaaccctagctatagatgaccaattgctactctgattctgcggcgaaatctgattactttctcaaaccttcaaagcaagttctcaaacaccatggcaccgac

SEQ ID NO: 155788 - DNA, 749 bp, Arabidopsis thaliana landsberg
gcggcagggaatgaagcctttcagtctggacgacacactgaagcagttgaacattacacagcagccctggcttgcaatgtggaatcacgtccttttacagctgtgtgtttctgtaatcgtgcagctgcatataaggctcttggtcaattttctgacgctattgcagactgcagccttgctattgctcttgaccaaaattactcaaaggttttaatcctaacatatcacttttggtttcatttgttttctggtttccacggaaatacggaatgtagttgaaaggtttcaacgttttgacataaaactggattgtgatcgttgggtaataacttctcttaaaagtaaataggttgctgtccagctgtatatcagtgtttctgtttacgtttcaaatgcataagctacaacattaaggatgtggcagcaattctcgtatgattcaaggctacttttctgtctgattggctgaaaaagtactctattgtgtcacttaatttctttctttctttattctcaggctatttctagacgggccacgttgttcgagatgattagggattatgggcaggcagcaagtgatatggagagatatgttaatattctaaccaagcaaatggaagagaagacctctggaacccttgacagatctactagtatgtccaatgacataagacaagctcgtatacgactttctgaactggaagagaaatcaaggaaagaaaattcattggatatgtacctcgtcttgt

SEQ ID NO: 155789 - DNA, 791 bp, Arabidopsis thaliana landsberg
cagttcgatgggaagactttgggaatcactgcccgtgattcttctactcttagttcttcttcttcatcaatcagtctctcaggtatttgaagatcttacgtgctctatcatctatattcatgatttaccgattcgttgtttttcttcttcttcttcttctattgatctataatcaatgaattttcatgtttttgctctctctgtaggggtttgaagaatctgaatctactaggtgaatctctagcaactccacttgattaaactcgtgtctttgtactcaaaacaaaaactttaaattagtttgtgtaagattattctcaatttcagctaaacatgtctgatttatattgatttgtcttgtcctgaaatatagattggttaacgaagaagtagaagttagtaatgctccagaaatacattgttcccgagaaagaagtcgagcagcttggcagattatacaagatgtaagtagagactattcaaaaactgaatatgtttcctttaatttgtgaatttgtttggtattagatggtaaggagtagatttttgattgtttttgttatttggatttttttctgcagtatttgacgccatttgtggaacgggaaagatatgaaattccaaagaattgtaggctgcatcctgataatgatttatacagagatcaggaacatcataaggttcatgttgatgtcttcgaatggaaatgtggttactgcaagaaaagtttcaatgatgagaaatttcttgacaagcatttcagtactagacattataatcttttaaatacg

SEQ ID NO: 155790 - DNA, 299 bp, Arabidopsis thaliana landsberg
atgtaaaattaacttacgagattacgacatatatacaaaatatattttcaacaatgtttggtttctaaatatttttgtggatttcttttttttttattaattattagccctaagcgtttgggtattcggatcgggtatttcgggttcgggttttcgggtttagaagtttaggacccgttaggataatttaagatttcgggtcggattcggtttgggtttgggttcgggttcgggtttatttatatattgaaatatcaaattttgtgtgcaaatctattaaattacttgaaaatttcaaa

SEQ ID NO: 155791 - DNA, 547 bp, Arabidopsis thaliana landsberg
cgttgaatacacacgctcgttgtatctatctactcctccggttaacgggggtttaaagccacgtcggtgctacacatgtccctgatttctcctttaacataaaactaaacagctgttttgtccgcaatcattatctattactaataaaaaatctcaacttttgttccttactcttattacttcctaaatccgatcgaaacaactgttgggttagtttctaatttccaagaatggcgcaagatcacgacgagacggagaataaaacctttgccgacgttgtcggtggcgatgatgtcggcgaaattgtcaacggaggaacaaagaatggctatcgtaaaccggactctgtggagaaggaagatgatgaggatttgaagagtctctattccttgatttgtctcacgatcggttcgattctgtttccagattcgaaaaccggtgatgcgtcttcgtttcctgaacgtgtaagaaactccgtcgctgaaaatggaaaaaagcttcgagaagcttctgaaagaacaggacgcgagattcttctctggagtcg

SEQ ID NO: 155792 - DNA, 1323 bp, Arabidopsis thaliana landsberg
  unsure (1)..(1323): unsure at all n locations
gatggtttaccctttttcccatcagattttcccgactgtaaagcgtattcatcttttacactgagcgaggctgcagacttggaagaaaaggcacaacgtcgccctccagccataagacctttcagaattcccattccacctccatggaatagtatccatgtcacccgttctattggagagggttccaatcaaaagttttcaagcaatgggaggagtgttgtggaaatttccagttatggtggtaatctgtttgatggtatcgtggcaagaacatcagattcgctaactacttttctccaaacattcacaagtgacaacatgcttttatttcctcacaacacttcaaaaccaagcacagaccttatgatgacgcttcaagaagatgataaaaaagtaagagctcagatccatcagagtagtaacaaactgtgcctcgtcagagttcttctacatgctttcaaggaaggttctttcgaagaaggcgcggttgtatgtgcaccaactcttgcagacatatcattgctaaaatccaggtaacatctccaagaatccatgtcaaattgtgatccattggaactatttcattttggtatcacattcttatacattatgttttacagctgcagtgaaggagaagatgggcgtgtcacaatcccacaatcttctgtaagttcttactttcaagaacaaccttgtggaacctgggaactaaatgttcctgaagacactcttacagagcaatctcatagatggccaatcgggtttgtaacaacaggatttgtacgtgggaggtaaaaactaaaaaaaaacactaaatattgagtacaggtcgccnnnnnnnnnnnnnnnnnnnnnnntcttaaacctgtctttattgtgtgtagtaaaaagccggcggccgaagctttctgtgatgcggtgttgttagggagactaagagatgagcaatggagagacaaagatgttagacggaggaagaagcagatttatgttttagttagaaacctaagatcttctgcttttaaactcgcacttgctacgattgtcttggagcaacaagactattgtgatgtccactgcttttaaaatgcattttttaaaattcaaattgttttttttttgtatcaattatttatctattttacttcatacaataaaaaatatagaaagtttagtgggaatttggaaaatttatcaccaacttatctgttttttttttttgggacaaaaaagtcaatgcttatggaatgtaaaaaaaaaaagtgctaaaaaattaattatattgtgtttagaaaagactagagaatgaaagatgagaatgat

SEQ ID NO: 155793 - DNA, 2490 bp, Arabidopsis thaliana landsberg
  unsure (1)..(2490): unsure at all n locations
tgatctgttggttaatactattgcagggagaaagggcttcgaaagcgacagacattctcaaaggttgaaatatatatttttattattaattcttgataaaattggtacgaggataaaagcgttgaggaattttctaaataaaaggaatttntggattacatgtggacagggtctcccgtggagtctggtcccactacaccttgccagacaaaaagttgttactcttcatcctcgatagacttcaaaagtatgttctctgttattctctcgtttcttgtatctctaggttcatgtgatttcactactgtgtatattggtttttctgatcgttgttgttttgtaaaactcttgaaggaaggatacttatggagtttactctgacccggttgatcctgaggaggtgattgtctctttttcttgatgttttagtcttgttaatgttacgagatttctgtttgtcttatctgtgtctttcttacagcttcctgattattttgagattattaagaatccaatggattttagcacattgcggaacaaattagactctggagcatattccactttagaacaatttgaggtatgtctttctactcctccttttcgatcagcttctatcctttacagttttgatgcgttcgagttggttacacatttgattgatagctacagaaagttttgttgcttgccatcttcatttcgatactttgatacggagaacctttgcttgatgatgttgtttctgtgcattttctttcagttatgagatgttaaggctctattattgctaagtgctaaccagtgaagatacatatagtgtagggtgcgtgcagatttaaggctatttcaacagctctgtttaactcaatagtaacctttgatcagtttagtctcaaaattgtctcccagcttatttgtcgggagattggtgttggaacattttctttttatgcctctttgatatatatagcttctggccctgttctgttttgcagagagatgtgtttttaatatgtacaaatgcaatggaatacaattcagcagacactgtatattatcgacaggtatgtccttaaaattcactattcttctatcttttgatattttattccaggactctgaaaatagtgtgtaattcgacttttaggcacgggctatacaagagttggcaaaaaaggattttgagaatttaaggcaagacagtgatgatgaagaaccacaaagccaacaacagcaacagcagcaaccaaaagttgccagaagaggccgtccgccaaagaaacatcctgagccgtcttctattgaccgcactgcttctgaaatgtcagctgatgctctcattcctggggatagctctaataagttttctggtgcttacaatttaagaaaggctcctccttcatacaaattccggcaagcagaatcatcagttagaatcaatcataacagtgaaacccagagtggttggtcggtagactgggagagcgaatttccatgtaaaataatctctgccttttctcttaccttctttcagactttctttcttttgttgccaatatgaaccatcttcttgtttttttctgtagcttcggttgtgaaggcggttaacaagtatgggatgaaacatttcaatgtcgatgataatagacgtgatacctacaaccacctctcgacttctacccaagaaccatcggttttgacaacgcttgaagacgagttaaaacagttgattccagtacgtagttgccaactctattatcctttgtatcgagaaacaagagtatgacctctgttttccttatttatcaggttgggctgaacatggagtacggttacgcgaagagtctagcacgatatgctgcaaatctcggtcctgttgcctggaaaattgcatcgaggagaatcgagactgtattgccctctggaatcaaatttggtcaaggttgggttggagagaacccagcaggacctgaagaggatgattctcagaaacaaaacttattaatgtcgtcgggaaaacaaaagtgttctaatgacttagcgtctgatgatcattctaacagaatcctgtctccaaccgcttcagtttcaagtgctttcataggaaacagacatgcttcctctcaagccatcgaagagaccacaccaccacctgctcgtgtcttgaatccagaaatcgatcacccatcctcctcctctcaccaagcaggactgctaatcaaaacagagagcagcaacggcctcatccgcggattcaaccataatgcaaatcagatgctcggaattgctagacagcaacaaccaaacgtaagcaacgaggccacaccggtctcgcaacaacaaggctcattgtttccttaccccaaacaagaattccaccggtttccgccagaccttaacgctaggctagtctcaccaaactccccgggctctaatcagcagactggttcgtcctcgtcgcagcatccggatctggcattacagctgtga

SEQ ID NO: 155794 - DNA, 326 bp, Arabidopsis thaliana landsberg
cagcatctgaaagaaaaagatgtcttgggggtatgcggagaaacaggctctggaaagactacacagggttggtcttgccagctgctccttgttacttagtgatgataaaatatttgctgtttgctctttcattactgaggatatcggccagcttatagctttgagttattttaactctgcaacattattccaggttcctcaatttatattgcatgatatgattgattcggcgcatggtggatactgtcatatcatatgcacacaaccttgtcggatagcggtgagtatctcgttgttaagatgtgatactgtaatatattggatga

SEQ ID NO: 155795 - DNA, 1381 bp, Arabidopsis thaliana landsberg; identical to SEQ ID NO: 70808

SEQ ID NO: 155796 - DNA, 426 bp, Arabidopsis thaliana landsberg
acactctaatagcgaaccaaaccctaacaaaaccaggtaataataatagaagacattttttaacactgatgaagatcatgaggaggaggaagcagagtttgtgaaggaagaggtccatctttgacgataaaccccattgctaaaccccacgaagtatgttgttctagatgacagtgaataaaccaaactcctggattatccgcatttatcctaatcgccgcccatcctcccgtcggcactgcaaaagtattcctctccggcggatccaccaagttgtaccttttcggatccttctccgggtcaaaattcccaaatcctcttcccactacgaagaaattgtgtccgtgtacatgtaaaggatgattctcgatgtttaagaaactcgttccctgaaacacgatctctaatctcgatccgaattcgact

SEQ ID NO: 155797 - DNA, 532 bp, Arabidopsis thaliana landsberg
tcgaagaagaaacagagaatcatcaaatcaaatccctaaaaattgatttttgaaatggagaagaacgcatcgacttcgtcgttgaaggacttgggtccgagtggtctagatctaaccagcgcctttttcaaaccgatccacaactccgatccttctctcccttcaaaccgacgtaccaaagtctccgtcgtcggagtcggaaacgtcggaatggccatagctcaaaccatcctcactcaagatctcgcagacgagatcgctctcgttgacgccaaacccgataagcttcgtggcgaaatgcttgatctccaacacgccgctgctttcctccctcgaactaagatcaccgcttctgttgattacgaagtcaccgctggatctgatctttgtatcgtcactgctggtgctagacagaatccaggcgagtctagactcaatttgcttcagaggaacgtcgctctcttccgtcatatcattcctccactcgctaaagcttctcctgattctatattgatcattgtttctaatcccg

SEQ ID NO: 155798 - DNA, 408 bp, Arabidopsis thaliana landsberg
tgtacataaaagcttaaaagaaaacaaaaagaatggggagagcaagagaaataggagaaggaaactcatcgtcgttaagggaacaacgaaacctcagagagaaggatcgaaggatgcgcatgaaacatctcttctctatactttcttctcatgtttctcccactcgcaaggtccgttttttctctctaactctccctctctctctttctctctctatatatatcttatattaaattgtagatgtgttttatgcgtatatacaacaatacaaacattatctacataattactgtaagatgtacgttttattctaaagagataatattttgattaattgaataggcagttgtccctctatgaccgtccatattagctctcttttaagtacggtgtctaattgacaaataa

SEQ ID NO: 155799 - DNA, 507 bp, Arabidopsis thaliana landsberg
ttaggggctagtttaaaagagtttcctttttgtggtaaagaaagagaaagttatgtgccttgttataacataactgggaatttgcttgctgggcttcaagagggtgaggagttagatcgacattgcgagtttgaaagagagaaggaaagatgtgtagttcgtcctccgagagattataaaataccacttaggtggccacttggtagagatatcatatggagtgggaacgtgaagattaccaaagaccagtttctttcttcaggaactgtgacaacgaggtcttttgacatacattttcttcaaattcagttttccccatgtatatggtttctgttctgtgatgtcttatttttcattgtcatcattattaggttaatgttgcttgaagagaatcaaataacctttcactcggaggacggcctggtctttgatggggtcaaagactatgctcgtcaaattgctgagatgataggtttaggaagtgatactgaatttgctcaagcgggt

SEQ ID NO: 155800 - DNA, 520 bp, Arabidopsis thaliana landsberg
tgtgcaaaaggatctggtgtggatcgatctagaacagcaacaacactgtgagcattcttatttttcaataagataatttattctgacacctttgtttttagggtagggttcagctgttgttcattcaaatgctgttaacttggtaaaccgataatgtatatatatatatatattatttggtatgacctttatgagctttcattctgtgcaacagttccttaaagaagaagttgaaagacaagatggccgagtttcaggtaggaaggaatagattaactattcaaaagtttatggaaactgttattctaaactaagattgtgacttgttctaggttctacgagagaacattcaacaagagtatcgcgatgttgttgataggcgagtttatacaggtatgtatgttgatgttatggtattgctttattcattgccttctaccgtttcttctcgcttattattttgtgtgttttccttgaattagtaactggggagcggccgcatcaagatgtaagtaaagta

SEQ ID NO: 155801 - DNA, 451 bp, Arabidopsis thaliana landsberg
cacattgagggattcttggcaaagaaaaaaacattggcagattttgtgtttgaactttcgcgagtttaagtcaaaggtaagtaggtaaagatctgatgtgatagggttcccacccatccacagtagagattccaagcccggattgcattgataaagtcgcttctaccggaaatcaaagcacttcagaaagattcttcaggtggacatgaccggaatggttgttctcagagctcagattttgagattccggatgattgcagcggaacatctggctatgaaccaaagcttgcaacttgtaaaattttcaccagaggagtttgaaggtttgaaactcgagaaagaaaaagcagagagcaaccttgcaagctgtgaagcagatcttgaagcaactaagaccaaactacaagaaacagagaaacttcttgctgaagtcaaatcagacttggaatct

SEQ ID NO: 155802 - DNA, 1307 bp, Arabidopsis thaliana landsberg
acaacaaacctatgccttcgacgcgctggctaacgtggtactgcctcctatggttggcggagagagaacgacggttacaacttccacggtggcgatcgataagcctggaatctcgatgatgagctagtaggttccggaaattacgacacacgcgcttagttactcggactatcccagtctcggtcgcttatccaggactaagtccttgatgaggaaagctgctaatgatgataatgcttggaaagctctttatcacaaggtaattagattcactaatcactcatttgtattagctttgtgtattggaaattcagaaatgattctaggttaaaagatgtgtattcttagcagtttctggattagtgtgtgttttcgtgaatggtgctattttgtttaatgcttctcttacttttttctcatgtgttaggattttactctggagcaagatggtataacaccagtcaatgggtggaaagagtactatgcaactactagagcgattattagtgtgaatacggaattcttcaccatcattagagacagagcgcttcaagcgatggctcggttgtggttgaactcggactatgtcaagtgtatccatgcctctggcgaactcttctccgggtaacaactccacatttcacccccttttgtcattctaatgtgtacctagcatgttctttaacggttttgggtatgtttctatggtcttagctatgagatggtatctgagtttgagtatactagcggaacaatgctcttgtgcagttcctcgtgatacaagatgttaagagtattgtatgatttagtaaaaacgtttaagcaaaaaagttatagcaataagataacagagttaacagtagtatatccacagtagctctgatagaatttggattctttcagcaccttccattgtttgagtctactccacacagttttattcttatgcatctttgttctagatttggccatcttcaaataggctaaatacatctttgtggatttctttaaaagaaatcggtatgaatcatctatgttttcccttcttgaattgcaggtacaatgaagtgatacaaagctggcaactttgtttcaattgggaacaagggtttgactttcaggtccacacggttcgcactcggatactaacagacatggcttgggtcaccatgaaggcatacctgaacgtggatggtggtccattcctaatcaccaatgtgttcgagttccacaatggaaggtggcacatggttcatcatcacagctcagtgatgctcatcgatgatcaacaagttgttgttcattga

SEQ ID NO: 155803 - DNA, 973 bp, Arabidopsis thaliana landsberg
catcttctcttgagtttcacactaatgcttgtataacactctatgaatggtctcagagagaagaattacgtgcaagattccctggtgtacctggtgatcttgtcaactacttcttatacgtagcagaagaggtcagccactttttttaatacctcaatcattaagactttttttggcctaatctcatctgaagtataatcttttcttggcaggtgagaggtatcttagcacagttgggatacaacagtttagatgacatcattggacgaacagagttactgagaccacgagacatttcgctagttaaaactcaacatctcgatctgagttatcttctttcggtatatgattgtatccagactctatttcttcaacatgcatgaaatgaatcacttgttctaatttctctttttttttgttttcactcttttagtctgttggaacaccttcattgagcagtactgaaatcagaaagcaggaagttcatacaaatggacctgttctcgacgacgatattcttgcagatccattggtaacagaagtctttcactgctgttttccacctggttctgctgaactgtaaagttgctaacagttttaatatctctaggtgattgatgcaatagagaacgaaaaagtggttgagaaaaccgtcaaaatatgcaacgtagaccgtgcggcttgtggtcgtgttgctggtgttattgcaaagaagtatggagacactggttttgcaggacaagtgaacctaacgtgagaaataaacactgaagctttgtagatatctatatgtttcagttcaggttatagctaaaaccaagctttactctttccttgtctgcagtttcttagggagcgcgggacagtcgtttgcgtgctttttgattcccggtatgaacatccggatcataggagagtcaaatgactacgttggaaaggtaaaactagcatccatgtacattgaaatcaattt

SEQ ID NO: 155804 - DNA, 964 bp, Arabidopsis thaliana landsberg
caatttcttcttcttctcctttttcaaaaatttgtcacctccgagatcagatctgatcgtcggaattgagatggcgaggaataaacttgtaagtggtagtcatgggatatggaaatatttcaacccagcgttttatctccgaagaccaagacgtcttgctttgctcatcatcctcttcgtctctgtttcaatggttgtttgggatcgtcaatctctttcccgagactaccaggtacgttattgaattgatgagaggcgctaatcgaatctgttaaagtaggcagctaaaggtctagactttatgaaattgtttatactgggctgtagaggaaatcaaaattcaatctttggataaaggagagtctctgtgttatgtgaagataggatttttctttcacttatgtgtgtttataatgtatgctgactttttgcagtttgaagtttccaagttaaatgaagaagttttgcggttgcagcagatggtaagttatttatttcttttccctatgaggctttgattatacccaaagtttcctcctttttttgcatttgcttaattacacagtggctgatattgatgtggcattacgcgtctcgtggtcttgcaagaatttgatttactatgagtttttaaatcttgagaaagttatgagattttttataatgatcttaaattttgttgtgttttctgctagttggaagagataaagagcgtcactgaggatgtgtctgtcaatagtttgaaggatgttcaggaagatccagttgatgctcagcgaatgcagagagttaaagaggcaatggttcatgcttggagttcatatgaaaagtatgcctggggacaagatgagcttcaggtacagttttatctttgtatggttagctacaatgctgacagcttatgttaacgttcaccattgttcagagaataattgggttgtttaactagttaaaatgagaacac

SEQ ID NO: 155805 - DNA, 793 bp, Arabidopsis thaliana landsberg
taccattctgagacttgtttttctttttcatgtaccaaaaggattagctaaagttcacgagcagacgagggagccgctcgatgataaaagaatagaggaagatagttcagaagaagaagaggaggaagaggataaccaagaacctcaagtagatgtaactcaacttacagggagacaaaagaagttgtttgagttgagacttaagatggtaagtctttttgtacagtcattagtaattcttttaaaaaatccaaagatcgttttatatatgtaactcttccataacgcttttgtttcagaatgaagcaagaaaatccaatcagacggatgtcgggagtgaaaagaagaaaatggaagcaccaacagagacaaaaggaatctcaaaacagaaatggttggaggggaggaagaaaaagattgggaaacttcttgatgctaatggtttagatatgacacaggcttatatgctcgatactcaagaagcagctgaatcaaaatacaaaaaatgggaaaaggaacctacgcctgcgggttgggatggtacgtgaaattcgtactgaattgaaactcttgtctcttctcatttgttatgtttcacttcgatgattacacaattattgagaggctaatgtgtgaagtgttgtatttatcttcagtctttaaccagaagacgttatacaacgcatacaagaaacggacaaagaacattcaggttgatctagaggagtataacagaatgagagcagctgatccagagttttaccgtgaagcttcaagcttgcaatatggaaag

SEQ ID NO: 155806 - DNA, 1485 bp, Arabidopsis thaliana landsberg
gcgtttttgcggcgatgggtcagcaattgcgtcgagctgttgggaaaatcaaagaagttgagagatcatcaccatcaagagtctccattgatcggagatcgcttcctacggaggagctcagtgccgtgaaatcgtctccgtctactgccgccgttgatggagtttctggtataaaccctaaatctctcgcatttgggtattcgaaagttttcaccgttataaacatttagattgatgggctgcttcttaaccgtttccaaatttttgttcgtttttgatctgaatttgggtatgtatctgttgttagataaaggtcgaagaaccagtgaggataatgttttagaggaacgagaccccaagtatgatacaatgttgaaccaaatggttgggagaataaaagctaaacctggaggcaaagctgagatgggagaggtttgtagtgttgtttccttaagctttgtttatctcttgtttgatttgatgcattgattcgattctcgtcctctcatcaggacaagtatgtgacttttggatttttaatatagatccacctgattacctgcattgatagttggtgcttatcttagttatgtagctgttgagaatggtatatgaaccctttgtcttgcctcttagtcacatcttgtggagtttttgtcattagtcatgtaaaggtttcgttactggttgattttaaggtattagagataagatgggttcaaaaggtttcgttactggttgattttaaggtattagagataagatgggttcaaaaggtttcatgaccaatgctgggttgctttctaattctgctctggaatatatgttaaggtttttgccccagagtctctggcaacaatctagaattttatattcccctgaacaagttcacattttagagtaactgaataatgtagaagtaaccagattagaaaacctttgatagcgttctgtgtcacaccaatgaaatagttagcataactaagaagtgaacagattgtgtctcattcttctgctggtaatcttagagctgacagtgattgatggtgtaaattaagtttaggataagagatgaaatgtagaaatgtagataatgcaaaagggccatatagttgcgggttttggtctttcctgtgtataaatccatgaagacatatatctatctgactaaactgataagacttgtgatttatataggcatcagtagttgagacatcgaaaaggccactcccatagctccggaacgcaactcctgaatcaacaagatatgaggaaaacccggtgcctcaaggaacgttgaacgtagcacaagtgcgacacatcatgcttctctttcagggaaaatctcaggatcaccatggtccaatgggtgttaacgagatagctgaaaaataccggattgatgtctctcaggttcagaagatcactcagttcctgtctttacctcaagagattactgataagcagaagaaacaatatgaataa

SEQ ID NO: 155807 - DNA, 237 bp, Arabidopsis thaliana landsberg
gaactaaacttacgcccaattatgggctagacctctttctcttgtccatagatgaagggattacgggttatcgtgatgattctcttgagactgttaaacggaacgaagtccaagtaagcttctttttgaattctatgtgtgttaagtgattgttttatggcggttttttgtttgatgggttctttatcctcctcttccagtatggttggcctactaagatcgatgcatattacgatc

SEQ ID NO: 155808 - DNA, 502 bp, Arabidopsis thaliana landsberg
cgccgtcgtctcccgccgtttataccctctccgaagccccgagcggccaagacgctacgtttgatttcgtctcaaggttagggttttggaatctcagtttttttttttgtaaaaaaacaatatgaatgctgaatttgtttctgtcgattttgcctctgtttgcaatcatgaatgcgtagattcactctgaatggggattgaatttggtgaactccaatgaggttagttatggagttgttgttttagtaattgataaagtatttagattcagaaatagaaagcttggcttattatatcttatatggataaatgcatgaagaacataagaatctctgtcattgttttgaggacttatccccttatttcacactttgatatgagtttggtcttgagcgttttgtctttgaaattctgtaattctcgtctgaagttttggattttctttttaggtgtttgcaaaactccgcaaagactctacctttagcgtttaaatcggtaagtg

SEQ ID NO: 155809 - DNA, 480 bp, Arabidopsis thaliana landsberg
ctcgttgcgcgcattggtaacacggttaacagcagaaatggcgtcctcaccgagatcaaatcctttggcaaggtcgaattgggttacggtattagaaagctcgacggaagacactatcaggtattcaatttcgttagttttcttactgaatcgatggtttatgagtccgtagagtttgtttgatcaggattttctccaggccgattcaatggtattagcattttagtttaggtttgtgttagctttgtctttttcatctttctgatcgattcttatggttagatagctagattttgggaatttatacagtcattttactcaaatgcttgctacgaccatggactgatacttctttcgcccagattacttacgcttagtttaactttcagttggattcttgaagcaaaatcatcatattgttactagtaaaggttgcttttgcgtgattttgtctacccgatttataaaatcctgatgagg

SEQ ID NO: 155810 - DNA, 830 bp, Arabidopsis thaliana landsberg
cgcgtctgggatttttcagaccttgcgttacgcatcctaagatcgttagagatcacattcctaaaggaggagactccattactctccgtccttcctccatcgaaggtccgtggatcactaaagggacccttcagaggtaaagaatcgctgcttcctaacaaaggagaaaacgttatgtcatgaacactaaaatttgattgttttgtttccgattttggggaacagatttgtgcgatttgtgactactccggaggttcttgagaggtctgtaacattagagaaggagattgagcagatcgaggattcgattcaagctaatgcagccgccattgccggtgaagctgaaggtatgtttggacatagaatcagagattttcaaaattggtaatttaacacatagaaatataaaaatgttcaatcctttttcaacattgtgtaatcttgttcatatgtaggaaacgagttgggtggtacatggacttctcaaaagtctacggctttatcaaaggtgagtttttttctgttcactctcttagatgccaaaacttgagttattgcttaatgtttcaattgttgtggactctgtgtatgtgtagacgaaaggggaaactgatggagacactgtggaagaaaattctaagtaagttttaagtagtttacaataatataattatgatgttattatcacgtgagattatgggggtgtcttatgtggccatcaattccacgtgtctctttctcaatacggatgaagaagcagtgaagcactaatgacaaaaactttcccagatatgattgtaatgttttatctctcttctaggtgtatttga

SEQ ID NO: 155811 - DNA, 334 bp, Arabidopsis thaliana landsberg
atgtcagatctggtcgcgacgtcgccgtcgccgtcgtcagcgccgagatccgccacagacttcttctccgatccttacgactctcatcctctatggttcaagccttccctcttcctctcccctaacttcgactccgagtcctacatctcagagctccgtacatttgttccctttgacactctccgatctgagctccggtcacaccttgcatccctcaaccgagaacttgtcgatctcatcaatcgagattatgccgatttcgtcaatttaagcactaagctcgtagatatcgatgcagctgtggttcgtatgcgtgctccgctccttgagctcc

SEQ ID NO: 155812 - DNA, 723 bp, Arabidopsis thaliana landsberg
  unsure (1)..(723): unsure at all n locations
gtgtgccatttatggcatatgaaaaagttaggtggtgtcttcgtcatcggtgacaagtggctttgtcaccggagaagtcctcagcgacaggcgaaattagttgaagttcttgcaaaatccaagcttctctgccacacccgatctgaaattcttcagttttgagttacgtagatctttacaagtctaaagatagggatgagctgaagaaggcggtggactggtgttccattagagggcagcaaaagtgtgtagtacaagagattgagaaggacgagtatacgtttaaatgcatcagatggaaatgcaattggtcgcgtcgggcagattgaatagaagaatatggacttgttaagataactaagtgtagttggtccacatacttgttgttctattaagccggaaaacttcaacttgtaatttgcagcagaagagattgagtgtctgatcagggtacaacccactctaacagcagagttgaaaagtttggtgacatnnnnnnnnnnnnnnnnnnnnnnncagcagaacaggaagtaatcaaagatcagagtttcagagtattgcctaaactaattggctgcatttcactcatctaatgggctacttgtggactgcaatatgagcttttccctaatcctgaatttgcatcattcgctggagccctttgaaagtttccccagtcgcttgaagggtttcaacactgtagacatatgataaaagtgaatt

SEQ ID NO: 155813 - DNA, 2639 bp, Arabidopsis thaliana landsberg
  unsure (1)..(2639): unsure at all n locations
tatataagctaagtatgcanaactgttccaaggcgtaactgtgcttgtgatagaaatctcacttgacaacaccaagttgagcagtttgctctttgtagcgacatggggttattaagtggcattagtatgaagatccttaaaaatgaattgattgctttacacaggtaaatgatgggaaaatccctaaagatcgtgcaactcttcggatgctgcatgaggaaatgatccgttggccaaatttagaggtacctcttctttgtacctcacaattgttttttgttgcctattggtgggactgataggaagaaactgccttaggcaatataaatctataatgacatctctccttaggcaatttaaatccataatccgtaatggttcctattgatgctagaaactataatggaagagatctcttttcttttgtgtaactctggtgacggctatatacatttagttagttagctaagcagaactctgttttaaagccctatcttaacaccttatcttatttatcttataaggttgaggtttcaaagaagcaacgaggaaagtcaatgtacgctaaatccacagacactggaatagatccaaaagaagcagccaagagactcaacgtcgaatgggattcagctgctgcaattgaagaagtcgatgtcgatgatgaacaaggagtagtaaccaaagtcgcggtttgttcccatatcactctcaaacactttcacagctttgacctggaaatcgttattctttcacaacattttaagcgttccgtatttgactttttgaaatctgattgatatttctcctgccttttgttcttaatccgtttgcagggctatggagcgttgtacttcgtctcagctttaccagttatcattggtatctctgttgtattaattttgttttacaattccctacagtagagtcaaatccatttagttgttatacacaccaccaccaatgacccatcattgatgttttgtaacttaagaacatgaaatgagtttttcaattatttaatcatcttcttccttatacaacggcttgtggtctgcacaaattccaggtaaagtactccaaaaccctcggtaatattaaaataaatgtggttcgtgcgagcatatctatcatgatcagatcctgtctcaatcttgggcatagtctcatgtcaacgatgttaaatattttaaagcttatattatttgtttatgtttataagaataaagtcaaataacctttggctgagactaatacgcaggaaacgaaaaaaaagctggacgtgcatatcatgactcagtgtagctatccttaagccaccaaacgtgcggtccatgcttactctctgtggctctgtataagtattcatcttctctttagcactaagacttagccatttgtcaatttctcttcttacagatcgagatttcaggtcggaaaataaaatggtggctgcagtacttatgccaactattagtttcagagacgaaagtgctcgcgaggattggcaagttctaagcagaaacgattcaaagaagaagattctagtcaagcaaacgagtatgatgcaatccgagagagagatatcgatggatccgaaatcaatcaggtcgttgtctatgtcgggttcgttgagaaggaacgatagcttcgatatggttcgtttaccggcaatgtcacctcctagagacttagattcgcctatgcctcttcctttgcagccagtgcagactactggttctcctaaacaacgttcaggtctcatgcgggcgctcagaaacagggaacaagacagcctcccaaactctcctaaacaacgttcaggtctcatgcgggcgttcagaaacaaggaccaagacagccttccaaactcaaccactggttctgcaaaacggcgttcaggtctcatgcgggccctcagaaacaaggaacaagactcgtcttcggcgtcgtacaagagaagcaaatcttgtgggtctactagcaagacactttctcataagagcagcggaatcagaaactctttcttcattaaaaccgattcgaacaagagcatcagcaataatagtacattagaagacagattcaaatgcaacgctctgtgtttattcctccccggtttcagtaaaggaaaaccgatcagatcatcacagaaagacgattcttcttccttcacccgaaccaccacgatgacgagatcatcatcctctaccattaccgtttcaagaacagtctccgtcagagaatccaccaccactaccacagtgatctccgctcgagcttcaatggagaaattcgattgcggctcatatacttcggaatcctgcggagaggaaggaggaaatcacttctttgacttaccgtccgagctaatcaaaagtggttcaggtgataacgaccatgacgaatcggtttcagcggctttcgtgttcgacaaggaacctgttgagaaagagatcaaaggtgttttaaaggtttctggttcgaaagacagaaaagcaatggagtctccttctctgcgtcaggttcgattctccacatcatcgccggtttcatacctgacgtctccggcgatctctccacggttattagaagcctccaagaattttaatgctttcttggaagctcaagccgtttaa

SEQ ID NO: 155814 - DNA, 756 bp, Arabidopsis thaliana landsberg
atgaataacgaaattcatagtcgaatgggggttggagacatacttgaggtagtttatgatagcttctatttcctgctatataccttcctttcccgttttggtcattttatacttcctcttaaggggattctaacttgacgtttgtgtcataggagttgtagtgatagatatgctgagcatctctttatattttatatgatatctttttgtctatcattaccagtcagcttaactggcacattggttgtttgaaggcgttaagagctaaatctatgtctcaactctatctcttgggttttggttggcatagctttaaatcatgatttgaattacttttgcaggcattgctaagggggagattcttgcgaaatggtgacaacgatgataaagagaaaccaacatcatctgcagccactgagttgggctttctaagagagaggcacactgtatctgagctgaggtagttaattcttctgtaataataaattctattttagaggtgttaaaaaggtccttgcttactgtgtgtttgtcatatgctagggaggaatttatatccagactggaccggtctgcctctggtcaagcgagcagtagtcactctgagacctcatcaaatgctgaaactgatcataatagaggtgaacaaaacgacctgaattgtctagatagcatcaatgatgcagacggtggttcagatcaaaatggccgagaggctgacaaccaaagttcactggatgagataactaactaaag

SEQ ID NO: 155815 - DNA, 557 bp, Arabidopsis thaliana landsberg
gctttgttttatttggttgacatacaaaagcgttttgatctcaatgcagtgatacttcttttgtgggtgaaccattggaaattggccagtcagaatacatgcatgtaagctctcagtatagtggataagcataagtttatgttgccatagaattagctggatttcagatagctgccatccttctctctttgcaggatctcaagaaggccaagaatagtaagaaacaatgttctgcagtgaattggcttcaatgcagagaagaagatactaatggagttatctgcggaaagtggcgtaggtaagttaaacaattttgcaagttccattatttggttcatgctctcgtcttgaatgtaacttactttctatcgccttttcatcagacttcttaccaattaccaataccttcttccttgtctaaatatgcttaatttgactggatatacacagggcccctcgttcagaggtacaaaccaaagactgggaatgcttctgctgcttctcttgggatccatcacgtgctgactgtgccgtccctcaggtcagaaactctctta

SEQ ID NO: 155816 - DNA, 638 bp, Arabidopsis thaliana landsberg
gagaccatatttcctaaaaacttggtaaaataaccttactctggcatatctttgatgattatggataaaaagacattggtctcaatccatggtaaattctgacaggtgcagcttttcctccaaacttcaaggaagtggtgaagacaatctttaaacgactattccgagtttacgcacacatataccactctcatttccagaaaatagttagtctcaaagaggaagctcatctcaacacttgcttcaaacacttcatcctcttcactcatgtatctataaaccctcttttactcatcattaatcttccattctagtcttttatcagtcactgagtttgttgatttttgatttttattggtctggttttgttttgcaggagtttgttctcattgacaagaaagaactcgctcctcttcaagaactcatagaatctatcattgcaccttactaaaccaaacaaaacccaaatcctctgtccaattacaagacttttttttttcaatcacattcatggtaataagttttaaccccaactgtaaaaaattgctgtttctgtttgtaaaaaaagaatatgcaatacactgctgaaccttggattttatttaaatggttacattcgaaatttcacttgattacat

SEQ ID NO: 155817 - DNA, 349 bp, Arabidopsis thaliana landsberg
aggattgattcattaccagaaaaacaacgacaaagcgaaaccggcgtcggtgatctctgcgttcaacagtcaattaccgggaacacaatcgatcgccgccacgctattcacagccactccggcgattccggatcacgttttaacgacgacgtttcaaatcggaacgaaagaaatcgaaaaaatcaaatctaagtttgctcccaagaaagtctaaaaatcgcgtcgttatatatatatattttaaattttattaattggtttttaaattttaataaaggaaaaaataaaccttgttcattagaataacctgctgaatcagctggagggttttaagcaatgcgtataaagg

SEQ ID NO: 155818 - DNA, 616 bp, Arabidopsis thaliana landsberg
  unsure (1)..(616): unsure at all n locations
cccatctcccgcaatcgtaacccataacgtcttttgtttgcatccatcgctctctcatacaaaattcagatctgaagcacacacaagcttcggattnnnnnnnnnnnnnnnnnnnnnnnnncgctttcccaaattcaccgtcgatctggagccgttacaggatccgccgcagaccacggcgtcctccggtaccggcaacggcaacggtaagatacgctaccgttcgccttcttccactgagctcctggagtctggtaaccattctcctacatccgactctgttgacggaggtaagatgacggcgaagcgtgggattggacggcacgaatctcttgctgacaagatccaacgcaatcgtgggattatacttgtgatttcggttcccattgtgttgatcggtctcgttcttctgctaatgcctgggagatcgatttctgattccgtcgttgaagagtattctgtgcataatcgcaaaggaggtcctaattcgagaggtccgaagaattacgctgtgatttttgatgctggaagttctggtagccgtgtacatgtttactgttttgatcagaatttggatcttattcctcttgggaatgaacttgagctcttcttacag

SEQ ID NO: 155819 - DNA, 1677 bp, Arabidopsis thaliana landsberg
aaacttgcagatgggattactatgtattctatcgcttcagattcttatggaagagcatccatcattggtcctcttgtaaaggtatgttttctttactttgcttttaagccaattatctgtatcttgttttgattcttcatttttgtttccagtcgtgattttataacatcttctcctttacaggaacatggcaaaggaggaaaatgcattgtctttacccaaacaaaacgtgatgcagatcgccttgcatttggattggcgaaaagctataaatgtgaagctttacacggtgacatatctcaagctcagagagaaagaacacttgctggtttcagggatgggaatttcagtattcttgttgcaactgatgttgctgcccgtggacttgatgtgcccaacgtcgatttggtgagtgaaaactacactttttcttgctcttaactagttctgtttctcatttcattaacccgtattgtgctttgtgtataggtaattcattatgagcttcctaataacacggaaacgtttgttcaccgaacggggcgaactggtcgtgctggaaagaaaggaagtgcgattctcatccacggtcaagagcaaactagggctgttaaaatgattgagaaagaagtcggaagcagattcaatgaggttaatatctttctttaccgtctttgtatcttttttatgaatagcttgggtaacagttctgatctatttggttttgaattcagctgcctagcattgctgtggaaagaggaagcgcaggcatgtttgaaggagtaggtgctagatctggtgggtcgttcggaggaggtcgatcaggcggtggtgggtatggtagttacggtagcagcagtggccgttcaggtggtggtagttatggaggttatggtggcagcagtggccgttcaggtggtggtggtagttatggaggttcagggggatcaagcagccgttactctggtggttctgaccgctcatctggttttggaagctttggttcaggcggttcttcaggaggatttggtttagaccgttcttctcagtcaagtggaaggagcagctttggtggtggtcgttcaggcggatcatcaaacaatcgttcctctggtttcggggactttggctctgaccgttcttctcagtcaggcggaaggagcagctttggtgggtttggatcaaatgatgggaaaagatcttactgagagaagtgtttttggagccgagccggcaataattggtttgaccctaggaggagggaggattcggtgactcgagtagattagttactacggcggatacgaaggagtcaagttatatatataaatctgtagctatgtaaaacaaacatatactttcgaagttatgttatcatcatttcatatgaggtgattatcttcttttgcataatttgtttgtttatattgtcttgatatatgactatatgaggttcacaaaaaacagaaacacagaattattgaatttcattagattacgtagcaaaaataccaatgaacattaataaattggaaatactctctttttctcaatgttttcaagcccgattcatagtgttttcttagactatgtattcttgatgttttagatgatgaagaagactaccttgatgttttagatgttgatgaagaagactctcaataccgcctgaagtga

SEQ ID NO: 155820 - DNA, 797 bp, Arabidopsis thaliana landsberg
aataaagaaaaaatcccaatttccctaaatcataaagaaacttagggttcgttatcatcgccatctcgattctcctaaatcataagcgatgttatctccgattgagaatgagagatccgaaatttcttcccctaagaagctgaagttagaggaggagccatccgacgatgaatctaagttctctaactatgattcggacgattgggaaactttgtctgatgatcttcgactgttagatgaagagtggggcaagagcggggtttgtaatctccaaccatttctttcttttgaagaattgtttgattcatttaattttgatttgtggtgttttcagggttttgatgtggacttctcgaaagtgcgtcacagatttggttgcggagctgttcatctcgacgacgacaatatggttagcgagcctcatgagaccaacagagatttgctcaacaggttgtccaacatggctatctccttctacaacgacaagacggttagtaatctctaatgaatcaaataacttttgctcttgtttgctgatgcatgaatctcttaattaatagcgtatatatttagtgtgttggttatggtgatgcatgtttgtcttgtaggattcaagtttggaacttgtcaaggttttgagagcaaattttcacccatctgctgcaatcacgctctacatcacgttcgaagccaatgatcctaaagatggtaaccagactaaacgttaccaggcagtggtcctctacttgtcctttgatatcgaagtatgctcttgcaagcctgaaccatcttcttga

SEQ ID NO: 155821 - DNA, 1285 bp, Arabidopsis thaliana landsberg
atgggttggttgtggaggaagaggaataagaagctaaaattggagagaggaggcatcttgttaaaagatctcatcgaattaggccatggcaaatccaatcccatcaaattcttctctgctaatgagatcctcaaagccaccaacaatttcagcgtctctaatcttctttatggattagcttatcctttcaagtggtattaccacaaatggtattcaggtaagaacgagaaccatcccatgatactcatcaagaaatgtactagctggtgggatcgccggagagtagatagtttattgtgccgcgacatagcagtttcatcgatggtgagtggtcacaagaactttatgaaattggttggatgttgtcttgagttagattatccagtcatggtttaccacggtgtaaagaaacattacaaattagaaataagggaacagacgtggaaaaggagaatgaagatagcagaagatatcgctactgctttagcttaccttcacactgcgttccctaggccctttgtatataggattttgtctctttggaatatcttattggatgaagatggtgtcgcgaagctgactgatttctctcactgcgtctcaataccagaaggagaaacatttgtccgggttgagagaccagcagggggattatatagttactttgctgataattacgttaggagtggcctagtctcagataaaacagatgtctttgcctttggaatctttatgggtcataggcttctattaggagacgaagactttttggagcattatataggagatggatttggcagtaagatgaaaagacatgctcggaattttatgtcaaaattaaaggaagacagaccaatggaagagattgcagatccaaagatgatagaaaagatgggtcaaatttcagaacaagagcgttgtcaaatgaaagctttcctattgctctcactgagatgcaccggtcatgttgggaaagttccaactatggtggaagtggctaaagaactaaagagtattcaaagatgtcttcacaacgacactttttctccttcaggtgaaacccaatccgactctcaccaagacatttcttcctcggtaatcctctcaaaccaaactaaagacacaagggcattgctaagatatattgcctgccaggtatttgacgaaatgtttcaatgggttatgatgaattggtttcgttttttcagaagaaatcgaagaatatgctgaaaattacttcgattcttgtatttttattaagacattatcaatcgaaaagctttag

SEQ ID NO: 155822 - DNA, 847 bp, Arabidopsis thaliana landsberg
ggtatcgatttcacggaaagtgaaagaggttgtggctgcaaagtataggaatgctggagcagtgacggggaagtttatagtgattcatggtattgaatcagattctaaggcatcaatgcaatcaaaaggagatgatgatagtttactttcacttgaaaaatgggctaagattataaagggtgtaaggtaattattacacaccttcaaaatgtgaattttttgcttagtttgaaattctctgagatatgattgtgaacaatgccaggggattcaagccggtctttgtgattccacatgagaaagaaagagaaaacgttgaagattttgtgggtgatgatacatctatagtgttcatcacaacaccaggacaggtatgcatgcttatctgtctgtatttgttatgaacaaagttgaattcactgatcttactttgattccttttcttgagcttacttagttggctgctctgataaacgattctgctggagtcatcgcaacaaacacagctgcgattcaactagctaatgcgcgagacaaaccatggtgaatacctgagtaatataaagagtactgattcaatgttttcaagaactaacatgtgtgtgcttctttttcttccagtattgggttgttctcttcagaagagaaagggaagctctttgtaccgtatgcagaagagaagagtaactgtgtaattattgcttcgaagactggaaaactagcagatatcgacattggaactgttaaaaatgcaatgcaggtctttgaaggatcattggctctcgtgtagataactttacagtttctgaaacaagttctatatatagagcatttatgtgtataaatc

SEQ ID NO: 155823 - DNA, 559 bp, Arabidopsis thaliana landsberg
ggtcgttataaagaagaaaatggagaatccacgccctggcttggtaatatgataaaccttatacagtattgcattttatgacaatgatgttatttagatttaatacatttaattttatgatctgttccaaccacaggaaaaagttagacaacaaggagaccatgaatgtcttcaccgggacatgatagccggattcgcgacatgggaattcgacccgactgaattagaaaatccgtttgcggaaggcgaaggatcggtccacgtttggcaagggatggaagacagaatcattccatacgaaattaatcgatatatatcagagaagcttccatggattaagtaccatgaggtcttaggttatggacatcttctaaacgccgaggaggagaaatgcaaagacattatcaaggcacttcttgtcaactgatgatcatctctacacaagatgccacaaaaaatatagcatatttaatagattttatttatggattataatattatagcatattataagtttgtaagtaagatgaaaaccacttgaaagtcattaatttactat

SEQ ID NO: 155824 - DNA, 827 bp, Arabidopsis thaliana landsberg
gaaggaagaagatatcgaattttgctctttctacttttcgattctctctcgatcgagaggagaaaaagacagagaggcacggtgacacgctgctttcacagaatttccccaaccgacagacaagcttcgcggattcaggtttttctatgattcgatccatttcttaagaactctgcattttattccttgtaaaatcttcctcctagctcctttcttcaattttcgatttttgatttatattgtttcaattttggatcatatctttttatttcttgtgaatcgggtctttgtacttggtacctctatgtagcatttttggcttctgtacaaatctgatttcacctgtatgcatacgactcaatctaaaagaacccaagttttggattttcctctgctttggagctcaattttctttacattctgaaaaaaaaaatcatctttttatggaaatgttcaatttttgtagttgtttgtatcgtccgagtcttaatacttatgagagatcatgtctttgcagatggcgtcatgctaatatgactaaatgagattctggggattaagtttaagtgggaaggctgtaatagttcctaatggggataaagtacttgcccgtctccgtagcatcaacagctctcagctttgttggacttcaagtctggacagagttgtctctcgatagacttcgagcagatgggctgattgccaagaacatttctttaggagactctgagcatgcgcttgagctgcttctgggctcttatttcactattgcgctgcttacaaattttgtgctcaatgtgtatattcttttggtactttctctcaag

SEQ ID NO: 155825 - DNA, 1114 bp, Arabidopsis thaliana landsberg; identical to SEQ ID NO: 4354

SEQ ID NO: 155826 - DNA, 1868 bp, Arabidopsis thaliana landsberg
  unsure (1)..(1868): unsure at all n locations
ggaacgaatcaagtgtagaacgtttgatgaagcagataactaattttatgtcagatattgctgatgagttcaaaattgtggtcgtggacgcaataagatcgttgtgtgtgaaattcccactgaaatacagatccttgtaagtaaagttttagggtntgttatttgtagttttggtctcgagcatttctatttttntgaatgattaaatatgttatggtatctttttagcatttggcttatgattgatctatcaccttttcatttgtaggatgaccttcttaagcaacattcttagggaagaaggtggctttgagtataaaagagcaatagtagattctattgtgaccattatcagagatattccggatgcaaaggaaagtggactgcttcatctatgtgaattcattgaagattgtgaattcacatatctttcaacacaggtaattattccatcatccatctggggttgctattaaaaacttatgtgttattgaaatgtgtattctcgcacagatcccttcattttctgggaattgaggggcctaacacctcatatccaagcaagtatatacgatatatatataattcgtgtgcatctagaaaacgcccactgtccgggctgctgctgtttccacacattgcaaagtttgggtttatggttgaatccttgaaggtatagtcatcataacaaccattatttttattttccgtttatcttctttgactgatgataatgctcgacagccccggattactgttctattgaagcgttgcatctatgacagtgatgatgaggtgcgttcctagtcttagtctagaaaagcattgctgtttctgtatgtctgtttgttttgagtcgttgcatcatcaaacatgcatgcatgtgtttgcctctgtaaacattttcggatgcatgcaatgcaagttgtttgatgattccttccttgctcatgagtcagacatctttttatcttaaggtccgtgatagggcaacactatatttgagtgttcttggtggtgatggtactgttgacacatataaagagagcaaggatttcctatttggttccctggaggttcctctagtcaacatggaaactagtctgaagaattatgtgagttaatctatttctcggttttctccttttcaatattcttaggacatcagttatcttatatctgggattcctgcaggagccctctgaagaagcttttgatatcaactccgtacctaaggaagttaaatctcagccccttgcagagaagaaagcccagggtaaaaagcccactggtcttggtgcaccaccagctgcacctgcttctggttttgatggctatgaaagacttctctcatccattccagagtttgccgcctttggaaaacttttcaaggttaggggctgatttgtcttctgtgttattctaatgttaatggcttatcttgtttgctttaacttgtactttctttttcagtcttctttacctgtggagctaactgaagcagaaacagaatacgctgtcaatgttgttaagcatatctttgacagtcaggtggtgtttcagtacaactgcactaacacaataccagagcagttgttggagagggtactgaacattggtgtagaatattagtgtcaagcatatcttatctttctttcctcatttaattaatttggcatggggttgtaggtcaatgtcattgtagatgcttcagaagctgaggaattcagtgaagtaacttcaaaggccctaaactcacttccttacgattcacccggtcaagcctttgtggtttttgagaagccagctggggtccctgctgttggaaagttctccaacacattgactttcgttgttaaggaggtaca

SEQ ID NO: 155827 - DNA, 307 bp, Arabidopsis thaliana landsberg
atgatcaggtaagttctttacattatctagaacaacctagtgtacacaattttcccatgcactttcttatattaatcaaaagtgttgtgaactttttggttaaagtcgtagtcgtgtattcgtaataacattattgtaatctcgaactgtttcgatatgattttggctcttggaaagtctcctgagttgggcttgtactatgatccaatagtaaataatcacttaaaaagcaacataaacgataaaaatatgataagtatgaaccggctctaaaagcaccaattttcattttatgatcaacatatta

SEQ ID NO: 155828 - DNA, 416 bp, Arabidopsis thaliana landsberg
atatgcatcgagagtgagaacgatcgtgaatgatcccagcaaacatatatcatccaaagagatggtgcgattgaagaagttggtagcatactggaaagagcaagccggtaaaaaaggtgaggaagaagacttggtggatattgaggaagatcgtacacgaaaagatgaggcagatagttgaagaaagctgacatgaaattcgtctaggtgaaattgagactatagtatcactggttttcaccattctttttgtaggaagttcctgctttatagtagagtttctatcgaagagtagtcctatatgtctcaaactttctctcttttgatgagatcttcattacaagaaatgaaaaaaaaaaaaaaaaaaccgtagatattatatgaagctggtgagaaccatacaaacatataaagat

SEQ ID NO: 155829 - DNA, 757 bp, Arabidopsis thaliana landsberg
gttaggttttgtatatacattttgggtgtttctcttttgttatgtttttggtctaaaaggtgattgcttttcatgtattttacagtcgtcatcctgaagtgaagtgggctgagactaccgagaagatttttctcactgtagtattagctgatactaaggataccaaggttaacctagacccagaaggagtctttgatttctctgcgaaagttggtccagaaaaccacgtttatgagctcaaactggaacttgccgataaagtcaatgttgaggtgagaatttgtagactgacttggtcttattgattcatttgttacctgttttgttttaaatctgtaacatttttttccattcaggaaagcaaaatcaacattggggaaagaagcatattctgcatcattgagaaagcagagccagaaaggtggaataagctactccgtgtgaagaagcccccacactatgtcaaggttgattgggacaagtgggttgatgaggacgatgaaggcagtgctggttagcattcatcttaacgcttatattatctgttcttgtgtacactctctgcactttatataaagttcaggatgtgttaacttatttgttttctatgttatgtttaggtgccgcagatatggatatggcaggaatggaaggaatgggaggaatgggaggcatgggcggcatgggaggaatgggtggaatgggtggaatgggaggaatgggtggaatgggaggaatggaaggaatggatttctcg

SEQ ID NO: 155830 - DNA, 547 bp, Arabidopsis thaliana landsberg
caaaaacgatatgtgtggccatgggttggtctagtagccaacgtaccaactgaggtggacccatctggtcggagagtaggcaaaagcggttcaacgttacgtgatgagttcactctgaaagggtttaatccaacaagagtcaaacccatttggaatacctggggacatactggttttgctttggttgaattcgctaaagactttaaaggattcgaaagcgccatgcaattcgaaaagagttttgatttagaccgtcatgggaagagagattggaaaaaaggtaaaacattgtttttaaaagtcatttgcttttattgacattgatagagttcactttctttgtttggaaaaggtcatcgcttgagagatgataagctttatggatggcttgcgagagaggatgattataatcgaagtgatactgttgggaagaatgtcaagaagaagagggatttgaaaagtatctctcagattgtagaggaagaccagaggaaactgtatcatctatttgagaatatgtgtcaaaccattgagaagaataagcaac

SEQ ID NO: 155831 - DNA, 297 bp, Arabidopsis thaliana landsberg
  unsure (1)..(297): unsure at all n locations
aatgttatttacaataagtgtttcttattttctttccaagnnnnnnnnnnnnnnnnnnnacgagagacacaagtatgttacatcataatatacaaggtgtctccatagttttggtattagcacacaagtcaagagtatgccctacaaggaaaagattttttagatatcctattcaccttgtatctacagactgacaagacactaggactcctgttattcccaatcagcgtcgaagaatccagcatctttcatttctgaatagtagacattctccaaattcagatcttcctcctgaag

SEQ ID NO: 155832 - DNA, 2655 bp, Arabidopsis thaliana landsberg
atgagtcagatcgcgagacgacggaggaaaggtcgtccgtcgaaggcagatctggcggcgcggcgtagtagttcatctccgcgtgaatctggttatgagctccggcgaggtcaaaggcagcgaaatgtgaggtataacttcgatttcgacgattacttcgacgaggaggaagaggatgaggttgaagaggagaagaagagacagaagaagctgaaacaagttcttaagctgaaccagagccgtgctagagctgaccctcctgttaagagtcgagcgcgtgtgagacacgcgtctgattatgaagaagaagacgaagaagatgatgaagcagaggaggaggaggaagaagtaagtgagaagaggcaagtcaagaagaggaaacttaaccgtcaagacgaagaagaggaagaggaagaagagaaggattacgatgtggaagaggaggaagaagaagaagaaggtcacgctgattctgaggaagaggatgataaggtactgtacggaaaccctagaaactgatgaactttatcagtgtctctgtctctctgtgtgtgtggttctttggtggcaatgagagtgtggggaatttggcagataatataaactgtcggggtcaactgtcaaaaaaactaacttatgttgtctctctctctcactcactcactctctctcttcccacagaatctgatcacacttcccacctttctctctccattaccattaccctcatctttatttactctttctctctctctctctaatgtgtgttgttgttgtctcacactatctctgtcaatcacttctgtcttttgtttgtttggcattggcttttgattcagttacatctttgaggttactgattttgattcagttacatttttgaggtttctgatatgagttctcttgtgaatttgtcaggaaaggaagaggaggagcgcttctggtatgttgcattttctgtgttactttgtgtttagagctttgattatcatgactaatctcatctctcagtctgctttggttgtcgttcttgttgtattagggaatcagtgtgatcattcttcagaaacaacacctatccttgacaagaagtctttggagttgattcttgacaaacttcaaaagtacacaactgaaattccttttctttctctcttttgtgtgattgcgtgatcacattgtttagcttatcttacttggagtctttgttttgcaaacaggaaagacatctatggtgtgtatgcagaacctgttgatcctgaagaggtaatggtggatttcctggagttatctctgaccaatctgttccgaaattagagttttaagctgttttatttgatttttctttgggattgtatttgcagcttcctgattatcatgatatgatagagcatcccatggatttttccacagtgaggaagaagcttgcgaatggatcatattctacgttggaagagctcgaggtgggtgataagtttgttactcaagtttacatggagagcttttacatgatgaactgattttgtagcttttcaggatatggcttctctgtagaataatgggttgtgataatagaactgctctagtgtatttgctaggatcatgtataatctataccgttgcttgacttcctttactaacctggttttggaactgtatttcttgaatgcagagcgatgtcttattgatttgctcaaatgcaatgcaatacaattcctcagacactgtctactataaacaggtaaatcatgtttttatattctcaccaattttctttctttgctaattagggtttacttttctgtctgccggtattttaaactccttttttttcctattaggcaaggactattcaggaaatgggaaagcggaagttcgagaaggcaaggcttaagattaaacgagctgaaaaagagcttaaaacagatgaaaaggtgaaacctgacagctctgtgaagaagcaagtgagacagccattcagtcgaaatggtctagaggccgttggttctgatttctcatctggggcgaaccttgctagtggaggagcttctcaaaacgagccggtttcaactcaaatcggcggacatgaaaagcacagctacacggatgtgctttttgagggcaacacatcattagtagacagtctggagaaagcagaagacttatcatctggtatgagggaaacacatacttcaattagttgtagatgctaagagtaatggctatttttttccacctcttctctttttctgatatatttccatattgtttcacttttcctagggaagggtctctttggtaagtgtgggaggaagctgtcggctgttgaggaagaccgccgtgcaacatatgaagattctgatcagcagggcgatagatcggagtccatattcacaacatttgagagtgaaatcacgcaggttgttgctgtaagggataattattatgcccaaagtttcattgtcattctatgattgcgcttaaccttcttgactaaatatttttcccgtatcatcaggcagggcttcatgcacaacatgcgtatggtaggagccttgcacgttgtgctgcagctcttggacccgttgcatggaaaatagcttgtcagcgaatcgagcaagcctacctgcagactttaagtttggccggggatgg

SEQ ID NO: 155833 - DNA, 1186 bp, Arabidopsis thaliana landsberg
gactagattgttttattttttcttcaacatttcccatttgagcttatatgtttcgttctttcttgcaggaaaatgtgggagaaggttactccattcatgcagtcacttaaatctttgccagcagactatagatttgatggttcaccagtctctgaccgccttgaaaattcttctggtgcaagcgttcgcttgaccaattcgaatgttccaagaaaaggtggcttaaggaatggtgttagtcgaactgatactgctgctggggatagtgaggattcaccatatagcgggcacggtgtttttgttgaagagcagtctttaacggatgatgtagattctggagctgatacaatgcccttgcctcataatgatgaacgcaggtggagtgacactagtgcatatgctcgaaagaaggtattccttagatttacattttgtgattctcgaggcttgagggttatgtggtggatttcttgctaatttgagaataaacttattgcttctaaagttataagaatatgggatgaaattttgacagtttttaactttagatactgcaatcttggattcaacttccaaatggtaactgggagcttgggaagatattgtcaacttcaggggaggagtctgttatatctttgcccgaaggaaaagtaagtaactttttgtatttctaaggtagccaggttaatttttgaagtatttgatctgaaactactttcaaacttgaaacaggttataaaagtcatatcagagactctagtacctgcaaatcctgatattcttgatggagtggacgatcttatgcagcttagttacttaaatgagccatcagtgttgtacaacctcaactataggtacaaccaagacatgatatatgtaagtcttttgttgtgatatttttttttgctcatcaggataatagtctttcccctgaatctgttactatatatgttccagcatctactcttgcttggctaacctttttcctttatggtgctagacaaaagcagggccagttttggtggctgtgaatccttttaaggaggttcctttatacggaaatcgatacattgaagcatacaggaagaaatcaaatgagagtcctcatgtgtatgcaattgcagatacagcaattcgcgaaatgatacgcggtgggttcatgtttcattctttagttaattgttga

SEQ ID NO: 155834 - DNA, 429 bp, Arabidopsis thaliana landsberg
ggtacgtctgagaggctcaggagaaataccgaagaacacgtcataacaaaccaaagagatagaaaaggaaaacgaagatctggacgttcattcatagttgaatcggacggtggagaagaaagttacctgggaaccggacatgtcggtgtcagcggaaaccaagcaccaagaaccgagaaaaacagcccggtttacgaggaagttagaaaggagttctctttttcactgaccgcttacgtctgtctccggtcccattccttgcctcatccttcatttaacgcacccaaagtacacaacaccaaaattaacaatctgtattttaataccagaggatctagagtttaagaataaatcttaatccatgaaagttctgttcttatgaatctacactctgaatccatgtcactacaacaaaaacatctagatttg

SEQ ID NO: 155835 - DNA, 345 bp, Arabidopsis thaliana landsberg
gtggacaggacaatgaagagattacaaaactagaagctccatcaacaaacaagacaaacaccttattgatctcaatcacatgcggtagttaatcatggtgataatggtcagatcaacgggaagaagacgaaggaaattcacagagtaaaacgagcttcagacaaaaaggtgtcgtctaaaagagtctcaagaacttggaaaatccctaagtatccaaagaagcagcctaaatcagatcaagaacatccgggtttcaatcttgattatatgcagcccactacacacccgcctcatcataattgaactcttaatgatcatgtaataactccatgcataaacaaattt

SEQ ID NO: 155836 - DNA, 675 bp, Arabidopsis thaliana landsberg
aaagcaaatgcatctaaagaaacagatttctgcaaatacgacaatcaaatcctcacactcttcacttattctctgtacttcgccggtttaatctcaactttcggagcttcttacgtcaccagaatttacggtaggagaggaagcatcctcgttggctctgtcagcttcttcctcggaggagtgattaacgctgcagccaaaaacatcctcatgttaatccttggtcgaatcttcctcggcataggcattggattcggaaaccaggcaaaaaaaacaccacaatttattaactctaatgtctaagtgagtggtccggttttgcgtttaatttatgcgtttgcgtttacagtcggttccgctatacctctcggagatggctccagcgaagattagaggaactgtgaatcagcttttccagctaacaacttgcattggaattctagttgctaatttgataaactacaaaacagagcaaatccatccatggggatggagactctctctcggtctcgccaccgtcccagctatactcatgttcctcggtggactcgttttgcctgaaacacccaatagtcttgtcgagcaagggaagctcgagaaggctaaagccgtgcctgatccaagtacgtggcacaaacaatatagaagctgagtttcaggatcttgtcgaagcca

SEQ ID NO: 155837 - DNA, 254 bp, Arabidopsis thaliana landsberg
cctccgaggaagttccatttctgaacaagtgaagaagaattcaatgaaggaagagcagaatccttggtccgagaattaagtaaattggtgatagagatgaaaagcgagcgacgagatagcagaagagaggaagacgaagaagaagatacagtacttgttccagaaacaatcatacgacctccgattcgcgatagagaagttacaagcctcgcaatccctttcatttcgtcgaccaattagggtttcgttctaat

SEQ ID NO: 155838 - DNA, 902 bp, Arabidopsis thaliana landsberg
gacgcggctctcgtgttatcgaaatcgaaggtttttggtcttgaattttgaatctttttgtgattgacttttgttttgaaatgaatggaattggtagctgtagagattacaaatgatcaaagtttagcttttggagccaatggtgctattttaaagttagattcatatctgagtgtgtgggctgatgattcttatatagcctattacatagctgttgtcttcttgatttcctaaattttgcttcttttgatgattgaacttgtgttgaaatgaatggaatttgtagctgttgtctgtagagatttcaaatgatcaatgattggattttggagctaacggtgctatttaaattagattcaaataagagttgatgattcgtatagcgcctattagaaagttgctgtcttcttgatttgcttgtagctttgggtttggtcaattaggagcaatggatcgaatcttatagggaaatttgaaagttactctttaggactaagcaagatttctaaatggatggaactggtagtggtagagctcttggtccactggtatcacttgaatcagaatcggatcagagtttatggccgaatcttatagttcatttgatgctactatcttcctgaattgcttgtaatctggttaggctcatgttagtgaaaatggtaaacatgctcgtgtttgcagttcaagatgattttgttacacagttggtaaaattgaatttggttgataggaccattgggtttaaacgaatctattttcaaagctgctctaaacaagattgatttcgtgttacaggaactctcacagttgagattcaagttatgcccgcgagttttaaaggaacatcagttttggaggatatatttccagcttgtgaggaagattgtggcaaagtaagt

SEQ ID NO: 155839 - DNA, 1015 bp, Arabidopsis thaliana landsberg
atggaacatctctttgagacttattggcatttgaaagggaaagttgttcttgttcagatagtgaaccctgcaagatcttctggtaaagatgttgaataagcgaagagggagacgtatgagactgcgaggaggatcaatgagcgttacggtacttctgactataagccgatagttttgatcgatcgtcttgttccacgttctgagaaaaccgcgtattatgctgcagcagattgttgcttagtgaatgcagtgagagatggtatgaacttagttccttataagtatatcgtctgcaggcaggggactcgaagtaataaggccgttgtggattcatcgcctcgcacaagcactcatgtcgtgtctgagtttattggatgctcaccttctttgagtggtgccattagggtgaatccatgggatgtggatgctgttgctgaagcagtaaactcggctcttaaaatgagtgagactgagaagcaactacggcatgagaaacattatcattatattagcactcatgatgttggttattgggcaaagagctttatgcaggatcttgagagagcgtgccgagatcattatagtaaacgttgttgggggattggttttggtttggggttcagagttttgtcactctctccaagttttaggaagctatctgtggaacacattgttccagtttatagaaaaacacagagaagagctatatttcttgattatgatggtactcttgttcctgaaagctccattgttcaagatccaagcaacgaggttgtctctgttctgaaagctctctgtgaagatctgaataacacggtgtttattgttagtggaagaggtagagagtctctgagcaattggctatctccttgtgaaaatcttggactagcagctgaacatggatacttcattaggtatgtattataaatgcagtcttgttctgactaaacttgagaatacttttttatattttggtttgtgtgtgttagatggaatagcaaagatgagtgggaga

SEQ ID NO: 155840 - DNA, 2372 bp, Arabidopsis thaliana landsberg
  unsure (1)..(2372): unsure at all n locations
cactggtgtggaagttcagaagtggcaattttaccataacatctcaggatggcacgaagcttttctctatggatcgacctgctggtttgagttcatcgttaaggcccttgaagcctgcagcagctccacgtgcaaaccgttccaacatcttttccaattctaatgtcacaatggcagatgagactgagattaacttgagcgaggaagagaaacagaaattagaaaagttgcaaagcctccgtgtgaagtttttgcggcttttgcaaaggttgggtcattcggcagaagattcaattgcagcgcaggttctttaccgtcttgcactacttgctgggagacaaacagggcagttattcagtcttgatgctgcaaagaagaaggctgtggagtctgaggctgagggcaacgaagaattgatcttctccctaaacatactggtccttggaaaagccggggtgggaaaaagtgctactataaattccattttgggaaaccagattgcgtccattgatgnnnnnnnnnnnnnnnnnnnnnnnnnnnnnnnnnnttctggaacggtgaatggtgtcaagattacctttattgatactccgggtttgaagtctgctgcgatggatcaaagtacaaatgcaaaaatgttgtcctctgtaaagaaggtaatgaagaagtgtccccctgatattgtactatatgtagatcgtcttgacacccagaccagggacttgaacaatttgcccttgctaaggacgattactgcttctcttggtacatccatatggaaaaacgctatagtgacattgacccatgcggcttctgcccctcctgatggcccatctggcaccccattgagnnnnnnnnnnnnnnnnnnnnnnnnnnnnnnnnnnnnnnnncagtctataggacaggctgttggagatctacgcttgatgaatccaagtctgatgaatccagtttcacttgttgagaatcaccccttgtgtaggaagaaccgggagggagtgaaggttctcccgaatggccaaacttggagatctcagctgttgctattgtgttactccctgaaggttttgtcagaaacaaattctctattgaggcctcaagaaccattggaccatcgtaaagtatttggtttccgagttagatccccgcctctcccttacttgttgtcttggctgttgcagtcccgtgcacatcctaagctccctggagaccaaggtggtgatagtgttgactctgatatcgaaattgatgatgtgtctgattctgagcaggaagatggggaagatgatgagtatgaccagctgccaccatttaagcctcttcgaaaaacccaacttgcaaagctctcaaaggaacagagaaaggcatatttcgaggagtatgattaccgtgtaaagctcctgcagaagaagcaatggagagaggaattaaagaggatgaaagaaatgaagaaaaacgggaagaagctgggtgaaagtgagtttggttatccgggagaagaagatgatccagaaaacggggctccagctgcagtgccagttccattacccgatatggttttgccaccttcatttgatagtgataactcagcttaccgataccgatatctggaacccacttcacaactcctaaccaggccagtgttggatacccatggttgggaccatgactgtggatatgacggcgtcaatgcagaacacagtcttgctctagctagccggttccctgccacagctactgtccaagtcaccaaggacaagaaagagttcaacattcatctggactcctctgtgtctgctaagcacggggagaatggatccaccatggcagggttcgatattcagaatgtaggcaagcagctggcatatgtggtcagaggagaaaccaaattcaagaatttgaggaagaacaagacaactgttggagggtcagtgacattcttgggagagaacatcgccactggggtcaaactcgaggaccaaatagcactggggaaaaggttggtgcttgtgggcagcactgggacaatgcgatcacagggagattcggcctatggtgcgaacctcgaggtcaggcttagggaagctgatttcccaattggacaggaccaatcttcttttgggctgtctctggtaaagtggagaggcgatttagcccttggagccaatctccaatctcaagtctctgttggaaggaactcaaagattgcgcttcgtgcaggacttaacaacaagatgagcggacagatcacagtcagaaccagcagctcggatcagttgcaaatcgctctcacagccattcttccaattgccatgtccatctacaagagcattcgacccgaagcgacgaacgacaagtacagcatgtactaa

SEQ ID NO: 155841 - DNA, 1046 bp, Arabidopsis thaliana landsberg
aaatcgggttaggtctgacaggatttggcgtattcttctcgtttttgggaatagtcttcgtctttgataagggattacttgccatgggaaatgtaagtatctcatgtatctttgtttctatactttgaccactattattgcatacacgtacagaactagtatgagagcttgtttcttttcatattttctcagattcttttcatctcgggggttagtctaaccattggcttcaagtctaccatgcagttcttcatgaagcgtcaaaattataaggtttgtttctgtctttgtctacattatcaatagcttgggccagtctctgctggatttttacagatttctccttaatgtcatctatgtgtgttcatttggctttatatgttatccactcagggaaccatctcttttggcgtcggtttcttctttgttatcatcgggtggcctatcttgggaatgatgttggagacctatggctgtttcgtactcttcaggtacttttgcctattttcttcttccttactggtattgcttgaggaaatgtaaactgatacttaaaacgttttgcttttgcagtggcttctggcctaccttggcagtctttgctcagaagatacccgttctcggttggattattcagcaaccatatattagatcggtatgtgtccaattgcaaacaactatagcaaacttcgcatgaaattcttagacctcgaatacaacacatacaaaactcataatgactcccagttttgccttttcaaattacagttgataattctctctttgtttctgatgatcttgagttgctaggccttttctcagtttggcttaactttaatattaactctgttgcatagtctgccaattgttggctaatgcgattacttgacacttttatttatgtgatgtgtagttctttgacaagtaccggggcaagcgagtgccggtctagtcttccatcccgagtagagagacgattcactgagctagatgcagctgaacaggcgattaaagtttttggaagaagaagtttcgtgatcctgtag

SEQ ID NO: 155842 - DNA, 717 bp, Arabidopsis thaliana landsberg
agatattattcacagagaggctcatggctgaggtaaacggagatttcccggttcctagtttcgtcgacgggaccggttctgtttccgccggacttgacttgctcgttgagagatcgattcacgaagctaggtttgtatcacttgtaattggaatcgattcgcatttctctttatctgtctttgtgtttgaagttttttttagtcctatagttctgtgatttgttagttcttagtacactataggagcgtgagcaattgatgagacttggatctatatgaattgttaaattagcagatcaatttgggaaactcaagaggtttaatttcaaactcttgtttcaaggtccacagagccagttgcttcaagtcaacttactattatctttggtgggagttgtagagtcttcgatggtgtccctgcacaaaaggtttggtccatctagcttttagaagctgttggttgcatcagagtttctaattgtattggtgatcaatgcttaataggttcaagaaatcattcgcatcgcttctgctgctaaagagacaaagaatgtgaccggtatcaatccagcactgaacagagctctttctttctcaactgtagctggtaagcaattgcttcattcggttactgtaagcattatctacggagttacggactattaatccctgtttgtctcagatcttccaattgctaggagacgttcgcttcaaaga

SEQ ID NO: 155843 - DNA, 229 bp, Arabidopsis thaliana landsberg
aatctttaccggggtgtgggggattccatacgatgaaagaggaaccctcttcgttccatgagataacatcgtcgatggaactatcttcaacgaggttaaacgtttttgtgagaaacggcgttgggatagatctttgtgacgatgattctccggtaatcattgcgtcaaccggcggcgaattcataggattttaagcgtaagttataaaaacaaaagtgtcccctgaaag

SEQ ID NO: 155844 - DNA, 507 bp, Arabidopsis thaliana landsberg
tgtatagaaatggatcaaagacgaatcgtgcgactgagatgggatattggaagacttcaggtaaagatcgagagattcttaatggttcaaaagtcgttgggatgaagaagactcttgtttatcacaaaggtcgagctcctcgtggcgaaagaaccaattgggttatgcatgagtatcggttggttgatcaagaccttgataaaactggtgttcaccaagtaagactttgatctttttgagttccttgttgtttaatgggatttgtgttgttgactttgttgtggaattgtgggaaggatgcgtttgtgctttgtaggatttttcagaagagtggctccggacctaaaaatggagagcagtacggtgctccgtttgttgagggggagtgggaggaagaagatgatatgacatttgtacctgaccaagaagatcttggaagtgaagatcatgtttatgtccatatggatgacattgatcaggtttgtggtctagtatttgatatctctt

SEQ ID NO: 155845 - DNA, 569 bp, Arabidopsis thaliana landsberg; identical to SEQ ID NO: 52379
  unsure (1)..(569): unsure at all n locations

SEQ ID NO: 155846 - DNA, 858 bp, Arabidopsis thaliana landsberg
acaacttcaaagctttctaagcaagagattgagagaaatcggattttctttctaagactcaaaatatctaaaaacaataatggctttttggtctgctgagaatgctactaaagcctatcttagtacattgaaaacggtaagagtttattcttataaccaaaacatttacccgtgatattgtttcaaattacgataaaagattagttaatgtcacattttgacatatttctctatatgcattttcaggatcaaaggacaaaagaaccaaacgtcgccgaattcatatcagccctagccgccggaaatagcgctagaaagatagccgtggcttgcgccggagcagcaaacgccgacatactcgttgcactaatcgcagcggctaaccaaacgcgtggtcaagttgtatgcgttttacgtggtatcgaagaactaatcatatcccaaaaaatgttggaaccatcagagattcatcagatacaattcgtagtcggagaatctaacgacgacactctaatcaataatcatttcggagaagcagatttcgtcctcgtggattgtaacctcgaaaaccaccaagagatcgttggaaaaatccttaatcatcacgaagaaaacgcaagaaccgggggtggaagcggtgtggcggttgtggtgggttataacgcgttttcgagagggtcatggaggtttagcgatggaaggaaaacgcagtttttacctataggagaagggttacttgtgacgagggtcaatgataatcagaagatgatgatgaaaaatcaccatcgtgaaaaagtgatgaggaagagtcgttgggtggtgaaggttgataagtgcactggagaggaacatgtgtaa

SEQ ID NO: 155847 - DNA, 358 bp, Arabidopsis thaliana landsberg
  unsure (1)..(358): unsure at all n locations
aaaccaatcaatggaaactttcaagtgggctaacaaacacacaacagaaatacaactctcactcagttaagacacaactctcgtagttgggattgtaactaaattattatgagttccgtttcagagcaatcaaaagaagatattcagatcagaactggaattgcatctccggagagtatcccagagcttcaaggtttgcagccatggccttgttcattggcggtggtccgcatcttaggatctgcaatttaaacatgaaccatacttagatcgacacaccatcttaaaccatatgctcctcaccaaaaatgaanttgttatcaatgttacattctcttgcagtgttcttgattttgct

SEQ ID NO: 155848 - DNA, 1000 bp, Arabidopsis thaliana landsberg
atgtacatctttctcagctctgagagtgagaatgtaatggatgcattggaacgagaatattcagctcttaactatggggttcgagcaatggcagtcaatattcctggatttgcttatcatagagcactcaaggtctaaattaaaccacccttttttactaaattcaatattctttcttttggaagattttgaagatcattattatttattttgcaggctaggaaaacacttgtagctgcctttcagtccatagtgactgagcgcagaaatcaaaggaagcagaacattttatcaaataagaaagatatgttagacaatcttcttaatgttaaagatgaagatggaaaaactttggatgacgaagagattatcgatgttcttctgatgtatcttaatgctggtcatgaatcctctggccacaccattatgtgggctaccgtttttctacaagaacaccctgaggttctacaaagagcaaaggtaagtggagagaaaaaaacgatttcatttccttatcatcatcttatactttcttgtgttttgcatatgatggtacaataggctgaacaagaaatgatcctgaaaagtaggcctgaaggtcaaaaaggtctatctctaaaagaaacccggaaaatggagttcttatcgcaggttagattctggtcacctatgagtttagcgcaacagagattttgtatgcgatttgtttttggtgattttgaaagagctatttcttcactaggttgtcgatgagacacttcgagtcataacattctcactcactgcttttcgagaggcaaagactgacgtcgaaatgaatggttagtatacatgtaaacagtaaacacatgacttatatgaaatacaaaacaccttcttaagtgcacctaaatatttagcatgatttgataaatcttgcaggctatttgatcccaaaaggttggaaggttttgacatggtttagggatgtccacagcgaccctgaagtatttccagatcc

SEQ ID NO: 155849 - DNA, 309 bp, Arabidopsis thaliana landsberg
agaaaaaactaaaagaggaacagagcagaagtggaagtctcttgtccctctgtaaaccctaaaatagaaaagcaaatcacacttaggggattcatgttctttggctttcttacaaacctctagaaataatggccgagaaagcaggcaaggcaacgaatggtggagaagcagagaaatctctaaaggaaaaaggaaatgagttcttcaaagctggcaactttcttaaagccgcagctctctatactcaagccatcaagctcgatccttctaacgctactcttcacaggtttcctttttcttgtcttctac

SEQ ID NO: 155850 - DNA, 749 bp, Arabidopsis thaliana landsberg
gtcttccttcttcttcctttttctctcccccccccattatcttcggcgaatcatgaatctagggttttgttttctcccataaccctaaattttcttccatcaatcttatatttttctcatttcttcttctccgttttagctcatctcccgattcatctcgatttccatggaggttagggtttccgtttgaatttttcatttcatttctgctccttgatgcaattcaatcgaatccccttgttctatgagcttagatgatttgattcggcgtaattgcgttaattcttctatataattgccttgattttggggactcgaagttacaatttctcttgatgattctctcgtcgtctctgttgggattttgatgatatctgacaattcaattttttttgttagggagcgggagagacgacgacgtcggaggggcatttgacttcggcagcagcttttgtggaagggggaattcaagatgcttgtgatgatgcttgtagcatttgtcttgaatccttctgcgaaagcgatccttctactgtatgtttgctaaatatttagacttttttttctatttcatttgaggttataccgattcattttgttttttattctctcgcagttgactagttgcaagcatgagtatcatcttcaatgcattcttgagtggtaagctcttcaacaaatttaacaactctgtttttgagctgtcatgggtgatactctcattgaacatatatattccaaaagggttg

SEQ ID NO: 155851 - DNA, 574 bp, Arabidopsis thaliana landsberg
  unsure (1)..(574): unsure at all n locations
aacaagtgaactaaacacagaagaagaagaagaagacgagacttctaattctgaaacagagagagacagagagctgggaatgggttcttgtacacaatcttcttcgcatggaagattttctgtttctcgtcactctgatatccaaaaatgtctggatctgattttgatttcgcggcgtttcgagttcaatgctaaaacatcgaagcggtttcgaatctctgagaatcgaaggaaaacgaagcgtgtaggttagggaacttaagattacgttgaagagaagcaagtttctcttaaatcgcattcgttgttggtttttggtaaagcgatggagtcacgaatggatcagtacgagcttatggaacagatcgggagaggagcgtttggtgctgctattttagttcatcataaagctgagagaaagaagtaaaattggtttctccatttataaactctnttctttgaagatccttaagttttttatttttgtgtattggtgtgtatttttaggtatgttttgaagaagatcagattagctagaccaacggaacgttgccggagatctgctcatcaagag

SEQ ID NO: 155852 - DNA, 557 bp, Arabidopsis thaliana landsberg
aaaaatattgtaaattaaccccatcttgtatctctggttttggaaataaccagaaaagttgtgttgccaattgagcattcccgaggaaagaatcaggaagaaagcgtttgtcaccgtttctcgatgtccaggtaactttattagttacatttttcgaaatttataacatgatatattgtttggaaaatgaacttatattcatgtttttttcttttgtctaaataggtgttacttcgataacaatggatgacaaaaccgggaaaatgacagtagttggtgaagttgatgtaccggttatcgtgatgaagctaaggaagctatgtaacacagagcttgtttcggttgaagttgttaaaccacctgagaaaaagcctgaaccagagaaaccggctccacctaaaccagctccagctccagctaaaccggctgaaattgttgcctggccggttcagatgaacaacccttaccaatacaatcctgcctatgcaaattcttactatcaaccatatgggaactctagatttgtaacggacgaatcaaattgtgtgattatgtga

SEQ ID NO: 155853 - DNA, 2753 bp, Arabidopsis thaliana landsberg
tgagagttgttcctgtttgttttttcttttctaaatgttggtttataaatagcatattttttttccttggccccaatagataaagaaccaaacctataatcttcctctataatgaattttcatatctttcgattttttcaatttatcctcgtcgcagttttcatcttccacgactcgtgttattccgatgaaggtacgtgaattattagtttccttttaccaatcattcaacttatgtttttttttttttttttgttataccttaccttagtgtactaatatgaactccaactttatgaaaaatatgttttcgtgtagctggaaactatagatttatgaaagatgcaacattagcaccaaagttatctcacttcgactacataatcatcggaggaggaaccgctggatgtgccttagccgcaacgctctctcaaaacgcaaccgttctagtcctcgaacgcggaggttccccttacgacgatccagcggcaacagacatcggaaacttcgcaaacacactcttgaacataactccaaactcatggtcgcagcttttcatctccgaagacggcgttttcaactcacgcgctcgtgtactcggtggaggcacggtcataaacgcaggattctactcacgtgcggaagaagatttcgtggcggaagcaggatgggagagagacgaggtcgaagcggcttacgagtgggtcgagaagaaagtggtttttgaaccacccgttaacaaatggcaatcagcgtttcgagatgggcttttggaagctggtgtgactccatacaatggtttcacgtacgaacatatcgttgggactaaatttggtggtacgatatttgaccgggatggtcataggcacacggcggcgaatttgttggagtatgctaatccgaacatgatagttgtctacttgcatgcttctgtccataagatcctcttcactattaaaggtaatgacgactgataattgaatacatgtcttataatttattttatttttccataacgagaggtatgaaagaagagagaggaacgttcctgaaaaaccaaaaacaaagcgagagtcagagagacgtagcttacacgtgatcaaacttgtttgtttgttttttaatcacaacttgtgtttaatttgttattgaaaatcttgcttacgattatgatttttatatatttattacatgtagtaaggatctattattatattttgactagaacatggttataacttgtagatgttccttaacaaaaaatacataaagatgtttaacatagttatgatacttatttataaaacaaacattatttatgataacatacactaattacaaaaaaaactgaaacttcaaataagaaacctcttttttactcttaaatcttattaattttgaatcatgactttcagttgttcattttggtaattataatgaattattcaattatggcgatcgtttggtcattatcaccgtcgcagtcattcgttgttgcacattaccatactcattatttgtttgtatattgctccggatataaaacttctctattggacaggtaaccagaggcccaaagcatatggggtgatatttctggatgcaaatggtgtatcctacaaggcagaattggcaacgcaagactcgacaatgagtgaggtgatcttatcggctggtgcaatcgcgagccctcaactattgatgctaagtggtgtgggccctgcggctcatcttgcagcctatagagtgaatccggtcatcgtagatcaacccatggtgggccaagggatgggtgataacccgatgaatccggtttttatcccttctcctgaacccgtagaagtgtctcttgtacaagccgtaggaatcaccaggtttggtagttacattgaaggtggaagtgccttaagtctctctattagtttgacccgtagcttcttcgatggtgttttgaatcttcttaaaaaggtataatcaattaacactctaaaatgttacaaattttgttaacacaagacttcatatgatattttttgatattgatgttttatatgcagacaaaacttcctacccaatccatctcaaagtttttcaaatctttggatcttaccttgaacgtgactacaaaagcgggtgtgatcatccaaaaagtgaatggaccgctctcgagaggtcacttggagttgcggaatacgaatccagatgataacccttcagtgacattcaactactttaaggatccagaggatttgaacaagtgcgttgaaggacttagttccattattaaagtgatagattcgaagggatactccaagtacaagtaccctttagcgagtgcacgtggactactaaatctcattcttgctcttcccactaatttaaggccaagacacataacttcaacgtttgattaggagcagtattgtatcggtaccgtgatgactatttatcattaccatggtggttgtcaagttggaaaagtggtcgacaacaattacaaagtattaggggttgatgctttgaggatcatcgatggatccacgtttctcaagtctccggggactaatccacaggccacaatcatgatgctcggaaggtaaaaacacgcagaaaccaattgatacaaatgatctaaatatgtttttttcttctttttaaaatatgattgttggaaaattgtaatgtgtagatatatggggcagaagattcttcgagagaggatagctttccgaggaaaagaggaagaaacatga

SEQ ID NO: 155854 - DNA, 852 bp, Arabidopsis thaliana landsberg
agaatatcatgcaggtaccaagtgatcagaagctgccaacactgtacctgttagacagcattgtgaagaacatcggaagggattacattaagtactttggtgccaggctgcctgaggtttggtgctttgttgatagtcatggttatagaatgtttttttcctagcaaattcatctctgatcaccctctttttacttctctgaaggtttttgttaaggcttacaggcaagttgaccctcctatgcattctaacatgcggcatctttttggaacctggaaaggagtctttcatccgcaaacacttcagcttattgagaaagaacttggctttaatgctaaaagtgatggttcagcagctgttgtatccacagccagagctgagccgcaatctcagcgcccaccacatagcatccatgtgaatcccaagtatctagaaaggcagcgccttcagcagtcgggacgggtaagcaatgaccaaagtaaacttgcagccactgaaagttattagtgatgatacaccctaaccttcagctctactagagatttcgctgttctaagtgttcataaatgtaaccttcaggagtactaaacatttctctgttctaagtgttcacaaatgtagggaacatttctttttcggtttagatagcaatcaatttctttcaaagggtcctgggtttctggatataggtagaggctacttatcgactttattaaaatttccctgagtatttgtcggttttctttgcagacaaaaggaatggttactgatgtcccagagaccgcacccaatttgactagggattcagatagactggagagagtttcaagcatagcatctggaggctcgtgg

SEQ ID NO: 155855 - DNA, 1520 bp, Arabidopsis thaliana landsberg
tggatttcactcacaagctttgtacttctttaatgttttctactttcaggtaagctcttatcatccattccttagctttacttacatttttagctaatactcatggaattgtgcctcctttagcttcctcaaacgatacttaaattcagtttgttgctgttttcacagggacactagcagtcctctttctttagtgattggcaggcaagtttcttgacttaatgctacagcttacagaaatattgttggtgttcatataatctgcagaactaaattttcatatctttcttttcgattcaagtgttcatttggatctgtttgttgcagcctctgtatcaaacatccaaatttgtttggaggaagcgaaaagcttgatgtatcatgggataaaggattgtatgattccaatgtacttgtggcttttaggagacctagacctgaatggcgtccacaacagtgtttcttcatacaggtactcaatgtttatttgttattgtactaatctgtgaagctatcttaaaaaagtgaattctaaagctatgttacatttaaatttgttaatctggcgcagcattctctctcacccgagataggggtccacggcaccccagttgacaacttttctcggtcaggaagtggaggtgtaaatctgtctaaattggctcttggtttagacttgagtgagccagcgagttcaaaatggagcagcacaaccagcataaagtttgaggtgcccgcacattaccttcttcagacattgtagaacaatttttttctctttgctgttttgctttggggtaaaagagtatcattttccattggtgcagcatgtgcgtccgattaacgatgatggacgcgcgataaccagagatctggacggatttcctataacatgcaggtgatattagatctcacttcccttaatttgtttctttaagtactagcataaactgatatttacatgtgtagaattctctgctatgcagtggaaatacccatgacagtatggtagttttaaagcaagaatcccggtttgcaaaggctaccgaccaaggtctttctcatgtaagagactcatttctgtttcatagcctaggcaaaccacagccatttttgcacttactttgtcaacgttttttttcttgctttttcagtttagcatgcaaatagaacaaggtattccggttgtgtccaagtggcttattttcaaccgtttcaaatttgttgcatcaaaaggtgtcaggtttggaccggcttttctcttagcaaggtactgacaggatcttacacacttggtctagaaaactacacgtagaagatgctttgtaaagatgtcctagttttgccgtggttcttacctcttctgtgacagcttgacaggtggttcaattgtaggagacatggcaccttatcaagcatttgccattggtgggctaggcagtgttcggggatatggtgagggtgctgttggatccggtcggtcatgccttgttgccaatacagaattggcgttacctttg

SEQ ID NO: 155856 - DNA, 5259 bp, Arabidopsis thaliana landsberg
atgtccgggtctagaaggtcgggtcaattggatcaccaattgagtaatctagcgtcgagcaagcctaaatacgggtcgtcggtgacgagtcttaacgtagacccggttcgggtcgggtttaaagtaccaaaagcaatggtttgggcggttttgatagtggcggcgatgggattgcttgtgggagcttttcttaccgtggcggtgaagaaaccggtggtgattgctgcggttttagcagcagtttgtcctgcaatcgtggttttggtttggaattgcgtttggagaagaaaagggttgttgagttttatcaaaaagtatccagatgctgagcttagaggtgccattgatggacaattcgttaaggttacaggggtaagttaaaacctaattttcagatgttaatatttccagttttagtaagtaactttaattgttctgattaaagtaaattgcttccatatttagcttttgatcattttcaactttggtgaagttagaatgtcattatcatcattggcttttcttatggatgttatactcttggatctctctgttttagtgttaattaacttcatttagttttgcttcattatgtttctgggtgctttatgatgatttttgcttttgtctgtctttgacattttatattatctcaccaaactaaagtttgctgcttgtgtttagtatagattttataagagtctttagtgaaattagaccatttataattcgacaaattggagtcacgggtatttttgtattgtcgattggattacagtcgtcaacagctagcttaatgcgttggacagaccatttatcttgtctgaattaacaatgttgatgtagatatggtagtgtggtcactggtgtgtcttttatttgctggaaatgttaaaacttttgttatgtttttgtaggttgtgacatgtggaagcattcctttggaatcttcgttccaaagaacaccaagatgcgtttatgtatccacggagttgtatgaatacaaaggttttggtgggaaatccgcaaacccaaaacatcgatgcttttcttggggatctagacatgcagaggttagtttctttttctcctcttgcaaaaggaccatttgtctcagtgatttggtcaaagttttcagatcttatatgacaagaaaagatggtgaagtttgatgattcttgttgtggttatatttctttggcagaaatatgtgtcggatttttacatctcggatttccaatctggattgcgagcactagtaaaagcaggatatggatcaaaagtttctccttttgtcaaaccggcgacagtggctaatgtaacaacgcagaacaaagatttatctcccagcttcttaaagtggctgtcagatcgcaacctctcagctgatgaccgtgttatgcgtctcaaagaagggtatgttatattcaacacgcatcttaaactgttcttcgggttgcacgaagtatcttagccaaaatctaaaaataacgttattagagtcactatccaaaccttggatccttattttacccaaattacaaccttttaaaccctgatttctttagtagaatgggaagtattaaactgttgatgtaggcgtttactttgactggtaccgttggttattcttccacattaaaagtcacagtaatggaaaaagatgtgatgagacatgtattgtaggaagaaatccagcaactattgtcaacgttaacggcttaaacatctcacatcagtgcatgataagtctgaagttaaagggcttagaagtttgaattaagtctaaagctaatgagacccaaaagtcaccgtttctagtacaaatgatcgtttttagtacacaagaaagctcattggtttcacttttgctgtcaaagagaatccctttgttactgatttaaaatcatatttgattgtgtgtgatgcaacagatacataaaagaaggaagcacagtgagcgtgatggggatggtaagaaggcacgacaacgttctgatgatagttactccggcagaagcagtctccagtgggtgccggtggtggcactgcctcttcccaacctacgcagatggcttaatcataacctgcgacgataatcaaaacgctgatgtcattcctgtctgaaaccaatatgtatgtaatgcttcttttgcccgatattcaaatataaaaatgcttaaagagttaggctcacgagactgaaggaaggaagagaagagaggacagccaaattggttcaaaaagaaaaccaaataggctttgccttttgccttattagtttttatttttctttcttaattctgttttttttttgccccttgtatggggtttatgtttgtgtacatagagccccaaagtgtaaatgctattttctgttaaaataattattatgtcatatccactattcttatccaccaaggaaaccttaggcatctcttcaataggtgcatgcaacgttgtgtgctagtaaacagtaagcatgaaagccgcagagaagctgatgacaacaaagcccatgtagaagcctttgattggtttccatagtggaaacttaaaacttaaagcccaaaagtggaaaataaaagacagcccaaaacttacccatttaatttacggtctctcactctgcttgtgagaagcgaaaacacaaaaccccaaactccctctacgaaggcggaggcacgcttctctgtctccctccactctcgagtctctcgtcccctcttggtcagttttatgcttaccatatgaccgattaattctcttttcttccgatctcaaatcatcgagtattggttgatctcatcccccttataggctcacatgttttgatagtaatgaattgaattatcaattatgggtttggggggagaattttttggttttttagtaaaccacaacactttattttagattctgcatctgctttcattaatgttagctgttgggtttgtccaaatttcactcttttttttactgtaatgaattgagatttatggttctgagctaggatccattgtttctttgtaaaggagtgtacttaaatagattctgcattgatttcagctggttggtttgtccaagtttcattctttttctgatggaagttatttatatatctttcagttttactcatgcttacttatctcacagtggctttttggttttgttttgttttgtttgcagtgtgtgattactttgctgttgttgatgctggagatatcttgttcatattgatcacgcctgaaaggtttattaagatttggcaaaaggatggataggatcaacggtctatcagatctcttctgagttctgatttgaattctagggcgtttatttggaagaatcattgcttctttggttgaggatcttggtgaatcgctgggattttgtgttctagggtttttgaagcaagctttagtgtaaggaaaattttaagaatgaaaggtgaaagagaagtcaagagtggtgtttctgaggaagagagagaagtgaagaggaagagagtgatggaacggtctgattcaccacctccaccactaggtttcaacaatcctcttctgccgttggctaatgcttatgatgatgatgatgaggaagaggagaacgagctgaagaaatcgcaagctcgtggtaatggagttgcgaaaagggagggaaatggtaacaaagtgaaaggagaagctcaagaagaggtggatgacgacgaagatgatgcctcgaagggtaagggaaagcattcacgccatgttgaagttcgtcgtgattgtccttatcttgataccgttaatcgtcaggtaattaaatttgttgattgtaatctttgatcgatggttatgtttctgctgtcttcattgtataatcgtttttggtgttgagtatctaaactcatgttgtatgttgaatttcaggtgttggattttgattttgagaggttttgctctgtgtccttgtcaaatctgaatgtgtatgcgtgtcttgtttgtgggaagtacttccaaggaagaagccagaagtctcatgcttatacacatagcttggaagcaggacaccacgtttacatcaatcttctgacagagaaggtttattgtcttcctgatagttacgagatcaatgacccttctttggatgacattcgccatgttttaaacccaaggtatattagatcttgtgactaactacatcatagttcttactgcattttgggtattgatttgtgaacatgtgagcctttgcacgtagttaaaaacaacaaaattgctttgactataatctcaatcagtttcttcttgctagttctctatatcatctaccatctatttatattttttcatattactcttctttcatgttttctcaatttttctttgatttttcagttcctttttatgaaggcttcggtgctatccatttacaggtttagtagagcacaagtaaacgagcttgacaagaataggcagtggtctagggctcttgatggctccgactatcttccaggaatggtaatcctttctctttgattacacttgatctttaaattaatttgtctcctaacggtttagcttgtaaatatgtaggtggggttgaacaacatacaaaagacagagtttgtgaatgttacaatcccgtcgttgatgagagttactcctttaaggaatttcttccacattcctgaaaattatcagcactgcaagtctcctcttgttcactgttttggggaactaactcgcaagatttggcatgctcgaaactttaaaggacaggtctgactcaattttgcctcttacttttttagtttttgttatgccctcacctattgaagacctcactaatttaagttaccttgcatcaacaggtgagtccacatgagttcttgcaagctgtcatgaaagccagcaagaaacgctttcggattggccaacaatcagatccagtagagtttatgtcgtggctcctcaacactttgcacatggatcttagaacttcaaaggactccagcagtatcatccacaagtgcttccaggtatgtgtcagtcctttgacatgtcaacctaaatgcagtttgatataattgcttacaaaaagctgcatcttcatgtaaccttctaaccattatagggtgagttggaggttgtgaaagagtttcaaggcaatgaaaacaaagaaatctccaggatgtcttttctgatgctcggtctagatttgccaccgcctcctcttttcaaagatgtcatggagaaaaacattattccgcag

SEQ ID NO: 155857 - DNA, 967 bp, Arabidopsis thaliana landsberg
atggcgcttgagcaagtaatgtctgaccgggatagcgaggatgaagtcgatgacgatgttgcagattttgaagatcgccaggtattccatgatttctttctgcgttcattaaatagacaacagaaaatggtatatgatgtaacttgctaatggcttttgaaacttaaaaaagctgcagatgcttgatgactttgtggatgtgaataaagatgaaaagcaattcatgcatctttggaactcgtttgtaagaaaacaaaggtaactacttctcttacacatgaacagacacaaaaagaccttatgtcttacattccatacctgtctaaatgattttgcttatggaactttgagctcaattatgattgttgatgtttcagggttatagcagatggtcatatttcgtgggcatgtgaagcattttcaagattttacgagaaagagttgcaccgttactcatcactcttctggtaatataagtacaccaaacatatacagacacataactacactatcaatcttgtttcgttttctgaaaaaaaaataaaaatttccaggtgttggagattgtttttgattaaactatggaaccatggacttgtcgactcagccaccatcaacaactgcaataccatcctcgagaattgccgtaatagctcagacaccaccaccaccaacaacaacaacagtgtggatcgtcccagtgactcaaacaccaacaacaataacattgtggatcatcccaatgacataaacaacaagaacaatgttgacaacaaggacaataacagcagagacaaagtaattaaataggaaaatctccggcttttatgataccgatttatcggattgtaacttattcttctttcttaaaaaattgtttaggagcaaacaaattttttatatgttagtgtattcaactgattacatttttagttaaaaaaaaaaatggattctgcttataactaaa

SEQ ID NO: 155858 - DNA, 467 bp, Arabidopsis thaliana landsberg
tgcttatctttgagttaatatcaaattcatgttcctgttcaaaattggccaatcgtgtattatttgaacacgtggcttattacaaatatatatattactactatgtatttaaattatggatattttcaaatatccgttcgggttcggattgggtttgggtttcagatttagaagttcggatttggatctggttttttggatcgggttcggatcgggtaattgggtagtgtattatgcccacacctacttgtcaccgtcagatctgaaaacatgaatattttatatcaaacttgttacaaattacattatatcttttgacattttaattcaataataaactaggatttaacccgcggtttaccgcgggcaatcggtttatttggtttgtatactccatatttgactaaatttgttatcttaaactaataaatataaatttctagtgattagtgaagaatcataatata

SEQ ID NO: 155859 - DNA, 557 bp, Arabidopsis thaliana landsberg
caaaagcactctaaattggggtgaaaaagcattaccaaacaccaaataaatatgtctgatctgaataactcatcatcactcattctaataactttgattttggccacatcagttctagtctccgagagccgggtcgcaagaaaagacttgggtttggaccttggagggatcggtgctggtataggcataggcataggtatcggtggaggtggatccggatccggagctggtgccgggtctggatccgagaggaggatcaagctcttcttcctcatctagctctagttcttcttctagctccggtggtggtggaggtgatgcaggatccgaagctggatcatacgccggatcacatgccgggtctggttcgggaggacgttccgggtcaggccgtggaagaggaagtggaggaggagggggtcacggtggaggaggtggaggaggagggggtagaggtggaggaggtggatccggtaacggagaaggataaggtgaaggcggtggatatggtggaggatatggtggtggcgacgactgaatgaagaatattgctatca

SEQ ID NO: 155860 - DNA, 1343 bp, Arabidopsis thaliana landsberg
ggtgacatgccgtgactggttccaactcagtctaaaggaaggacttactgtcttccgtgaccaggaattttcatctgacatgggaagccgaactgtaaagcgaattgctgatgtttcaaagcttcggatctatcaatttccgcaggtaccttattttgtactccttcgaggcctcttcatgggattttttcatcttctcatgccaacttctctgtcctctaatttatcaggatgctggtcctatggcacatcctgttcgcccacattcatacatcaaggtcagagatctcttattttgccttggaaatgttgatgtacatgttatgtaaagtgttgctaaatatggatcttttcctctctctggcagatggataacttctacacaggcaagtttctgttcacaagaaggaattccattaaagcattgtattatgttaatcttagcattgtgatccaatctaacgtttgtgtgcttttgtaacctgttcgaacctgctttacatctctggccatcacctactctctcagtgacggtagggactaaaaaacactcttttattcataatttcattttctatcaatcccttacatattatttctaacagaatgatttggtttctgttgttgtttcaggtttatgaaaaggtttggctctttaccaatagtgttttgttatatgcagtaagccagaatccttagttgactttataatgttctcctagggagctgaggtcgtcaggatgtacaaaactctactaggaactcaggggttccgaaaggttgcttcccaacgctactttttgtgtggatccagtgacgagatttttcgtctaaagtgttctaatcatctctatatatccatatgttacagggaattgatctctattttgaaagacatgatgagcaagcagtgacttgtgaagacttctttgctgctatgcgtgatgcaaataatgcagactttgctaatttcttgcaatggttagtcagattattattgtggaatttcttgtgaagattcttgttttcatacttctaaggatataccatatacaacatcttaggtactctcaagctggaacgcccgttgtcaaagtggtatcctcttacaatgctgacgctcgtactttctctttaaaattcaggttcaattcttcttatatctaattctttttcttttccttttttccaaatccgtgcaaaaattgtttgtttatagaccaaacttcatggcccgtccttgaaattgaaccttcgtggatcttacatctattgaatttgttacttgacattggctttctttgcaacttttccagtcaggagatacctccgcttctagccca

SEQ ID NO: 155861 - DNA, 1080 bp, Arabidopsis thaliana landsberg
atggaatcagtagcggatgagcttgttgagaaagtgaaagctaaagtggccaaactcacggtgggaccgcccgaagagaactccgatatcacggcagtggtgtcggaatcttcagctaatttcattgaaggattggtgatggatgctaaggagaaaggagcaacgttttgtcaagagtataaaagagaaggtaacttgatttggccgttgcttttggacaatgttagaccggacatgaggatcgcgtgggaggaaccattcggtcctgttgtgccggtcttgaggatcaattctgttgaagaagggattaatcattgcaatgcaagcaactttggccttcaggtttggctatatggatttggtttagtccggtttatatggtttgcatttaaccagagctaacacaataattgcatttgaagggatgtgtattcactaaagacatcaacaaggcaatactgatcagtgatgcaatggagacaggaaccgttcagatcaactctgcgccagctcgtggaccggaccacttccctttccaggtaaaccatcgatgtctagacccttttttgcctccgttatgaccggtttgattaacttggttttggattggaataaacagggacttaaggacagtggaatagggtcacaaggtgtgacaaatagcatcaatttgatgactaaagtgaagaccactgtcattaacttgcctacaccttcttactctatgggttagtttccctttttttatgttcttcatcttagaatcaaaatcaatcatgtcatgtttgtattggattcaatcgaatactgcgaataaagggagtgattagcgtaactattatggtttgtaatctctatgtaaccaataagaggatattatgaaagatgagtgagaggtttggttgtgttgtgttataacaggggacggtttcatctcacgcctgtgattcgagcacacaaaactgaaaacttcttttgataattggagttttatcatttaaaataattttgattttggttaatggtaataattgaaaatatattccattttaagataatcgtttgagaccaatctcattg

SEQ ID NO: 155862 - DNA, 546 bp, Arabidopsis thaliana landsberg
agagttttgaaattggttagttgttgttgttgatgatgcaaagcaaagattttcattttttttcttttgttctgttaactgaattggattaacaagtgaactatctttgtttgagaagttggttttgcttggatacatttgaagctcttctttttggaatgcagggagcatgtaaagaagaaagggagaaaagatgttacagtcgatgaactgatccgagtgatcactcctaaaggcagaggtaaaatatataacgaacaatccgtttctgtatccgttaattcgttgttagtaaccttgactttgtttctatggatgtttgtcgtgtatgtctgcagcttcagtaccagattctgtgaaggcagagctgttgaacagaattcaaaacttcattgtatcagctgctctttgatggtgttttgacaattttactacgaacatggtgtcgttggctctatgttgtggtttttagttgtatccaaacactaaccagatagcagcccaattttttttatcaaatgtatcatctatgctgttgtagaatta

SEQ ID NO: 155863 - DNA, 1819 bp, Arabidopsis thaliana landsberg
tctctctcctctctctctctgtataaaaagaatctccattgtctttaatttctctccatttctctgtctctcttccttcaaagttttctcttttcttgatgggtttaagagagtaaagatcatcaagtactatgcattaaattgagaagttattaaaaatttcgaaagtaattaaagattgttgatgatgaagagattaagtagttcagattcagtgggtggtctcatctctttatgtcctacaacttccacaggtacttagctaattttctaaacaagtcctttaattaatctcatctttgtttgctaattgttcttcttatggaattacagatgagcagagtccgaggagatacggtgggagagagtttcagtcgatgcttgaaggatacgaggaagaagaagaagctatagtagaagaaagaggacacgtgggcttgtcggagaagaagagaaggttaagcattaaccaagtgaaagctttggagaagaattttgagttagagaataagcttgagcctgagaggaaagttaagttagctcaagaacttggtcttcaacctcgtcaagttgctgtttggtttcaaaaccgtcgtgctcggtggaagacaaaacagcttgagaaagattacggtgttcttaagtcagactttgatgcactcaaacgcaaccgcgactagcttcaacgcgataacgattcactccttggacaggtatagtctttgtgacttttagatttgtcaataaatttaaacgtctaggcacacccaaacaaccatcttagccattattgtaactaaatccatcaatgattcggtcaatcaaataaacgaacgtatagaacattaataacatcgtttcaatttgtttattttgaaatttcaatttgaattctgaccgttagactaaagttttgatcgtctgtgtttgaattgcctttaattacgttgatttttctttagtgtataaaaatgtcacaaacttatgcattttaagctaatatcatttgttaaacaatatcattttaagctaattacaaatgataaaccaaacacaaacagaatttttttttgaattttgagattaatatactaaaagtttcatgtttattaatttattatataatctgggataataatagctaaatttaaacaaattcagagataatccttttgtttggtagattataaagagtattgatatttataaaacatgacatttatgcagattaaagagctgaaagcaaaacttaacgtggaagggtttaaaggtatagaagagaacggcgctttaaaagtagtggaagcaaatcagacggtgatggctaataatgaagtcttagagctaagccaccgttctccatcgccaccaccgcatattcctacggaagctccgacatcggagctcgcattcgaaatgtttagcatttttccacgcacggaaaacttcagagaagatcctgccgatagcagcgactcaagcgcggttttgaacgaagagtatagtcccaatacggttgaagcagcgggcgcagtggcggccacgactgtagaaatgtcgacgatggattgttttagccaattcgtgaaaatggaagagcatgaagatctgtttagtggagaggaagcttgcaagttgtttgcggacaatgagcaatggtattgctccgatcagtggaattcgtaaaatgtgggggcagaaataaaaacatagaaaagtcgaaggggatatgtggaaatattactgaagtcatattgggtcggaaaatgcattacgtcaaatatctagggttctgttgagaaatggaatatgcgcgaga

SEQ ID NO: 155864 - DNA, 799 bp, Arabidopsis thaliana landsberg
  unsure (1)..(799): unsure at all n locations
aaaaaaggtttgagcttcttcaaaggcagttacatctcttcttcatttggggtacgaaaagattctgtctttgaccaaaacaaacaaaatattctcattttgcaaaccagtgatgttctcttaacttgatagaaagattttgatacacgggctcaatcggttgtagcccaatcgaagctgaaaggtgaaatcaggttcaaggccgagactgtttcgcctggtgaatgggaaaggtcgaaactttcattgccatttgttgctgatcaaagtttgatagaagaaagatggcaactttgttgttgagtcttaaagatgtctctggttttgtttgtttcaggtggataagagatcaacagatatctgaaggagttaacccgggcgatgatgtgtacatcatactgcggttagatggtcgagtccgcagatcgggtagagtaagtttcatctagaaaccttttcctctcttgctttctcgtgtttgatatctacttattggtttttgaggaggttttgtggtaagtaataaaaactttgttttttcaggggatgccggattgggctgagatatcgaaggagttaccgccaannnnnnnnnnnnnnnnnnnnnnnnnnnnnngaaactgtgaagctttcttaattcttacatattgtatcttcgtaaaaccttagaattgagtagagagaactcatgggagaagaaaaggtctgtattgtttgtttgtgttcataagtccatgaaattgatatttgtgtatgtgaacacagtttttgcattgtcaaaagaaaatatttctattaa

SEQ ID NO: 155865 - DNA, 438 bp, Arabidopsis thaliana landsberg
cagacagttcccctcggacgcgagaaactaaagagttttgtcatgattcatcgtcgtcgtctcgagaaccaaagcatggttgtggtctccttcgtacgtcacgattagcatcatcgcatcatctagtgcacgctccacatgcttacgcgccggacaacctcttacactgctgcacttgtaatatcccctgtcataaccattacaccgagtcctccccagttagttcgagttcttattaattaatgagaacagaaatagtcaacttaactctcggctttctatttcaaatttattctataggaaacaacaagtcaaaaagagcgtgaaactgaacccactactgtactactagacaacatgtttggtacaaccgatatagaaaaaaacaatattgacaatctctctggtactaatattgacaatacacaagttgcttaa

SEQ ID NO: 155866 - DNA, 985 bp, Arabidopsis thaliana landsberg
atgtacattggctttacttcagtgggaagtccaacttcttctcactacattcttggctggagtttcaacaacactggagcggtttcagatataaatctctctcgtcttcccaaagtccccgacgaagatcaagaacggtcgttcagttccaagatcttggcgattagtttaagtatttcaggagttacactagttatcgtcttggttcttggagttatgttgttcttgaagaggaagaagttcttggaagttattgaggactgggaggtgcagtttggtcctcataaattcacttacaaagatctcttcatcgccacgaaaggtttcaagaacagtgaggtacttgggaaaggaggttttggaaaagttttcaaggggatcttaccgctgtctagtataccgatcgcggtgaagaagatttctcatgattcaagacaaggaatgagagagtttttggctgagattgctaccattggtagacttagacatccagatttagttcgtcttcttgggtactgcagacgcagaggagaactttacttggtgtatgactacatgcccaaaggaagccttgacaagtttctttataatcaaccaaatcaaattcttgattggtcacagagattcaagatcatcaaagacgtagcctcgggactctgctacttgcatcagcagtgggttcaagtgattattcacagggatattaagccagcaaatattcttcttgatgaaaacatgaacgcgaagctcggtgattttggacttgcgaagctatgtgaccacgggattgactatcaaacctcgaatgttgcaggtaagtttgtgtttttatgatcattataaacaatcaatcaagatctctggacttattgagggttttgtgttgttactttggacgcaaggtacatttggatatatatcaccggagctgtcaagaacagggaagtcaagcacaagttctgatgtttttgcatttggagtgttc

SEQ ID NO: 155867 - DNA, 496 bp, Arabidopsis thaliana landsberg
ctaactgtttatccatggcagtaacatgccaggaagggtttagctatgtcaaagccttttttgttggccaggtgcgtatacaagagtcttgtttcgagccactgaaacaagcggatcagagactcatgggtcttcttgaatcaatgatcacttgacgtatttggtgtctcgttaatttacttattgattagtttcattttgttataatcttttatttttattttggtttggaagacaaagagattgacggcaaagaacgagaaggaagctacggaggctcatctaacggagacaaaaatgcaagttgacgcaaccgatgaagcagagaatgccaagaagagacttcatcaatcttcttaatgtttctttattaacatataataatggagtgtgtactttattaagcaaacacaaatatctgggagttttcaactgtttctactactaatgatgaatgttatttcagtattgatttttaatacagaattctattccc

SEQ ID NO: 155868 - DNA, 599 bp, Arabidopsis thaliana landsberg
gtgatcggtatgcaacatgagcttcgtgatttaaagagtcaaatccaagagaagtcagcatattccgttaaacttcaaagagaggtaggttttgtgtcttgtttacttcttgttattctttcatcaacaaactgtcttgactctaaaaattgcaaatatccatatagatagcaataattaagaaagctgaggggtccaagtcatgtccgtatgttctggatggtgcacaaagtcttggctcgtgcctaagaatccgtgcctcctcagacagtggtatagatatttccaaatgctcaatccattggtaccgtgcagcatctgagtctagtcgaagagaagctatatctggtaattcgcattctctctttccctgatcatttggcaaatcttattatgttctcaaaataacttataggacatgagcttttagcttgagcactgagcagttcacatttttccaatcttaggtgccaaccggtcagtatatgctccagaaccatttgatgtcgggcgagtgatacaagcagacattgtttcaaatggccagaagttcaccgttacgactgatggtccgattaatactggttggtgtacaagag

SEQ ID NO: 155869 - DNA, 1385 bp, Arabidopsis thaliana landsberg
actccatggaaccaaacattcgatcctacatcaggtatatacttaaatcttctctgctttttttttaaaagatacagaacagatttcagaattgaaggatgagacttttcttcgtttccaagtaaaataaaaacagatctcaaacttaaaatttgattgctctttgcagatcttcgcaagatagacgtgaacagttttccatcaacggttaactgcgaggaagacacaggagtttcgtcaccaaacagtacgatctcaagcaccattagcgggaagagaagtgagagagaaggaatctccggaaccggcgttggctccggcgacgatcacgacgagatcactccggatcgagggtactcacgtggaacctcagatgaagaagaagacgggggcgaaacgtcgaggaagaagctcaggttatcaaaagatcagtctgcttttctcgaagagactttcaaagaacacaacactctcaatcccgtaagtgtaaaaaagtcagaggaatcaaatgataattatcgtaattactttgaaataaccaaggttattatcataatttacagaaacagaagctagctttggctaagaagctgaacttgacggcaagacaagtggaagtgtggttccaaaacagaagagctaggtgagattttcttgtcttaacaccaaaattgtaaaattacatttatacccccttgtgtagaagtttttacttacaaggtccgatttggttttacagaaccaagttaaagcaaacggaggtagattgcgaatacttgaaacggtgcgtagagaagctaacggaagagaaccggagacttcagaaagaggctatggagcttcgaactctcaagctgtctccacaattctacggtcagatgactccaccaactacactcatcatgtgtccttcgtgcgagcgtgtagctggtccatcatcatcgaaccatcaccacaatcacaggccggtttcgattaacccgtggattgcttgtgctggtcaggtggctcatgggctgaattttgaagccttgcgtccacgatcgtaatttttagtggtgggggaagggtgttttgggttttttcattatcgttatatagtctatctgtgtggggtcattgtaattttggatgattggccttctcatgaactagtcatatgtatgatgcaaccttaaaaatatttcaagtagcaaaacttaattacaaacttgctatattaaccaaaaattatgaaactatctttttttgatatcttacaagagttctaaattaaaccaaaaattcacaaacgtcttctagataaatacacagtttctgagcatggtataagtgtagcttatatgcagttgctcaaaaaagaaaagaaaaagaagtgtagctta

SEQ ID NO: 155870 - DNA, 440 bp, Arabidopsis thaliana landsberg
  unsure (1)..(440): unsure at all n locations
ccgtctctctccccctcaaaaccagcagaaccagtctcactcgatccttaatccaccatggcaacgacttctcgccggtttaccaccggtttattcgcctcgatcacctcggtcaaatcccattccgcaaaccgacctcaatccatctccctaatccgtcgaaaccacatcgatcatcgtctaccgttgatcgttccaagttccaggcggtggattatccaagcggcgagatcctgggatggatttgacgacggagctgaggcggagattaagaagccaggcgcgtatggnnnnnnnnnnnnnnnnnnnnnnnnnnaagggagcagtagtagtactgtccatgtgatcgacggagagcatgttaagacggcggagatagtgatatgggcggcggttacggcggcgtttggcgtcggaaacagagtgatgtataagctcgc

SEQ ID NO: 155871 - DNA, 1278 bp, Arabidopsis thaliana landsberg
cgatattttgtcactaatcttgtccctttctgcatcagtcatctcacggaatgattttccttcaatgagagtaggctcggagagatctgcatctgaacttagtattccacattccaaggcaatagccctggcagtttggacgttgtcaccagtaaccatacggacctgaacatcaacaaatatcatgaagtaatcatgcagcattaattagcaggctaaacaataaatttctgtcacttgtcttttctgtttttctgtaaaaaaaataaatcgaacaaaagaagtaccttgacaccagcattttgacacaacacaactgaatctttgactcctggtctacatggatcctgtgcacatttcaaacatttcgataaaaaaatataccaagaatattgcaggacatgacatgcgggttaatgtctgatctataagaaaaatgtgtctatagtggagtactatgcaatgtgaaacggtaaattgaaagtgatctcataagacgagagacacaataaaactaaagcaaaatgccaaaatgtacataaacgaacaaaccaaatcgatcctcacctttatgcccactatagctaataatataagatcatcctctgggagtacccactttgagagctcttcgcctgttgggaccttttcagcctcataggttctaaaggcgagtgcaacacatcgtaaggttcttccagccatatcattaatgccattcttgaaaaacgatgcctggtaaaatcaaagaaaatcgagtgagctgagggtaaaatcaaagaaaatcgagtgagctgagcatcatgacagcccaaaggctaatcacagattcgaacaaatacagctgagtttagaggttaataaattagacttttcacaaaccttgtcgtcagtcattggtgccacattaccatcctcatcgatgtagcttcggcatgatgccaggacaatttcagaagctcctttccagtgaacatgaacttcaccatcagcctgaaagaaatatgggggggaaaacgtcaaaaaaaaagaaaagaaactgaactgtgcttatagagtctgcatagatattatttcgactatagtagaccttcacgcttatatctttcatgcaaccttaaaaaatagagtataaaaattcgtaagcaaatacagggctcaagaaactggtttatttaccgtttttacagcaacaccaccacgtttcttctctgagttaaatggaaaagcatgaagaatagaagactgcgatcgggctgtctcgaaattcattcccag

SEQ ID NO: 155872 - DNA, 311 bp, Arabidopsis thaliana landsberg
  unsure (1)..(311): unsure at all n locations
ctgctattcacaacctcgttccgccgaatatcgcagttccttcaggatggaaaccaggaatgccagtcgaattgcctagagatttaccattgccacctcctggatggaaaccaggcgacccagttgtgttaccgccactggagtcaattgctgcacctagagcagaggatcatcaacatatgagaccttctcagggactccnnnnnnnnnnnnnnnnnntacaggtccgagctgttcaacttgacattctggaggatgatgatagcagtgattacagcagcgatgatgcaagctcagatgatgaggattaa

SEQ ID NO: 155873 - DNA, 719 bp, Arabidopsis thaliana landsberg
atggcggtattcggattcagaaacgcgacaccaatcttcggtatgttaccaccaacactgggacccttcaagcctgcagcacttcttccatccgtgacggaagaagacaaggtcatcttgaacaatgttcagaaagtaatcgagttccttaccgcaagaagctccatgtcgaataatcctgatcaggttagattcaaaaacctctcataatttgaaaaaaaatcagtctgtgtgagtaccaagtttttaacctatgtgtggtcatcatcataaaacaggtagtagatgtatctcaagttgttcgggaactgcttccagtgttgcctggaatctctgccacagtactgcctgagattttgagtcggcttgggtcaagggtcatggcgagaatagtccgggatgcgtttttgtgaatattggattaaactttgtacaattgtgcatataagttgcattttaaagttactacaaagaaatatatagctgattaagttgcattattaacacatatacacttgatgttatatacacagttgcaatggaacaatgactttgccttccttatgtggcagtgttggacatcaaaatttaaatcacagtattcacattttacattgttttgatatcagattatgtaacattttagtattttattgactgaaacataaaaaactaaatacaacagacttatttaaaacatgggctctgggagctgtttt

SEQ ID NO: 155874 - DNA, 753 bp, Arabidopsis thaliana landsberg
aatttcgacaatgtgggttgttctttttccttgataatcttcttcgtgaagaaaaaaagtattttggaaactaaagttcagatctttgcttgtcgtttgatgagtgagagattgctgggtaggtagattaattctatgagtttccagatttgattttgtgaattggttctgtgtggtgtttatctagtaagctttttgtacaatgtgtaatgtttgtttgatgattgaaagtttgaaactttggtgctattttgattactcaggtgagctaagctaaagaacaaggaacaaaaccaaattatgtgtttgcgagatctgtctcatagtttatggagttggagaggtgtttaagcttggtattgagaagctatactgttgtcagcttgaggtgtttttagcgaaagggtctatcgagtgaatagaagttaaagtatgggttcgctctgttgtgtagctgcgaagtcagatagatcaaattctacaagtggggacttttcatttggcctgcatgagccttattggaggactaatacaagtttctctcctccttcatcgagatgggacgtccatggattaatggatggtattagctgttatggatcttccacatcatcaaatgctaatgttcttcgtagtcccgacctttctcaagctcttcattggacacctaacgaccctgactctgctacaagaagaggtttgttgaactcaaaaacacattctcctctttatgatatttacatctcggaactt

SEQ ID NO: 155875 - DNA, 1705 bp, Arabidopsis thaliana landsberg
gaaagtcactccggaccacacccatggcgtcgctagattctcatgtgttgatgaaactagttagcctctttttatctactctttttgtcactatcttaagctcggaatcgcagtgccggaacttcgagtcgatcatcagtttcggcgattcgattgccgacactggaaacttgctcggtctctcagatcataacaatcttcctatgagcgcgtttccaccgtacggagaaactttcttccaccacccaaccggtcgtttctctgacggtcgcctcatcattgacttcatcggtacttctctttatttatatgtaaattgacttttttgacgcagctttttggatcaaatttatataagaacattctaatttttttgtgtgttctgttcactgaaatctttctctgtttttctgttttcttgaactgcaagttaacattgtgaaacctcaagtgatgctccaattttttttttctttgcagctgaatttttggggcttccttatgtgcctccttacttcggatctacaaatggaaactttgagaaaggggttaattttgccgtagcctcagcaacggcattgaaaagttcttttctagaagagagaggataccattgtcctcacaacatcagtttaggagttcagcttaagatcttcaagcagagcttaccaaatctatgtggcttaccatcaggtagtaatagtgaagatcaactttagtaaagtgattataatgtatttgttttcaagtggtttgagctaacttgtatttgttcttagattgtagagatatgattggaaatgctttgattctcatgggggagattggagctaatgattacaatttcccattcttccaactcagaccattggacgaggtcaaagagctggtaccgtttgtgattagtactatttcttctgcaatcacggtaaacattcttgatcagccagttccgggaatgactaaaacatatttgtatctacgctgataattagtttggtaagaaaaaacacatgtacatgttacgttgttttgaaactgaatgttgaattcaggaattggtttgcatgggaggaagaacattcctagttcctggaaatttcccgatcggatgctcagcatcctatttgacattatacaaaacatcaaacaaggaagagtatgatcctctaacaggatgtttgaaatggctgaacgatttctcagaatactacaataagcagcttcaggaagaactcaacggactcaggaagttgtaccctcatgtcaacatcatatatgctgattactacaacgctttgttgcgcaatttccaagaaccagccaaattcggttaggcttcttgaatcctccaagagatttcttcacaaccaagtcactcatttgattcactaattaattaaccgattttattatccaatcagggctcatggacagacctttacccgcttgttgcgggttaggaggaccatataactttacctttagtataaaatgtgggagtaaaggagttgaatattgtagtgatccttcgaagtatgtgaattgggacggcattcatatgactgaggcagcatacaaatggatatccgagggagtactcaaagggccatatgcgattcctcctttcgattggtcctgcctcgactctaagattaagaacaatgagtcattacacacacaatattctttgatgaacagctga

SEQ ID NO: 155876 - DNA, 645 bp, Arabidopsis thaliana landsberg
agttaccattttcttagttgtttcgtaaatcaggaattgtgacagttgcattggtttcttttatgatatagagaggaagatggggagctggaatatcttgtcaaatataaagagctatcctatgatgaatgttattgggagtcagaatcagacatctcaaccttccagaatgaaattcaaaggttcaaggatgtaaattctagaactcgcagaagtaaagatgttgaccataaaagaaatcccagagactttcaacagtttgatcatactcctgaattcctcaaaggtatttggatcaccttaaatcatatactataaatgtttcttatatttggtacttatagatgttatgatttatttgtttcctgcgattgaaggcttgttacatccataccagcttgagggacttaattttttgcggttctcgtggtcaaaacagacgcatgtaatccttgctgatgaaatgggactaggtaatttttcaattgtcccacttgggtggtcacatagatcttttcatccattgtaaggggcctttgttttctattcctgtaatgttgtgagatttttcctgttacaggcaagacaattcaaagcaccgcccttttagcttcactttttgaggagaaccaaaaaccgcatttg

SEQ ID NO: 155877 - DNA, 774 bp, Arabidopsis thaliana landsberg
ctacttttttcactcatcaaaaaaaaactaaaccctagaatgcgtatcgctttctttgacctgaatgtgcaatcaaactcctcttagatctatggctctcgattcttccggaaaacaacctgagcagcagcaacaacaacaaccacgagcctcctctggaaacggcgaggcaagattgaagcttcggagaacccctaatgaagaacatgagcctgagaactatgaagatctacctttggactatagtccttctctgttcacctctcttgagcgttacttacctgagcagcttctcaattccacacgaatcgataaagctagtttcatgagagaccttcttctccgatattcccctgatactgagcgagttcgggtaaaagtttcttccttttaccgattcttgttagttcgagcttatatttctgtaatttgagcttgaatttgtgtctcattttcaggttctgaggcataaagaatacagagacaaaatcatgtcttcttaccaagtaatattctttgtcggattgggttaacaaagtcttaatcttgaattggttatttaaatctgttttgcttgttgttaatctgattttgcagcgtctgcatggagagatctatactcttgaccctagtagtttctttgcgccatcgtttcttggagcttttagtcggaagtcagagcggaatttcagaagtagtgtggttgcatctaatcctgggattttcacttgtgagatgttccaaccccagttttgtgaaatgttactagcagag

SEQ ID NO: 155878 - DNA, 1172 bp, Arabidopsis thaliana landsberg
ctccctcaacaacaatgcccgtcaagtggtaagctttgatccaatttcgttttccaaaatctttatttttttcgtttctgttctgattactcttccgattcttgtatttgggttttgtttttttctagggttttacattggcaaccaaaccaaggatcaacagtaagcagccaaatcctaaacgaagcaacacaatgtgtagagagcatcaatggtgtgaaagaaggaagatggaaagcaacactcaactattacaaacccatgttaaaagaccaagcgaatcaattggagtttcctcgtgattttctagggatttcacttgcggatcagccgaataagtactatttcattatcaggacgcagaggattgtcttggaagctgattcttcgattcagttgattatggagaagcttcagtcttataaatctaaagtggctctttactttgatgggtttcagtatcagcttggtgattttaggtcgagagttggtaaagttgttcctactcattctgagaatgttagaggcattgtcatggaggtaaacaaagtttccagctttttcttgtttaagacagatatgatgaacactgaacagtggtgattaattttaaagatgaaaatcttgtttttctacagatttttcttgttaaaagagtttcttgtaatatcttttagtgatgatccttgatgctgtttatgatgttaagacagatgatgaaaattgaacattgttgattgttgactatgcatctacaagtttctttagtcttgtttcgtgtaatcacaatgatgatgaaaaaatccttgttttcttaaatccctatagtctcaatgctaatctaatcacctaaagggtatatggagctgttcccttttggtgattgtcttgtttcttgtaatctcaattttgagtttgtgtgttgttacttgcaggtggagtatcttcctatatcatcaatggaaaaggcacaaaaggtgatggaggagttcttggagatatggaatgaagctctggctaaaaggtcgttgccgcgtaagtttgtgaacatagatcttaactttggggagtttggacttggagacaactacactccacaacacacagctgttcgtaattacgctctcgttatggctcacatgattgctaccgttcaagctgtgagtggctaa

SEQ ID NO: 155879 - DNA, 3631 bp, Arabidopsis thaliana landsberg
caaagatcatcattcacgaaatgtctgattcgattcaccggagaaaagtttcgaatcctgtaggaaatggaggtcggagctccagaacaagacgaacagctttcagatatgtttccgacaagaataatcgctctaaatcgagtaataaggttttcgagagaagcttctcagagccgagtcttaatcgccaccgcgacggacagagtaatcacttgcggcgaccatcgccgatgagaggtttaccgatggaagaagaaacaaaaccgatcgtttacttgcctaggattcgctctgaggttttcgcttcgtctccgtcgttgttgaacttatattcgccctcgtcttcatctccgatcaatcaagaggtcagagtcgtttgcttctattttttcaaatcaacaaattcatgatttcaactctgtaagagaatttaacttttagtccacaaagatttaaaagtttacagtttaagcctaatattataaaatatttcaatataaccattatataggcttaacaaagagttttaagttcagctgcaaattctagagtcagttctccagttcatgttatcagatcgtgagaaatataccaaaaattgacatttcgattaaatttctaaaatcagagaacctcattttgttattatttttcgaaacaaaatcagggtaatacaaaagaagcaccaaaagtaataatcagtgtagcagtagaaggaagtcctggaccggtaagagcaatggttaaactgagttgcaacgtcgaagaaacgatcaaaattgtcgttgacaaatactgtaaagaaggaagaactccaaaactcgatcgagattctgcctttgaattgcatcagtcacatttcagcatccagtgtaagatatattaattatccaaaaataataattgtttttacatatagaattaataaaataaaagcacaaatgatgttttggttgaaattttgaatcagttgttttcagtttgacgtagattgattggattaaatatctatactccatgatatctagttttgctttaatcaccaacggttatggaaaatatcaaaactactcatggctcatgtgaacatagaaacatcacataattcatgagttatataacctataataaagaaaatggtgactaaacctaatgatttacctctctttttgtcacataattgaatggttaagacaatcaaaatatacttaagtttgatgtaatgtaattttcaggtttggagaaaagagaaataattggagaattaggcagtagaagcttctacatgagaaagaaagctcctgaaaccggaggttcgttcgccgggatttctccagcgagaacgagcctaattccgtcgtcgaatttgatcggatcgtgcatcgctcagttgattgggaaaatcatgaggagaacaagaaggatatggaacatattggtatgtgtgcaatgagatagaccaaagtatacacttttgagcgtggcacataatattttttagtttgtgttttgctccactctcatcaaataagggaaccttgtactttatgaaattgtattataagtgtgtatatatttgtgacgatagatggatatggttctacgaaattattgatttatgaggaaaaaattcatacacacttcgagaaaataaaagaaaattgacttttgaattataattatgagaaaaatgagagatcaaaccttctgtttgagtcagagtctttaggaagtatcttcttcttctgcgaattgcaaaacccaaacaggtttataacagagagaagttgccgtcgctatcgccgacgcctccaccactactcggcgatcactgtagtcctcatactctctctttcgggtaaaattgctctcattctattttaggaagcctttcttatattattcaggatataaaccgtaaagttttagattcgaaattaaaattttgactcggtgcatcaagcacaaacttattggactttctctagaaaagagctgaaattaggaactgaggcatcaatgtaatgtatgacgattgttttgatagtggaaggtctttggtagattggttcttgtgttggttttagagtttgtttcacaaatgttggattctaagctgagattcttccttcaaagatgtgtagtgcttgaacaggcgaagcaagttcatgcacagttagtagtgaaccgctataaccatcttgaacccatcttggttcaccaaactcttcacttcactaaagagttctctaggaatattgtaacctatgttaaaagaatcctcaaggggtttaatggtcatgattctttctcctgggggtgtttagttcggttcttaagccagcataggaagtttaaagaaacggttgacgtgtatattgatatgcataactctgggattcctccaagttcacatgctgtaacctcagtgttaagagcctgtggtaaaatggagaatatggttgatggtaaaccgattcatgctcaggctctgaaaaatggattgtgtggttgtgtttatgttcagacaggtctagtgggtttgtattctagacttggttacattgagctggcaaagaaggcgtttgatgatattgctgagaagaacacagtttcgtggaactcgctattacacgggtatctggaaagcggggaactagatgaggctcgcagagtctttgacaagatccctgagaaagatgctgtgtcatggaatctgattatctcgagctatgcaaaaaaaggtgacatgggcaatgcatgctctttgttttcagcaatgcctttgaaaagtccggcttcttggaatatattgataggcgggtatgtgaattgcagggaaatgaaactagcaagaacctacttcgatgcaatgccccagaagaatggtgtctcttggattacaatgatttcagggtacacaaaattgggagatgttcagtctgctgaggagctctttagactgatgtctaaaaaagacaaactcgtctatgatgccatgatagcttgttatactcaaaacggcaagccaaaggatgctctgaagctattcgctcagatgcttgaaaggaattcatatgttcagccggatgagatcacactctcaagtgttgtatcagctaattcacagttgggtaataccagttttggtacatgggttgagtcatatataaccgaacatggaatcaagatcgatgatctcttaagtacctctctaattgatctttacatgaaaggcggagactttgccaaggcattcaaaatgttcagcaatctaaacaaaaaggacacagtttcttactctgctatgatcatgggctgcgggataaacggcatggccacagaagcaaacagtttgtttacagcgatgattgaaaagaagatccctccaaatgtagtaacattcacaggactattatcagcgtatagccattcaggtcttgttcaagaaggctacaaatgctttaactccatgaaagaccacaacttggaaccctccgctgatcattatgggataatggtggatatgttgggacgagccgggaggctagaagaagcatatgagctgatcaagagtatgccgacgcagccaaatgctccagtttggggagctaaaacttttagccagtaa

SEQ ID NO: 155880 - DNA, 415 bp, Arabidopsis thaliana landsberg
tccgcacccaggaaaccttgcaattgatgtagatgaatcaatcatctactatgacttcggcatgatgggagagatcaaaacatttactcggaagagattacttgatctcttctattctgtttatgaaaaagatgcaaaaaaggtaattttttcttgcaagggttaattctcaatctgaaaataagaaaactaactcaatgtttttacaggtcatgcaaaaccttatagaccttgaagcacttcaacccactggagatctttcatcggtaacctgacagtctcactctttatttatgcgaagtttacatatgtaatctcattgcaactttatacgtgtttgttttaggtaaggaaatctgttcagtttttcttggacaaccgattaagccaatctccagatcagcaacagacatga

SEQ ID NO: 155881 - DNA, 1035 bp, Arabidopsis thaliana landsberg
ggcatagagaagaaatctgcaagattaaaaggcaatgagaaggcagtggtcgcaaggcatgaagctgggcatgcagtggttggtaccgctgttgcaaatcttcttactggacagccacgtgttgaggtaaaatggaaaaacattgtctacatttacgctcattgtttatgttgtttacgtgcaaatgattcaagttttgctcatctttgtggtgttgtcagaaattaagcatattgccaagaacaggaggagcattgggatttacatacattcctcctactagtgaagacagatatttgctcttcattgatgagctacttgggcgtttagttacccttcttggaggtcgtgcagctgaagaagttgtttactcagggcgtatatcaacaggtgcatttgatgatatacggcgggcaactgatatggcatacaaagcagtagctgaatatggtcttaaccaaaaaatcggacctgtgtctgtggctacactttctggtggtgggattgacgattctggaggctcgccatggggaagagatcaggtatcttcatattgcaatgcacttgcctaggttgttttataatgtccatgcaaaagttaaccttccatgttaatacacaggggaaactagttgatcttgttcaaaaagaagtgacaattttgttacaatctgctctcgatgttgcgctgtctgttgtacgcgccaatccagatgtattggaagggcttggtgctcaacttgaaggtttagtagaagtttatttgttttcatcagaacagtttttgaaaacatgtaggacactataggatataactgcttgcgagaaagattatatcccttgtcttgagtttggttcaggtgacaactggctgattttgctgatgaaatatcatgttttggtgcagagaaagagaaagtagaaggtgaagaactgcagaagtggttaagcatggtggttgcaccagaagaactcgcagtctttgtcaaaggaaagcaagagcttttgctctcagcacaagctagctccagttaa

SEQ ID NO: 155882 - DNA, 724 bp, Arabidopsis thaliana landsberg
acttacaatggctgcatcgttagcctctctttcctccttagctaaagccggagcaccacgagtcactgttcaaccgaaacggcagccaccggccactcctcctcacaaatcatacctcttgcttcctctgtacgcaatcttctcttttactaattatctcgtcttaaccaatttcagtcagaatttgaaccacttaaagtctatagcattgataagcgaaatgttgataagatcatgttttgtcagatcaagaaacatatcacgacgagcttctataggagaggaagttctctgaagaacatttatgccctcgagacctctgacggcgccattaacgtggaggtcgatgatgatgaggaagaagaagcgtgtgagcttgttaacggaacagaagtgtccgttgacggtgttgaaggttatcttttaacggcggtgaagaacaataacggaactggattgcttctactctctgatgtctttggctttcaagattcagctacacgcgatttcgcttaccgtgtggcttgcaatggctataagtaatcaatcttctctgtttacttatctctctcgaattccaaagttcattgttgaaatttcagttttgtgtttttgattttttggttgagatagcgttcttgtcccggacttgtttcgtggagatccatggtcgaaaaaccgaccaaagtccgaatacgaggaatggagaagaggacatgaccct

SEQ ID NO: 155883 - DNA, 953 bp, Arabidopsis thaliana landsberg
  unsure (1)..(953): unsure at all n locations
atgaatgcaaatgcagacaaggatacacctgaatctatcatcaaacatggaagcaattgtgggaaaaatgcagcaacaatgagtcatgatgcatccgaaagctctagaatcaactcagatcctgtggatgcagtattatcggttatgtccagaagctttactggtggtttagagcagaccattcgtggaaacttaaggcctgatgatgcaacctttgcaaagataccggatgcgatatggcaggaaacctctgcatccactacagagaacaaacatagagaggttatagaccgttttcagatactgaaggagcaggaaacagagcgcaagctcaagtctcagaagctccctgattcagacattgatgttatagaccggtttcagattctcaagcagcaggaaacaaatcgcaaactcaaggctcaaaaatgtccagaaacaaaaaagggtgaccaggaggacaaactagaaggttcagtgatggctaatatgggcagaagcagcgatgtgagtgatgttatggatagattccagatactgaaacgccgggaagctgaacaagtgaagaaatctctcaacagcatggatgtagattcggattcagaaaatgaccagccacaaaagnnnnnnnnnnnnnnnnnnnnnnnnnnnnnnnnnatacgtggacattctcagagagaaacatgcgccgcggacactgaacaatctgcatctggcaaaggatacgagagcccgacctcggactgggaacatgtcatcaaggatgattgagtagtgaaatttccttggacaagaagtttcgatcctataatgaaatcttgttattataaataaaaggtatttgtagaataacatgaacggccattatgaaaacgtttgttatgtatgataaaaggataaaactgcttggatgctgattttcataatatgatagttttaagttactgattttc

SEQ ID NO: 155884 - DNA, 696 bp, Arabidopsis thaliana landsberg
gtagttgtgacccaaatgagtggggaagaccatacatcagaatctatccacttgtttcatgttggtaaaatgaggataaaactttgcaagggaaagacagtgattgcaaaagagtactactctagtgcaatgcaggtaaggatactactttaccccgagaaaattgtcatatttttagtgttacacggtgagatctataatatcataatctttgatgatcatattgagtagctatgtggagtgagaggaggtggaaatgctgcagctcaggcattgtattggcaggcgaagaaaggagtgtcatttgtgatagcttttgagtctgagagagaaagaaacgctgcgatcatgcttgcacgaagatttgcttgtgattgtaatgtaagtatatctaagatggagttagaaactttggtttttggagagagaggtgttgatgtaagtatgaaactgatgtgttgcaggtgacacttgctggtccagaagacagaacagagacgggtcaaagcccttgaagaacggctcttacctaagttgtgatttttagtatccgtaagagcttatttgttttgtagtttatataggttttaggcatttgtttgaattgtacttgtattgtgtgtaaaaatatcgagcagtgaagtaagaggtgatggtgaatctatatgtaacgggtggcttgtgtttattcatttg

SEQ ID NO: 155885 - DNA, 299 bp, Arabidopsis thaliana landsberg
ctgaatgtaaaagaagccttggagctgtgtcggtatgagtggatgcagagcgctcttgaagagtttctacgagtaatggcagaagaaggaagcacaaaggaagactctcttgccatttccagcatttcaaatagaagagagcgtcaaattgatcctcgctactgctttgtagtctaactagtttcgtttctctaggcgtatcaaacttctctctcattgttatatattatggaaagacttcttctgtatacaaagttaaacatgagaagcaatgctttcagaccctgtgacttgatgtg

SEQ ID NO: 155886 - DNA, 3023 bp, Arabidopsis thaliana landsberg
tgaaagtgggagtaaacgaaagagggtttgtgtggatttggttgaagaaactattgtgaagaatgaatcagaggatagtgtggatttggaagataagagtagtagtggtgtgttaggtgactcgttagcggagaagtggtatgtagtagaagtagagaatgagagcaataacaaaggaaaggggataatggaagattcctatggagaaagtgatgtgatttgtggtcagagttatgagaagccgagtagttctatgggtagaagaagatatactagggaggagaagggaaagggtattatgcaggtggaggatgtttcttctccggttacggttgagattgtcgaagttgatgaagaagaaacgcaaacccagagcttggttaacagtgagaagcccccggatgtctctgtaacagaattggctgcgacgatggctaatgttgagcaagcgcagaatcgagaaaatagtaatgagattggaaacgattcaagaactcagcactttcgtgacattgcagagaggattgctcacagatttgctcattttgatgctcaagtggaggaagaagaggatttgtcagataaagagggggagcagcaggtcgaagattggccgggtcctttctctactgctatgaaaataattaaggaccgagaagagtacacgactccgcatgttggtattggcgtctccaacaaagaaagatcttcaccaactatttgggttcccagaagtaactttagtttcccccctcggaaggctccatctctgcaagaattatccttgcgagttcttgtcaagaatgctgatgccatcacttctcttgactatgttccagacacattgagggtcaaactttgtcaattgctttgtgattctaggagaatggacctacactttcttgatcttcttgtccagggatctccaacagaaatttgtgttccagattgctcatggctgaccgaggaagagttcactgaatgttttaagaactgtgacaccagcaacttgatggtaacttattttttcctgtgaagacaacattttcagtaccattttattcctgtagttaattggcttagattggatattgaaccgtatatgaggttagctgcccgttcttggaaaataatgatactgacaggaataaatcatgataaacatcttgtcacacctaagataaagtttttcatgcataagatgatattaaagtgttcattgtaacttaagtccacattcgcggattcgcctcctttttgaaacaggttcttcaacttgaccagtgtgggcggtgtatgccagattatatattacccttcactttagcaaggtcaccaaaagtgttgccgatgctatctactttatctttaagtggtgcatgccggctttccgatgtggggctacgacaactggttttctctgctcctgcgattacgtctattaatctcaaccaatgctctcttctaacatcatctagcattgatatgttatctgattcattggggtcagttttaagggaactgtatatcatcgagtgccaaaacattgatatgaagcatattctcgcagcattgaaaaagtttgagaagttggaagtattgtcccatgcggatcttccttctgtcaagggtcggttcttgaaggagtttgttactgctagaggtcagaccctgaagcagctgattttgaccaactctcggtatgcctcttgaatttccttgttcaccccctttgattcagtcactctgaattcttaccttattgggctttgtgaatctgttgcaggaagttatctgattcttctattaaagtcatctctgaaaactgtcccaatttaagcgtccttgacctggctaacgtatgcaagctgacggattcttctctgggttaccttgcaaatggctgtcaagctttggagaaattgattttttgtcgcaaccctttcaggcaagtctctatacccttctgtattcatgcttactggaagattactatctcattccaaatgttcatgttatactggtacagccgtacagtgttaccatttgatatggtgacatggcctgttatatataagaacttatggtgttactttgttaagatatctgccactatgttaattttggagacattatctgttttctatattcaaatcaatacacatatagtcatgttcttgtgaactgtgtgggctgtgttttatgtcaaagttaaccgacgcttcttatgtctctatagtgatgaagctgtagctgcatttgtagaaaccgcaggtggttctctgaaggagctatcactaaacaatgttaagaaggtagacggattctttcccactatgccaccaatccacagatcgatcttaagttacacttacacatttgttttatgttcaggttggccacaacacagccctagcacttgccaaacattcagatcaactgcagattttggatatatcctggtgccgagaaatgtccaacgatttattaggctacattgtcgataacagttcatctctgaaagtgttgaaggtctttggatgcagtcaggtaaaaaactttaaaacccaaaagccctcgtctcctttgcaaagaaacggacatatcctgataaagaaacctatcttttctcttttgcaggtgacggatgtatttgttaaaggtcactcaaatcctaatgtcaagatcttaggtgtgaagatggatcctttcttaggccacctttctgataactgaaagaaactcgaaatctccctctgctttgcttcttttttggagaagtgcagagacgatttttactaattgtccaaacatgtggtttatctttgattttgtaatctagtatttattaaatcggcaagatcaaagtttacttatgtttttgaattcaaattagtaaagacctttgatgaaccatgtaagtctgcaaattcatagcgattttcgatgttcgagatatgaatccaaagccaaatatatacttcttcacaaagcacacacaattgtacatgaaacttggactt

SEQ ID NO: 155887 - DNA, 1306 bp, Arabidopsis thaliana landsberg
acctcggagttctggcatgaagcagaaattctttcaaagcttcatcatccaaatgttatggcattttacggcgtagtgaaagatggaccaggaggaactttagctacagtgacagagtacatggtcaatggatcgctcaggcatgttctgctcagcaacaggtaattatttaatacagctcgtcggaatccttgcttcctcaagatagctctagtttataccaattcaattttggcaattacaggcaccttgatcgacgtaagcgacttatcattgcaatggacgcagcttttgggatggaatatttgcactcaaagagcatagtgcatttcgatttgaagtgtgataacttgcttgtcaacttaaaggatcccgcccgtcccatatgcaaggtgactttctaggacagttttagaacataatgatgcaacattttcattttcttttgtttatgtaacaaagagatgatgctttatgcaggttggtgattttggtctgtcaaagataaaaagaaacactttggtcactggcggtgtaaggggaaccctcccttggatggctcccgagctacttagtggaagcagcagcaaagtttctgaaaaggtatgagtccctaacattcttgtgcaagtaaatgacttgcaatgctctcaaattagttgttggtaatggtagatgaaaaacaaatataacccctttttgtacttatttagtttcaatgccctttacatgattttgcaagtaatatcgccatggatacttcatttacacacaggttgatgtgttctctttcggaattgtcttatgggaaattcttaccggtgaggaaccctacgccaatatgcattatggggcaataatcggtaagcctgggctaatgcaccataacatccctatacacattcagttctgacttcacgctttgcagaagtctgaatctcttaccatttgttactcgtgtgacaaaattgtaggaggcatagtgaacaatacattgagaccaaccgtgccaaactactgtgacccggagtggagaatgctgatggagcagtgttgggctcctgacccatttgttcgacctgcgttcccggaaatagccagacgtctccgcaccatgtcctcctctgcggtccacacaaaaccacacgctgtcaaccaccaaatccacaagtaatctatcaatttattattgctggtacgtaaatcgtaaaaaatggtttgtgtataaaatatttccttgctgcttctttcggatttgagtgctacagtttcaaggattggtgttgatttgtacaagaaaccctaa

SEQ ID NO: 155888 - DNA, 1481 bp, Arabidopsis thaliana landsberg
atgagagtttctctagaattgtattcgcggccgttgacgctattggcggcggaagtgtcatcggcgtatacaattgaatttaaaagaatcatcatcacacgtaacacataaatcgatatattattttaaaaaatattgataccaaagaaaataattgaataagtattactgcaaacagtttatatcatatctgatagactgatacagttgaattgctgataccaaacaaaaaaatgtttaaagaatttctataatatctgatacagttgaattttatcaatttctacatccatattccatattactgatatttaaattatcaaattgagtataggatgattttgacatatacaaaaaaaaaattaattttgtcacaagattgctaactttattatatcatacgatttcataagtagttttttttataaagattataaataattcacttttattgtttacatatcatataaaaaagtctaaatttcataataaatcgtcaatacttatattcgaaggtttttgtgcgtagaagtaactattgaagggcaatattcttgcaaatacaacgattatgtttaagaaacataaaagttaggaaagatattgtttagaaatatttaataatgtaaatattaaacggataaataaaagttacgtaaatgtttttttttggaagggagggaggtttccctatgttttgacgaaaaatgtacagtttaaaacctttctctcagtctgttggttggctccattcgcagctcactgttttcgtcaaccaaattttgtttatccatttcttaaatcatcacttaatcattgcctagttctaatcccaaagttggatcagaaatccaaatttcaaagtcgctatacagagccgtagctttctggcaattttgattcccaccaaaaaggtgatcactttatattagattcctcttcttttctcctattaattttgacccgggggggtcttatcactctcacacaaaaaaaaaaaaagacccatgaaaatccacccattacccagaaactaaaataacaacaatctgatccatcacgctcgtgatccgacccgagaacccggaaagaagctccgtcgtctcccacatatcttcagccgtgttctagagctgcccttgaagtcagacgctgacgtggctgttgaagagagtcatgactgcttcaggttcgtcgcggaaacagacgggggaggaggaggaggtgtgagggcttacatggttgagattcatcctggtgtgaccaagattcttgtgagaaccaatggttcatcgtctcttggtttgtcgcttgatgagcttgagcttgacgtgtggcgtttcaggctaccggaatcaactaggcctgagctcgttaccgtggattgcgacggcgatggagaattgattgtcactgtgcctaagattgaagacaatggtagagatttgatagtgcttgtacagtaatctaatgtgtttgtg

SEQ ID NO: 155889 - DNA, 1344 bp, Arabidopsis thaliana landsberg
  unsure (1)..(1344): unsure at all n locations
gtaaagttgatgctttgtttcgacacttttggcataataattttaatgacattttttcggtataaaaactataataatttaacaatatcaacaataaagtttttatttatctatctatccaattggagacgaatcatatcgagcgatggatttggcagaactgtgggcgattttcggacccggattctccggcgccgttttcggaaccgggtggtggttttgggtcgacgccgtcgtttgcagttccatccaagttcccttcgtccattaccttcccggtaaatatatctaactctcgataatttatcaattagggtttccgaattttgagcgattttggtccgttggatttggggatttcgcnnnnnnnnnnnnnnnnnnnnnnnnnnnnnnnnnnnnnnnnnnnnnaaaagaagacattgattactctccttacgacgaaggcgagtggaggttagtttttcaaattgatctgagtcaacataagagcttggttacttcttgtttaaatctgtaattctgtggaaagtagaaggtagttgagataagtgtacaaattttagctgatttttgtgactgatccatttagtttgaagtatttgagtgatcattgcttctataagtgttgaagtattcatgatttgtgttttatggatttggattgaagcttatttatagcgtatgtcgttgaatttgtttcattcgctctgcttctgattctgtttttgatcaagataagagttaagagcttggttacttcgtgtttctaatctgtattttttgtgtaaactagaagatacttgagagatcttgtgtgtttcatttatgtgaaatcaagttttcgctgagatttgcggttagtttaaactgtttctgatttgtgtatttatgtatttggattcttggctacagattgaagctatggctttttcatagcgtatgtcgtagcgtttgtttccctagctgtttatgttggcttgctgatacagttatttaatcaaggataagatttaagagcttggttactaagtgtttctaatctgtatttctgtgtaaactagaagatacttgagaaatcttgtgtgtttataaccctcattatctgaaatcaagttttcgctgacatttgcggttagtttcaactgtttctgatttgtgtttttatgtatttggattcttggctacagattgaagctgtggcttttcatagcgtatgtcgtagcatttgtttccttagctgcttctgttggcttgctgattcaagattcggttgtgaagactgggccttcaacttggactggtgtggctggtgtctttcaatgtgtatttgtattgataaggtaa

SEQ ID NO: 155890 - DNA, 618 bp, Arabidopsis thaliana landsberg
cattttaggaccgaataaggacactagcttgttctgcaaatgtggtgacacagaatctgaatcatgcctctatcaagaaggtacatatctgtggtttttataatcttagatcgtaaaatttttcgtgacatagtcttatcatcttcttcttcttcttttggtattagatgagcatcacaaagattatcgccgcccacacacgggtttaagaaacattccaggtttaaagagaaaaacatcgaagaagaatgacgaagaagaagaagatgaagatgaagaagtgttagaaacccaaaactcttcttctttgctaaacttcaaacgaatgaaaaccagcaacagtccaaggtgttcatcaaagtccccttgttcaatcgagcgaagtctttcacaaggttttgcgagtcttttatcgactggagataaaccatgaaacactggaacatcgtcgcacatatatatatagattatacaaagcaaaagagttctcaaggtgttgtctcattttttcctacctaaatacctcacttctttaaatgacagttgagttcttctttgttgtaagctatagaataatttgttccttgaatcattcataatttgatcttattccatttt

SEQ ID NO: 155891 - DNA, 1957 bp, Arabidopsis thaliana landsberg
atgtttaggatagttttgcatgcatgttgcatatttgtgttaatttcaggttattcagagctgttgacgagctaactggaagaagcggacctgatcatgtcaaaccactcgaccccctggtcgagtagatgcttcacgacttcaacagaccactcgaccccttggtcgagtagaatacctcagcacttcacgtcaccactcgaccccctggtcgagtatcatcacctccaccacttcaccttcactcggacaccctactctaccacaaggtccattcatcaccttcactcgatcactttaccaccaagccgagtaccaacatctctatcactcgactacatactcgactgccagctttagagtcttcttcatttcgcactcaaccagacactcgagcacaaggaagaaaagaagactccagcttatcactcgacctctcactcgacaacctgggtggagtacagttcttaattcgtctcaatattgcgtcgttttgagtattagggtttcagaatattttgctataactagcatgtactttacatttttgtgaacaagtttttatctaagttttatttcgcagacactgtgtgcttgaccttttgtaatccgaatttccctttatctattcagtattgagtatttgttcttgatttcgtttactgtttttcatcttgttaccatcctgctattactttgttgttatcatgctttcattccattcaacgtttatgctttttgctatgatgtctgagtagtgaataggtttctgaggatgggttagagtagtttagaattcttagtatgctaagtggttgagtttgatttatagatctcttttggattagttgttcttaatgcctattgctttttgatcaacaggaatttgagcccaaacatttccgcgcccaaaaggtgttcgatgaaatgtatgaaccactaattccagagattcgtggctctgtaccaaggtattggttgcagggagcgttttggctttaacttgttgattcgtaatgcctgttaggttagctctcgtcaatggtgattgagtctgggactaggttaacttgagggtctctattgcggtggcacttagatttggttaatgaacttgttttttagggaaaatttattgagcatgtcaatcacctgtaaactaaggaaacgaaactactcaattaccccatcctcgggaattctttatctgattgattttattgtttctctactgttgtttactgcatcttgtcatctgttgcttagtttctgcaattctttcttgttactcgacctcgtactcgatcacccagttgtctggcaacagactgtgcagtcgagtacctgtgttttattttctgtttgttactcgacctgccactcgacttcacccagtgctctgcaaagagctgtgttggtcgagtgtttatttgtttctgcttgattttctgttttctgcatgttcacttaggactgctagaacgcaccaaaacctgttattgcttggcttgacttagtgacttctgatcacatcttgattgttagcatcacacccatttggattgacaacctaaaatactacaacgacatgattggtgttttaggataattgactaaaaaacctattatcaatttggcgccattgccaattgggtgtttgtttgttacatttaagatttcagacttgcttagatcaagttcattttcaattttcttttcagtcactaactgtgtgttttacttgttgtcttcttgatccaggtacacctatgctgtatgcgaactcgatcaacaggaaatcagaacctccttttcaacgacaacatcaaccgcacagctcgcgaactcagaaaaaggagaaccacagttaaccttgtacctcagcaactactcgaaaagactgacgaacagaatcaacaaaatggccttgccaacattggtgatggagatgcaccac

SEQ ID NO: 155892 - DNA, 697 bp, Arabidopsis thaliana landsberg
gtgggttcgagccaccaacgagtttcttggcgtccttagctgcagtccttatatgcatatacagaaagtaagtttccgtttattagaattgcagtttagataatttaactcttctctctatttctttcttcctaagattatcaatttttttgcagattgtagataaaagaagctcagggtcagggaaacaagagccatcgataaaccaaggcccgtacctaaacattgcagaagacgggttggtggcagcagtcaaatatgagcaagacaccaataagaccacactgaagcagagagggcgaaagcctgaggaagatgtaacaaagaaaagctttaaagagctgtgtaggcagacaaaacagtcggtatggtggcttggttacataggcatggttacaagtttccctttacttgggatgctcctaaactacatcttccgtaagaagcaacgacccacaacaacatccacatcctgaagttgctttctttctcaacatctctattcactaattcttctatctgccacccatatcgattattgagaatgttaataatcaaataaattttttttatcataagcatagtaattatgtagagttttcataaaggaaaggagtggaatcgctcaaactcattttttgtcttattatttcggagaatcctttcattaaaactgactttgatcgaagatcaaatc

SEQ ID NO: 155893 - DNA, 643 bp, Arabidopsis thaliana landsberg
atttcataaacgtatcgaaggcttctgacaggctgaatcaaaaagatatattgattgtcttgtaaatcttacctcgctccacatatgtaatccgactgtaattgcaggacaactgatgatgaatcctatgaagattaccgaagtggtatgattgctagattgctggaaaacgatccctctctcttgtccgagacaaatgacttatggagtcagattgttgacaaaaggtaaggatctcaagggtttgaagttatgtgacctgtagtatctatagaactttcaatgatttacttggatccatatccacaacggtcactggcgaatgaaaatggagttaactctctcacaggtacatgtttgatttctcccacaaagaagcagaagaactaagaagtatacagaagaaagatgtgatcagttggtacaaaacctatttcagagaatcatcacccaaatgtcgtaggcttgcggtaagggtttggggatgcgataccaatatgaaagaaactcaaacagatcaaaaggcggtgcaggtcatcgcagacgcagtggctttcaagtcaacttctaagttttaccccagcctttgctaatgagaagaaacatacaaaagagttttgcttcgtcttcccttttttttatc

SEQ ID NO: 155894 - DNA, 1462 bp, Arabidopsis thaliana landsberg
tggtctgaaccaaactccacttgatggtgacaagccaagccttatgacattccgggaggtaaaaaatatcttaaattctatattgattgtgaaggaaggaaatgcctgagtatgtatggtagttggtaacaaactatgagtacacatgcccccaaatgtagttttccctgccctagaagttaaattggtacctgagaaaacttacttcatgtgtaattttattgatttattcgactattgtggattggtattcactcatggaactttacatattggtggcgtggagggccatgctatgacgaaattttacaatctttaggagtagcactagatagaccacttctcttttcgacctatatgtagctttccatacttgaaactttaggtgcttttggagaactcttacatgcatggtcaatgactcatgatccttgtctttatgacaatattattctgatttacaggtagagactgtgttccatgaatttggccatgctcttcagcatatgcttaccaaagaggatgaggggctagtggctggtatccggaatatcgagtgggatgcagttgaattaccgtcacagtttatggagaactggtgctaccacaggtacttgggttcaactgccttgccgaatttaatttacaaatgtttgggtccccgtgatttttgtcctcttacaaatacttttgcagtgctgcgtagaggcatttactagtaaatttataatgaacattatctgaatgtggtttcagggataccttaatgagcattgctaagcattatcaaacaggagaaactcttcccgagaatgtatacaagaagctactggctgcaagaacattccgtgcagggtcccttagtcttcgccaggtcagtacattatatcaaactgtagatgttcatatgtagtactaagcaagattctcttcttcagcggattgtacacatttcagtaaatttggctcttgttgttccagttgaagtttgctacagttgatctggagctgcacacaaaatacatgccaggtggggcagagaccatctacgaagttgatcaaagggtgtccataaaaacacaagtgatccctccacttcctgaagatagattcctctgtagcttcagtcatatatttgcaggtaacatccttaaacccgttttgttgtaacgcatccgtaaacgttagtcatgtgcagttatcgtaggtgcgtttgatagtttgtttcacttgttcaccttctcatgtcttgtcaggtggttatgcagctggatactacagttacaaggtaaaatatattcttttgtttctatataattcaccgatgcagcagttctattcacgatggttctctgctggtcaaatatctaaatacacttttgtggacaacgtgcagtgggcggaggttttgtctgcagatgcgttttcagcttttgaagatgctgggttggatgacattaag

SEQ ID NO: 155895 - DNA, 534 bp, Arabidopsis thaliana landsberg
gtttccctttctctttcgctctctgtctctcatattccgagaatctcggagtttcggcatctctgatattctctcttattcgtgtttcagattcattcgttaagaaagcagatcgacatggcagctcaaggtttgttattgattctcttattcttctctagctcttcctcacttgatgataacagtaatcgaatcgagttcacttgtttgtttttgttggtgacaggaggtgattcatatgaggaagcgttggctgctttgtcgtctttgatcacgaaacgaagtcgtgctgataagagcaataaagaggatcgctttgagttagtctttgattatctcaaggtttctcttttccaccccattctagaagagttttgaatatttattgcaccttttgttttattttctgattgaatacgcttcttgtaattaatttggcagctacttgacctggaagaagacattttaaagatgaatgttattcatgtcgctggtaccaaaggcaaggtaacaacaacaactttactttttctg

SEQ ID NO: 155896 - DNA, 594 bp, Arabidopsis thaliana landsberg
gtaacttcaatggaagattgcactttgattgcaggtttgataatcttcgaattccaagagagaatttgttgaatgcagttgctgatgtttcgtctgatgggaagtatgttagctcaattaaagatcctgatcaggtaaatgccaaccttggaaccaatttaaggatagaatttactatacttgccgagttgcagtgtcaatgtttataattttattttcagagatttggagcattcatggcccctttgacttctggccgagtcacaattgcatcaagtgcaatttattctgcaaaggtacagagttcagtagttttattttgatctcgtacataaatcttacgtaagatatgaacctgactgtttcaggaatcaatgtagttgattaagatttttactgtggcaggtcggattatctattgctataaggtactcattatcgagaagagccttctctgttacagctaatggtcctgaagtcctcctccttgattacccaagccatcaaaggcgactgctaccactcctagcaaagacgtaaggagctttataaacattgtagccatcaaattttgaagtgaatgcccgaaagaag

SEQ ID NO: 155897 - DNA, 320 bp, Arabidopsis thaliana landsberg
  unsure (1)..(320): unsure at all n locations
ggtgaaagagatgccccacccccggtaatagaaagagaagagtggaccaagactagagaagacatgtagaaacatctcaggaagntangagccccccgtgtaacaaattggttctagaagaactggagagacaccaaacgacaagtcagcataactttcttcttgagatggaaaacgagagcagatgatctaaatcgatgatatggtggagggtaaacaattttggtgacctcaggtactgcactagccgcagacccggatgtgttattagatgaatatgggcctctagaaaaaagtgtgtgtatgcaatagttagatgg

SEQ ID NO: 155898 - DNA, 2876 bp, Arabidopsis thaliana landsberg
cactagtgttcgtcatctttgttcgattgaagtttgggaagtggtgatggtaataggagcagcagcgcgtgtagccatcggcggttgtcgaaagctcgtctcgtcacatacctccctcctcctcgtctcttctcagtgtcgccaggtaaatcgtctgtcttctcaatcgattcttctgtatttacatatttactcgtggattcgtccgcagtctctcacggagaaaaggatcgagtggtttcaaaatcagaacaatggttatatatctgaattcagttttttctagtatttctcggatcttgtggtctcatggaggaaaagtgaattgggtttcctccggatgtttttgttaaagaacaaatgtgaatacgttatgataatgatactctgttaattcaattgattatcagatgagtatggacgcacaaagcgtttctgaaaagcttaggagttctggtctattacgaactcaaggtctaattggaggcaagtggcttgactcgtatgacaataagacaatcaaggtcatacaactctgccttttaccctctctctttgttttggggatgttattttggaatgctttatgttgacatcatgttttcttcctgacaggttaacaatccagcaaccggtgaaattatagctgatgttgcatgtatgggaacaaaagagacaaatgatgctattgcttcttcttatgaagcatttacttgtatgcttctcttcttcattactttagcttctttcttttcgagcttcttattctaccttaaactgttccgtctctcctgctcaatgtttgatggtcacttctattcacgctgaacattttgctctaatgctcttacatgttatcacattcagcttggagcagattgactgctggagagaggagtaaagttttacggagatggtacaatcttttatcccgtagcaatgcgttctcttttacttttgtagtgttggatggggatgtttaggattataaggttctgagccacttcatttcaccaaacacaggtatgacctcctgattgcacacaaggaagaacttggacaacttataactttggagcaaggaaacccactcaaggaagccatcggagaggttaatgactcatcttttatttgagaacattgaatgtgctgtttaggcttgtctcaactgtagcaatcgtttcttaaatgcaatatatgattctgcaatttagttaacaggtagcatatggggcaagttttattgagtactatacggaggaggcaaaaccgtgtatatggtgatataattcctccgaatctgtctgatcgccgactgttggttctaaaacaggtttccccattcatgcttctatatttaatacatgcagcttttttgtagtgacatagttctgcaccctaagcttaacttgtaggtgcgtagttaaataattgccaggctatctgggcttggaaacctgtgacttggctctgctttcccacaccttcccaagaatttttttttgcaattttctaagtcttgtagcaatgtgatatgaacttggagagccttacccttgctttgcgaattccattttatatgtggatattcctcgtgtacttttttttccatgcaatgtggctgtatttgtaatcgcaagtgtttactatacatctcaattgcttgactctcttgattttctttgcagcctgtcggtgttgttggtgcaattaccccttggaacttccccttagccatgattactcggaaggtcttgctttttttaccattccaatttaccttcttctttctgtaaatagctgcctagtacccagtgagtatgtagaacttttttcattaaatttgatgtagatggtaaatggtattgtaggtcggccctgctcttgcttctggatgcacggtggttgttaaaccatctgaacttacgcccctaacagcacttgctgcggctgaacttgcacttcaagctggagttcctccggtaatcttttatattaggcttgaactatacaaccaactagcgtctctggtcacatctagatggatttcctcatgtcagggaaataaccaataatgtgttaagttcgaacacagtagtctttccgttttacatgtaatctgatttgaatatttgatcagcccatctccaagagtttgtattgtcgtcaatgtggctactatctgatgtatggacccattgatgtaggattaagtggtttaaaggctagttttttacgaagtttcttttgtgctaatgaactctttgggcagaccatctctttagggttttgctcttttttttttttttttttttttggtatttgtaacacttcatgtttcatttgcattattattttcaatagggggcacttaatgtggtcatgggaaatgctcctgaaattggggatgctttgcttacgagtccacaggtttctctaatcatatttgtgtacattctgttatttgtatctatgccactagtagtgaattttgataagtatccttattaattgactgcttttgtttctcgtgctactcaggtgagaaaaatcacgttcacgggatcaacagcagttgggaagaagttgatggcagctgctgcacctaccgtcaagaaggtatacttaagcaacgatatcatgctatttaaaataatattctctagaatctagattgaataccccctggtacctcttcttttttattggtgtaggtttctctagaacttggcggcaacgcaccctctatagtatttgatgatgcagacctggatgtagctgtaaaaggaacggtcagcaatagtcataaggttgaaggcatttctttatccaaaagatgcaaaaacgttgattcatctggaattactcagaactga

SEQ ID NO: 155899 - DNA, 2342 bp, Arabidopsis thaliana landsberg
atgttaggtcttgattggtcttctggtatgggaggtctgaaatgtgttggccgtgctgacctgacccttagtggttcatttgctgatatggtcttgtctccaattgccagttcaaggcagagtggggtgtttttatttctgttgacaaatccaggacaactgcaagcatatgacgatacctctctggcttctatgatgtctcagaaagagaataagatttctgtttctccactgccatatccaatggttgtaccaacgatggatccacatatgacagtagcaacgttttctgcattaaatgtgaatgataaaacgtcattagctctttctgaggtagtctctcgacaaattttcctagttgtgcttcccattgtgaggcaattaatttatatcttattcctgatagatagtcttagctgcaaaagctcgaacccctcgtaccccatccggagaaagtgcacaatggcctctgacaggtggtgttccaagccacgttgatgactacaagcttgaaagactttacatggcaggatatcaagatgggtctatgcgaatatgggatgcaacctatccatgtctgtcccttatttatattttggagccaaaggtattaatgttataacttttcttcttttgagcttcatcttgaaaactcgtttaaacatttttttgagaaggtttgtttgcaataaataatttcatccttcaccaatgatcaggcaagtgttattgacataactggagtagatgcatctgtaacggcattttgcttctgctctaagacttcttgtttggctgttggtaacgaatgtggtatggtaagaagacctgtttctgttgatacctttttgatttcagcttagattctaatgtgcatctgattttctcgcttttctgaatctgtaggttcgcctatacaagttggtcggccatacaagtggaggaactttggaagttgttaccaacactgagaagaaaggtttggctattgttacaacgttgacactatggatttgttatgctttatctcatgctgttggttcattacttgtagctcaccatttgcatcaagaagatggtcctcaatggttggctgcgttttccttcctgagttccccagtgtgcaccctgcaatttgtacagtctacaagaaggcttgccgtgggatttaaatgtggcaaggtagggatttaacaaatgtttaagtgtcggcatacagctgttttctttagttgaaagtaaaattaagttttctttcaaaccatttcaaattttcatttcaaattacaggttgcagtgcttgacattggtgtgccgtcagtattatttgttacaaatagcttatctgactcaggttctccgatcaagtcactctatgtgaaatcctcttcagctccaacaggctcaaaaagtgatccaactgatcacaactccataaattctgaagatgatttactcttgtgtgcaatgaccaaagatggacagaccattcttttggatggcaatactgggaaaatacttgcctcttgcctgagacctctaaagaacccaactgcgatttgtatgcacattataggtattttatctgatactaacataaaagtgtgttttcttatgcatctagtattcataaaaataattctattttgcagagaactgctatgaaaactatgaaacgcccagtgaaaaaccagctgaaaatccatctgggaaggataaacatgagaacaaatctcatataatcaaagctagtgagagtcattcaccagacggtgaacagaatgctgtcacagaaacaaaacttattgatcagatatttgcgaattcattatttctcatgtgttctgaggatgcactgcgcttgtatactgtaaagtctctatctcaggtatatcacagtatttatcctttttatgatacctaaagtatcttgctggctctttctgataacaaggacttgctttcaatacctagggaagtcttgagagcattatggaggtaaatcttccaaggccgtgttgctggatgggaatcctaaaaaaagatggaagggaatgtgcagtactcctgttttaccgaacagggcatattgaaataaggtgactttcaaatatatgtcagataaaagttagttaccaaaatacaatcttgtaactatttagtctgaaggctactatagatggaccattgattgctcagaaagaatggtttcttaattgaacagatctttcccgaatcttgaagttgtgggagagagctctttgctgtcacttcttaggtggaacttcaagcctaacatggagaagacagtatgttcagataatttcggccatgtcgtcctg

SEQ ID NO: 155900 - DNA, 401 bp, Arabidopsis thaliana landsberg
tgtatagttgatggatgaacaacaagagaaaaatcagcaagaagttactctgcgtgaagagttagaagctatacacaatggtttggagcttgaaaggagaaaattgttggaggttactttagaccgagataaacttaggtcattgtgtgacgagaagggaacaactattcaagttagttataacctaacttttgtctttcttttgatgcttggttgaagttatttaatgatttattctatatatgctatagtccttgatgtctgaactgcgaggaatggaagcaaggttggcaaagtcgggcaacacaaaataaagtaaagagacaaaatcagaattagccgaaataataatcaggtgaatattatgtgtttaaatctaattcattgtgatcagtgcgttg

SEQ ID NO: 155901 - DNA, 1008 bp, Arabidopsis thaliana landsberg
caatccagtcccaaaggtttgtgttcataaagtctgtggtctttctaacctattggcaggttaaatttgcttactacttcagagtatttgatatcctctcttgccttttgctatcttccacgcatagttgtgttttctgattgtgttccatgaccctcttctttgcacagggtgttctcgttttccttgctgcaaaatctggattcataaagagtgcagaggcagcagctcattttcaaaattttataatatgtgtcgagatgctcattgctgcagcatgtcatttctatgcttttccatacaaggagtatgctggtgccaatgttggtggatctggcagtttctcaggaagcttatcacatgctgtaaaactaaatgacttttaccatgacactgttcaccaggtaaatggtttctcttgaagccatctttacttcagataatatacttttttcatattggttttctgatgattgttttattgcagtttgctcctacctatcacgattatgtgctctataaccatcaagatggtggtgacgaggggacaaagaagtaccgatcgagaacctttgtgccaactggccaagagatggatgcaatgagaaaaaacaaacctgtgtatgcaaacaagatagatggtgtttcagtctcaagtagtctatcttcagaggcaagctcacctaaaagctccagcgtaacttctgatcctgcacgctctgatgctgtgaaatcttccttgctggtggatgcctcagattctcttgaaacaatgtatgatatgtcgctcattgacattgatctatctagtttccccagcaatgtcccatctgcaagtgaaagtgggcctagataggagcagagaaaatgtagaaatcaccattaacaggtacaaaacatgctcctaatagttgtattcagatgaatcttctgaggtgtgttcttagttggaagatgttgttagttggagacttgaggataaatgaaaaaagcttataaacccattta

SEQ ID NO: 155902 - DNA, 387 bp, Arabidopsis thaliana landsberg
  unsure (1)..(387): unsure at all n locations
cttgtgttgttctttatctcttgatctctgagaagcctgtggttctgttgtctatatctattgcaggatgaggattataaacggtttgaagagagcttggacatggaggacctggaaaccgaagatcatcagggattgaaagactggtctctgtttccttctcatcaatatagtcttgcacctttatagatatcttgaaccattcaatgagcctaaaacaagaaccatgtggttttgtctcggctgttctgcgatttaactttgattttcgatgtgtatgttggattcaggtggacanagagcaaatacgcgtacttgaaccagcctgctcttggatctgcagattcactgaagagaaagaggttttcgacttatacaccaaactgt

SEQ ID NO: 155903 - DNA, 602 bp, Arabidopsis thaliana landsberg
aactttcccgaaagggaacatcgtcaaaaggaagtagcagcaacaatgtgatcaaaagggtttgtttagactactctgttggtggacacaatgctgctgtttcttgtgtagcgttttctcagtttcaggagaaaggtagattcttgatctcaggtggtaatgataaaacagtcaaaatatgggattgctttaaatgtcttgatccaaacaacaacaacaataacagagatctcctccatttgaacattaacctaagcaagaaggtaactaaaaactcacattgttcttttgctcttttctcttttgtctgattctgacatttattggggtttcttaaacaggtgaattggctttgcacgaatcaatctgattctgagaatcttgtagtgtgtgacacaacaagagtaattaaggtttactcaatctcttaaataggcctgatgggtccataaacatagactaaaagattcatctttttttgtcattgttattagactaaaagattcatttttatttttgacattagaatggttgcttgatctacaagttagtttatttttttgcttaataaccacattataaagaatgattacatttaatca

SEQ ID NO: 155904 - DNA, 470 bp, Arabidopsis thaliana landsberg
atggtgaacgcaatcccaaagcctatcaaggacatttgggacgtatggagcatccgaagtaccttaatcttcagtctcagtcttcaaacatttctcattttctttgcacctcagagaaaacgctcttccaaaaaggttttactctccctcatctggtcagcttaccttcttgctgattggtcggccaatttcgccgccggacaaatctcagatagtcaaggagatgacccagaacccggggaacccaaaaataacggcgaattgatagctttgtgggttcctttcttgctcttgcatcttggtggcccagatacaatcactgcccttgcccttgaagacaatgagttatggctcaggcatttgttgggtctcttctttcaagcagctgcaaccgtttacgtgcttttgcaatcgctacccaatgctctttggaaacccattttgctcgtgttctcggctggagttatcaa

SEQ ID NO: 155905 - DNA, 508 bp, Arabidopsis thaliana landsberg
cgatttcgggaacaagattcttgatttcgtagaagaaatgaatatagaagagcctcggaatggttacccttttgtgtatgtgattgataaacacattgctcaagttgatttacctcggttgtacaaagcggctgatgcgtttgtgttgcctacaagaggagaaggatggggacgacctatagtggaagccatggctatgtctttgcctgtgatcacaacaaactggtcaggaccaacagagtatcttacagagcggaatggttacccgttggtggtagaggagatgagtgaagtgaaggaaggtccttttgaagggcatcaatgggcagagccatctgtggataagctgagggttctaatgaggcgtgtaatgagtaaccctgatgaggctaaggttaaaggaaaacgtggaagagatgacatggtcaagaattttgctcctgaggttgttgctaaggttgtagcggatcaaatagcgagaatctttgatgagaaaataagaacatga

SEQ ID NO: 155906 - DNA, 760 bp, Arabidopsis thaliana landsberg
tcatctttaagcttctgaatcttctcagggtctgtctcattcatgtgtttcttaaattgttgcctcaccataccaaccactagctcagtgttgtgttgctgcaagacacaaacgtaaacataacaaaaagttcacttcatatatctcctccactccaggctatctaatcctaatagaaacacacaaatctctttctcgaggaatcaaaacagaagtgacgataatatcaatctcaaccttttctgcttgcagcacatcaacacatattttcaggcttcaatcaaactgcattcgtgtataacttacctcaagagaatcgactgacacaaatgaaaacctctctacattttgctctaaattactaagtgactaaaagtgaaagcatgtgaaggtaacgaacagtgaaataaactcgatttagcttcaaagtaataaaaatgaaattctttaatccaacattatactacaaacaagaatagcaatcaaaccaaacacaataccatatattctgagtcagacaaagcaggttcatattcaaagctcagagaaacaaactagttataaacctcacctgcttaccaataaatttagctctacgaagacattctcggtacaactgcgcataaaaaagagacaaatagatcagtgaaatagcatcaaggaaaggtaaaacaaatcacaagtcaatgtgggaattgttactgaccctaaccacattgttagcgagttcaggaggcagagaagtttgcagagacggcat

SEQ ID NO: 155907 - DNA, 789 bp, Arabidopsis thaliana landsberg
aagacaaacaaacaaaaatatcttagtgagcttaatcaagaacagcaatggcagacgaggtgattcttcttgatttctggccgagcatgtttggaatgaggacgaggattgctttagaagagaaaaatgtcaaattcgattacagagaacaagatctgtggaacaaaagcccgattctcctcgagatgaatccggttcataagaaaataccggttctcatccacaatggtaatccggtatgtgaatcactcatccagatcgaatacatcgacgaagtttggcctagcaaaaccccacttcttccttctgatccttaccaaagagctcaggccaaattttggggagatttcattgataagaaggtaatctatcttccaaaataagcttaaaaatcaaagccttcttaggcaagacatagacgttaatatttcgtataatgtgcttaggtgtatgcttcagcgaggttgatttggggagctaaagccgcagagcatgaggcggggaagaaggagttcatcgagatactcaagacactagagtctgagcttggagacaagacttactttggaggtgcaacattcggttatgttgatatagctctcattggattttacagttggtttgaagcgtatgagaagtttgggagtttcagcattgaagccgagtgtccaaaactgattgcttggcgtcaaaaggtgtgtggagagagagagtgtggctaagtctcttcctgattcggagaagatcattaagttcgttcctgagctaaggaaaaaacttgggatcgaa

SEQ ID NO: 155908 - DNA, 3670 bp, Arabidopsis thaliana landsberg
  unsure (1)..(3670): unsure at all n locations
atggccgtgtccgatttctacgcggatcatccaaattacctcacaagacttacgcttcacgttagagattccatggaagatactgttcaggcttcagctgcaggttcgttacttctctatgtcttgcttcagcttcccgtcattttgatttattacttattagttgcggttgaatcaaacatattacgtatagacatggtttagctaattactattttattgaatgtgaccaatattttagatcagtattaaaaatcaaagtatcatatggggggtatatgctaagagtcttggaaacgatttatcttttagactatacttcaaaaaccaagtgtattcttatgtggtctaatgtctatggtaagagcaatctcttgatagagaagtccaatttttttctcttctagaaattcatggtgacggttgtatggtcgcagaaatcctgattactattagtctcgttaattatatttaactcatgagtcttaatatattagatgaatagtcgaaaactattggtgacatgtcttatgatacctgtacaattttaactatttatgtaaattaatattgtcttattactttgcaactagagctcttttggactcgacaaacatggcttagccttataagttgtaactcttccattgaaaatggaagatattatatccaaaaacagaggatatttaacctttcttcttttctttatgttgcttgtggtgcaagcagccttggacctaatcaaaaccgagcaagtgagcgccatcatcggaccaataaactctatgcaagcagattttatgatcaaactggccaacaaaactcaagtaccgaccatcacattctctgcaacaagccctcttttgacatccatcaaaagcccttacttcgtcagagccactatcgacgactcatcccaggtcagggccattgcgtccattttcaaattctttaggtggagaagggtcgtcgcaatttatgtggacaacgagtttggtgaaggattcatgcctttcttgtttgacgctttacaagacgtggaagtcaagagaagtgtgatccctccggaggctatcgatgatgagattcagaaagaacttcgtaagctcatggagaggcaagcgagagtatttgttgtccacatggaatcaagtctcgctttacgggtttttcagatagctagggatatcgggatgatggaggaagggtatgtatggttaatgaccaatggaatgacgcatatgatgagacatataaacaatggtcgtagcttaaatactatagagggcgtgttaggtgtgaggagccatgtccccaaatcgaaagagctcggagatttccgtttgagatggaaaagaacatttgagaaggagaatccatcgatgagagatgatctaaacgtttttgcattatgggcatatgattcaattactgcattggctaaggctgtggagaaagccaacacaaagagcttatggtatgataatgggagcaccttgtcaaaaaataggacagatttggggaacgtaggggtctctctctatggtccaagtcttcaaaaggctttctcggaggtaagattcaatggtttggcaggagagtttaaactcatagacgggcagctccagtcaccaaagtttgagatcataaattttgtcggaaatgaagagaggattattggattttggacaccaagagatggactcatggatgcaacaagttcaaacaaaaaaacgttggggccagtgatatggccagggaagtcaaaaattgttccaaaaggatgggagattccagggaagaagcttagagtgggcgttccaatgaagaaaggcttctttgattttgttaaggtaaccataaatccgatcactaacaaaaagaccccaaccggttatgccatagaaatctttgaagctgctcttaaggaattgccatatttagtcattcctgagtacgtcagttttgagtctccaaataactacaacaatttggtctaccaagtatatgacaaggttagtttctttttttctacttacaaacaaaaaattctaaacattcacaaaatcatattgtaaaccatttccctaattttatgtcttttagatgttagatttataacacattatactaatatatgaagcagacatgggatgcagttgttggagatataaccatcacagcgaacagatctttgtacgctgacttcacgttaccgttcacagagtcaggagtgtctatgatggtgccggtgagagataatgagaataaggacacatgggtgttcctcgaaccttggagcttagagctatgggtcaccaccggttgtttgttcgtcttcattggttttgttgtgtnnnnnnnnnnnnnnnnnnnnnnnnnnnnnnnnnnnnnnnngccttagtaccagatcggcactagtttatggttcttcttctccaccatggatttttgcccaccgtaagttcttacaccaatcaagaatctaataatgataaatatttacgttttgtagcttttatctccaaacataattacattgtcaatattttttagatatctcaacttattttatgattgtaatgatacagtcacaacttgtgcatgtgcatataggtcagaatgtagtgagcaattcagcaaggtctgtggtggttgtctggtgttctgtagtgcttgttctcactcagagctacacagcgagtctcacctctttcctcacggtacacagtttgcaacccacggtcacaaatgtcaacgatctcatcaaaaataggcattgtgtagggtaccaaggtggtgctttcgttacagatattctattagggctaggatttcatgaagatcagctaaagccttttgattctgccaaagatgccgacgaccttttgtccaagggcaaatcaaaaggtatcgcagcagctttcgacgaagttgcttaccttaaggctatcctttctcaatcctgctctaaatatgtcatggttgaacctacatttaagactggtggttttggctttgtaagtaccttctgtttcctttctatgtatttttacaaaataaggggacaaataacacatgttttgtttccatgatcaatgtgtaggcattcccgaagaattcacctttgacgggagaattctcaagggctatcttgaatctgacacaaaacaatgtaacgcaacaaatcgaggacagatggttcccgaaaaagaatgattgtcctgatccaatgaccgctctttcgtccaaccgtctcaacctcagtagcttcttgggtctatttctaatagcaggcactgctatatctttttcattactcgtcttcgtggctcttttcttgtacgaacataggcacactctaggtgatgattccgaggattccttgtggagaaagctaaagttcttgttcaaaatcttcgatgagaaagacatgaattcgcatactttcaagaacagtgccattcataatataagttcacctatgactcacaagactccgagcccttcaactgtgcaaatcacaccatggccacaaagcccatcacaaaacagagagtttgagctaagaagagtgtcatttagcccgagcgaagaacgcttcactacgcaaccgataatacatcatgaagatggagaatctgatattgaatgtcgagttgaacaatag

SEQ ID NO: 155909 - DNA, 867 bp, Arabidopsis thaliana landsberg
cgttgaaccacttacaaacttaacgttataaataccattggaacgaacacatgagagaagaaagtacataagagggaaaaggaaaatgacttatggggaggaggagccggttagcccgatggcgcgtgtattccaatcgccgggcatagacttatgtgccgtgaccatcatgggtttcaaaacaaagattaatcccgacgttgttcttgatgccttgaagcaaaatgtctccaagcatcctcgtttctccagcatactggtacacttaaaacaaacatacacacacattcttacttcttacacatatagtttttgtttttgatactggatttaaattttactttctatagaataaaattttgaatattattaatcatataaatatcagcctttttaaatatatatgttttttatagacataagaactgtacttatgtcttatttgtgatttgacgtagtgtttggtttccatttgtcttgacttcacagtctgataatggtgcaaaatggatcgagaccgaagttagtgtagaagatcatgtaattgtaccatacatagacgcggaagagataggtgaaggtggacaaagcttcatcgatgattatatgtcacgtctcacgatgattcctcttgatagatcaagacccttgtgggacattcacatccttaacgtcaaaacctcagaggctgaagcagtcggttttataagatctcaccattcgttgggagatggaatgtctttgatttccctcatgctcgcatgtacccataaaacatcagacccagacatgttttcaaatgctattccatccatgaaaaggagagccacaatgtcgcacagagttaacacccaagactggctctag

SEQ ID NO: 155910 - DNA, 461 bp, Arabidopsis thaliana landsberg
acaatgataccaagttacgacccaaatgatacagaggctggtctcaagcttctcgaggatctgacaacaaatgcagaggctatccaacaacaagttcttcaccaaatactctctcaaaactctggaactcaatatctccgagcatttctggacggagaagccgacaagaatcaacaaagcttcaaaaacaaagtccctgtggtgaattatgacgacgtaaagcctttcattcaacgaatcgctgatggagaatcatctgatatcgtctctgctcagcccatcacagaactcctcactaggtaaacatattttttcaccaaattctacaaaaactatcgttatatactgttctgttaagaattttcgatatacttattagtaatttctttgagttaatattggatgcagttcggggacttctgcaggaaagccgaagttgatgccttctacagctgaagaat

SEQ ID NO: 155911 - DNA, 527 bp, Arabidopsis thaliana landsberg
accctcattgtgttactatagagatgcaggtattttttgtctccgagtttctcattgctgtctaatgtttctataatcttatgcccaaaacacgtttgtcagcctgatccagaaaaagcttctctagaggaagcggaggagaaaagtatcctaggaaaagttaaagcaagtatgacagaagaggatcttacagaactagcgcgtgccacagaggagttgagattgaagcaagagactcctgaccctcctgaagcactgaaatgcgttccaagtttaaatttgagtgacattccaaaagaacctatatatgttcccactgaggtgatgattatattagctctctgctgttgttggattccttttaatttttcagcttgatgctgatatggtgctttataggttggagatattaatggcgtgaaggtgttgcggaatgatctctttacaaataatatactctacactgaagtagtctttgatatgggcttactaaagcatgagcttcttcaactgatacccctcttctg

SEQ ID NO: 155912 - DNA, 829 bp, Arabidopsis thaliana landsberg
tgtttcagaagattgaaaatgtggaagtatgcttgtttggtttgttcgttcaggaatttgggacagaggctggggctcccaatgagcggcgggtatacctttcttatctggactctgttaagtatttcagacctgaggttcgaactgtgtctggagaagcccttcgcacctttgtgtaccatgaaattctggtaagccgttttatctctaatcccatcttctttaggtttcatgttttgcttcacgagtacatgaaacttatcattgttacgaatttgcagattggttatctcgattattgtaagaaacgtggttttacaagctgctatatatgggcatgtcctccacttaagggtgacgattacattctttactgtcatcctgaaatccagaagactccaaagaccgacaaactaagggaatggtatgagatcgcgactgttctgtttttacttgtttgtcagtgttatgtacatttgttggcactaatcacattcctaccttttcaggtatttggcaatgttaagaaaagcttcaaaagaagatgtggtcgttgaatgcacaaacctctacaatcatttttttgtccagtctggtgaatgtagagctaatgtaactgctgcaaggttgccatattttgatggagattactggccaagtgctgctgaggatttactacgccaaatgaaccaagaagatgatggtgagacaaagtttaatagaaaaggattgaacaaaaaggtcatatcgaaaagagccttaaaagcccgtgggccagttgggacctttctcttaattgcctccaagggatcgacttatgatgcaaaaa

SEQ ID NO: 155913 - DNA, 4307 bp, Arabidopsis thaliana landsberg
ggtttgccattgaacgctactgtttccgaccttaaaatcgaagctgctaaggcttttcacgaagtgtatgcaatgttcaagaggtttgaagttgaggagctcctaggttacggttctatagatgactctattaccctgaaatttctagttggcacaaacggggtcatacggattaaagggagatgctcaaaacacgggctccttagataccgcatggagagaggggtggataattggaaagttgattgcaagtgtggcacaaaggatgatgatggcgagaggatgttggcctgtgatggatgtggtgtgtggcaccacactagatgtattgggatcaataacgctgatgccctaccttccaagttcctttgtttcagatgcattgagttgtacagcaagaaaccaaagcaatctaaaaaagagcgtggatctagtcaagtgcccaaagctggctttgtttgtagaggtgagtcagctgctatgggcagtggatctaatttatccgtaacacttagagtaggctgactgtatttatgatctttctgtatataggttcttatctaggcacaaaactgcaaatggcttaaggtttctacccgtgattgtaactaacacatgaccacttcaagatttcaatcctaagcttaaaagtgttatgtaaacatgggattaagacatttatgaaagtcgaatgttttgttttgggatgctttgcattacctttccttcttcttttttacttgctcctcattcataagcctcaccagcatttccttgtatagtcagcaatctctaagcatcttccacattcagaaccaggtcactggcgtctgcctccatattatgggggtactccagatctgttatgagcaatcaagaagctcaaagataccgatctgtttatgttttaaaccatacaagagaaaccaactataatagattattaacttttcacataccaaaatatcaaaactagtaagcaaataatttgaacaaacttactggtagatgaaccggattctaccttcttactcggtgctgcacaacttcttaaatgacttgtccgagacaaggtttatcctcagggacaatttttgccttccttcagtataattggatggatgaacttgagaaaagaatgcaaggtgcgcaggatttgtctgcaattgtagatcaagtaaattattactacatagtaagtatttcaataatcactacagagaaataggatatcgaacgtaaaaataaatacactgctttcctaaggataaaaaaagatctataataataaaagcaagcttgagacatcaaatggaaacttgacctggaaagaatttacaccgaaataattaaaatattacatctagacctttcttagattgaagagggcacaagatgaaatatagttgagaaagttgaaattgagtagagcttaccatgattgtagcatacatgaggagaggcaagaactcatctgctcctgccagaatatggtcatttgactttgatgcatcaggtttctaatgagtgtgcaacagcttcaaaagagttgattttcagtaggtccttctgtgcaagctacaagaaaagccatgttaggcgaccacttaagaaaggagcactatatatatcttgcacttgaataaacttcccacgctttgtgttccacaccatcaaaaccgaaaacaacacaaagtgttaggctattagccagcacataccaacaaataaccatcatcatgaaacaacaagtagacatcaagcagattctaagcagttgtatcttgtcgacaatctgctgggcgtctcgacatcctcggtagaaggtgggaaagccctgatcatagttctttcctgacttatttcttcaaaccctacaatgatcagaaactacatatcacaaaccatattgccataaaaagttgctgatgatgatgaacacaaaagaggatattcatgtgatggccacaaagggtaatcaaactaacctccaaggcgcaattgataatttcatctgttccctaaaaggccgtttccatggcgacaaagaatttctgaagcttattgctgcgagtatcatgatccattgtttagaacgaatgctatgctaagaatctgtaaattatcaattcaattggtattcatacaagaacttgtaatcttcaccggaacgaaacaaaacaatataaatccgaatcatacaaaaaccttcgctttgaagaatttaagaatcctaagtgatcggtttcatacctcaagataaatcgaccaaagatcgacggaagcatcacaaccttcattcatccgagaaaatcatcgaattcaacagattgatttcggctcgtcttcataagaattgaaaaccctaaccctcgaagaccataattctctcgacggcaagattgaattgatgaaaaaagaacattcgaagaatcttccttgggagctctagtatctttctccaatgtttttggcactagaagcagccatgtgaaaacgataaagaagaagaagagaagaatcgtgaagaagatgaagaagaagaagcaatagcatcgtcgctgcaacaagaagacatttgttcagggaaagagattattaaccaaagttaaatttcgttaatagttaggttttcagtttcacaagtacgaagcctaaatgggccgtatctaggcccaataaaaattagatctgattactttaaaaaatcattaattcgtccgagtgaagaagaaaagggtttagggttcaaagaagaaatggaggagaatcgtcggaatccgtcggccggtatggaagttccagttgccggcggcggaaatgtcgtcaaatggattgagatatctgttccttcaccttctgtttcatcttctagtatcggtgctaattcaagtgaggacaatgagtgtgttcagcttcctttgtctgaagactacgcttctagctctgtaattggggaaccttcgatctctttcgtttggagaatcaacaagacgagtccaaatgctctcgagcttcttcagctctcagctaagtctggatttccaataacaggactgcgtttcgtctttgctcagactctttctccttttgcttttgtatacgccgatgaggttcgatttcactgtcttctgcattttttggatcttttagttttgtttgtgtgtgttgaacttgaaagctatgaaattgaatgtgtcagggtggtgatagtggtcgtcttgtctactttctttactctctcacgccgtctggtgttgtctacgttcttaaactctcgaatacgttagcatataagtctggttcagtcttcccgcttgatcatttgattcacttggatgttcgaccttacttgaacgagagtcgtgttactagtgttgctgcatcgcctggtttcatttttctcgggaggtccgatggttgtgtctcttgcttccaacctattgtgtattttcagaaatcttcaggtaagattactctgcattaccttagtatctcaatatgatgtttcttctagtctcttacttatcattgatttgtttctgatcaggaaaccacaaggagctgcgtgatgatacaggatttggtcgtctgtggggattcgtaaggcatgtcttttagtatagtcattagaaaaataatgttatcatgctgctttacttcatgtacttagaagaaataaactacgctaatgtaatgctatcttttgctatatgtcatatatttcccctgtcgtgatgctcatctaaataacctcttatagattgcaatgcagggggacagttgttgcagccgtgcaagatttatttatatcagaagttcatggaagaaattatctatgtgtgcttcatgctgacggggcattacgtgtctgggatattttgacttatagcagggttttatgtcagagtatagctgctaagaaccttgagggtaattatctgttagttctacttgtgaccattagttgacgttattttattatcttttaccttgttttcactctttttttcatgcttcttacactaggggttatgtgtgtgaggttatggttgggcaaagctgattacgattctggcatcattccattagctgtcttgtatagaaagagtatggtaagcgtttacaactgatggcttgacttgagtgtgacataggtagttatttctcttgttctaataaccttttcccaatatttgaagaatgacagcatggacgtgatcactgtatatggcctgcactttagttctgcggaggggatagctttgtctctagattctggattacagaatataccactggaagag

SEQ ID NO: 155914 - DNA, 560 bp, Arabidopsis thaliana landsberg
tgtcccctgacaaagtcgtacccacaaaccaagactcagacacagaacccaaaaaggagactgaaggagacgttccttctccagctgatgtcattgagaaggccattactgacgagaagcatgtagtcgaagaaccattaaaggatgaacaagagaacgtaagtgaagccaaagatgtcgttactaaactagcagcagaagatgagaacatcaagaaagatactgacacacctgttgcggaaggaaagagcgaagagactttgaaagaaactgatacagaatcagtagagaaagaagctgcagcaaacaaacaagaggaaccaattacagaaaaagtagcagaagttgtagaaacagcacctgttgctaaagagatcgatgaggcgaaacaacaaccagaagtcacaaccaaagaagctcctgctaagcaaaaacattcaaacagcattatatcaaaggtgaaacaatctcttgttaaggcaaagaaagcaatcattggaagatctccaagctctaagactatcacaactgaagaacccaaagaagaaatcaaagtctaa

SEQ ID NO: 155915 - DNA, 777 bp, Arabidopsis thaliana landsberg
atgcaggaccaatatgaagaagttgatatgattactaagggaggaaactatggttggcattactacgagggaactttgccatttcatccctcgagttcttctaatatcagcaactcaacaacaaagattgaaaatccgatcttcccggtaatgtggtacaaccattcagacataaaccaacaagaaggatcatcagcatcaataactggcggatacttttaccgttcctccactgatccatgcctttatggaacgtatgttcggctctttcctcttcttctctttatttaccataccagtattgtccatcaagaataattcctctgtttgtgttttaggtatctctttgcagacttgtacgctggaatgatttttggtggagctgaaactccagttggtagtggaaacttcacgagctctcatattccgttacaatgcgcttcggattcgccaatcccttgctcatctgaaacagaaccttcctcttcttcatctccaccaattggctttgtattctcctttggagaagacgacaataaagacatatacttacttgcaagcactggtgtttacagaatcgttggcccgagccgctgtaacttccattgctctcttgaaaacacaacgtcctcacctccttcaaaacagcctgatcgttctccaccgtcttcgtcattttctaaaaaactacacaacattggtactcttgttgtaaattacttagcttggtgtgttcttttggtagttatatagagaaaaaagaacatgttcgtacag

SEQ ID NO: 155916 - DNA, 504 bp, Arabidopsis thaliana landsberg
  unsure (1)..(504): unsure at all n locations
gcagtgattgaaaacattcaattgaaacaaaacatattcaaagaaatcgaaaaggtttgtnnnnnnnnnnnnnnnnnnnnnnnnnatacatctactatcgacctcgatgtaattggtgaaaagactaactcaaaagatcgcattgttggcgcacatttcttcaggtcattctgcgtttccaatgcctcaaaatttttatgcttttttcgtatttttagtgtaatatacaaatggtttgtctttttatagtccggcccatctgatgccccttctcgagattgttcgttcaaagaatacttctgctcaggtgattctggatctcatggcggttggaaaggccataaagaaagttcccgtggtggttggaaactgcataggctttgcagagaataggacattctttccttattcacaagctgcacatatgttggccaatctaggtgttgacttgttcagaattgacagcgttattacctcttttcgcttgccattgggccctttcca

SEQ ID NO: 155917 - DNA, 8428 bp, Arabidopsis thaliana landsberg
  unsure (1)..(8428): unsure at all n locations
tgcattgcgtccataaaaagagtggaatgactgttgtcaaaaatgaaaaggatgaactaatccctactagaactataactggtcatagaatgtgcattgattataggaagttaaatgctacatctaggaaagatcattttcctttaccattcattgaccaaatgcttgaacgtttagctaatcatccatattactgctttcttgatggatatagtggtttctttcaaataccaattcaccctaatgatcaagaaaaaaccactttcctatgtccttatggaacttttgtttataagagaatgtcatttggtttatgcaatgctcctgcaacatttcagaggtgtatgacctctatattttcagatttaatcgaggagatggtggaggttttcatggacgatttttcggtctatggcccctctttctcctcatgtttgttgaatcttagcagggtattgaccagatgcgaagagacgaatcttgttctcaattggccagaaaatagacaagaagcttcatgtcatatattacgccagccgaacgttcgatgaagctcagggaagatatgcaacaactgagaaggagcttctagctgttgtattcgcatttgagaagttcagaagctatttggttggatcaaaggtaactgtctatacagaccatgcagctttgaggcatctgtatgccaagaaggatactaaaccaagactgttaagatggatacttttattgcaagagtttgacatggagatagtagataagaaaggcattgaaaatggtgcagcggaccatctgtcaaggatgagaattgaagaaccccttccgatagacgattcaatgccagaagaacagctcatggttgtagagttcttcggaaagagctacagtgggaaagagttccaccaactgagtgctgttgaaggagaatctccatggtatgctgatcacgtcaattacttggcatgcggagtagagcctcccaacctgacaagttatgaaaggaagaagtttttcagagacatacaccattactactgggatgagccttatctttacactctctgtaaagataagatctacaggagatgtgtctcagaagatgaagtggaaggtatcctgctgcattgccatggctcagcatatggtggtcacttcgcgacgttcaagacagtgtccaagattcttcaagcaggcttttggtggccaacaatgtttaaggacgctcaggagtttgtttcaaagtgtgattcatgccagagaaaaggcaacatcagcagaagaaatgagatgcctcagaatccaatcttggaagttgagatctttgatgtatgggggattgattttatgggtccattcccatcttcatacggtaacaaatatatactggtcgtcgtagactacgtatccaagtgggtcgaagctattgctagtcctaccaacgatgcaaaagttgtgctgaagctgttcaagaccataatcttcccgagatttggagttcccagggtagtaatcagtgatggcgggaagcatttcatcaacaagggttttgagaacctcttgaagaagcatggagtaaagcacaaggtcgccactctctatcatccacaaacaagcgggcaggttgagatcttcaatagggagataaaaacaattttggaaaagactgttgggattacaaggaaagactggtctacaaagctagatgatgcattatgggcttacaggacagccttcaagacccccattggtacaactcctttcaaccttctctatggaaaatcatgtcacctacctgttgagctcgagtataaagcaatgtgggcggtaaaacttctgaactnnnnnnnnnnnnnnnnnnaggagaagcgattgatccaactcggtgacctcgatgagatccgtctagaagcttatgagagctctaaaatctacaaggagagaacaaagcttttccatgacaagaagatcatcactaaggatttccaggttggtgatcaggtgctgctattcaactctcgcttgaaactctttccaggaaaacttaaatccagatggtctggccccttctgcatcactgaggtccgtccttatggagcagtcactctagctggtaagagtggagattttacagtaaatggtcaaaggctcaagaaatacttagcagaccaaatccttccagaggtgacatcggttcatctccaggagcttcttgatgattaaaggagtaaaggagtcaagttagagactttaaacaagctcacttggcaggaagtcccatgactatttttttaaataaatttttactttctcgttatttttgatttgttttagttgtgtttgtggttctcaggaaaaaaaaaaaaaaaaaaggagtacgtgaaggtagagtaaaaaattcaaaacttttactctattgaaggcctagagatcgagcacattggtcgagtatggatgatgtttaaaacttaaaaacttttaaatcatcattttactcgaccaacaggagctacagagtcttacacagagttcatcaagtttacagcaaattttaggatttcctgaaactttcctagtgaagaaagagtaatgattcagaacaaagagacaagcgagggacccactgctgcaccctatgtctcccacgctcctaaccaacagacaagaaatccaactccttcttctcacacccactcgaccccctcaccttatcccatctctacactccactcgacctcggcgacatcaccctcctcacttatcacttactcgactttgttatctccacctcacctattaaactcgacccatcctcattcatcatcaccaacaaaacaactctcatactcccaaccactcgacctcctcaccaccctcttcatatactcgacctcatctttctccaaacaccaaactttttgcaactctctcatctcccatagtcgctcattgcaattcaagtcctcaagtgttcgtcacaatcactcgacctctaccccaagaccatcactcgaccgccgcaactcacttcttctccaaagccaccaccgacttctcttcttccgcgagttcaacatcactcgagttctcatcacgattgtcattctcacaaactttactcgatctcttcaccaccatcttcataaccgagtcactcgattcaacaaacgcactcgaccgctgcaccaccttctcctccgtccaagccgcaccacttggccgcttcatctctctagcccatacttcactcgaccacagtcccacttcactacctctcattcatagccacttcactcgattcactgcatctctctcatcatcgctcactccgattatcaccaagtactcgatttcaaatcatcatcaacttcaccgctttactccattcactcgacttcacggcaagagcacatccgcctttcaagctcacatttatcactcgacttcctcaagctcattagattcaccaccaaaacaacatcactcgaccgcgagttcaccaaaccgaaaaaaaaagaagaaatgtttttttttggtacactcgaccggttcacttgattggtttgtgtttttggtttgctgttactaacgtattaacacttatttttgagtttcgtctgttttcaggtttcatcatgagtaactacaatggagaatcctctatggaccctgattacaatgtggatgaagctgagtcctggtccgctagaccgagagagcaacatgtttaccagagcttcagggatgaattcgaacgctctgcagcccgacgtaatcagagaagagctgaaatcgccagaggaaagagggcgatgtcaagtagatatgagctgattgatgaggatatcgaaactgagtatgagccagagtcatggcgcaaggagacgaagctgctgaacaaacccgacgaggttacagtggaggagtatatcagattctttgagatgaatgacttctggggaacgaggtatccgtgttatgagactttagcccagctggggttactggaggacgtgcagcatctgttcgagaagtgtcatctggagacactcatgtcttacccttaccctgcctataagggggagacaatcgagtttctttccacgctgcaagtggagatgtatgagggactcacaaactttgagctggataccatggggttaggcttcttgacgttctcagtgaatgaacagcgatatcagctatcgatcaagaagttggaagaactatttggtttccctagtggaaagggaaccaaacccagatttgacagagaaaagcttaaggatttatgggccactatagggaacaatctaccgctaaactcggcgcggtccaagagcaaccaaatccggagtcctgtgatccgctactttcagagattggttgccaacgtcttttactccagggagtctacaggcaccgtgtctaacacggacatggagatgatagattatgcgcttacagggattctccgccggacgaagggaaagaatgtcttgagaggcgatctcaacaacgcaccaccagtaatgcctctgttgatccatctgtgtggatacaggaagtgggcgttgacgaacgggaagaagaaggtgagaggagcactatgcgtgggtggcattgtgacgccaattctggaagcttgtggagtacccctcaaggaaccagggttagcaccgaggatgatggacttggatcatttgcgccgatgtgagttcttggagtttgacatggctggcgaccttcaccgctacaggttcgagcattcatcgattagaatcgccaacattcttctcccctgcattgacgctactaggattctcgagggcaagaacattgacttgaagcctgcgcttcaagatctttatttcgagggcagtccgccaactgaggagataagtcacaccgaaagaagctacaacagaagatgttgatgagacagatgatatagatgaggcggagttcgacactagcatgtatcatttcagtgagcatgtacctccagcgaggcagagcaagagtttgactgaagctcataagaataacagtaaattgcagaaatggtgcaagaagcaggacaagctgatcgccaagtgcctcaggacaagtttattcattttttgtttctgtgattggatttgtcctgagtactctcttccaagtttattcacacagtggtctgtgtgatttaagtttgggggagggctcaggaagtgtgtgttgcattgtatatattcttgagtctgcattcatctaaggcatagaaaaaccaaaaaatttaaaaaatttaagaaaatgatttcacaaaaaaagagtgttcatgtaattgcattacatttaggattgagtctagagtgttttgatttaggattgttgcatgtgcattgtgcataggggataatgatgagatagccttgtaagcattttggttcaccggataaactcagtgccctcgttgcttgttgtctattgcataatcaatgaatttgaaataaaactgaaccatgcctagacagctctacacgaccaaattgtcatgatctgataacattccctatcaatttgaacctgaatctgatctttaattatcatgtctgcatcaaatttgaactcatggataccctaaaatacttggattttcttattcattttgatcactcttgttaatccaagtagctgactctccttattagagcagttaacccaaacccaaacctagactttctttcaagccctatatcacttgtgagtgtttgtgaggtcttattccgattaagcttggtagaaagtgttaggttcgtaacgacagagatagtgtctcatgtagttctagttcgcattcttcagactagataggactaggtgggcgcttatactttgggttgggatgtgtttcccaaaaaaaaaaaaaaaaaaaaaaaaaaaggggggttgattcaatgatgagaaaaagtaaaggactctaggtgaagtaagctaaagaagcagaaaaagtctagtaaagattttgggatttgtaaagaaaagaaagagttcttgttagctattgaagatgggcaaaagcccttggctttagaatgttaaaaacaggaatcttagttgttaaagaaatccaaatccgctagatgtatcaaagtgttgagaaagcttctcctagagttaagagaaaagaaaagaatgattagaaaaagggcttaaaagattcatgaatgcaaagggtagagttaagttcttgtattgggattggagttggattaccattagagcttcatttgatatattctgggtagatgggatcttatctctatatgcatagcttgggacctacctttagcattctaataaagcttaatcattttttgagagatccccttttactgaagcatattctataagggatcatctttgtctcttgaccttttaccttagccaaatgagttcattgatgatgcattgcttgattcacgttccagaactaatgaatgttaaagggattggtagatttgaaaacatgtgtaggtcgagtatatgagtcggattgattgataacaaggcatgtctaacgtttttaagtagaattcgatcatattgcagcttaaaactatcaacttggacattgatttcatctaatttatctggtgctttggctctgagtccccactttcaaacctcacctccagcttgttcttaattgcttgcttgagggcaagcaaagactaagtttgggggagttgataagtgtgtattttgcatgttttgagcatccatttgtcatcattttagcatcatatcatcactgttttataccatttcacaacatttatcatcactttgcatgtttaggatagttttgcatgcatgttgcatatttgcgttgatttcaggtgatttggagctgttgacgtgctatctggaagaagcggacctgatcatgacaaatcactcgacccagaggtcgagtaggagcttcaagatcttaagagatgactcggccaccaggtcgagtaggggacatcaccacttcacctcaccactcgaccccgaggtcgagtgccatcatctctatcaccagaccgtcactcgatcacttcactcgaccacgaggtcgagcgtcttcatctccatcacctgaccaacactcaaccacatcactcgacccccaggtcgagtgacttcatctccatcttttgaccaccactcgaccacatcactcgaccccctggtcgagtgacttcatctccatcttctgaccaccactcgatcacgccactcgatccggcggtcgagtgtccttatcccgttgccagaccactactcgacctcatcactctaccttgaagtcgagtaacaccatcacaccactcgactgcatactcgatgacaagcttcagagccttcttcattccgcactcaaccagacactcgagcacaaggaagaaaagaagtcactcgatctctcactcgaccacatgggtcgagtacagttcttaatctgtcccaatactttgtcgttttgagtattagggtttcacaatgtttggctataagtagcatgtacttcacatttttgcagacgagaagtttttatctagttttattccgtagacactgtgttctagaccttttgtaatccggatttctctttatctattcagtattcagtatttcttcttgatttcatttactgttgttcatcctgttatcattctgctattacactgttgttatcatgttttcatacgtttatgttttctgcaatgatgtctgagtagtgaataggtttctgaggatggggtagagtagtctagaattctcagtatgctaggtggttgagtttgatttatagatccgttctgtattagttgttcttaatgcctattgctttctgatcaactgtaatttgagtccagacatttccgcgcccaaaaggtgttcgatgaaatgtctgaaccactaattccagagattcgtggccctttaccaaggtattggttgtagggagcgttttggctttaacttgttgatttgtaatgcttgttaggttagctctcgtctatggtgattgagtctgggactaggttaacttgagggtctctgttgcggtagcacttagatttggttaatgaacttgttgtctagggataatttattgagcatgtcaatcacctgtaaactgagaaaacgaaactactcgattaccccatcctcgggaattctttatctgattgaattctttgtttactctactgttgtttactgcatcttgttatctgttgcatagtttctgcaattctttcctgttactcaacctgatactcgaccacccagttgtctggcaacagactatgcagtcgagtatccctgtttcactttctgcctgttactcgacctgtcactcgacctcatccagtgctctgcacagagctgt

SEQ ID NO: 155918 - DNA, 846 bp, Arabidopsis thaliana landsberg
atgtatagccgtaaaaactactttatctgaatcaattcttaaggatgctggtccttctatgatacgagacgatattggaaacatctcaatcaatgacattctcactggtggctcagattctaccagtatgtagtctcaaagaaattcgatggaaaatatcgttcttttcatgtgtattttatttcttgtttactccttttgaaaacttttgaataaaggggctttctttgtaacgagattacacatttaaaacaatcttttctgtaaatccatgaccttttcttcacctactttatagtggcttatacagtttcaaccttttctctttacatgcttgagtacttacgcagctttttcatcctatagcttccacagcaatgcttgaagagaacacggtcagcgacaaaaccagcgctaacgggtaagaaaggttcctttatctaaacattaataccaagtgaaggtcatctggttatcaaatcacagccatcatgcaagtagtttgatgttgagaaccataataagtttagggcttatgtttataatatgcaaacagtttattcgagccacctatggagagaatcatttatgattacaatgttactgttgaggaattcaagaaaatgttgggactatagaatttgaagaaaccagaaatatttactcattaactggtttaatcattggagaatgaaacaaatgatatggcatgtgaaaattttcatatacttgagattgcagatgcaattttccaacaggtttcagggctctcgacgagatatactgaggtatgggagtcttggcattgctctttcttgtgtctacttcgccgccaccaactggaag

SEQ ID NO: 155919 - DNA, 607 bp, Arabidopsis thaliana landsberg
ccgccacccaccaagaaagaagaagaagatatatgtgagaacttactgcagaattttgatcttgatcatgtgatggaaattcttatgagatttcctttaacctccctgacgaggttcaagtgcgtctctaagcagtggtcatccctcatttctagtcgatatttttgcaaccttttatatactacggtcacacgacaacaaccacgcctatacatgtgtttaaaggatgacggcgggcaccgtgtactgctatctatatcatcaccgtctcgaggcaacacttctttcgtggtggtcgagcaagatttgagcatcccagggatgggaggcttcttcttgaacgttgttcgtggcttgatgtgtttctctcgcagaaaaaaggcgcgtatctataaccccagcaccaaacaactcttgaccttacccgccataaagtccgacattgtagttcaacaaggtcaaacgaagcatcatccccggtattacatcggacacgaccctgttagtgatcaatacaaactagtctgcacggttgcgatatcctcgctattgccacgtttgggtaatctgaagtcagagcactgggtcttcgcactagaagctggag

SEQ ID NO: 155920 - DNA, 658 bp, Arabidopsis thaliana landsberg
tttttttacatttgaaaactattgcaaataaaccccaactttattttttgattttgtaatgacagaaacgttgtgttgcaattgagtattcacgaggagagaaccaggaagaaagcgcttgtcaccgtttctcgattttcaggtatcttttataaaatttacattagaaatgtataatatgatactattgggaaaataaacttgtattaaaaatttgattttcttaataggagttacttcgataacaatggacaaaagtgggaaaatgacaatagttggagaagttgatgtaccagctgtcgtgatgaagctaaggaagctatgtaacacagagatcgtttcagtcgatgatgttaaaccacctgttaaaaagcctgaacctgagaaaccagctgaatctattgcatatcctgttccgatgaactacgcgtaccaattcaatcctgcctatgcaaattcttactatcatcaaccatacggaaattgtagagtggtagacgaaccaaattgtgtgattatgtgattgttctagtgttatttcaattaatgttcagttatttaacacttatagttttgatagaaatatgtaattttttcttagatactgttgtaatatgtaattttttgtcatcgttgtaatatacatttctcttgccaa

SEQ ID NO: 155921 - DNA, 531 bp, Arabidopsis thaliana landsberg
atgcagacccaaaaggcaaggtaaatattaatttttggctttgtatagttctttgcatttatagctgattcttcccctctcttgtgattgtcttgtgtgagttttgcactttttcaacgctgaatcttgaaggttacattcttgtggtcctgaatacttatttcttttcctatttaatcaaatcttatcacaaattttctctaatcttttatcgaacaagaagaccaaatctatgtagcaacaagtagtgaccatcaatgatctcttttggttttctgactcatttgcttgcaactttggagtgtgatatcttcttggtttacaatttgtcattcttttgtgttttgtgtcagaaatggatctccggatgttcctaagaaggtgtctcctcgagctgctcggccactgaagatcgcagcgctagagcctgaatcctcttcatctcctatctcagctactaacagaacaccaaaggataagagtccaaaagttctaaatcgtaggtctcctcgaagccctgtctctgaggta

SEQ ID NO: 155922 - DNA, 569 bp, Arabidopsis thaliana landsberg
tttcatgatgagtgttagggattaaactggtaatttgttttttgtttgataagatctttatgtgtttaagggtttgggggcaggtgggtgatcgacctttcacagatatcgtttacgggaacagaaacggatttctaaccgtattaaccgagcctttgagtcgagctgaggagcctttcattgttagacaggttggtttttatctcctcttccttaactgtacactttggtttactgattcaggggaagtaagcacataactattttctgcatctcacttttagctttccaaaaatgttgtacaatatagctgaatggggttatttcattttttttgttgcaggtgaggagattagagttggccttgttgaaacgttggttgagaaaaggtttgaagcctgtggatcatagtttggtatcagatataacacagtttgttaaagttccatcagatttgtaagaaggattctcattttgctattgcaacaacaactttgttccttgttttttttttgtaattgaaattttgagtttgggttttggccaaatgcatcatgataaaaaatgcc

SEQ ID NO: 155923 - DNA, 1175 bp, Arabidopsis thaliana landsberg
ccatcttcgtctctagatgctgatgtatgaagaatacttgatttcaattttcaacgctcctttttgattcgagctgaatttattggatggcaattggcacaaggtttcttcttgggagtttcaactgcttgcttggaacaatgaaagtggcttctttgttaccgctattactcttggtttatgtttttgatctgcacaccacattgtcaggtgcatcttctcatatcttattgtcaatgtgtaaattttgaggcctatgcatcaaaaatatttcgtgatgaatatcaagctaccgcaacgtcagctgtaaggttctccatatcatacattgtatatgtgttgactgactactggccgcatcaaatgtctaactctacgtattccatgttagcactgcttggctcactggactgaacattggccctgctcttggtggatgtttagctcaggtaagtcgatcgtatctaagtttttatattttcttagctttccaaaccttgccatacgttatgatataaatgtgaagcttatcatgtgtccatctctcttcctttgctacaacttgtttgcgtattcattgattcatatttagctttctagtgttctaattaatgcttttcgatgttctctaacttcagccggcagacaaatatccaaatgtgttctcccaagaatctctttttggcaggtgtccattcatactcctctctttaaaagttgtgtagaagggatctaatatggaatctcatgaaataatatgcgaattctgatgcagattccggtatgcattgccttgctttacgatttcagcttttgccttgcttgtgacagtactatgctgcttcatcccggtactctattttctttgagagcgttctgagaaccttgtattcattgatgactcttctttattaatatatttcgtacagagttcactcactagtctcctttttttctctgagtaggagacactgcacaatcataagctggacagcttatcacatgatgattcatacgatatacttgaagctgcatctcatgaatcatctccttctaccgggaaggcaggaaaaaacgaaagaaaggcttctcagtctctcttgaagaattggccgctgatgtcatctatcattgtgtattgggttctgtgtcttcatgatactgcatactcggag

SEQ ID NO: 155924 - DNA, 862 bp, Arabidopsis thaliana landsberg
aaagcctgcagaccaggctttttatggtatctggcccagccaaaggttagtaattattttgaaaattttcatttcagcagtaagcttatataatatagattattagttagccaaaaagccttgactaactgcaagctttcccctgggtttgtttggtactgttttttgatattagctttgttgcgaaacatttttcaattttcactgcataagtcataaagttttccgatgctgcctatgtgactacttttttcatggtgtttaataaagcagatgataaatgacctatgaagtaaacatacttttacgctactttaccctgttctgattccttaattaactaaccatcgtctatgttggatctgtggttattatcgtccaatgcatttcaatttggattgaacaatcattgtagtgaacttgtaatgtacagaacgttctctgtgattctgatacgacaataccatttgttattctgatatgcatctagctgttcaattaagtattgttcactctctaagtttgcttacaatggtactgagggatctgttgtttaacatttgcagtcaagttgtaaagccacgtcgtcctctgcaaaaggatccagaattggattatgaagttgatagtgatgaagaatgggaagaggtaggtttattgaattcagtacatgctttttaaacttgacaaaagatcactgggtaataaagatacttctttacaggaagaagctggtgaaagcctttcagattgtgagaaagatgaagacgaaagtttggaagaaggatgttcaaaggctgatgatgaagatgatagtgaagatgactttatggtgcctgatggatatctctcagaagatgag

SEQ ID NO: 155925 - DNA, 601 bp, Arabidopsis thaliana landsberg
ttattgcagattctgcatgagtttgatagggagcaacaacgagcctttttgcaatttgtaacaggatctccccggttacctcatggtggtttggcgtctctcagtcccaaactaacaatcgtccgcaaggtccagtggactgaaaaaacttctattttctcacattgaatgaaatgctctcttctcttttctcataggctttttcttttgttgtgcaacagcatggtagcgattcttcagatactgacctccctagtgtgatgacatgcgccaattatctgaagcttcctccttattcatccaaagtgatatctctctcgtgaatcttttgttaaccgccctcttattactcgtggatttctctgattaaatagccggtctcatgatcaatctcactgtgttgtgtttctgtctttttcctgtctgtgtgtttgcaggagaagatgaaggagaagctgatttatgccataacagaaggtcaaggttccttccatctctcttaagttaggttcttgttaaaagttagcagaagcggtagtggaagagaagagtggattgttagaagagacgaaaggaagctcttcttctcctttttaacatg

SEQ ID NO: 155926 - DNA, 261 bp, Arabidopsis thaliana landsberg
cttatttgaattagggatgagactttgtaaagctttcattttttcattaattctacttctcctcctctgttacaagaaagataaacataaatctcaaataagaaagtttctacttttgggagagactctaaaccaaaccttctcagagagattatgaacttcagcagctctgcatcttttagatgaactacgagaagaaggacctgacttggaagagggagcttcatcaactacagcttctcctccttcctgtattttcat

SEQ ID NO: 155927 - DNA, 996 bp, Arabidopsis thaliana landsberg
atgcatactacgcttggtgacattcacatgaagctttacccagaagaatgtcccaaaactgtggagaatttcacaacacactgtagaaatggctattacgataaccaccttttccatcgggttatcagaggatttatgatacagactggagatcctcttggggatggtactggaggacagtcaatttggggcagagaatttgaggacgagtttcacaaaaggtaaacatttcttacaggctgctttgagtttagccatccgtttagaaacaaatgaaatctaacttagtttgatacgttgttcttttacttggcctgcagtctaaggcatgacaggccgttcacattgtctatggcaaatgccggcccaaacacaaatgggtctcagttcttcatcacaacagtggctacaccgtggctagacaataagcacactgtttttggaagagttgtgaagggaatggacgtcgttcaggtatgatttgaaaaccaaaaagaatatttttacttgttggcttagtgtgacttagtgcctaaccataaaaccaaatgaacagggtatagagaaagtgaagacagacaagaacgacaggccttaccaagatgtgaagatacttaatgtcaccgttccgaaatcttagcatctttgatactgtctcaaagatagtgaacaatctatgctgatccgtaaccccgtgattggttctatgctgggaagttgttcttgcggagatggatcgaactgtgggatatgtttgttgtacccgagcagatcaggttaagttggtggcatcatcttcttgacactaaacattattttatgtttttgtcaaacaaattttatgagaatgcttagtgaacaaaaagacttcaacttctaatgttacttcaattcctcttattttcttgtaatagagttgatctactttcttctaatttatccaagcttcatgggtttatgtctgaaacgacaacaccaatgtctgaagttaataac

SEQ ID NO: 155928 - DNA, 457 bp, Arabidopsis thaliana landsberg
ccgcttccgggtctccgccagaatcacgatcccggccaccgtcacgccgatcactacccaaactttgggattcgaggcattgctttgaatcaaagaaagcgttttcgacataacgcgatctcacgagaaagagagagagagagagagagagagacaagggttttaggcgggtttaagagagaaactgggaaagaatcttacgagagagatttggaagaagcaaacacagatgctatcgtgcgcactgtgtctaaacccttttaattacgagtgatgacttggccagccgtgaactcaagtccgtctgcccaaggcgaatcttctctttttgattgattaataattgtctttacgaaatcgataaagaaattaaaaaaaaaaattaaattaagaaaaatggaaattttaattttaattcctttatttattagaattactcgtttcaattttttttaat

SEQ ID NO: 155929 - DNA, 362 bp, Arabidopsis thaliana landsberg
gtccaatacatctcctctctacccaaaagcttataaattttctcattcaaattcgaattcgaagagattttcctctgtgcgtgcttcgtttcctgtttctgataacaagcttaaatttgaatacacaccatggctgatcgttggacttgttaaccctggattaaagtattacggaactaggcataacgtataaatttcactcttttacattcaatttttgatgtttatgaatcaaagttctcttcttttttgtgattcttgatctgtttttgttatgtctagattggttttgagatgattgatcatatagctcgagcaacggatatttctatgaacacaattcagttcaaggctttagttgg

SEQ ID NO: 155930 - DNA, 716 bp, Arabidopsis thaliana landsberg
  unsure (1)..(716): unsure at all n locations
ctgttgtgttcctccttcctgctacacttatcatggaaaaaaatgttgttggcattacaattgcacttgccagagacgattttagaatcgtttggtatctgctattcaattcggcgctagcttattttgtgaacttgaccaatttcttagtcacgaaacacaccagcgctctgactctccaggtaaaaacacatctcttctttctatacatcacgtcgatcatctaaagccattctgcatctgaccatgtcttatcacttttctgtgataggtgctaggaaacgccaaaggagcagtagcagtggtggtctctattctaatcttcaagaatccggtgtcagtgaccggaatgctgggttactccctcaccgtctgtggagttatcctgtacagcgaagccaagaaacgaaacaaaaattagaacactaaacacacacaaagcttttacttcttcttcatcattcccccctatatatatgttttatattttctcccctatggatatacaggcaagtagtctcttttgctgggccaaactgactcttgtcttaatgaaaagctgggccaaaaacatctcttttttttggcagaaacagagaagcaaagccacacaaagattgattaccaaaggcaagaatttagagaacttcctcctatgaataaggtaacctnttggttttcattttggtctttcttctcggattctcttgcctttc

SEQ ID NO: 155931 - DNA, 424 bp, Arabidopsis thaliana landsberg
aagtaaagacgttgtttttatataaaattgttcgctgcttattcactgaaacttttcaactaattttttgtgcaggtcgagaacaataggagcacagaagcttatgtctttgaccactcaaacatggcgaggcgtgctttgaagaacacagctctaggtttgtgtcccagagccatcctttaatagaaggagatgctctcagctctagtcactaacttgactttgttttgctttgttaaatactccagcttatcttgcatctctcgaagatccagcatatatggaacttgcactgaacgaatacaagatggccaccaatttgaccgaccaatttgctgctttggcagctctatcccagaaccctggtaaaacccgtgacgacattcttgccgacttctataacaagtggcaggacgattacttg

SEQ ID NO: 155932 - DNA, 518 bp, Arabidopsis thaliana landsberg
agggggactcgcttcacctggcaaccctttttaattctattcaagagaaacataaagtcggggaccttgtatgcattagtgggaaggtaattcctttgcttccctgaaagttgtctttgtatgtgtatgtattgcttgctttggtattttacttgcatatcagactgcctcataagtctttagctctcttcttcaagtcaacttttcaagcttagacttgttttagcacgataaaagatccctaaagaaacagatttacgaggaagaaagtttttggcaactatgctaattcaataatctgttaataatctcttctacttctaggtaaagtcattgcgtgcagaagatcattttgaaatgagggaatacaatatagatgtactcaaagatgaagaagaatcatctcatcgagcccaggggagaccatatcctatatatccttcaaaaggagggttgaacccaaagttccttagcgatgtcatctccaggttttgattctcttttcttttccgtgatct

SEQ ID NO: 155933 - DNA, 379 bp, Arabidopsis thaliana landsberg
tcttttttattttttccatatacacacataatttggagaaaatacttaataacaaataagtttcacttttgttaaatacacttgctaaaattatttttatctaagaaagtccaaaagcaccatttcaaaattaactgatacgaagtgaaatggttcatgttttttatatactagattgcatttttttatgaaatgtttgatgcattctactttctaacaggaggaacgtctgggatcggtgcggaaactgcgagagtgttagcaaaaagaggggtgagagtagtgatggcagtaagagatatgaagaaagcagaaatggtgaaggagagaataataagagagaatccagaagctgacattatgttattcgagatgatct

SEQ ID NO: 155934 - DNA, 1301 bp, Arabidopsis thaliana landsberg
ttatttcttgattctagatcctctctcgaatcggggatcgcgattgttaaccaaaagcttgagtttttgttgtgtatctgacattggattaacagaaaaaagcagagattccaaactagggtttgagattgtatccttcattactgtgtcgtcttcttcttcctcacaaagtttgcaattttgttttttggattcgtaacgttcacaaagagaagaagagaggctcctaaatattttgttgtatttacgcttttacccttcttaacggtcttattttattcaccgttgaccaaaccggttaaagagagaatttgcatattggtttattcatcctccttcgcttattagacaatcagtagtaaacaaattcaccgactaaaccaaaaattccactaaaatacagattcggtttaacttttgaacttacaaagcatcaaacagtttggggaaggcagatgcttgtgtggatgtgtatcagaaactgaccaagtcccagattgagacgttagaggttaatttagtcgccgggttgatttcagctggaaaagcttctcaagtgcagaaaacattggagagtttgaagatcaaaccaactagtagttttgagttggcttataatactgcttgctctttgattgaaaacaataactatgctgatgctgaacaacttttgctcactgccaggaggtatatattctctcatctgtttctgagaaatttgagcctagtattttgggatatatagatgatttcctttctctgtatccttatcaacatttcaagtacattgaccatttgactattgatttcccaagtcttgtacaatgtacgcatacctgataaatgtactgttactttgagacagaattggtcaggaaaccctcaatgatgacgacatcgctttaaccgatgaagaaggggagattgatctgtccccaattgctgttcaattagcatatgtccaacaggtacttttatatgctgtttgtcctctcctaaacatcttgtcaagatatattccagtgcctagtaacatagtttttttcctttatcagatccttggacaaactcaagaatccaccagctcttatgtagatttcattaaacgaaatctggctgatgaaccttcacttgctgttgctgtaaacaaccttgttgccttgaaaggtttcaaagatatttctgatggcttgaggaagtttgatctgctgaaagacaaagactcccaaacttttcagctttctcaagcacttgatgcaaagctttcacagaaacataaggaggctatatatgccaatcgc

SEQ ID NO: 155935 - DNA, 451 bp, Arabidopsis thaliana landsberg
ccttgcttcacggcgtgtacccttttgcgcaaataagttcttcgacactgggcttggtttcagtttggtaatactgtcatgggctgtaaatagactcagggaggtgattgttcatgtcaataggaaagcgaacaagccatgttcaagtttgaaggatgacgaaatcataaaaagtgtggagagaagtatgaaggaggtttactacagagctgcaacggtaatcgcggtgtttgcgcttaggtttgcatgttgagaactcgcggtgggaggtaaaaaatcttgatttactactccatggaaagcttctaaaagatcttgtaaatgactaaaaagttgtttagtactgagctgtaaatgtgaagatgatattgtgttgtagaacctaaagattaagaggtgaagaattttgaagagaataaatgttttgcaagaatgcgtttgttccatcact

SEQ ID NO: 155936 - DNA, 350 bp, Arabidopsis thaliana landsberg
tattcacggttggtgcgtgaagcactgtgtgagctggagcttccctatgtattacacaacattggagaagggtccacacggatgaaatcacttctaaatgcttcaggatccaataaggtccattttctcgtccgctctttgtctatatcagaatctacaatcttacaaatcacttatcaaaaggctgcaactgctgatgctcaatacaatttacaggttccattcttggttgatccaaacaccggtgtccaattaggtgattacgagaagattctggcttacctcttcaagacatattcttcagcagcatctgcatagtccatagaacctatacatcattattcccaagg

SEQ ID NO: 155937 - DNA, 4098 bp, Arabidopsis thaliana landsberg
ttgatcctgaaagagggcaatcttcaaattcacagcatggtttaaattttactcagcagcctatgaggtcggagtactccagaagtgtattacaagaaccccagcaacccacaaatggttacatgcatgggaatcttgggttgcagacgatgccgaatgaggcaaatgttttgggaatggatgtagagtcgagtagggataagttgtcagagagaggattcactccagatcttcataaaattcctacgaggtttgaaatgggagaatctccagttaattatgatttctttggtggtcaacaacaatcaaacacacagctccctggcatgctccagcctttgccaaggcagcaggtgtcattcaatgatatgcaactactgaagcagcaagttatggttaagcaaatgcatgaatatcaaatgcaacaacaacttcaaaagcaacggctagaggcaaggcagctcaattctttgaatagaaatgcagtcaatggaagttgcgtaagtgataaccaatcacatatgattaatggcatccctcttcagaatgcgtctagtaactggttgcagccagatctcatgacaggaaatacaaactggatgcatcgcggcatctcgccagctgttcaaggttcatccagtgggctcatgattacccctgaccatgggcaggcgaacttaatggctcaacaatttgaaccttccttgtacggtatgcctgttagtgggacaaatgcacctcacaatgccttttcttccagccagatgaacagattagctgcacagcatggttctgcaaacaggacttcctctgtcactaatcaacctacttcatttctgaatcaaggtgatgtacaggatagtcatatgctccctagatccacatacccggagaaattattgttctcccagacatcagttccaagttcaaatagtatgcccaattttgaaagtttacaggaagatgattcccgtgaaaggaacatttcagtccaggcgaaatttggtcagatggagggttctggtccatcagaacaatcatttattaaagcgcctgaaaatataaatgcattgcagaagtcgtcagcattagatcctactgaagaaaagattttgtttggttctgatgacaatccgtgggatgcatttggaagcagcactatattaagcttgcaagaaaaccttatgtccagtagttctgccctttttgatgaatgcccctctttccaaagtggaagttggagtgctcttatccaatctgctgtagcagaaacatccagtgatgacgcaggcgtacatgaatgggctaataacagtactggcccacatgcaaattttcatcgtggtaatatggcccaggatttgggtgcaaagacttcaaatacactaagcgggagagtccacagtgattctactcggacagctgttcaacatttgcaagacagaggaaatagtgttgcagataatggcctgctggaaaattcaatggctcaacgcaatctaatggctgaaaatattttccattcttcaagttctggtgtcgatgggcagaacaattcgtgttctattagaaagaatgagggtgttgaggatagacttggtatctggaaggctgcgtcaaatccaaatatagttgctctgaaggaacaaaatccttcaatgcaaaggacaagctatggatttggcattgctggtgcaggaaacgattctaggcatttggataataactctttggagaaggctatccctcatctgaattctagagacggcagtcagattcttgagtcatattcgagtaataatgctggatcaaatgaaatggtaaatacccgtgatttgtctacgttacctggtgggaaagaaacacaatctggtcatgttggtgttaggccgtcaatacctcgcaaatttcagtatcaccccatgggtaatattgatgtcactgatgaaccttgtcgaggaaaagtttctcgttttgggcagtcacagtctctaggtcagcctgctatgaacactctaactgacaaggtaaattttatcctttggttttcattgtggtttagaaatttgaatccatctgaacattattttggctttcattatgatagggacatgtttcacaaaatgacttaaatcgcacaaataaggcttttaaaggcatgggtccagaaaattcaccgagtacttctgcgtcagccgacagaagtgttgataggtgtaatcaagtgaatagtgcttcgtcaaggtactgttcatttgtaacttaatttatttagtgttgataggtgtaatcaactggcaaagttacctaaaactcaaattttctcattgagatgtaatttctcactcgtggtaattgctacgaatatttgtaatttgtgctttgcaattgtctttctgaaagaaatttcctgtgcaggcttgagcttcttcacaaggtggacccgtcgccggaaaattcctcggaaacaaatgttactgggatccatgaagcaaatgcctttgcagactatggtggtcaattccggcataatcaggcatctgcttcgcaggggtttaatctacagttggcacctccatctcaactagctccctcacctgataacatgcagttttttcggaattctttgcagccattgaattcatttcatactggccctgaaaaaggaggaacaagtcagtccaggtttgctccgtggggatctaatcaatcttttcatcaatccactcatcaaggaccatttcctgcaatcctagggggatccaacatgacttctggtttcccttattccagagggaatcaccagaatcaacagatggctgttggtacccgacaatcagctgctattaattcagtcaattcatcttctgagttgtctacccctgcagtgaaagaaagagatgaaagtagtgactttgatcaacgtggacattcagctgaaggatttcgtatgctgtctgcttctcagcctctggtggcatccagctcgcctcagcagaattcctcttctggtatgatgtctgacccaccagccggtatttcagcaccacaacttcggttttggaaccagcccttgcctcagtcagatattttacggccgcatccatcgcccggcaacaacatggcagttagcttctcaaggcaggagaagacaaatcaattatcctcccaaaatggagacgtgtcattaagtgggagggacatagtgaatatgcatgagttacagagtaaagatatgggtgcaaaacaaacatctaatgttgcttcaatgttctccaaaatggtgcagagcaataatcaatcctttggtcgctctcttccttcaaacaactttccaaaggatagcttacgtcatgatgaacaaatggctggaagtggggagggcgatgcacccaagatgactgtgaagagagttgagaatagtgctattgatcctcaaaaggtagctcccaaaggggagcaacagtcaccttcaaaatctgatagtttagttagagatggattgaatcacagggaatcagtgaaccacatgccgtattttggccaaaatgtaactcagagtttctcgactaagaatcattcagcctcggttggagcagatcatcaacaaatcagtcctcagatggctccatcctggtatagtcaatatgggacttttaagaatggactggtgcaacccgtgaatgatactgggagattcacccccttaaagataggagaacaatcgtctaatgttggaagttcagttgatggcacacactctgttcaattgtcacagcactttaaaatgcagcaaatgtcaggctccacactaggagcagagattccctcatctgagtcattgcctcatggtgcaaccgaacaacttctgaaggttaataaaccaaagaagcgcaaaaccgccacatcagaacttataccttggaataaagaagtcatgcaggggcaccagaggcttaagactctcgggtatgtggcattagcactaatagtcccttttttttctttcaatatcctttaccgtaattaactttctacattattttcagtgaggccgaagttgattgggccagagcaaccaatcgatttgctgaaaaa

SEQ ID NO: 155938 - DNA, 709 bp, Arabidopsis thaliana landsberg
tgtgatgctaacaatcaagatgtgatcagaagtcactaagtcaagccaagcaataacaggttttggtttattctagcagtcctaagtgaacatgcagaaaacagaaaatcaaacacaaatagtaaaacactcgaccaacacagctcttggcagagcactgggtgaggtcgagtgacaggtcgagtaacagacagaaaataaaacacagatactcgactgcacagtctgttgccaaacaactgggtggtcgagtatgaggtcgagtaacaagaaagaattgcagaaattaagcgacagataacaagatgcagtaaacaacaatagagtaaacaaagaattcaatcagataaagaattcccaaagatggggtaattgagtagtttcgtttcctcagtttacaggtgattgacatgctcaataaattaaccctagacaacaagttcattaaccaaatctaagtgccaccgcaacagagactctcaagttaacctagtcccagactcaatcacaattgacgagagctaacctaacaggcattacgaatcaacaagttaaagccaaaacgctccctgcaaccaatacattggtacagggtcacgaatctctggaattagtggttcagacatttcatcgaacaccttttcggcgcggaaatgtctgggctcaaattccagttgatcagaaagcaataggcattaagaacaattaa

SEQ ID NO: 155939 - DNA, 867 bp, Arabidopsis thaliana landsberg
caaaaaaatgagcttgcccaagcttctcaggtaccaatctctatctcaccaattcgaatttggactgttttcgttttttcgttgttagctgtttgatgatgaggcgattctcaatcatatcgtcgctctaggtggaattagtttccaatttaagtttagtgacaatgatttaggaaacggtgatgattcagatattcacgaaaattgtggtggatctagagcttcctcgatttaatctgagcttctctgtagcttttacgttttctttatctggttaagttagatcgtctctttcacttgaccaacctaattgaaaggtggaaggtgcttaggtgtttcaatttactgctctctgttttacgatgagattaatgagatgttgatgtaactggtctcacattgtttagcttgtttgttattttcgcaggacgtagaagacatgagagattgctatgatagcttgctcaatgccgctgctgctactgccaatagtgcttatggtaatctattgttccttttcctttgttcggataaaagtaacccagctaacttcataactttactattcagaatggtggtttttcagtttgatgtattcttaagtttagatttaatacttgtagttttgcattctcattttactggttcaaacgcataggtctattattgaactgtattgaaccttcagttataactcttgagtgaatctcttgcatcccaatttatggagagaaacatcttcttgttaataaatatatattcttatcatttgcagatttcgtttgcttgcagaattttctgaatctttgcgagaactaggtgcttgtcttcttgagaaaactgcgctaaatgatgatgaagaaagtg

SEQ ID NO: 155940 - DNA, 1079 bp, Arabidopsis thaliana landsberg
tctgctataagcttataagtattttgtggttacatgtccattaatcattctcatgatccttaatcttagcttctagggtttctgtgaattacaattttatgcctttgaggatatatctcaatgtgaaagtttcaaacttgtaactcaaaaaccatttgttagttagtaatcatcatcattctgaattgagctttgtggaatttgactagggcaacgaaagattcacattagttgcggtaagagtgaaataatgaaacctcatgaagcagaaatgcttgtgaacaagagaaccctttatgctcccattgagccatatagcagtggaaatttaaaggtttcagatgttcacactctctactgggagcaatcaggcaaacccgatggacacgtatgtaaaaccatcattgttattgaatcaaccatcatgtgttcaagtttctaacttttccattgtatgatgggaattaacattttgcagccggttgtttttcttcacggcgggccgggaggagggacggctcctggtaataggagattctttgatccggagttttaccggattgttctgtttgatcaggtcagtctctgaatttcagggacactttgattacattgatccatcttgtatattcatctttaagtttttgttgtcttgttttcttctagagaggtgcggggaagagtacaccgcatgcttgtttagaggaaaacaccacatgggaccttgtgaatgatattgaaaaactaagagaacatttgaaaatacctgaatggctggtgagagttttcttccagatatatggttcttgatgttgttgagatggttaagagccagaacctctgtctttttcaggtttttggaggatcatggggaagcactctagctcttgcatacagtcagtctcactctgacaaggtgcaaatcttgatgtttacattcttacatctgacaataataatggtggttcagggattgatagattggaatagaatcataataacatacgttatgttacctataatctcacatctttgaactttgttggcgcaaggttactggtttggtccttagagggatc

SEQ ID NO: 155941 - DNA, 740 bp, Arabidopsis thaliana landsberg
aaacgtttgtattggttgtgtgtaatatgtgaatcaatattattatatgcagatactagaatttgtggaagccatggaaaaatatccattacattcaaatggtcttttaaaagttcctaaagttctagcagacatagtagagtctaccattggagctatcttcatggactgcaactccaccgagaccgtctggaaggtaacttactaaacatttagttataaatatctagctactagattaaggcaatcgattaatccatgacttttttggtgttgaaaccattgttgacaaaaccattgttgataggtgataaaaccattgcttggagccaataatacatttagacaaaatgaaaagccatccaatgacaggtctcaatcatatgtgtcaaaagagcatcttgaaattgacgtccaaagacacttgggaagaaaatcaaacctattgtttccatattgaggataagtttgttggatgtggtcaccatcctgtcaagaaagaaactgcttgtaatttcgctgcaaaaaatgctatcgacaattttgctaaatttttcggagacctttagatatatcgaaaagaaaaagaaaaattatatttttataaatttttacagtataaattgtaatatctttttgttttctttttgttaaaaaaaccaaaagcccaaagaaaacataaagaaataagtgctgtaaatgtattttagccagcttgtattcaaattcatcggttcttt

SEQ ID NO: 155942 - DNA, 351 bp, Arabidopsis thaliana landsberg
  unsure (1)..(351): unsure at all n locations
caatacatctagtttacctttttgaaaccagctaccacacgtagcggaacaaaaccctcattattcatgaaccctcgaaggtatatgtctgtaatcaaattttcatcactgtaacaaaagacacatttgcatctaaattagtatttccctatagtgaattgatcagtgggaatttcatcgtcgagaagaataagagaaattaaatacgagggtactacctaaaataatattgtatttgcttatgcagtttcatgtgtaacggaggatcttgataatggtagaagaactgcggaccatgcggaataggtgtcatgtaaggcatacggngataatacgacgactgtgccaatt

SEQ ID NO: 155943 - DNA, 597 bp, Arabidopsis thaliana landsberg
  unsure (1)..(597): unsure at all n locations
aatttcttagccaaattggtagctctgaaacctggaaagactnnnnnnnnnnnnnnnnngaatgtaatgcaagggaaagatgaaggcgcagataatcttagcaaagaatccgattcttctaccgaaggaagaaaaccaagtggattaaaaggaagggtaagtatgatcaagttacacattgttttgttaaaagagaagacttttcagtaggctctgaaccaaagatatgtcttcttttcttactttgcctacttgatgcgatctcagggaagcgttacaggaagaaaaccgttaccagtaagaccaggaatgtttctagaaactgtcacaaaggtatgtttccaacattcctcgatcccctatgttcaacagatgatagtaatagagaacattgaccacttttttatgtgatgtttaaatccaatcttgataggtactgggaagtatatactcgggtaatgcctccgggataacagcacaacatctagaatgggtaagttccttataacaccaaaacattaaaaaccaaagtctcgtttctttgtattcatcagagcttatttctgttcacaggttcaccaaaaaaccctccaagtt

SEQ ID NO: 155944 - DNA, 1207 bp, Arabidopsis thaliana landsberg
gtgattctgagccagttaagatgtttgatagaacggctaatttggcaaacaatcaaattataaactataagtgctctcctaatgagaagtggttggtcttgattggaattgcccctggctctcctgaggtagggttcctgcaccacgtattaggttgaattaagacatcataacggcagtcatgttgtatatttttgacggaatcttgtcattattatcctctgtagagaccacaattggtgaaaggaaatatgcagcttttctctgtggatcaacagcggagtcaggcccttgaggcacatgctgcatcgtttgcgcagtttaaggtaacgtctttgttctttggtgagttcatctatggtctaatcttgaactgtagtttgacttgcaacactattaatattaggttcctgggaatgagaatccttctattcttatatcatttgcaagcaagagctttaatgctgggcagataacatcaaagttgcatgtcattgagcttggtgcccaacctggttagcttcccgacgcaaaactatatcttcactgttatttaatataattggttacgttttctaggttgtattcatctgatctttaaaggttggcgatttttttgcaggaaaaccatcatttacaaaaaaacaagcagatctcttttttccccctgattttgctgatgattttcctgttgccatgcaggtttgctattgcattagaatttcagttatatgtgtaagtagttagtgacaatttctggcactaatttctcattttcctgacaggtctctcacaaatttaacttgatatatgttatcaccaaacttggcctgttgtttgtgtacgatctagagactgcttctgctatctacagaaatcggattagtccagacccaattttcttgacttctgaagcttcctcagttgggggtttctatgccattaataggcgaggacaagttcttttggctacagtaaacgaggctaccattataccttttattagtggccaagtatgctaatcttttatgctattttcccgttataacctacccttttcatcatgtcatgctaagaaatctatgcttttgtatcacagttgaacaatttggagcttgctgtcaatcttgctaaaagaggaaacctcccaggtgcagaaaatctggtatgcgatgtttatcatggatctgttgtctcggtgaagtaa

SEQ ID NO: 155945 - DNA, 865 bp, Arabidopsis thaliana landsberg
atttgccccatcttggtctgtttcttcaatcattcgaattttataacctcaaggtctgtacatttctaatcattagtgttttcaatgcagctgactctgctgacgattctaatgattctgatgatgagttccagatatgtcagatatgcagtggggaagatgtactttacttttaactctgatagcttgattaccgttgagggttacgagattttaataacttgtctggtgatgaaactaggaaaggaagaagttgctccattgttctgaatgtgacaagctttttcatccggactgtgtggttcctccagttatagacttaccatctgaagcgtggatttgcttttcttgtaaggaaaagacagaggagtacattcaagcaagacgtctttacattgccgaattgcagaaaaggtctatacactgaaatagcaacttgtgtctggtacagaagcaaagtattagattctttttaagagtggttatccattttgtttctttttaggtatgaagcagcgcttgaacgaaaatcaaagatcatagagatcatccgttctctgaatcttccaaacaatcctttggatgacatcgtcgatcaggtaactatcatttacgtctctgttttttctcaggtatgaagcagctcatggttatacatgagtctcctttctttttagggtataacgctagtggtatctatgaatcatttattcaagttttggcatttagtatccaaaggctaattgtgtggttaaattaacttctgaaaactttagcccgtctctccattgctgtgctttatatgtactaaagcagctaaaaggccctgaaaaagttgcagaaatgacgggcaggcggggtttgc

SEQ ID NO: 155946 - DNA, 817 bp, Arabidopsis thaliana landsberg
  unsure (1)..(817): unsure at all n locations
atgcatcaatacgccgtagaaatacacgacatgacgtttagttgtttaagtatgaacgacatgacgtttgatggtttaaacaaataactgcgcgtagtttctgtggtttgctttactcggtgcgtgaaccagctgtaccaccaattcaaacaacacggttacgcaaactctctctgagaaaatccccaaatctcatgaaattagggtttcaatcattctttgaacgcaaaattagaaacctcctctccatccgccacgaatctctagggttcttctgaaggattagatttctgggttttagaaannnnnnnnnnnnnnnnnnnnnnnnnnnngatgccgtcgttaacactgagcattcgtttccttttcttagttctctgcttgatcggtttacaagctgcggatgatttcccagataaatcccgcggtgacgtatgccctcgggttaaggatcggggtggatgcccaatcaactgtttccgggcggatccggtttgtggaaccgatggagtcacgtactggtgcggttgtcccgacgcagcttgccatggcgctcgcgtagtcaaaaaaggagcttgtgacacaggtaatgcaggaagtgcttctgttcctggacaagctttgttattgattcatattgtttggctcttcttgctcggactctctctgctcgttggtggtttctgatctctcgagtgttaatgttggaattagatagatcacacgtcctgagtttgttgtatgtgtatagttgagtattgttttgctttgtgtgctatatatatgtaatagattctgttgcagttcattctaataa

SEQ ID NO: 155947 - DNA, 4394 bp, Arabidopsis thaliana landsberg
  unsure (1)..(4394): unsure at all n locations
atgtgtcttcggcaatcccttgcgggcttcgagtttgtcaattatttggatagcgatgacgacacgtgtctttttatgaccggtcacgatgcgatttactattctatccctctagtgtttggtattacggatagggattaacggcctagtgattaactcttttagggcctgacgggttgaaacgcagcgggtgcggttatggttgcggaagtttgcggaaactggcggttgcagtttcaagcgttatcaagcgttttgaacgactggttgaacgtttgataataggtgcgtttgcgggagttttatgactggtaaaccagcgagtgcgatagtaattaaataaaaaatanccaaaataaatataatatattaattttaaaagaaaaaatacaatatattactatgataaattgataatattagaaaattaaacatgcttaataattaaaaccataaataaaacattaaattcaaaaataaataaattttgtaagaaaaatcttagtactttatgcatttggtacatcaccaaaaattgcatcaagtagtgtaataaactgtaaataacgttgaactcgtgggttttccagattgcctctatacatatgataaagttctaacaagaaacgggtcatctcgtctgaccaaataattttctaatcgagaaaacaaatcaaaacatgtattcaatcaaaaaactcaaaaaaatacaaaataaaaaaaatgacgatgccataaaatactcagagaattacactacctaatgaatggatgaaaggatagatcatacttacgtttgattcttgattttgattttgattttcgttagtttgggtagatgccataattgagagaatagggtttcaatatattgattagggttttctgataagaataagatatatagggtttgggtggaagacataattattttaattaattaaaaaaaaaattaatctaaccgctaccgcccgcaaccgcaaacgcttgcgggaaggagcttttaaaatctggcgatttcgaacggtccaaaacggtatctagcgatttctatgattggtgtcaaacgctaacaaccgctaccacccgcaaatgcagcgtttgcgggtgacagagggagaaccaatcaaaacaaaatgcgactggtttcgtcgaaacccaaattgttggctatgtgtgaaattctgggacgcacatttgtgatattgttgtggcttgtgatagtagctaatcgaatacgtagataacatttggtcagggcatttggtactagtcgttcgaaacgataacatacttggtatgcactatttggctttcaaggatccaacgcaaaaagggttgacaagaagtcgacccatgcatttgtaaaaagaagcatcgagcacgtttgcttcaacaaatttgatgttctgactcagttgtcatattttaaaagctatatagttgcgacaagccgacaaggtacctcgcatcacagttcacaaccaagggcggacccacgttggtcttgggtgggacatgtgcccgatattcaattttataaatcttatataagtttgcattatataattaaaaatgtatgtagtgtagtggttttttacttgatggtgccccacattaatccaaattcaaggcttgctgatgtctttttattgattttttataactgtgccccatataagattatttcgtggatccgccactgttcacaaccaatgtaaacacacactatacaaaactcggtttcgtgtcttcgtgacctaggagatggagttgtgtatacggtttcaaccaggtataaatttatataaatacattttcactccttcaatatctagtaaatggagatggttatacggtttcaaaaacaattttggtgaagaaaatgtaatcttctacggatatttaaatgttgataaattacttatgcaaattgtaactagtgtatgttatgcaaattatacacacatctccttttttttcgttcttcgtccgttagaatctagtttgctcaaccgcattgtcagactcttgccagtcacaattatctcattttgattaaagcatcagaaagttgtcatgagaacaatcaaaattactgaaattaattgaacaaactgaaaaaaaaaaaacccgagattattcaaaaaccaaacttaccaaaatcctaaaatccaaaacccaaaccaaaccaaactgtctactacccaaatcgaattgaaccaaatgtatttcgttttaaattctataacatttcctcgtgtaatcaataaaccaaataccaaatcaaccgatcataaccaaaccggattaccaaacgtattacattaattgtccggtttggtgtagcttaaaacatggtaaacccaaaccaatacgaatttgtttgaagtttagattgacagcgaccaccggctaagattaatctaaaaacatgaaacgaaagcagcaagaagacgacaannnnnnnnnnnnnnnnnnnnnnnnnnnnnnnnncctcgccactacctcaaacaccatgagtactgatctacttttacagtcatcttctaaactatcacagaaacaggactacatcttccatggaggtaaaaacgaatcctccaatctccacactctcttcattcaactaattgctctggtttaatcgcttgatttgtttgtgcaggaagacgccatgtgagaccttactacttcgagttcatttctcatgtaagtatcttccatctttcttcattatcccttgtttttgctcatactagagtcacatggagattgaaattgatgtaggtgaacaaacgatggactgggaaaacaattgtggatttgtttgctgatgaatttaaaggacggcctcgtgattattatgtactgctcttcctctaatctcaaggaattattagtttgatgataaatctgtgtttttgggattttgatatgtttgaacattgtaggttggtgcagtcaaatctggaagaatcaaagttgatggagaaattgtaccggtttcatacattgtgaaatcatcccaaaagattactcacttcctccacaggttgttcttaagctgaactttattcagatggttgcatttgctatttgaaatcagttttgcattcaatgtctatccaaattctaaatgtgtgagaaggtttcaggcatgaaccaccggtgatgattgatgatgttgtgatccttcatcaagaacctgacgttgttactgtctgcaaaccagcttctgttcctgtgagtattctttctgttggattgttttcactctatttggtctctggagaatgtgaaacactttttgttcagagcataaaccaaataatctgattctctttctgttagtactattcgaagcattgtgaaacaattcccattatatgtttaatgcctttgtggtgtatgattgatactttggtaataatgtcgggcgttttcgtattgtataggtgcatccatgtggtcaataccgtaagaacacgattgttggcatccttgatgctgagcatgacctaggaactctatttcgtatccagctaatagtattagacaaggataaattgtcaaaatgttccttgtttaaaaaataatacaatacgagttatccttgcatcatttcacagctattcacagattagaccgtttggtttctggattgcttnnnnnnnnnnnnnnnnnnnnnnnnnnnnnnnnnntcaggcaacaggtactcgaacaagttggtctcattttgcttggccataccattattcctaagatgctatttgctctggtaaatcaaaatttcatacttactacttatcttgattgtttcagattgagggtggaatggtgaagaaacgttatattgcaaaggttattggcgtgttcccagaagatgaggcttgaagtccttttgatgttactagatgatttttgtaactgtctctaatttccaacttcatacagtagcacgagtgatataagtccacattagaaaagtaatttgagtccagtcataatatctgaacctcaaaatctaccagttatcttgagggcgttataatatgaagaacacttttgtttggagttcacttgatgtagctgcatgactttgatgtgtcagatgatagtcgacgccaacataaattataatggcagcgaaggaagaagtacagcagaggtaaagccacattttgcctctagttatacagcataaaatcttccattagacacttataagtaaaaatattggaatgtgtgtatggtttatgcaggacgccaattcaagtggtgacgataagaaggtgaaggggaagcctgcatgcacgaagttcactagaatcgatacaaatgggactcatagcctcgtctcatgtgaaccagtgacagggcgaacccatcaa

SEQ ID NO: 155948 - DNA, 472 bp, Arabidopsis thaliana landsberg
ttcactttctcgatacgagaattgcttcctttcatccccattttcaaaacccttgttcctaaaccaatctcagaacaaacccagattctcaatttcattttgtctcaagcaaagtaatcatgacgagaggcaaattcaacaagactctgccaaagaagaagaagaagaagaagaagaagagtattgggttgttacagcagtaagaagcagatacaatgagattgttatagtggatactgcttcttccagatatcttctccttgattcaactagtgagacttcttataaccctaattcctctgttttggattagggtttttgtactattctatcctctgattttttaaaaaccttgctatgtagagaatgtgcatagtgttatcaataaaggaggccaaaattggactggatcttattgggtatgttagactttcttgcatcaatcttttgttaatgaccctgccgcagaaaa

SEQ ID NO: 155949 - DNA, 476 bp, Arabidopsis thaliana landsberg
cccaatgttgtgttttggtcaaactcaataacaatctccaccttttggcaacaacacacttccacgacgacatcgacatctccgacaaccaacgtcatctcgtgaaatcaacaccactgccggattccaacctccttcggcgaacataggacttttttcccgtcagccatcgtctcctcctttccccaccgagttctctttttctcgacatggagaagatggagcttgcctttcgatgacaaaatcaaactcagattctgactactttgatggctacctccggcgaaagcaactgcaaaccttcaccttttcttggttgctctccgttctggtgaaacaagagacttctcttcgtctctcatccaggcctctcgtccgtgacacatcacaacatcacaatcatcttcaccatcaattaactccggctgcgtttaactccgccgaatcggaccgccaccatcaccgcacaactcatg

SEQ ID NO: 155950 - DNA, 256 bp, Arabidopsis thaliana landsberg
atgacccatcacgcatgtaagccgcgtaagcacaaggcccctccacgaaaacattcgtcgaggggtattctaggtattaccggtgataatttatgtgaattgacgtttttatcctttgcctctataaagatcttcttccgtttttgcaattacggcgtcgcgcatttagcgttgttttgaagctctctctttcaaattctgttcgtctctcgcgatctctctctctctcagatagctccgaaactttcacgcagag

SEQ ID NO: 155951 - DNA, 255 bp, Arabidopsis thaliana landsberg
gtcacaaagtcatcgactactttgccatcgacgagttacaatacaaaccaaagcagagaagaaagaatccacaatgtgggagtctgcagaatgcaccttattgaacccggtaagtctttcttaagaatgtttaaactgtgtcccgacttggacttgttgctgcgttgtgttatgtagagtagtaggctttttaactttaataggtggaaagagtattttgattttgcaaacactcgaacaaagttagatgagtaa

SEQ ID NO: 155952 - DNA, 1302 bp, Arabidopsis thaliana landsberg
  unsure (1)..(1302): unsure at all n locations
aatgtgtatcaaaacttgaaaatgtgattgtgtcactgtcaagcacagaacctaaattttacgatctttcccaaagcgccaaaagtaaagcggacaagcgaattctacgaaaccaacaagccgccactgtgagtgtctctctctcgctccctctccctccctctccctgaaagattatcatgcttcttgtggtgaagctgatggcttttccttgatttcagtacattgcaagtcttagtcaggcactggcctattgtcatggaaaatgtgtgattcacggagacatcaaacttaataatttgtgatcatgaggtatatatggttaaagtgtttttgcattgagaattcgggatattcattatttgcagcttcttgttaaggatccctcaaaacaactttccgtggattgtcaagaacgcagatccgaaagctcaattgggcctatttacaggcttaggcccatatactactagattcatcggaagcgaaacaatgagcgtcgttgtctttttcaataacctctgcttcgccggaaaaacaaacagacgacgactattgagagctaaaatccgagattaagaatggcgaatcaaggagcgaagaaacgaaaggaagagaancgccaacacatggctaagctccgtcgtatcatcatcgcttccaatgtattttctcctctcccatctatacgtttcccagatttctacgatttttcgcgattcttcatgaattgagaattggattttgtaatttatggtcacaggctgtgtatttcgttgtgaggatgttgattttctactcaagctttacttggaaacattggatcggtttagtgataacttcgctggcttacgcgtttccttataagcagcttgatcaaatggctaaacctagtgttactgatgatggtgagcttattgatggtggatttgacatgaccactggtggaatctgcgggtacgtttgtgttaaatgaatcaacaagaaccaaaagctagcttctgtgttatggatttgcatactatgatgtttgagttatgcattttgaatcatatgatgacctttgcagatatttgcacgatgtcatctatatcacttgctttgttcagctagcttccatcatctctgggaagttttggtacacgtatcttgtggtatgcgtgtttgcttagttaataaacacgaattgatacatagaattggattgaaatgatgtaacttttgtttggtttttagattcctgcgtttggagtgtataaagcttctggtcttattcgaggattcatgtcacaaggttcagag

SEQ ID NO: 155953 - DNA, 400 bp, Arabidopsis thaliana landsberg
atttttcttcttccggttttgacagcagcaggaagacgaggagatgcttgttccgaatccggatttggtcgagggacctcagcctatggaaggtaacattttcgtgtttaattgaattcgatctacttattctacttctcgtctgtgttctactcttatttggtttgatgtagatgcttcagcacttgtggatagtgctgggggtgtagaaattgatgttttcactgtgcgctagggttttgtcaattttttggattgtggatttcttaacgattgttgatgcatttgtagttgcccaaactgatcctgctgctaccgctgtggagaatccaccacccgaggaacctaaagtctgaaattcacgtggaccatcccaatgttcactaggcgcaatgccagg

SEQ ID NO: 155954 - DNA, 2332 bp, Arabidopsis thaliana landsberg
ttaaacattaccttcatcagacacaaactcaaatctctcaaaatcaatcttactgtctacaacttccatagatttcgccatctttatcaaaccttcaccatgtcttaacctcttctcctcaattccccctacttctctagccgtctccaaacacttctctaactcgaccacaaacaaattcatctcctcatacttttcttgcaaggcaagttttgcatccatgaacttaaccctaaccctttcctccctccacatctcagccatctgcaacatctgcctctcctcctccgtttcgtcccacaccctccttgtattcaccttcaattcatcgatcctcgtcaccagttcctcgcacaccttctccattgtatctctttctcttctcaaccgatttactgatgactccatatccaaaatcttcttctttaacctagaattctcagctttaactcttttcttttcttccctctctttgcttaacttttccttcaagtaatcaacaaatggattagtggtttcttctttctcatttctttggtttctgatgagacatcttatagtttcctctgatttaaacttttcagcctcaagctctttgattctcgtttgagccttccatagctccgtttgaagacaaggaacgaggttaaagtctaaaaactcgtcttcttgaaagttctcactaggttcaacggagtaatacgttcgaagtgatcccaagtcccactccgttatgctctccatctgcaatttatcgtgttagataatcgagttaaccaagagaaatctcagaaaccaaacaaaatgatcaagccaaggaaccttgaccttggaaaggaggccttgaagcctagacgcaagcttcctggccgatactttggatctttctgattttgattgtcgagagagattatgacggaacaaaggtggccgttgttgtctctggtgggaggagatgtgttcttttgggcgatgaagagagagttgatccgtaacgttggcaatgcgagagaagaaaacgttcataagggacacgataataatcaagatttaaccattttttgggggcatataaatcgaatacataacatacatctgcatttacattgaatcataatgtagagtattaagaaagaaatttcgaaaccagctaagacaatgatttggtaccagatttagtctctttaccgcatctgtatagtttaaagcacattatgaaccttttctcttgtaataatcagataattttgggtatactgaacaaaaataaaagtatttgatagatatcttcctatataattatatgtaattttagtaactgttttgcaccggttgttgtccaaaatatagggcacaatcaaatattttcttcctaaaatagaattttaccaatttaacatattgcctactagaagtttgagcctaaaccaaagaagttccgtataaatgagcacatttgcagaaccaacaaacttaggaagcttaaaaataaatgtcaattaaagagtaacaacagtttataaaaacagaagaattattcaacaacaaaactaaaaccagagagggacaaaagcaaagcagaaaccagagagaaaaatccaaagctgcaataaccttaaacttgtctttaagaaagctggcgcctcttgtaacgcaccatcacattgcctttaactccaaccaccatagcgttccagtcaatctcagggaacggtgaaactagctcaagctcgaagttcctcaacaaatgactccatatgtctgtgatcggcaggtaagcagacggctctccaaggcacccgtgccttccccctccgaatgcaatgtacgagaatgcccctgcggctttgtcctcttctcttccaggggagaatctttctgggtcgtaggtgtcggggtctttgaatgatgtgcggtaagcggttggcaaatgcaggggaggttgcaacgatgtgaccctttgggatatcgtaagtttttccatcccgagctgtcacgctgaaatcactgtgcgaggctctcattaacatgatgagtggagggtgaagcctcaacgcttccttaatgcagcggtagagaacatccatctcggataagatatcatgatcgatcttgtctccatgtttcgcaatcaggttcttctgctcatcaagagcagctgagaagtactctttgtatcgcatcagataagcaccggtccaggtggaagtgatagagctcgtgtgttgtcctgcaaacagagcagcaatgagcaaaccagtgacttcagattcggttgtctgtctaccatctttgtactttgattcgacgaaacactgcagcatgtcgttct

SEQ ID NO: 155955 - DNA, 415 bp, Arabidopsis thaliana landsberg
ccacttaactctctctctttctctttcccctttcttcttctgagatacgcttctctactccactgccatggagctctaatgggtctctgcaattttcattcttttcctcttttcttctgagaatttcagctcaagaaccatggatgagtcttctcttgttcgttttgtgttccttctctgtttggtttcgtcgtctgtgttctgtttggctgagtctgaccaaaacgcaaccgtttcttctgctgtttacattgttactctcaaggaccgtccatctgttcatttctccggcagagaatcgagtgactctaaacacagccttaccgctacttcgtcccaaatttacagaacattgtatgtagaaaaaagttaccattctttctttttgttcttcaaagtttcaatctttatccag

SEQ ID NO: 155956 - DNA, 404 bp, Arabidopsis thaliana landsberg
cagatggctttttgtaactgaagaggatatcaagtttttaccttttttccaggtctgtctttcctatttggtatgttgaatcctatgaatttgatcaatcgattgtatgtatgtcgatcccaagactttcttgttcacttatatcttaactctctctttgctgtttctgcagaaccagactctgatagccgacaaagctcctcatggcacaactttggaagtgcctgatccagatgaagttagtctttttcagcgaccttggatgacatctgccattctttgttagattccaaaacgttattataatgtctcttctttacttgacaggcggctgatcacccacaaaggagatacaggatcattcttagaagtacaatgtgacctattgacgtatacctcgtcag

SEQ ID NO: 155957 - DNA, 614 bp, Arabidopsis thaliana landsberg
ccactcctattcaagtggttgtaggaactttcttaggtggaacaaaccagcaagaacagacaccgaagccgcataaccacaacttcatgtcttctccattaatgccaacttcttcgaatgtagctgatcatcgaaccatccgtcccatgacatctagtctcccgatcagtacatggacaccgtcttttccttctgattcacgacacaagcattctcatgactttaatatcactttgacgtgatttcttccttgaagaactcgtagatcctctttattttggtttccagtttagggctctacatgttagactctcaaagtctaggtgttatgttggtctgtcacttaggattgttagaccatctccatcaatggtttctcaatgagaaactgttcaatataaaaataaaatataatcaaaaagtatgagagagagtataattagtctctcaagtgagaaactctgagacacctacaaaaacacttgtatatcatctattagtcaaatattattttattgttaaaatttaattatataactaatatttattaaaatactaatatcttttttttttgagaaaccaagaagatatttcactgatggaaaggcctttat

SEQ ID NO: 155958 - DNA, 145 bp, Arabidopsis thaliana landsberg
acaaaatggagggaggaataatacatggaggagcagatgaatcagctttcaaagaatgtttctctctaacatggaagaaccttatgttcttcgcttgcttctctgccggaatcggtggtctctctttggttcgcacgggtaagtt

SEQ ID NO: 155959 - DNA, 587 bp, Arabidopsis thaliana landsberg
  unsure (1)..(587): unsure at all n locations
gtttctgtggggctcatagagagagagaaagaagagagattttatncgattatatagctattagatttttgtggtagtggtgttgtctcatgattaagagaagctttaaagaaaactcaagtttgcttctgaggaagacaatcaagaaaaaggtatccaatttttttttcttgtattcaagttttgcaattgaggatcttagggttttaaagaatcgattgatgtagaaagaactcattgtttttttaattttgagtcctcttgtaccaaaaacgatctctgccactagtgtcatgttatgtttttgttagattcttttttagcaaacatccaaaaaagatttgattcatcttgtctattgaataagtggcagtcttcaatttttttctctgtttttcttgattcttgcaggtttactattaaacgacaacgcttttgcaatcgccaccacaaaaagattcaagctttggattcgttttacttgtggacgactaaacaaataacagattaaaaaaaaaaggtttcacatggatcaaaagtttgtgaatgtgtgaagcacttagaaaacagagaaaaagaatgtgatt

SEQ ID NO: 155960 - DNA, 1006 bp, Arabidopsis thaliana landsberg
ggaacgacttcaccacttgcaggcaagaattctctgatgtttgaacgagattggaatgttcaggttttattttttgatattatcggctgtaacatgtgtatgtttaatgtaacagaggacagaaatggatcgggtctgctttgggcgatctggaattcatggatggggtctttttgcaagaagaaatatccaagaaggagaaatggtatgtcagcagacccatttgtgatattgtgtttggtctatttgggatgaggggagtgtttattgtcgagaggtgctattgtatttcaggttcttgaatacagaggggaacaggtgagaggtagcattgcagacttgagagaagcacgttatcgcagagtaggaaaggattgctatgtgagttgaaaaagtttccattttatcttcacaaattgtctcttctctctctatctctcttaaccaaaagaaggatttatgttgcagcttttcaagatcagtgaagaagtagtggttgatgctacagataaagggaatatagctcggctcatcaatcattcggtaagctgcttggcatggactttttacgtacaagaaatttgacagactgttaaagcctaaatcaaaatacgtggtgtgtagtgtacaccaaactgctatgcgaggattatgagtgtaggagatgaggaaagcaggattgtcctgatagccaaggccaatgtagctgtgggagaggagttaacgtacacaacgcatttctatatataccattcttcaatctaaagctgattgattgtcatagtttaagaaatgttgtgtggtgttttggcaggtatgattacttatttgatccagacgaggcagaagaactcaaggtgccatgcttatgttaagcccctaactgccggaaattcatgaattagaatagaaaggtatagatcctttaagtttactttacaggctacaacaccaataagaaaaggcccaagctagattgcctttttttgctccaaaaacaattgat

SEQ ID NO: 155961 - DNA, 1521 bp, Arabidopsis thaliana landsberg
  unsure (1)..(1521): unsure at all n locations
atggcggatttggataaactcgagggtggaggaggaggaggagccgtcgtaatcgccgacattagagccgatgaaagcggaggagcggtggaggacagggagaggttaacggaacttgaaggaatttctgtgttggatttcgatttgctttgctcaacggnnnnnnnnnnnnnnnnnnngaaatggaggaagcttgagagctcggagggagaagatgcgacggaggatgattatggcggtggcgttttacggctttgggaaggcgatgttatggattgctttgaagatcgtcatctctgtatcgaatctgcttggtattgggttttctcttctcatatcattctttaattccaaaagcattttttttttgttccccagaaattgaaattcatataatttactgtaattagagcaattgagttctatatgtgattataaagcaagagacttttttttgtttatcttgtttcagctgtccatgctacagattcgggaaaaacatgacaaggactggttttggttcttgctttcttcaggtataatatcctcttaatacagttgatctctggccttttgtttaccttcgttcttgtgttgcaatcattgaaagatactgactttaactgtattttgtatgtgtcagggtgctgttcatatgattcttattgccggtttcttattcaatgttgttgcttttgctgtaactaagaggcactgctttctctatctggctattgctttcgttcttttgattggatcctacttgggtttcttccgtatgttgataagaaggaagtttaatattagagtaagcacattccttgtttttttgtttcttttctatggagtgtgttaagaatgttatttgtcttcttttctgcatcatgacttttggatactcttacttttgatagggtactgatagtttcttggacgattttatccaccatctcgtatgtccattctgtacattaactcaggtgtgtgttattcacagatcattctcttgcaaacaagttacatccgttatgtccttttggttcattttgcttgtgatgtgatgtgatgcaggaatctaaaactctggagatgaacaatgttcatgatggtatctggcatggtcgaggagacactctatgtataggcggctattccgaaggaaaagcttttctcgagctgcattcgcctccagttattgcctcaacaatgtcatcatctcaaccctaacaacacacaacagagttcattcacagaaaccgcaaccaagttctgtggcctccatagcaatctgcattggtgtcaacatcggcttatggcaattgatttgctcaacagtgtaaactgattcatgtcaagagaaaactttcatgtttagttttggaaactgtggtatatagcaaacatggaagtttgatagaaatgtcctgtaaggttctaaaaggagagaggctaagaggccatttgtatgctaatagtgaatcagtccaagttacgtatatacagccacctatttgggtcatc

SEQ ID NO: 155962 - DNA, 514 bp, Arabidopsis thaliana landsberg; identical to SEQ ID NO: 66442

SEQ ID NO: 155963 - DNA, 381 bp, Arabidopsis thaliana landsberg
gtaccaaagaagcaacagtgccatttctgttggtaattaccataactgttttctctactccatcgatttaaagtcgtcttcatttgttctcttaataactgacattttaattttttgtgcagttgcgccgatgtgctatgctcacttggcagctgctcagcttgggacgttcatgaagtttgaagatcagtctgagacatcatcaagccatggtggtatcacagctccaggaccaatctctgttgcacagctcccaagactcaaagacaacgtcgccaactccatgttcttctgttacctgaccagccctacttggctcagtaagtaagtagtaaataaatcggctatctgactttcagcttaggatctctctcggctttt

SEQ ID NO: 155964 - DNA, 342 bp, Arabidopsis thaliana landsberg
tctctcattaatcgaacttggcgtgtttaaataatcttccgatcgttaattctcttccgatttcgattcgattttagcggcgatgtctctcagacctagcgcgaagacggaggtgcgacggaatcggtacaaagtagcggtcgatgcggaggaaggacggcggaggcgagaggataacttggttgagatcaggaagaacaagagagaggaaaatttgcagaagaagagatttacgtcttctatggcttttggctcagcaacgggacaaacggtacaggatctttcttcagcgaaccaagtatgtgattctttcttttgttacgattccaccttttagttttt

SEQ ID NO: 155965 - DNA, 649 bp, Arabidopsis thaliana landsberg; identical to SEQ ID NO: 13590
  unsure (1)..(649): unsure at all n locations

SEQ ID NO: 155966 - DNA, 1876 bp, Arabidopsis thaliana landsberg
aataatgattcaacagaatgtcgtgaatctctctaccttcctcctctataaactctactctctgactcttcttcatctctcacaaaatctctcttaatctttgcaacaatggcgtcggctctctcttgctctgcctctgatctgattccattactatcaggtggagccaacgccaccgcagcagcagccgccgctgaatacatctgcgggagattcgacacagtcgccgggaaattcactgatgcggcttacgcaatcgacaacacttaccttctcttctctgcttacctcgttttcgcgatgcagcttggctttgctatgctctgtgccggatccgtacgtgcaaaaaacacgatgaacattatgctcacgaacgtcatcgacgctgcagccggaggtctcttctattatctcttcggtttcgcttttgcttttggatctccttctaatggattcatcggaaaacacaactttggaatgtatgattttccgactcccacagctgattactctttcttcctctaccaatggactttcgctatcgccgccgctggaatcacaagtggttcgatcgcagagaggactcagttcgttgcttaccttatctactcttctttcttaaccggatttgtttacccgacagtctcgcactggttctggtcaagtgatggatgggctagcgcgtcccggtctgacaacaatctcttgtttggctcaggtgctattgatttcgcaggttcaggagttgttcacatggtaggtggaattgccggtttatgtggagcgttagttgaaggaccaagaataggtagatttgaccggtcaggccggtccgtggctttacgtggtcacagtgcatcccttgtcgtgcttggtaccttcttgttgtggtttggatggtatgggtttaaccctggttcctttttaaccattcttaaaggctacgacaagtctcggccatattatggtcaatggagcgctgtaggtcgcaccgcggtcaccacaacgctttctggctgcaccgctgcgttgactactctattcagtaaacggcttttagcaggtcattggaacgttattgacgtatgcaacggacttctaggcggctttgcagctataacctccggatgtgccgtggtggagccgtgggctgctatagtatgtggctttgtggcatcatgggttttaatcggatttaacttgcttgccaagaaacttaaatatgatgacccactcgaggctgctcagctccacggtggatgtggagcatggggattaatctttaccgggctgttcgcaaggaaagaatacgttaacgagatttactccggtgataggccttacggactgttcatgggcgggggaggaaaaactgctcgccgcgcagatcgttcagatcattgtgatcatcgggtgggtgacggtaactatgggaccgttgttttatgggttacataagatgaatcttttgaggatatcagcagaagatgagatggcaggaatggacatgacacgtcatggaggatttgcttacgcatacaatgacgaagacgacgtgtcgactaaaccatggggtcatttcgctggaagagtggagcctacaagccggagctcgactcctacaccgaccttgactgtttgatactttgattggagaattgagtggtcccaaacgagtcagttttaatgtggtgaagacaagagttcgggcaccaaacatgttggacgcatctttgtgtattattggtcttcttcttcttctttttttttctcttggttatcgctctgttgtggacagatagtgtggaacttttaacaataacatgatcagtatgtctttttaattaaagtgaacgtttggtatcaaaattaaaca

SEQ ID NO: 155967 - DNA, 350 bp, Arabidopsis thaliana landsberg
  unsure (1)..(350): unsure at all n locations
agtcgggttcatcaagtggccttccacagttgccaggtacaactagcaaaggaaagaagcagaaggccaaaacttcacagggtcccggtttgtcatctacatcctcaaatgttgctaatctggctgactccttcaatgagcaaagtcagagtttaagtcatcccatgacagatttacttcctcagttgttagcaatgcaagaaacgatgaatcaggtgacatatttggtctagaagaaactaattagaaccctatttcttaacaaaatctgttattatactcttgcatcatttcactgacacactactaaactngttgttaccttgattntgcacataggagttccaatc

SEQ ID NO: 155968 - DNA, 3263 bp, Arabidopsis thaliana landsberg
tcttggcaacaacgttaatgaccaaatctttgctctgaaatttcgcagcgagtctcttagccaatcctctctccacgagctgattcttcaccgtcgtctccactttcacgctcgtcgagtttttgggaccttgtcggaatccattcatcgtcgtctctcccatcccggtctcatcgtttcccgaaccaacgctcaaatcaacggcagtgtttccgtagtaaaaaacgagtttcgagttcggattcttcatctcaacgcgggcaacggcggtggcggagagagacgcgccgtcgggatcgtcggcgagtttgaagccgtcgagacggaaggaagcgaggctgaaagtgggaagcttaggatcgaaccagaggtagaaaacagctgttccgaccaagaggaggaagatgaagagaacaagagtaatgcagatgcaacagcaacagaaacgacaacagcttctacgttttttctttggtcggtaagaagtaggcatagggacggcttttctcataggttgttgttgaatgggaggtggaggaggaggaggagaggacatgtttggatctctgtaacctgggggcttttgaagaaccgggttcatctgataatctgccatcttttttctcttaattattcacctctctgacgatctcctgataaatcgtatcaaggaagatcaaaacgaaatcttcaaaatggagagagagatgctatgatgatgatgattgcaggcaaacttggtttctaagagattttgagtttttggaagagagagagagagaagagaatgtttttttgtgttgcgttgtctcttctctctcgttaatgaaagaaggctgagacgtgaggaagggatttcgttttaggcccgagactcacgcgcgccgtttttgttgctgacgtgttccctcttttttctcttcttcctacattcattgaaatattcaaatttcagttattagattagtcgattaatttataactgataatcatattgagtttgatacgtccaaagtggcatgggcctacagattagatgtttaggccaggtggactctgtttcgagcccattactgccacgtggctctattcggagttatttaccaatggtacgctcaccggtttaacgattcaccacttaaagccctcaaaatctcagagaacgctcgctgatcaaatccgtcgtccttcaaccgtcgcctcctccgtcatgacaatcgagtgcgttaatcccgaaggtcttcgattcaaccaagtatgtgcacatatctcttcctccgtttggtcatgtacttgtttccgattaatgtattatcttttgttctttctgttgaattgatttcgtatctgtttgcaagatgaaaagctcctctcatcaaaccctaaaacgaggatgaggccgattttgatgaagggacatgaacgtccattgacgttcctgaggtacaacagaaatggtgatctgcttttctcctgcgccaaagaccacactcccacagtctggtttgccgataacggcgagcgtcttggcacttaccgtggccacagtggtgctgtttggtgctgtgatatctccagtaagtggtctcagcctctcaaattcaaatagtatatagtggatggaatggattcagtttaggatttaagtcgttgtctttgttgttttagtctttcatagcttaacgattagtgttttgtttgtgatttcttaggagactcgtctagattgatcactggtagtgctgatcagactgcaaagctgtgggatgtgaaatctggcaaagaattgttcactttcaagtttggtgcccctgcaaggtctgtggatttctctgttggtgatcatcttgcagtgattaccactgatcacttcgtgggaacttcctctgctattcatgtcaaacgcattgcagaagatcccgaagaccgtaagttgtcaattctaagttaaaatctacttatgttttttagcctatgtcttttttgtatgggtaaaaggaattgatttaatgtaattgatgtagaggttggtgattctgtgcttgtccttcaaagtcctgatggaaagaagaagatcaatagagctgtttggggtcccctgaaccaaaccattgttagtggtggtgaagatgctgctatcagaatctgggatgcagaggtatttcaactttcttaaggcctttcttttgtctatcaatatctctcttttttttttattagcttaaaccttatgtggtgctactgccattgttactagactggaaaattgcttaagcaatcagatgaggaagtgggtcacaaggaggccattacatccctctgcaaagcagctgatgactctcacttccttacaggttcacatgacaaaactgcaaaggcatgtgcttctttcttttacttgtttcaaaaatatgctctatacatattacatatagagataaatcatctaatagagtgttctttttgttgattctttcagctttgggacatgagaacgctgactcttattaagacttacaccactgtggtgcctgtaaatgctgtcgccatgtctccacttctcaaccatgtatgcactaatgcttcttgaaattcaaattcggttcccaaaagcaacaagtcttgatgttatctttgtgaatgtttctgctctcgctcttttaggttgtgcttggaggtggtcaagatgcatcagctgtgactaccactgatcatcgtgctgggaagtttgaagctaagttttacgacacggttagtgtttataataagagtgttttacttggaaacatgtaacctggaaaatacacatatttaaataaccgtgtatcattgtgtttggtataatatatagattctgcaagaggaaattggtggtgtgaaaggtcattttggacctataaatgcttcggcattcaatcctgatgggaagaggtaaattaacaacatttggattttgattgattgacacaatcctcacatgatgaggttttgagtgtgtgttttggctctctcactgagtttgaggaatgtatatttcagtttctctagtggaggtgaagacggttacgtgaggctgcatcattttgactccgactacttcaacatcaagatttagattccgactacttgaacatcaaccttttagaatctttgaaaaagtctcccattccggattttgctttctctctcttttaacattttcatgtttttatttactaccaatacaaataccttgatgataaagcttttgaaatttgacagaa

SEQ ID NO: 155969 - DNA, 388 bp, Arabidopsis thaliana landsberg
cccagtcaaccgtttatgtcaggtaagatatctggatatgaatttaagatggagagaacttgtgcggccagaccaaaatctccagaatgtcaaaggcccagagacagatgttgccatttttagaaacgctcggatatgtgacaaaaagcttagtgataacaaggttagctacggagttttctttggaaatcaaaagcatctgccatcacgcgtcatgaagaatataatggaggtcgagaaaacccaagatagaaatgaaaagtattggttacaagaagcccatgttcccctatacttgatcaaagaatttgaagaaaaaatgcatagagtacaaatgccttcttcaaccaagaagccatccaagagattatcaaagaaacagagaaag

SEQ ID NO: 155970 - DNA, 1126 bp, Arabidopsis thaliana landsberg
gtttcttgaaaacgagccattcgaagagcctagagtacaacattacatcaagagacgttgtgttcttcgtaatctccttcagatcccggttattcgaggtaaaaaaccttaaaaccgaatcttaccaaatcatttgctaaccggttcttgaaacccgtctttgaaccggtttatagatgtttttttgttactgatgagaagaacatttgatggtgttaacagaagatggaaacaaggacaaaaagaatggcagaagaagagattacgaggaaaataatgacggtgtgattaaaagcgatcaactagtggaaataatggaggaaacaattcgattattttggcgatttgttcggtgtgataagcttactatctcgatacatgatcagaaatcgcgaaccaaatcacaaatagaaccggatcatgaagaagactcggaagacctagagatgttcgcagaggttaaatcacaacttcaaaatgtaagtgttttctttctcaagatacaaagtctaaaacattatggttgtgtgactgatgtgattggttggttgcagaaggagaaaaggttgagagatgtgttgaaaagtgagagatgtattataagaagattccaaaagcacaaggaagaagattcgacagaagatcaagtacttcacttcttctcacaagtagacatgaaacttgtgacaagggtcttgaatatgtctaaattgactagggaccatttggtttggtgtcacaataaattgaccaagattaactttgttaatagaaggttacatttagatccttccttctgtcttttcccttgttgagatttttgatattgacaaatttgtacattggagtaataatgaaaatacaaattttggcctcttgttattgtaagtaagactcataaaaagtccatcaatttttggctatcacacttgatgacttttattgattttcactagggttggatttggtccacaactgaaccaaattggttaattccaaaatgttaatcaaaacccggttatctccctagttcatttaaatgtctcttgaccagaatatactgaatggaccagagtctactgatagtaaaggctctagagattcaaacactcgttttccgggataa

SEQ ID NO: 155971 - DNA, 461 bp, Arabidopsis thaliana landsberg
  unsure (1)..(461): unsure at all n locations
tcagaattctcaaaggcgacacctttaacctcctccactctgtttttcttctccaacaaaaatgtcataatcccatttgggtactctctgtttcatcatctctttactgggtttggccaatttctcactttctcaaaccggtctcgatgattcgactatgcaatctatcaaatcaagtctgaatcttacatcagacgtcgattggtctaaccctaacccttgtaaatggcannnnnnnnnnnnnnnnnnnagtaatcgtgttactaagattcagcttaaacaaaaagggattcgtggaactcttcctactaatcttcagtctctctctgaattagtgattctcgagctcttcctcaatcgaatctctggtcctattcctgatctctctggcttatctcgtttacagactctgaatctacacgactatctttttacctctgtaccgaagaatctcttctctg

SEQ ID NO: 155972 - DNA, 810 bp, Arabidopsis thaliana landsberg
atgtctgtgcaccttgctacaatgaagcgcgtgaaaaattggtttttcttgatggaacttctataccgaaaacaaggcttcagaaaaagaaaaatgatgaacaagttccggaaggggtatgtatgcctcatgatatctgaaatttgtttcttcctttgttttttttttctttgttttctttttttgagtgtgtctgaaccaaaccaatggttttctgcagtgggtgcaatgtgataagtgtgaagcatggcagcatataatttgtgctttgttcaacagccgaagaaatcatggagaatccaccaagtacacttgccctagttgctatattcaagaggtggaacaaagagaaagaagaccattgccactaagtgctgttccgggggcaacaaatttaccagttacttctcttagcaagcatctagaggagcggttattcaaaaagttgaaggaggaaagacaagagagggctagacttcaaggaaaaacttatgaggaggtgatctctaactctttaaggctgtcaactgttttatgcttttgttcttttacgatacatgagctttaggttcacttgaacagcctggagcaaattttgttataataaccatctaccttcattattgatgtatcaggtcccaggagctgaatcacttactgtcagggttgtgggatcggttgataaagtattagaagtaaaggaacgtttccttgagcttttccgtgaagattataatccccctgaattcccttataagtccaaggtagcattagtacatgggatttgaaacttattcatgtaaatgatgc

SEQ ID NO: 155973 - DNA, 411 bp, Arabidopsis thaliana landsberg
tcttttgattctgtttccgctctttttgggtttacttcggattttaatcttcagattgacgaaaccctagtttgattttggtttcagaaacgacgagtcttcattgatttggtttccccaccagctcttcttcttctttttttgttccgagacctttttgacggaggtaggtacggagggaatctggagttgggtttgaaggatactcttatgcgattcttctggataacttgatgccgcaggatcacgcttcgtgggatcggaaagagctcttgaggcaaaggaaacacgataggcctgaacaatcttttgaatccccgccttttcgatggagggattcgccttcttctcaccatgttcctcgagagttttcttctcgtttgggatctggagacttccgcagaccttctt

SEQ ID NO: 155974 - DNA, 664 bp, Arabidopsis thaliana landsberg
gggctgtgggctttattggcatggtgctcgttttatggtcaccggttgtgattccattgcttccaacacttctccagaactggtctacaagtaatccttctagagtggcagaactagctagtgtagtcggtctctatgttgctgtattcattcttgttatgctgtggggaaagagagtacggaagtacgaaaacccattcaagcaatatgggcttgatttaaaggcatcaaacaaagaaaaggtaaaacctttaatgtaacacggagattagaatattagaatagtttggttttcgttgcactgctgaagaaaatttctcgaccgtcaatacttcattagccactagactaaccttattcaactaagaacttggtggacgtttttcaaacagcaacaggagatggcttagttgtgatttttcttttcccttaatttcacatgttcttattctcttcacttccatacattcaggctattaagacagtagaaatgatactgtaagttcattccttgcagattcaagagtttttaaaggcctttgcagggggcatcacggtcgttctactaattcagttcataaatgcattatcaggagctgcgtttctttctcggccaccatattttccacattcttttgatgccatgaagtggcttaagggatgt

SEQ ID NO: 155975 - DNA, 462 bp, Arabidopsis thaliana landsberg
ctaatctgttttgaatcttaggcgaggataaagatagcttgcttggggattgtgacacacaacctgttgatgacaatgctttgattaatgatcagtatatggagactcaggtcatggatactgaatgtgataatgaagaatttcttctttgtaatgaaactcaagcagttgatttgggatttgaaaccggagaagaagtacttgtagaggggaaacagttacttgaagcttctgatggtttggctactcaggttttggatctttgtgatgatgaagttgttgtggatagtgatgatgatgttactgatgtgttggagggcaacagtgatctctctgatagtgatgactcgggtagtaaagcggaaactgtgttatctagtgaagagaatagacaggatgctaatgaaaaggttaaatcagcagttgtctttgatgcttggtcgaacgaacatggagtttctg

SEQ ID NO: 155976 - DNA, 1049 bp, Arabidopsis thaliana landsberg
ggcctttgtgggcttgtgctgatggaaagattttcttggagacattttctcctctctataaacaagcttatgactttgttatcgccattgctgagcccgtttgcaggttctcatcacacacttttttaagagatttcgattttgtatagggatgtcaatgtacaagttatgattttggattcattggttactatttcaggcctgagtcaatgcacgagtataatttaactccacactcgttgtatgctgctgtttccgttggtcttgagacagaaactatcatctctgttttgaataagctgtctaagactaagctacccggggagatcattgatttcatccatgcttctactgctaattatgggaaagtgaagttggtattgaagaaaaatcggtattttattgaatcaccattcccggaggtaagttcaccagactgatcctctttctctagttatgtgtatgggatttttgtttagtttctctgttggttttgctcactcgttaaatataaacaatcttaggtgttgaaaaggcttctcagtgatgatgtcataaatcgagcaagatttacttctgaggtatgttgaactcctcaatttagtgctttatgattactattagtggatggaaatacataccatgatctgttgttctcaacagtttttgcatcttttgataccaatgcggcagagagatctatcctgattctcttggggcaattggttttgtgtttaaattctatttttttttcttgaactatataatagataaataaactcattattcttcttgttaaactccttgattcattgaatgtgaaattgatatctcttataccattgtattctccacagtatgttgacccaacttattaacttttttactagccatattatggtggtgatggatttacgatcggcaaaacaagtggtgaacttgaagcaggacctggggagctgttgaatgaagcagaattggcagcagcagcagaagagaaagaaactcactcatttgagatagaccctgcactggtaaatttcccctaa

SEQ ID NO: 155977 - DNA, 855 bp, Arabidopsis thaliana landsberg
agaaatccaaataaactcatttctgtaaattaggaaacttctgagaaagtgacgaaagcgaagaaggtttcggaagtaaatatgtcttccttggggagcagcaaatccctgagggatgagatggaggtaacaaccgccgatgtttttccggaggttaacgccgccgctgtgacggaaaatcttgatcggaacgagcttgtgcttgctgacggagtcgtgtcggctgaggaaaggaatattgagccagacaatcgtggagagaggaagagagagagcgagtctcctccagaggatgatgtttgcccgatctgtttcggctcctttacggttccgtgtcgtggaaattgtggtcattggtattgcggttagtcttttcatctttcttcttcttcttgattctcttgagccatttcatctacattgaagtatcaagcttgtgtctttttgggatatttctgttcgtcagaggtaaatttggagaattgtttgggttggaattgatttagggttccttttggtagccaagaatgatttatcacaactgattaacttttgaaagtgttgatttttaaaccatgctctgttactatggagtgttgtttgcaatgtcacaaaaagatctgaaagtttcttaaaccggttgctgattttgttacaggaaattgcatcttgcagtactggaactatgctgcaatatctaggccttgcaagtgtcccatgtgtgttaggcacatcacgaagctgtcaccagaaccatctttgcaagagcgtcaggagcaagaggtgaaggaggttcttgataaagtccgtaggtataaccgtctctttgttggaggtctaactggctttgttcag

SEQ ID NO: 155978 - DNA, 2086 bp, Arabidopsis thaliana landsberg
atggcgaacttgggaggcggtgcggaagcacatgccaggttcaagcagtatgagtacagagccaattctagtctggtgttaactactgataatagacctcgggatactcatgagcctacaggagaaccggaaactctgtgggggaaaatcgatccgaggtcttttggtgaccgtgttgctaagggaaggcctcaggagttggaggataagctgaaaaagtctaagaagaaggaacgtgatgttgtagatgatatggtaaatattaggcagagtaagaggcggcgtctaagggaagagagtgtgctgactgatactgatgatgcggtttatcagccgaagactaaggagacgagggctgcttatgaagccatgcttggtcttatccagaagcagttgggtgggcaacctccgagtattgttagtggtgcagcggatgagattttggctgttctcaagaatgacgcatttagaaaccctgagaaaaagatggagattgagaagttgctgaacaagattgaaaaccatgagtttgatcagcttgtttccattggaaagttaatcacggacttccaagagggtggtgattctggtggtggtagagctaatgatgatgaagggcttgatgatgatttgggcgtggctgttgaatttgaggagaatgaagaagatgatgaggaaagcgatcctgatatggttcaagaggatgatgatgaggaggatgatgagcctaccagaactggaggcatgcaggttgatgcagggataaatgatgaggatgcaggagatgccaatgagggcacaaatcttaatgttcaagacattgatgcatattggctccagagaaagatctctcaagcgtatgaacagcagattgatccacaacaatgccaggtactcgcagaagagctactaaagatactcgctgaaggggatgatagggttgttgaggacaagctgcttatgcaccttcagtacgaaaaatttagccttgtcaagtttctgctgcgtaaccgtcttaaagttgtgtggtgcactcgtttggctagggcagaagaccaggaagagaggaatagaatcgaggaggagatgagggggttaggcccagagttgacagcaattgtggagcagttgcatgcaacaagagcaacagcgaaagagagggaggagaacctgcaaaaaagtattaacgaggaagcccggcgtttgaaggacgaaactggtggagatggaggcagaggcaggagagatgttgctgatagagattgagagagtgggtgggtgaagggtcagcgtcagatgctggacctggagagcttggcttttgaccaaggtggtctcctgatggcgaataagaagtgtgacctcccccctggctcttacagaagtcatggcaagggatatgatgaagttcatgtgccttgggtttctaaaaaggttgataggaatgagaagctagtgaagattacggaaatgcctgattgggcgcaaccggcttttaagggaatgcaacagttgaacagggttcagagcaaagtgtatgacactgcgcttttcaaggcagagaatattcttctttgtgctccaactggtgctgggaaaaccaatgttgctatgctcaccatactgcagcaacttgaaatgaataggaacacagatggaacttataaccatggagattacaaaattgtctatgttgcacccatgaaagcccttgttgctgaagttgtaggtaatttgtctaatcgtctgaaggattatggagttactgtgagagaactcagtggggatcagtccctaaccggaagagaaattgaagagactcagataattgttacaacaccagagaaatgggatatcatcactaggaagtctggagaccgaacttatactcagcttgtgagacttcttataattgatgaaattcatctccttcatgataatcgagggcctgtgcttgaaagcattgttgctaggactcttaggcaaattgaaaccacgaaagagaatattcgtctggttggtttatctgctacattgccaaattatgaagacgtggccttatttttgcgggttgatcttaagaaag

SEQ ID NO: 155979 - DNA, 1488 bp, Arabidopsis thaliana landsberg
catggctaagtgctgtttggagatggaggaatcgctgaacgcggtttatagacaaagtcgggtttcagataaatctatcggtccgttggagatacgtgtggtgcagaacggcacgtttgaggagctcatggacttttccatctcgagaggttcatcgattaatcagtataaggtcccgaggtgcgtacgcctcacaccgatcatgaaactgcttgactctagagttgtgtctgctcatttcagcccttcgttgccgcattggtcaccagaacgacgtcgttaggtaaaactttatgatagatatcaaccggatgatgtgcggttttagaatataaagctctgtttctgatgctaattaagactccctgttagatttcttattaggctttgtgaattgtacaataaaatttgaagtacgtaccgatgtttttttccttcatcttctgttggaatccagctaataactagctttggtccaaaaaccagatatttttaaaatcagtatttaattattactacgccctaaattttctttaaacacggaatgttaatcaatgtgccctaatacttccaacataaaagtttggaaactaacattagatcttaaattattgttagatcttaaatttcaactgtgtacaataaattagatcttagattgtggactaccccaaactcgggcttctctacttagatcttctactaaatatttgggcttttacaatgggttcaattactttccctctcagggcttttaactagtttcggcaattcacaattgtaaaactgttgcaacatggctcattcagagataaagcccaatatcagtattggtaaatacacatgtttattttttacttctttttacacgagtttctagaaatgaatagtttttgacatgcaaacaattagtcaaatctcttgtcgaacaaattcagtgcgaaagcaatgtatacgaatcaatagatatgcccagaagataaaatgacaagttatcatgaaacgaatttgaaccagaataagaggagcacacacaaatgcttcgttaagcatatatgaacaaaacaaggccccacaaaaggaataaaaaattccttggtatgtgacatatcagggaaaccacactaactaaaatatttttacgaccttgaacatgttgaataattttttttcctttgatgttttaagatatactgcaaaacattatgagtacttgtataagatatatacacaagaaaaagagcataaaaaaacaaactacagaaacaggattatatattaaatgaagttatagataaattcataatgaaatgtctccttttttttagaatgtttctatttgacttaacaacaccttaaaattttaatagaatgcaacttaaccgaactattgtgactaaaattaaatttattttggaaacaaagctaaaacttcgaaagttactggagaaacgattggaaaacaataaattaaacaacttaatatga

SEQ ID NO: 155980 - DNA, 99 bp, Arabidopsis thaliana landsberg
acagtaaccaagatggatcgtccagtttcgattttggagagctaaaagaagcaattgttctgcaaggtgtcaagtataggaacgaggaagccaagccac

SEQ ID NO: 155981 - DNA, 2590 bp, Arabidopsis thaliana landsberg
cagaaaatacagaagatggtggaaaggcatccacagagcagaagagtcataaacgccatgggtatgtcgctgaaacttttcttggtttaaattagccaagaggttatcaaagctactgtaacaagatctgctttaactttagcttagtcaatggttaaaaaagcagatatattgtacctttatttagttttctcttcgccaaaatatattcagcagcctagttcatacatcttgcatctgctctccaaaactggggagtgggatcagttttatttgatagtcatcattttcgtttgcagaaggcaccacaagagtgattgcatgtgtgcgatatgtgttttgaagcgtcgtaaaagagaacgtgaacgagatgctggagctcaagaggttagtaatgtgtttgcttacaatgtcgcacccatatatctctaggtgtgtaagtgtttatgtgcaatgtgtaaactttgtatcaagtaacactgtaatatctctttcttgaaggagtcttcacctgcgggaagtccgtctgtggataattcatcagtaaacatgggtgaggacatggatattgatgttgacaagaaacctgaacaagaaaaaacagaaatcgtggacctagatagtccggtgtcaaaaacacaaagagtgattgaaaacaaacaagaggtggaggaagaggaaaacgtcgaagtggagagtgaaaataaaaccaaagctaatgtagaggacaagactcagtcgattgatagatcaatggaagagactggcgatgagcctgtgaatagtgctgcagagaaattggttgttttagcttcccttgaaggtccaaaatcgactcagaatgaggaagaagagaaggaaaaacgacttcaagagcaaaaggtatttacttatcttttgctatatacatcagagcaatatcgtcagaaagcttaataatgtgtttgaataagccaataagcacgattgagaaaattgtgttgtttcgttattgcagaaacggctggagttagagcgtaaagaatggagaatgaagatgcaagtaaagttccaagtcagaaacccgcagcttataagtctctgtgaaactctcttccataatgacaacaaccacaattccgtatggaacggacctcactcactgtttagacgtcgcggaggttcaaattgtagtagtgctttacacaaagcagttgagtcactgatgaagtagtaaggattcaaaatgtaacataagtgtttagctattcgttttacctgtttgttacactcaacaccattcacaataagcatctttgtcaatgaaaacagatcatatagctgttgatgaattttccaaaaaatagcgaatgttatttgaattccagaaattgggaatgtaaaaggttttctgttacaagagtgagcttaacaattcgttgtcctatgcccttggagctagatctttgtttgctatgctagatgaatctggttattttcatactcttcgagctgccacctctagtatgaatataattgaagaccataccaacctgattcaatgcaagaattagcaaaaactaggactaagaagaaattatgtgaagacatgttaaggtttgaatgttaataaatgtttgatactgaatgtttactgatcagacgcttcaatttttatcatttcaaccaaagcaataggtgagtatgctagtctcatatcaaaggcagtcgagttaacattgaccatagactggaggctattgttgaacaaatgttggaaaagtatgggatgcccaatttttttttttttttttttttttttttaattgttatttcgtgtgttttttagttgttcagtccataaatggttacctattaaaatcatctctctctaaattaaattgaaatttcaagagagaaaagcgagagaccccgagagaaaaccctagatctgagccgccgccgcctctccgccgcccgtggcttctgccggcggtgtgagagggcttcccccctttctccttttcgttgtcttgtctattagtgtagaaataaggtcgactcattgctcctttctccggcggctaaggtgaagctaaacgacgacggtgtgacgatgcggaggcagtagctggaggagagagatctcggctcgatccttatccgggagactggtggagttcggagctgctccgagcagctgtttcgatccctgtatccccaaggagaaccaagccgacggaagaacagaggcagagtcgcagtcagagtctttcaggcgtggggatggagttgtggtcgccggtggccgagataatccggagatctagtgaaccgtctcaatgtctggtccagtccggcgatggagcgaggcaacaaggcatgtgcggcgagatcgttctggcaatgcaccgtttatgtgaggtcttactaatccgggctccactgtgttatctttaatcgattagtagcctgatgttcattggttagctcgggaaaagctctagccttgctggtttgccttgtatcattggtcgggtcagtcggatatatggtccgcttttggtttaagaccgaaacaacgaaagccggggattttgagcctttctga

SEQ ID NO: 155982 - DNA, 1147 bp, Arabidopsis thaliana landsberg
ctggacccagctatgttttagctgtaacacaggatggctcggtttactcgtttggctctggttctaacttctgtcttggtcatggagagcaacaggacgagctccagccgcgtgttattcaggcttttaaaagaaaaggtattcacatactccgtgtctctgcaggcgatgagcacgccgtggcacttgattccaatggccgtgtaagttctttgtttctatctcgttctgtctccatttggtctcagaaaccaaaagaactcttgttttaataattctttcttgcaacttaggtctacacatggggtaaaggttactgtggtgctctaggccatggagacgaaaacgacaagatcactcctcaagttttggtcaatctcaacaattgccttgctgtccaggttagattcgtcccccatctgtaccatctcaatgtctgagataatgatccctttacaccttgttcctatattctctaagaccttcagcggtctctaagaactaataagtgatcagttcaattagaatcaaaacttagcacaagtattttagtttagaggattttcagtataacattcagtttatttttcggttttggtaaagaaaaccgaagctggatgtgttggcctttgtttgtatggagttttgctccgtttaggatcagttagtcagccctgatcatgactctgcttttacttgcaggtgtgtgcaagaaaaaggaagacttttgttttggtggaaggtggattactatatggatttgggtggatggggtttggaagccttgggttcccggacagaggagtttcagacaaagttcttaggccaagagtattggagtgtctgaaaccacaccgtgtctctcaagttagcaccggtttgtatcacaccattgtggtcactcaacgtggtcgcatttttgggtttggagataacgaaagagctcagcttggtcacgactcactccgtggctgcttagaacctaccgaaatctttctccattgtggccgttctcgtagccggctttgttgatccaaggtatagataaacaaccatgtttgtatgaaccggattgagattggatttaccggttagtgtaacttgaattgatttgtatctgtttgatttcttcaagttgtgagagtaa

SEQ ID NO: 155983 - DNA, 436 bp, Arabidopsis thaliana landsberg
gaagaaggagaaggagaagaagaaggataagaagaaagatggtaataactctgaagatgatgagtttaagaagaagaagaagaaagagcagtgcaaggagcatcatgatgatgatgattatgatgagaagaagaagaagaagaaagactataatgatgatgatgagaagaagaagaagaagcattataatgatgatgatgatgagaagaagaagaagaagcattataatgatgatgatgatgagaagaagaagaagcattacaatgatgatgatgatgagaagaagaagaagaaggagtatcatgatgatgaggataagaagaagaagaagcactatgataatgatgatgatgagaagaagaagaagaaggatcatcgtgatgatgatgatgagaagaagaagaagaaggataagcaccacaagggacatgactaa

SEQ ID NO: 155984 - DNA, 235 bp, Arabidopsis thaliana landsberg
aggatgagaagcatgaagctgcagtgagacaagaagcaacaaaacctaactacgtatgatcgtcaaaataaaagagaatcacttcagagagatgtgtttttttcaatgtctgacgaatcaatgtttttttcttgcaatttctcatgtttttccctaagaaatggtttttttttcgaggcaacaaaaaaaaaataacactcgaatttgttaaccaaaatctgtatttagggttctt

SEQ ID NO: 155985 - DNA, 477 bp, Arabidopsis thaliana landsberg
tgccagtttttatcaatatatatggtgagttggacttcaactggtgatgttgcatttgtgtgcaggagacgatgctcataagacgaatggttctgccaaacctggtgctggtggagacgatgcagaggtaagtataagagattcctttactcggggtaaatcaaattaaaataagccgattttgattcaagatttctttgcttatgttgcagtgatatgatatgtgtgcacctggacaatatgtttcaagaactgaatgtgcggtgaataatagtgaaaagtagagtttctctgttccctatatcatgattgtctatgttacttgtactctggtttagccctaaatgtctctctggtttgaatgtattgcatgcctgtctcaggacactcttatttgtaattcactactgtcgtcttactatctatccttatggatccaatcttgaaacttatattccttcatttctgaattgctga

SEQ ID NO: 155986 - DNA, 725 bp, Arabidopsis thaliana landsberg
atgccttgaagctgaatccctagaagaagagaaatgaagaaagcaatgatcaaagaagcaagattcgtttcttccgtcatgcgtttccaatttcacgactgtttcgtcaatgtaaacacattaaatctttctctctgttcttaatctttactctgtttttctctctgaatttttctttgaatcataaaattcagggatgtgacgcatctctgttgcttgacgacacaccaaacatgcttggtgaaaaactatcactttccaacatcgattcactaagatctttcgaagtcgttgacgacattaaagaagctctagagaaagcttgtccagctactgtttcttgtgccgatatcgttatcatggccgctcgtgacgccgttgctcttgtaagtcaaaattcaatttacccggtttagtgaaatttcggttttgtaactttggtctttgaaaaaaccagacaggaggaccagattgggaagtgaagctagggaggaaagacagtttaacagcgagtcagcaagattccgacgatataatgccaagtccaagagccaacgcaactttcttgattgatctcttcgaaagattcaatctttctgtaaaagacatggttgctttatcagggtcacactcaataggtcaaggtcggtgtttttcaatcatgttcagaccttataaccaatccggttgtggtaaaccggatccagctcttgaaccgagttacc

SEQ ID NO: 155987 - DNA, 1348 bp, Arabidopsis thaliana landsberg; identical to SEQ ID NO: 32969

SEQ ID NO: 155988 - DNA, 797 bp, Arabidopsis thaliana landsberg
gatttttgacgactacaaaaccctaatcgagctcaacttgagcattgccgcgctcttctgctattctaagatttgatatttctgcataccacttggggttagctttcgttggtgaagaaatggatatggatatggacacttcccctagctacttcgaccccgaggccctcagtgttagggatcaattccgtcgctatcggtaaaattttcgactacccttttccgattttctgggtcttcttactttaaagtgaatttttcctgggttgtcgtttgtttgttagtacggtctaaattagctgattctagcgagacttgaatgcgatttgaattgttggattttctctaagaactgaatcttattaggggttatggttttagttcatggaatctgggtatagtgttttgatgcccggctatgtcaaataacattgcttgcagaaagagacactctacatcgccacatgaggaaatgttgagttcaaatgtcagcgagaacagattactgtatgacgggcataacattcatagtccaacaaatactgcattgctccttgaaaacattaaggaagaggttgacaactttcacactgatcattacgaaggaacacctacaaacccgatatctgcttccaggagggagagtgttggaattcttaatgatgacgatgaggctttgtttcgtcgagtagaaagtcaatcactcaaggcttgcaagattgagaatgatgagttagcggagagtggagatacaacctttgctttgtttgcttccctgtttgattctgcgcttcaag

SEQ ID NO: 155989 - DNA, 534 bp, Arabidopsis thaliana landsberg
aaatcctagtcagtttctgagaaatgttgctgagaagtcttaaaacttttgcacagttggatagaaaaccgtcgaaatgtgttgtgtttgaggatgatcctaggggtataaccgcggctcacaactgtacaatgatggcagttggattaatcggtgctcatcgggcgtaagtatactcttttaccctctttcaggaaaccataagcatttctggcatctaactttaacaaaaacaaatctgcaggtatgatctggttcaggctgatcttgcagttggaaacttttacgagctatctgtgataaacctcaggagattatttgccaacaaaggctctacatttatggatcacgagaaacagatcatagaaaaatcgccgcccaaaagaaagcttaccattgataccatattctaagcacattggatcgcagcatatagtagttaggttaggttcatgatctcttaagctcttgtctttatggttatacatatgtttgatactagacgcaaaccggatctatcgagtgaaatatgaa

SEQ ID NO: 155990 - DNA, 525 bp, Arabidopsis thaliana landsberg
tttcaattcttcgtcattgaccttgttgatgattcctgtgctttcagattcctaaagagcttacatttgttactcaactttaaagttttgacgctagagattactatcctcttgctgggaactcaacgtgaccaggtataaatctcagctcatagataagcaaagtagttttttttctacatctcttagatttgtaccctttttagctcacagtatcagttcaataaccaagctgatccctcttatgaacttacattcattggttctgtttttgctagactgtgtttgaaagatagcaatggctggagtattagctggggattgttcattcggtgagagtggtgtttcatcttactccaggaattccaatgaaaagcaggacgaggttgcccgctggtattttggaagaaaagaaattgaagaaaattcaccttcaaggttggatagtattgacttaaagaaggaaacatacctccgcaagtcatactgtacatttttgcaggatttaggcatgagattaaaagt

SEQ ID NO: 155991 - DNA, 459 bp, Arabidopsis thaliana landsberg
aaatcaacccgcgcctctttttcttcttcctgcgtctctctctggtggtgacgatcgaagagagttcacggattcgtacaaggattaaattaattattctggcaaattaatcgaagcgtaaggaattggggagagtgatttttctgggttcgaatttggtggttgattcaaaaaaaaaaaagggttttgagatttgggtttttttgatttcgaattttggttatgggtttaggcaataagggtaacaaattcaatttcggcgataatgatctcgccgacgaagctagtggtgccgatggcgacgaaggtgatggttttggttcggttgcgtgttcgatttgtctcgagacggttgttaaaaacggcgatcgagcatgggctaatcttcaatgtgaccatcagttccatctaggtgagtttgtggattctgatacgatactcttttttttgttctttttc

SEQ ID NO: 155992 - DNA, 314 bp, Arabidopsis thaliana landsberg
caggtggatgggttgtcctcagatttatcgctaataatcctggttagtaacatttctatatgtttagtatttacaccaattagatattaatcgatggattaataagaaaaagaaattgtttttttgcaggtatatggctgttccattgtcacatggatgcacatttaccattaggaattatgatggctttcatagttcaaaatgggccaacccgggaaacgagtttgccatctccaccgtcgaatcttccgcaatgcactcgggatcctacgatctatgactctcggacgactaatgttgatatgtcttactaa

SEQ ID NO: 155993 - DNA, 1224 bp, Arabidopsis thaliana landsberg
atgggaacaacaacacaggtacaagatgttttcctgataccatatttttttaataagggctccctatatgaatgaatcagtgggttccctgtcatcaactaacctattattttctttaaacggggtttcagagtcacaacagcaggatgtatctaacttgagcacttctgcagcagagcaccagattctggtaggattttgtaatgttagctgtctgcttgtgtgagcaaggagcgatctttaatcctagaacttaatttccttcaaatgtaatgctatggcctacgggacaaatcagtgagagctaatcatgacacataataatcaaatgtcagatattggcaaggcaacaagctcagagagaagaagagttagcacagacacagcgccatattttagctcttcaggtgtagtagaattggttgcattgatctgtttctgcacatgttgcaattagtaactgtttattctgaatcaggaggaaatcgaggagcttgaacgagaaaaccgtcttcacagtcaacaggtatgtgattacacgagagtttggttgctttgccagtttcttaggatcttatttcaaacttccggtggtatgctaaattacaggaagcagtgctaaagacggagttgagggagatggaaagaaaacagaagagagaaggcgtggatatgacatacctaaagaatgtgatattaaaactgctagaaacaggtaaaaaaacctggagattaaaggtggattcacgaagtagatgttttaggggtaaattaacttgtgataattgcaggtgaagtggaggctttactacctgtagtggggatgttgctgcagttcagtccagaggagatccagaagtgtcagcaagcctaccatagctcaacaacagcggcaacaacaacagaggcgactccaagtccggcaagtgagggttcaggtctatcagtcttctcaagattctcgttttcatagtcgggtggacagtggacacattcttttgggccaagatacatacacatacatacgacattgtgtttaagtccttcgtttttgtgtaatgaacactaaaagtcaagaaaacactttttgtccagatgtaaagaaaggataagccactgaattgagttgttgggccatttttaatggagtctattgtaatcatgcagaaaaccgctgattatcggaattaatgaaactaaaaaagtcaacgcaaaattaactac

SEQ ID NO: 155994 - DNA, 2074 bp, Arabidopsis thaliana landsberg
caaatcaatgggatcttccattaagatcaactcaatatccatagatctcgcaggtgctgccaacgagattgatatggtgaaatgtgatcatttttccatgcggtgagtatagtttgttgaccttatatcatcaacctctcttgctagagtatgtttatatagtagcaagctacaagatgaaatgacatgaataaccagtttttcttctctgcagtggattcgtagctgaaactcgtgagagagaccttagaaaatgttggccgttttcagaagagagtgttagtttagtagaccaacaaagctatactcttcctactttatctgttccaaagtttagatggtggcattgtatgagctgcatcaaagatatagatgctcatgggccaaaaggtatatcacatttccaatattgttttttatgtgtctaaagacgtgtctacttgaacttatgcattttgagttgcttgcagattgtggactgcatccaaactcaaaagttattggaaactcttctgttatcgaaagtaaaagcaagttcaattcgctaactatcattgatcacgagaaagaaaagaaaactgatattgcaggtatgcatctgctgagtcttggttcagtttcataatccatagcaaaatcttaatcattttgtattatcatgtttttcagataatgctattgaggagaaagtgggtgtaaactgtgagaatgatgatcagacaggtaaagttttctctggtcaagcaaattatgttttctctgatgatctcatgatgcggaatactaatttcttaaagcttcaacaactgcagctactacgtttctcaagaaagcacgtggtcgacctatgggtgcttctaatgttaggagcaagagcagaaagcttgtgagtccggagcaggtaggaaacaacatatctaaagaaaaactaaacaaaccatcgatggatattagcagctggaaagagaaacaaaatgtggatcaggctgtgacaacgttcggctcatctgaaattgctggtgtggttgaggatacaccacctaaggcaaccaagaatcataaaggcattcgcggtctgatggaatgcgataacgggtcatcagaaagtataaatcttgctatgagtgggttgcagcgtaggaaatctcgcaaggttcgtctactcagtgagttgcttggtaatacaaaaaccagtggtggtagtaacatcagaaaagaagagtctgctttgaagaaggaatcagttagaggtcgaaaaagaaagttgttacctgaaaacaattatgtcagccggatattgagtacaatgggtgcaacctctgaaaatgcttccaaaagttgtgactctgatcaaggtaatagtgaatcaactgatagtgggtttgacagaactccatttaagggtaagcagagaaacagaagatttcaggttgttgacgagtttgtaccatcacttccttgtgaaacttcacaagaaggtatcaaggagcatgatgcagatcctagtaagagatcaactcctgcgcactctttattcactggaaacgattctgttccttgtcctccgggtactcagagaacagagaggaagctcagtttacccaagaagaagacaaagaagcctgtaatagataatgggaagagcactgtgatcagttttagtaacggcattgatggaagtcaagttaactcgcatactggtccttccatgaacacagtatcccaaactcgagacttattgaatgggaaaagggtgggcggtttatttgacaaccgtttggcttcagatggatatttcagaaaatatctctctcaggttaatgataagccgataacatctttgcatttgcaagacaatgattatgtgaggtcaagagacgcggaaccaaactgtcttcgagattttagttcctcttctaaatccagctcaggtggatggttgagaactggagtagatattgttgacttcagaaacaacaaccacaatacaaacagatcgtctttctcgaacttgaagctaagataccccccttcttctactgaagttgcggatttatctcgggtgctgcaaaag

SEQ ID NO: 155995 - DNA, 3675 bp, Arabidopsis thaliana landsberg
agcaccagcttgccggcatcgtttcatattaatgatttgtcagctggaaattttggtcagcagttgcacaatcttgaccaatcaagagagcaattcattcatcaagtaactttaagcactccatttgttgtgagcaactgtcttccagatccaatatcactttctatcgaaagtggtggcatcactcaaactgcatcccttcctgaggtctgagagatatttccaaataatttcgttctggaagataagagttgaaatcatgtttttatatggttgatatggtattatttatgtgacaataaaatgtattttttttagggggagacgccattccatcatattgatccttcacatgacctggtccttgagttcaaattaaatggctgtagaacatcatctttaaagttttcacgctcagaaacttttagcacagaggctaagttcagtggagggaagttctctcagattgaaactatttcctttgattcacacgttggtggtggtaagatttacctctttatgtttaaaattggctactcattttgagacaattttaatattgattttcttataggttctgtttatgtatcgtgtgagaaaacaatggatgcaacatgtggggctcgggaagtattcatctttgtcccatttttactgtataactgcactggaactcctctgattgtttcggactgcaccaatgaaactaaagggatttacagcgtaataccgtcttgctacaacctgattgagcagcattttgttcaaagtcgaaaagttggtcttggcattttgacctctgagaaagatttgctagataaagctgtaatggaggatattccttgtagtccttcctcatcggagtgcagcaacactgcttccagtactgagagatttatagataagcatgcgactcagtcaactcgccaagtcccttttgcagcatatccaaaagactcagcaattgttcgcaagaggagcttttcttcaaaaagtttaagagaggtgtgcttccaaggtaatgatgagtctggcaaagtaaaggcatgcatttattcaccttgccctatttccagagtcagtgacaccatgatccgagtcaaaagggacctgccagggtgggttagttcaagtagcccataccctctgtggtctgctccgtttcctctcgttccacccagtggttctacaaatgtagttgtcccacaaccatcgcctggtgaatcatctttattatctgttacatgttctattcttggtggtgcattagcggggagaacgcaagcaattactttccaacctaggtgatagacagtttcaccaaatactctgttttctcctgaaccattatccctagtatccactaaacaaattcccatgttgcagatatatcatctgtaattcatgcagccataacctgtgttacaagcagaagggaaccaatttagtttctcatctggctgttggacagcattctcagcttcaatggacagatactactaggttcgtttacttatctatgtcttatatacaacacattcttggtattaaggagtggttttctttttgaaaccaccactgttgctacatttatcttacctttgtactgagagaatttacagtcaaaaggtttctacctatacgccacttactcttgtatataaccagggagctgctagtttcaatccgtttaaatgagcctggatggcaatggtcaggcagcttcttgccagatcatttaggggatacgcaactgaaggtttggaactatgttaacaaagctttcaacatggtgcgggtggaagttcagaatgccaatatgtcaagcggagatgaaaagattgtagggagtgttcatggacatgtcgggacaaactttattctattatcagatgacgacatgggctatatgccttacaggattgataatttctcaaatgaggtcagtaatgttatgattgatgattctgtatatccaactaaagagttttagttatttttcccgtcagttcacaggttgttcaactctacaacttaagtagcattgcctgaatacttcaaagcattcggaaaattaaattgagtaatcaatatctatgaggcctaaattgtacatgattttctttggcatccgttgagggaactatgctagttgtctttaatgtagcatgtaattttgggacccaagtgtaattgttggtgaaaacattttcttactggaaacttgctttctgagaatcaccaatgtatgatatcttgtcgattttgaaacccttatttgctcccacaaggaactgaaaatggattttttttctgtgggtgatagagactgagggtttatcaacaaaaatgtgaaacttttgataccatagttcatccttacacatcttgcccttatgcttgggatgaaccctgttatccacatcgtttgaccattgaggtatggtgattacattttctgcttaatgacaaatcagccctttgtatctgttgacatttctatttgctgctgttctcttcttttccttgtcttacattttttctcttaatgaggaatgtaggtacccggagatcgtgttctaggctcttatgcatttgagataacaaaacaacctattgcagtgcacttgcgctccacctctgaggtataatatcacaaataactttgttatgtattatttatttgtggttatcatggcttttactgagtggttcctacatgctagacccatctatatattggaatgtcctaccagcatgctttcttaagcattggttatgaacagaagaaaaaaaactagccaatctctcgttagtctaatttggggtaatattcgcatgaatttgaatgagttggatcctcatatcttttagcctaaggtagagcatctccaaatttcctttgcaaattaagtttgaactcaacaagtataggctttctgggcctgctaaaatgatgagatggagtggattaaactttacaataaccagttgcatgcagctctggacgatatacaataaccagttgcatgcagctctggacaatatgaatgcatgctttgtttttttgtatgtatgcagaaattcaaatcagtatcatcatcctggctaagtaaatatcttctgttgctagaccttgtaaaattggatcagtcgaatgaatgagtggtggcactgaaagttacactgatattgaattgactctaaagaaagaaaacagatgtcagctaatcacatgaaaacaaagcatatatttgataagaccaaccaatttcattcattttttccttcttttgatactctcttttgagttccacataattagtgcaaaagtgcgcttagaggacgtgatttatccttgtttcagttttctgtagccactctatcactgagtctcaggtattcttatctacttaattgttttaattgacctgcttcagaaacctgaaaggacattgttgctatctatctgtgctgaaggagctacaaaggtataatttctctgacaccataaaacttagctaactttctgaggacaactacgtctctctatgttgctgatgtaacttgttcatttttgtctttacccattccaggttttcagtgttgtagattcaggttatcacaaaataaaagatataaaggaaacatttgactgcagattccataaaaggg

SEQ ID NO: 155996 - DNA, 724 bp, Arabidopsis thaliana landsberg
  unsure (1)..(724): unsure at all n locations
gttttggagagagatttagcaatttttggattcttcattgctttgggcaggagcacacagtccattttagctgcaaatggttttgattctctggagaatcctttggaagaccttgttaggtaattgtcactgtttcaccctattctcattcctataaacttttgtaagtttgtattctcaccaatactcatgaacttttaatattcaggcatcttattggaggcagcgtcctgtactatcctccactttcagccatcagttcataccagctgtatgtagaggtagacattaatcacatcatcagttgaaattccctaaggattatattgatgtcttttcatggaaattaattgtgtaggttgtttgcgaagaactagaatggattcctttctattcaaacaatactggaacacagccaccaaaccaatcacatgggcataagaccaaaccagaaggaccacccaattatgaagttattccccaactgttggatgtttgttcttattggctacagagttntattaaatatagtaaatggccagagaatccatctaatgtcaaggcagcaaaattcttatctaaggggtatttgacataatgtttaattgtttactcaatatttggacaagaaagaacgtttttatttatcctgctgatggtctttcttaatgttcaggcacaagactttggttcggtgtaaagaagaactgnggatattaaagta

SEQ ID NO: 155997 - DNA, 187 bp, Arabidopsis thaliana landsberg
aacatatatcagaagaagaagaaagagagaacaaatcatgagtggctattccaagatggattcaacagaccagaaacttgagccggaccacccggtggtcgatcctcagattcagaagcccgatcttgaacctgctgaaatgaaaccgaagctgagcaggaacaggtcagtgtctgcatcagcacaa

SEQ ID NO: 155998 - DNA, 786 bp, Arabidopsis thaliana landsberg; identical to SEQ ID NO: 48859
  unsure (1)..(786): unsure at all n locations

SEQ ID NO: 155999 - DNA, 277 bp, Arabidopsis thaliana landsberg
acaaaccctttcttcttcctctcataatctctctctctcttcttctctctcgctcgctgctctgttttagggtttttctcgttcgtctcttctataagtactaggtttgttttttactcaaaaatcgttcaatgtatgttcgattttgaagctttcatgcatgattcctgttgatttcgtcgattttggtgttttttttctcttttttttagcgatttctgcgctgttagtgttcatctgtatttttcgtcgtcgtcgtttggtgttaaacaagtga

SEQ ID NO: 156000 - DNA, 487 bp, Arabidopsis thaliana landsberg
cttatggttaaaaatatttcagaacgccgggaacagaagaatatgacaagttctttgaggaaggaatcttcagctgcatcggatgcaaaactcctctttataaatccaccacgaagtttgacgccggatgcggctggccagctttctttgaaggactccccggtgccattaaccgagccgtaaagattatcttttgtatgtttaatttagtttattttcatgactactggttagtaaaacattcttctttttgcttgatttgattctacatttaccagcctgatccagatgggagaagaactgagatcacttgtgccgtatgtgatggacatttaggccatgttcataaaggtgaaggttatagtactccaaccgatgaacgcctttgtgttaacagcgtttcgatcaattttaacccggccaaaccttcctctataacctgactagttgatcgtacattactttcaaatcagattgtggtgttcaa

SEQ ID NO: 156001 - DNA, 440 bp, Arabidopsis thaliana landsberg
aagagaattgataataagatacgttagttcctccttgtccatctccaaggtggtgattccacatccaccatgacggcggatcaagaactacaaatcattggtgagtaagcataaaccagtttgtggtgaacgtcctattctttcatcttcaaaaaaaaaaaagatggttatgatattttatgattcaatatatgaaacgatcgacaacaaataaactaatttttgcgttattttcactcacttaccagttcggcagggaaaagaaccaaatccaacagttcaagatgaaagaaattcagtcagtagcagccaagcagaagtatctcactctaacacatacaaacggtggctcagggtgactttatatacattctttgtcatttcaggccaaacagttgctacaattttgggcagagcgtactatgaccaggagctgagag

SEQ ID NO: 156002 - DNA, 459 bp, Arabidopsis thaliana landsberg
agtctctccctactctactcttatctcttatagcttattggattattgtttttgtagcagagctattacaatgtttatggaggggcaactgctcagcatccaatgtatggaagcggaccaatgactggtgtagcagcagcaccagcagcagggttctacccatatctccagtttgctgaaggaaatggacctgtcactggttatgctcccctccactaccccaaccacatgtttcactattctgctcccgggggaaactacccgcatcacaatggttcaccagtgtctcttgcaccttcaccagtcataccatcaggttagtttctttatattttttcgttgttcatacacaacatggaaaactagaggtactgatgttctccagcagtttgctttgcagttccacaggcttgaccatgaaggctcatggttcatagttccatgatgctatgtagggga

SEQ ID NO: 156003 - DNA, 174 bp, Arabidopsis thaliana landsberg
gacgttcctaatctacccagtcatatacattccaacggactcgggtgcgtacgtttcggtttacgtaagaatcgataactcaaccctcatcaccaatccaaaagatgtgtatgcacagatcacattcctcgcttataaaagcagtttagacaagtaccaaataaaccagggtac

SEQ ID NO: 156004 - DNA, 157 bp, Arabidopsis thaliana landsberg
gcgatgttgttcattaacttcactggagaaggagctgagtctcttaaatcaaagtaccgtgaagttgctacatccaacaagggacagggtcttagcttccttctaggtgatgctgagaacagccaaggtgcattgcaggttagtctgatattctatc

SEQ ID NO: 156005 - DNA, 941 bp, Arabidopsis thaliana landsberg
atggaaggaaaaaaagagatgggtagttacaaattctgtctgatcttcacaaggaagttcaggatgacggagtctggtcctgtcgaagacgtcagagatcttttcgagaaatacaccgaaggcgatgctcatatgtcgccggagcagctacagaagctcatgacggaggaaggaggagaaggagaaacaagtctagaggaagcagagagaatcgttgacgaggttcttcgccggaaacatcacattgcaaagttcaccagacgaaaccttactcttgatgatttcaattattacctcttttctactgatcttaatcctcctatcgccgatcaggtttataaatttttcaagtcaaactctttttttttttttgttcctgggaagaaaagtctgagactttttggaatctgggatttgatggtgtttgtttcttgataaagattgagattgaaagattacgactttagattcttctctctgttggttttaccggaaaatctcagaatgttttctctctcatcgctatttgactcttttctctttttgctattttctggcctaaatttagtttgatcaaagagaaaataaaaatcatcacttttggtagcttcttcttaatgcttatgaataattcatcaaatcccaataaaagggtgaaacttttctcgatgatatgttcttggtgtgtactctgcagctgctgctgaaattctggaatctgactgtttgattaacctgtctaaatttagaagtttctattttggatactttctattctagtagttgcttacttctgcagagagaagattctcaattcttcagtgatataactaaaacattgttggttggttatttcaggtcccatcaaaacatggatgcttcattgtcacattactttattattcccggccccaattcctatttaactgggaaatcagcta

SEQ ID NO: 156006 - DNA, 816 bp, Arabidopsis thaliana landsberg
ccgcggcgctaatgctccaagttgaatatactttcaggtcaatcgatatgtaaatgattttgattctttactggttatttacatatcaaattttttggctccctctccaatgaaggaatccaaagacgattccgtatctgttgacgcgaataatctagttcggccccgaaccgtgaagtagaatactgtcccctacactattccaaagtggagtggccctccgtgtcaccaatttcagcttgaagttctcaaagaaagcgccattgttgagaaattagacgtgtaagtaaactcaaactcttatgaatctattaccctctaaagctttaaggcttctgattgaattaggaaggaaatggtatgtaattcgtatttgttcactttgcaggtataagagaggagcttacttgtgcttgctgcttgtgtcaaattggtgtatctaatttgactttttaatgttatggttctgatactagataatactgttatcatgtatctctctaggaagtaaaagaggccaaagatggatttcttatgtgcagtgtttttttatttgctttaggtcagagcattatgtgagaaagctaaggagatcttaatgatgaaagcaacgttcaggtcagttcttgatcttgcatctcgtgccaattataaaacccatgtggtagattgtgtaactaaacaatcatttggtttaaagagccttaatttttatattcttactgtatgcagcctgttaaaagccctgtgacaatctgcggtgatattcatggacagttccatgatcttgcagagcttttccgtattgggggaaag

SEQ ID NO: 156007 - DNA, 793 bp, Arabidopsis thaliana landsberg
  unsure (1)..(793): unsure at all n locations
tttctttttgcttctatctaggtacaccgttcaagagtaaagggtgacaagagggatgttgttgtaaaggtgaggaataatgaggagaaaactgaaatcttcctagtctacttttaattggtttctgaatgtgctacgacatgtttaggtccaacatcctggcgttgagaagttgatgatggttgatatcagaaacttgcaaatatttgcattatacatgcagaaaactgatatcaaatttgacttgttctccatgacaaaggaaatagagaagcaggtatatatcattctttctatattttgnnnnnnnnnnnnnnnnnnnnnnnnnnnnnnnnnncactatcagtccttgttttcatttactagattgggtatgaattcgactttaaaagggaggccaatgcaatggagaagatccgacgttttctatatgataacaatagaaagagtcctgttctggttcccagggtgtttccaaatttggtgaccaggtacttattcttatattagcattctggttatcccaataatgttttaaggctttttaggttgtcctgtttcactgatcaagaattatggttcctgtcttttcgacatagtctctttccattcgaaagttctttaattttcggttatattcactaatgagtgctgatcagaggaataatcataatacgcacaggaaggttctggttatggaattcatgaacggaatcccgatcttgagccttggtgatgagatggcaaaaagagggataaatcctcatggtaaaatggcagaggcagcaaaatt

SEQ ID NO: 156008 - DNA, 371 bp, Arabidopsis thaliana landsberg
gttccagaagaagtgatggaatcagcgcagcccgtggcaaatgaggagatagttgcacagctagtctcaatgggatttagccagcttcactgccagaaaagctgccataaatacttccaatgctggggttgaagaggcaatgaactggttactttctcacatggatgatccaggtaattgaaaatagttccacaagtctttagttgaggctcaactaaattacgactcgagaccgatttctaatatgatgaggcattatgtttcatagacatcgatgcaccaatctccctccagtcttctgtcattggtctttctagcgttggtgcctgactctccgttggtttagctgaagatgtcgctcgggtggcgct

SEQ ID NO: 156009 - DNA, 557 bp, Arabidopsis thaliana landsberg
cgcgactccaccaaaaggactatttgacccttttcttcttcctcctccctcatttctaccacctcgatttcttctttatttattagccgccgaagggaattcctccggcgccattttttatagtttttttgtttttatctttagagatgggaaccgaaattatcaggcctcaaaattgtttggttgaccggatgagagattctccggcgactttttttaactcccggaggaatcattttcaccggaaaccgcctctcaaacctgatcaaaggagaagattcggttccgatgagttcagaacgacgacaaagaacattgttaggagaagaggagagtcttttgactcattctcaaacatcaaagttcgtaaatattcaccggaggtttctgccgatgatatttatgccggatcttcgatattcgctgtttccccagcgccgagctcgttacctttgccgtctttctcgaagaagaaagcgaaaagccaggatgttgtcgtttccattgatgactcggcctctcaagatctccggagacttctccggctaaagttttga

SEQ ID NO: 156010 - DNA, 695 bp, Arabidopsis thaliana landsberg
agatgattagactgattacttttacaagtggtggccgtgcatacctcaatttcatgggaaatgaatttggacatcctgaggtaaatctacaaactcccactgttctaaagacatcatctttatttttctgattctgacgtttcatccttgtgtcagagggttgagttcccaacgcagagcaatagcttctcgttttcacttgctaaccgccgctgggacctgctggaaagtggtgtgcatcatcacttgttttcctttgacaaggtatcagtcttaccattaccacctgtttacaaaagtgcagcttccatatccatgattctgttagcatctctgaaaattttcttccttaattttcctagcaatttaatactgtattagtctatgaaggcggcaaataaatgttatcaagccgagaaagttgtcagactcgaacttaaaaaactttactgccgataatgctcatcatatcgggagaaacggaatgcttgattgattattgaagttttaattgtatatcttcaaaatgtaaggactagaaaatgttccaagcatatatcctcttgtatcagaagagatgctttttagctactgatctcgttctttatttgtaggagctaatggacttggataaaagcaagggtatcctttcaagaggtctgcccagcatccaccatgtgaatgatgcaaatatg

SEQ ID NO: 156011 - DNA, 511 bp, Arabidopsis thaliana landsberg
ccatagaggcatgcctgaccacagagtgcgtgcaacacttgctttacctttaacttccacctataaaagcctcatcagtctctcttattatattgaccagactcacatgaacactaaaacctgatgacacttcttcactcggtgaatctttcttcaggcctgttcataacagaaaaaaaaaatgatgtcttacggtgctaacttggtcatcaagagttttgaccgtgcttccgtggtgtatgttgaagatgtggtggatagctctcgagcgacatgtgttgagaatggtggtgacgacgatgacagtggctatgattatgcccctgctgcgtgattgtctcctattagtataatgtaatttagaagaaaaaaagagagagagagagatgataagataatttagatattagttagaccatttatgtactagattgtgtctcgagttttcttgtcaatgagcaaacatggtttccatagatgtttacttgtggattgatattgtctcttaatt

SEQ ID NO: 156012 - DNA, 8438 bp, Arabidopsis thaliana landsberg
ttgcggaacacgagggcaattacccaacccatgacttggagatggcggcggtgatattcgcacttaaaatatggagatcctatctctatgactctaaggtgcagatattcaccgaccacaagagtcgtaagtacatattcacgcagccggagttgaacctccgacaaaggagatggatggaactagtcgcagattacgatctcgacattgtttatcatctaggaaaggctaacaccgtggccgatgctctaagccgaagaagggcagaggtagacacggaaaggaataaggaggaactgattggaacgatcagggcaatgagtctcaacaccttggaggcgaatacggaaccgttaggattaagtgcggcggacaaggccgacttactaacgagaatctgtaaggcacaaggaggaacccatccgaatggttaaagtcctatggtcaattatcggccgagatgagttcacttgggaaacggagaatcgaatggtcgccgactatcctaagtggtacaaaagtctaaccgtcgaggaacgacttgggccggattcggggacgaatccttctcaggtgggggagacttgtaacatccccgatccgaacttgaatcgaggggaagggctgggacgagacttatagagagtcgggcaagaaaactcgtcccaaggcccagagaagggcggccaaatcgtgtgaacatgaatggccaagagcccgagggaaagaagtgggaataaatagctcggaaagctaagtgggaagctggagcagctcaagggaagctcggggtagctcggacagctcaaagggaagctgggccagctcgggagactgctagctagctccactagctcgacttagctggaaggggatgaggcggttactcggacggttgtcggacggtttccccgacagttaccttgagcggttacccggcggttaccgggccataaggacgcgccacgtgtgtggttaggaaggaagcgccctgaaggatctggaaggacctagaggcgcccgttcgcaagggcggttactcgccccttccttataaataactcgcccttcagccaaggaagtaacagaagtccatataccaaaactctcaccaaaactcagaaaagaaacgtgatctttctaagggtgcgagcgaacggaacaagatggccgagattgagatcatgggcactcccggcaccactaggccgacggaggccgaggaagcgaatggtcgaacgaccaaggtgaggcataaccgtaccgaccttaggccgaacggtcttaaagggctcgggaattcggttgatgcgatctatccttctattattctgtcctaacgattgagttatgtgtggggggtgaaacatggggagcatcatagcatatgcatgatcgctaagtgtaaaccacatcatactcatgattcgttaatttcagaatgtgaccaagttcgtgggaaggatatggcttagcggcaaggatggttgtccgggcaagtgggtggtgtttaagttaaagtattggatcgaatgattgtaatagcctatagtgcaaacactcatgtcgttcgaaaccttatatgaataaagttggcttgtttctttgtgtgaatttgtctcttttttacttatgaatctcagaatttccggtgagaattacacttagagcgaattcggataggacctaaggacacttgagttatcctcggatgggaacaacctcaccgggcggacagcccgggatgggacgtttcacattcttcccatctactcgacccccaggtcgagtaacctcagctcaggccactcgatgacgccactcgaccccctggtcgagtatcacttcgccacaccacctgacctcactcgaccattcactctaccacgctactcaaccccctggttgagtatcatcactcaccaccaataccatcactcgaccaagcactcgatcacatcttcggagtctactcaaatccgcactcaaccacacaagctgagcacaaggaagagaagaggagaagaagaagtgtttggaagcggtctggagctccatcggatcacgaagcccatctcggcccattatcactctatgggccgggcgattaggttattggcccgtctattatcattttatttcgttttgtataaatagatgttttagggttctgtcatgagacatctaggcgacattgagtctttacttcagttttattttctgttttactctggttgcgccgctttttcttctacaacctgtaatttgagattttccaagttattcagagtccgcatttaatttcactatcatctactctttatttctttacttatgcaatattatcatttatctgcgtttatgtctgtgagcatgttgtctgagtagtgacatagagttcttaaggatgggatagagtagttgtggaatccgtattctgtagaatggttaagtttagaattgattgaatccctttaggaatagttgtgtttactgcttatttctttctgataaactggaattcaattccaagcattctcgcacccagaaggtgttcgatggaatgtttgatcccctagtttctgagatattcatctctatcccaagggattggacttttagagtgtttattgactttattagtctattctgattgcctgcatagttagattccgttaatgggaattagtctaggctagctttgcttgaggatttctatcacgtgagtgaattgatctgttgttgaacctgttgtctagggatagcttgattgctcttgttaaccatccggaaaggctaggatacaactccattcgattatcccatccttaggaatttcttctctatctaatttctctgttttatcgttatcgctttatcgttctcattgcctgtttcttattttttgtaatcactcgaccaacttactcgaccacacctagtgtctggcaacagactgtgcactcgagtaccgttgtctcatttcctgtgtgttactcaaccagcatactcgaccacacccagtgtctggcaacaaactgtgtagtcgagtataactgtttcatttcctgtctgttaatcgaccagttactcgaccacgttctgctttctggcatcagccagttgtggtcgagtgattttagtaattctgttaaaatttctgttttttccatgttcgtttaggactgttagaaaccccaaaaccattattgcttggcttgacttagtgacttctgatcacatctcatctgtttgcatcacacccatttggatagacaactttcagtactacaacgacatgatagtgctttaagaataattgatcttaaaaacctattatcaaaatccgtatgagtctttggctttgtatcttctaacaaggaaacactacttaggcttttaagatccggttgagatttaagttcttatactcaatcatacacatgacatcaagtcatattcaaatccaaaacactaaccaagcttcttcttgcttctcaaagctttgatagtgtagctgataagtttgtattttgcatgttttaagcatccatttgtcatcactttagcatcatatcatcactgttttataccatttctcatcatttgtcatcactttacatgtttaggatagatttgcatgcatgttgaatatttgtgttgatttaggtgatttggagctattgacgagctaactggcagaagcggacctgatcatgtcaaaccactcgaccccgtggtcgagtaggagcttcaagatctcaagaggccactcgaccccctggtcgagcaaaggacatcaccacttcacctcaccactcgaccccaaggtcgagtgtcttcatcccataacctgaccatcactcgatcacatcactcgacccaaggccgagtgtcttcaccttcattgccagaccactactcaacctcatcactctacctggaagtcgagtatcaccatcaccaccactcgactacatacgcgatggcaagcttcagagttttcttcattccacactcaaccagacactcgagcacaagaaagaaaagaagactccagctatccactcgacctcccactcgaccacctgggtcgagtacaattcttaatccgtctcaatactgcgtcgttttaagtattagggtttcagaatattttgctataagtagcatgtacttcacaatttcgcaaaaagtttttatctagtttttccgtacacactctattctagaccttttgtaattcggatttctctttatctattcagtattcaagattcagcatttgttcttgatttccgttactgttgttcatcctgttatcatcttgctgttacactgttgttatcatgttttcatcctgttcaacgttgttgttctctccaatgatgtctgagtagtgaataggtttctgaggatgggttagagtagtatagaattctcagtatgctaggtggttgagtattgattgatagatcccttctggattagttgttcttaatgcctattgctttctgatcaactggaatttgagcccagacatttctgcgcccaaaaggtattcgatgaaatgtctgaaccacttattccagagattcgtggccctgtaccaaggtattggttgcagggagcgttttggctttaacttgttgattcgtaatgcctattaggttagctctcgtcaatggtgattgagtctgggactgggttaacttgagggtctttgttgcggtggcacttagatttggttaaggaacttgttgtctagagataatttattgagcatgtcaatcacctgtaaactgaggaaacgaaactactcaattaccccatcctcggaaattctttatctgattgattttattgtttactctactattgttaactgcatcttgtcatctgttgcttagttcctgcaattctttactgttactcgacctggtactcgaccacccagttgtctggcaatagactgtgcagccgagtatccctgttacattttctgtttgttactcgacctgtcactcgaccacacccagtgctctgcaacgagctgtgttggtcgagtgtttttacagttctgcttgaatttttgttttctgcatgtttacttagaactgctagaacacaccaaaacctgttattgcttggcttgacttagtgacttctgatcacatcttgattgttagcatcacacccattaggattgacaaccttcagtactacaacgatatgattggtgttttaggataattgactaaaaaaacctattatcaatttggcgccgttgccaattgggtgcttgtttgttacatttgagatttcagacttgcttagatcttgttctttttcaattttcttttcggttactaactgtgtgtttttcatgttgtcttcttgatccaggtacacctctgttgtatgcgaactcgatcaacatgcaatcagaacctccttttcgatgataacatgaaccgcatagctcgcgaactcagaaaaaggagaaccactgtcaaccctgtacctcagcaaccactcaaaatggctgcagaacagaatcaacaaaatagccctgccaacattggtgctggagatgcaccacgtgatcaccgccagaggaaaggaattgcacctcctgcaatccagaacaacaacttcgagattaagagtggtctcatgtcgatgatccaggggaacgaattccatggtctgccaatggaggatccactcgaccaccttgataaattcgataggctctgcaacctaacgaagatcaatggtgtcagtgaagacggattcaagctccgttgttcccattctccttaggcgacaaagcacacatctgggagaagaatctgccccatgactcaatcaccacctgtgatgattgcaagaaggcttttctatcaaagttcttctccaacgcaagaactgcaagactcagaaatgagatctccggttttttatagaaggttggtgaaagcttttgtgaagcatgggagcgtttcgagggttctaccaaccaatgccctcatcatggcttcactaaagcctctctgctccgcactctttatagaggcgttttccagcgcataagaatgcttctaaataccgccagcaatgggaatttccagaacaaagatgttgaagaaggctgggaattggttgagaatctcgctcaattggtaactacaacgaggactgcgataggactgtcagaagcacagctgactaagatgacaaacacaggaaggagatcaaagcgttgaaagacaagctggacaggattcttcttagccattagatgcatgagcacttccttgttgatgacgagcagtaccaagtccaagatggggagggtaaccagttggaagaagtcagctacatcaacaacaaccagggtgactacaaaggatacaacaacttcaaaaccaacaaccccaacctctcctaccgcagcaccaacgttgctaatcctcaggatcaggtgtatcctccacagcaacaacaaggtcagaacaaaccttttgttccctagaaccaaggtttcgttgctaagcaacaatttcaggggaactaccagcaaccaccaccacctgggtttgcacctcagcaaaaccaaggtcctgctactcctgatgctgaaatgaaacagatggtccaacagctgctacagggacaagcatctagctcgatggaaattgctaagaaattatctgaattgcgccataagctagactgtagctacaatgatctcaatgtcaagatggaaacactgaataccaaagtccgatacttagagggacattctgcatcttcttcagctccaaaacagacaagccaactaccaggcaaagcagttcagaatccaaaagaatatgctcatgctatcacactgcgtagtggaaaagcacttccaactagggaggaaccaaagacggtcactgaggacagtgaagatcaagatggggaggatttaagtctcgagtaagatcaagctgacaaaccactcgagcaatcactcgaccagtcactcaagcaaccactcgacctatcactcgagcaaccactcgatctgccactcgacaacgttactcgaccaacaactcgacctatcttcccagcagcatcaccaactactccaaaaccagttgctgtcaaaaacaaagaaaaagtctttatccctcctccctacaaaccgcagctttcatttcctggccgtcacaagaaagcgttggcagaaaaatatagagctatgtttgccaagaatattaaggaggttgagttgcgaatacctcttgttgacgctctagcgctaatcccagactctcacaagtttctgaaagacttgatcgtggagagaattgaagaagtgcaagggatggtggtattgagtcatgaatgcagtgctatcatacagaagaagatcattcctaagaagcttagtgatcctggttcattcactctaccatgctctttaggtccattggctttcaatagatgcctatgcgatttaggagcattagtcagtctcatgccgctctctgtcgccaaaagattggggttcactcaatacaagtcctacaatatatccctcatcctagctgatagatcagtaaggatccctcatggtttgctcaaaaacctcccaatcaggatcggtgctgtggagataccaattgactttgtagtcctggagatggatgaagagcccaaggaccctttgattctagggagacctttcttagcaactataggagctatgattgatgtcaggaaagggaagattgatctaaaccttggcaaagactttaggatgacctttgatgtcaaaaacgtgatgataaagccgtccatagaagagcaactcttttggatcgaagaaatggatcagttagctgatgaattactagaagagctggcagaagaagatcatcttaacagtgctttaaccaaaagtggtgaagatgggtttctgcatttggaaacattgggataccagaagctgttagactcccataaagcgatggaagaatcagaaccctttaaggaattgagtggaccagcaacggaggtaatggtaatgagcaaagaagggtcaacacgagttcaacctgcactctcgaggacatactcgaccaaccactcgaccttgtctgccaacgaatctggggagccgatcattccaacttcagcacgactggtctgaactaaaagcaccgaaggttgatctcaaaccactttctaaaggtctaaggtacgcattccttggtccaaactctacttaccctatgatcattaatgctgagtgaaatgatgatgaagtgaaactgctattacctgaacttaaaaagtataggagagcaattggttattcattatctgacattaagggaatttcacctagtttatgcaatcataggatccaccttgaaaac

SEQ ID NO: 156013 - DNA, 424 bp, Arabidopsis thaliana landsberg
acaatagacgctttcgagaaatttgctgatgcctgctctcggagttataagaaagccgagtttgttcttgataatgttgcaaaggtcaaatcgtgtttggtgatgttggacttggaatgctatgacctcatcctacaaatgtttcggaacttcttcaaattcataaggtagattagatatacaaaaagaccttatttacaatacttgagacaaactctttagattatagactgaatgggggttcttttgggtgttcatctaatagatctgatcatcctcaactggtcttttcgtcaatggaattaataatgattgcaataatagatgaaaccgaacaagtgtccacggatttgcttgatagtctcttagcaactgtcaaaaaggaaaatcaggtgaggtttcttcttatttcaagttaattatt

SEQ ID NO: 156014 - DNA, 703 bp, Arabidopsis thaliana landsberg
atgcctttggagaatccagatagttactgtgccatcaaagccaagatgactcaagcgcttagatacttcaaggaatctactggacaacaacatgttcttgctcaggtttgggcgcctgtcaaaaaccgtggacgatatgttcttacaacttcaggacagccatttgttcttggtcccaatagtaatggccttaatcaatacaggatggtttcattgacgtatatgttttcccttgatggtgaacgggacggagagctcgggcttcctggtcgcgttttcaggaaaaagttacctgagtggactcctaatgtgcagtattactccagcaaagagttttcaaggcttggtcacgccttgcactataatgttcagggaactttggctttgcctgtttttgaaccatccaggcaactctgtgtaggagttgtcgagcttattatgacttctccgaagattaactatgctcctgaggttgaaaaagtttgtaaagcgcttgaggtttgcccttgttttctccttctttttttagggttctttatcagtttcctttgatcttcccgtgacattgttgttttctcttgtgttgcaggccgtgaatctgaaaacttcggaaatattgaaccacgagactactcaggttatctgcgagtccaatgtcaaaaatctcgagtattctttcagaaactttcaagaactgtcttga

SEQ ID NO: 156015 - DNA, 1482 bp, Arabidopsis thaliana landsberg
  unsure (1)..(1482): unsure at all n locations
ctgagaaggaaggtcactagaagatgtaggatggtcacatacggacaaacttaagcatttactaaagtctgtcgcaagcacaatctgtggacttaaaaagaggtgtttggcaagtaaaaatctgtttacgtcttctgttcactttctttcttgctctccacgcatcttgttctatatataagcttacacagatattaaccgaaaacgaaacaaaacttgagaggttcttactaaagttgcatcgtcatggctttcgaaaaaaacaacgaaccttttcctcttcactttgttctcttccctttcatggctcaaggccacatgattcccatggttgatattgcaaggctcttggctcagcgaggtgtgcttataacaattgtcacgacgcctcacaatgcagcaaggttcaagaatgtcctaaaccgtgccattgagtctggtttgcccatcaacctagtgcaagtcaagtttccatatcaagaagctggtctgcaagaaggacaagaaaatatggatttgcttaccacgatggagcagataacatctttctttaaagcggttaacttactcaaagaaccagtccagaaccttattgaagagatgagccctcgaccaagctgtctaatctctgatatgtgtttgtcgtatacaagcgaaatcgccaagaagttcaaaataccaaagatcctcttccatggcatgggttgcttttgtcttctgtgtgttaacgttctgcgcaagaaccgtgagatcttggacaatttaaagtctgataaggagtacttcattgttccttattttcctgatagagttgaattcacaagacctcaagttccggtggaaacatatgttcctgcaggctggaaagagatcttggaggatatggtagaagcggataagacatcttatggtgttatagtcaactcatttcaagagctcgaacctgcgtatgccaaagacttcaaggaggcaaggtctggtaaagcatggaccattggacctgtttccttgtgcaacaagataggagtagacaaagcagagaggggaaacaaatcagatattgatcaagatgagtgccttgaatggctcgattctaaggaaccgggatctgtgctctacgtttgccttggaagtatttgtaatcttcctctgtctcagctccttgagctgggactaggcctagaggaatcccaaagacctttcatctgggtcataagaggttgggagaaatacaaagagttagttgagtggttctcggaaagcggctttgaagatannnnnnnnnnnnnnnnnnnnnnnnnnnnnnnnnnnnnnnnnnnnnnnnnnnnnnnnnnacatccttctgttggagggttcttaacgcactgcggatggaactcgactcttgaggggataactgctggtctaccaatgcttacatggccactatttgcagaccaattctgcaacgagaaactggtcgtacaaatactaaaagtcggt

SEQ ID NO: 156016 - DNA, 519 bp, Arabidopsis thaliana landsberg
gatctgcttaatttattgccgccgaaagggtatcatagtctctcgaagaaagatatcttcgctgtgctttctcgtccaattccttttgatgatgataataaggtatttgcttggaagttatgaggactgaattgtgattttgatgtattggatttgggaattagggtttagtttctgagtttttgattttggtttggatgaattttctctgttggtagttgaactctctgtgtttttgtttccaggaactatggattgatagagttacaggacgagtttgtatggcgatttctgctagaggaatgtctattactggaattgaagaccggagatattggaactggattccaacggaagaatctaggtactatacactaacgctgcttgatttgaatctcaaattgaattttagaagatcaactagtaggtgtcaagatcattgcaatacttggtttgtgattatgtcatttgcctttaactcatgagctgttgatacgctgtttcttaggtctttcttga

SEQ ID NO: 156017 - DNA, 509 bp, Arabidopsis thaliana landsberg
  unsure (1)..(509): unsure at all n locations
aaggcggtggaggaggtgttcatgttggtgaaggcggcagagaaggtggaggtggagttcgtgggggtggtgaaacgaaagaagaaggtggtggtgnaagtggccgtggagaaggtggaggcggtgggatgtagnatatctctgcctatactagcaagtttttctttaaatgccaagtgtttacgtatattaaactataataaagttacataagcacgtatgaatcgcaccacttttccgaatgtttataggatcatgaaagttttatgtttctctaaacgtattatcacaatattatctgttaataatctgtcggtgttcaatatgatttcatgaaaaaggatagagcaaccaaagaaacaattcaaaaagtatacaatgcaaataatagggcatcaaaagatgttcaagatgttgagcaaagcaaaaggacgttcacgatatggagcaaagcaaaagggaagcgaattgttccaaagataaataaaacggaacttgataacaaatag

SEQ ID NO: 156018 - DNA, 279 bp, Arabidopsis thaliana landsberg
cacagatggaactcaaattccccttgggaaacaagtgaattgcctgcggatttaagctggaagaaaatagctaaaccagtgatgaatcactatatggaagcgactgatggatcattcatagaggagaaagagagtgctatggtgtggcaccaccaagaagctgaccattcatttggttcttggcaagctaaggagcttcttgatcatctagagagtgttctcaccaatgagcctgttgttgtcaagagaggccagcacatagtagaagttaaacctcag

SEQ ID NO: 156019 - DNA, 1061 bp, Arabidopsis thaliana landsberg
ttaattgatgaacctaaaaaaacagttaatgagagagaagaaaggtggaaaaagaattgatcaaccactcaagaagtcatatttcatgtgcatgtacataactttgagtagataacaaactaacacccattattaaatgttaatcactgttaaatcaattggaatctgttgagaatataggaaaagcaaaagaaaaatatttgatgatatgcatcagatcgtttaaaactcgtaaacaacattatttcactaattaataatcatcatcattcagtcactacttatttttaaataatataaatacaacggggaaaactccgagagaaagcagaaaaaaaaaagaaaacaaacatcagaggaagaagaagactagaatcgtcttcattagtctcgttttcgttcacacgtctgaatcgtcaatagaactttgatagatccatttcaactagacttctctttactcacttctgaatctcccccaaaaaaaagaaagaatctagctctgaatttctcgattcagtttccagaccaagcttcgcatcagacagaacaaagtgtttcggatttggtgtttgctccggagaaagcgaagagagttgagaattttttgtataatttctgagattatatacatgtgatgtcgggatattcgccttctgctggcctccgaggatttgcaggtaaagtttccgattctcggatttcatagagctaagttttggttctgcttcgtattcttagggttaaggttttattcatttggatgttagcttcggatctgatatatatttgatctctggtagcttaattttactaatctactgatttagagttgttgaatctaagacttcaaattttgtcgcactagagttatgttttggatctacagaagttgggttttgtatatttacagtgttttagaagacataaagaggataatgaagaagaacaacaaatacaataagaaatcaacatctttgcattgcaatgatgcaggaggttgcagatattcattgcttactattgtttggaccgtcgtcgggtttttcctgggggctcat

SEQ ID NO: 156020 - DNA, 563 bp, Arabidopsis thaliana landsberg
atggactatgatcccaacaccaatccgttcgaccttcatttctccggtaaacttccggtgagtttttcaatttcttcgaaattttcacttcaattttcgaggttgtggtgattattcgtggtgttcatatatattttattgcctgatttagaaaagagaagtctcggcttcagcttctaaagttgtagagaagaaatggttagtgaaagatgaggttagttctttcatcgaacactttggtgtgcaatactttgacctcaaaatttttgactatgagtgaatggattaggttgatcaagttctcatatctgatttagacattgaatagtttgtttagatcggtgatgctcaaaagttgaacaaatcaaagctttgtcttacagagattttagtttgggaatggtgattttcattttacacagaagagaaatatgctacaagatgaaataaaccgggttaattcggagaacaagaagctaaccgaaatgttagcaagagtctgtgagaagtactatgctcttaataatcttatggaggaagtgcagagtcgaaagagtcctgaa

SEQ ID NO: 156021 - DNA, 497 bp, Arabidopsis thaliana landsberg
atgatcgagtccgagtcgaatgtcgccgtcgccgtcgcagtctatgtacgccgatatcccgagagggataacaacaatggtggtggtggtgtggtaataatcagaatgcgaaaatgagagtggcgaggcttgtggatagttatctcaccgaagttgctagagatcggaatttgccgttgacaaagtttcaggttttggctgaggcgttaccggaatctgctaggacttgtgacgatggactatacagagccattgattcatatctcaaggtatatatatattgaagggtctttttggtaaattcgtagaatagttttcaacatttttttggcttaattttgttgtgataggcgcatccgacattatcggagcatgagaggaaacggctatgccgagtgatggattgtcaaaaactatcaatggacgcatgtatgcacgcggctcagaacgagaggttgccattgagagtggtggttcaagttctcttctcggagcaa

SEQ ID NO: 156022 - DNA, 2611 bp, Arabidopsis thaliana landsberg
gttaagaaccatgagctgatcaagggtcgagaaaaaacctggtgggagagaacccgagagacggttataagaaagatcgagacgagagagacggtgaatgttctgaacagacgaagcgagagtgccagagagtcctctagagggcaaggaaatcacagtgacgtgactatctgatgaatcatcacacgtaattccctcccaggaacaacaatcaatggaaaaattccaattcaaaggaaacacagaagaagaaacatttccggaaaaccacatgagagattctcgatcttgtaggttacaaacggcttctgaaagtgtaagaaagagggcagataggaaaagaacacagaggaggaagagatgcatgtgagaactcagaggctgtacaggttttgtgattgatggtctcacaagacctttggctttggatctcatttccttatctatcatgcaaggagaagaacaatacagagaagaagaagagaaatagaaaacttcttgtcgatacagaggtgaccaagggaaatagtcagccgagagtcactcagagagaagtgtgatcttgtcaataccatcgttgaccaaggcaaagtcattttattggtttattcaacccttcgactaagtttgttataacattgttaatcctttgttaatttaatctagcctccacatatatataaatatatctacggacagtatttgaatttgctccaatcagggatttcgaaacctcgagatccaaccaaccttgcttatctctcaggtaaattcctcgctccttatctcactgtttctgaaaaaaatcatcggtttagattaaagaccttactgcgatttgatttcccaattttgaaaatttgattttcccgttaggttttaaaacagtcttcgacgataaagaaggctacgcaggaggaggctgtggctgtgacatcggtcttttgggacatcagtatgtatctggttcccccttgctttgatcctcgtcgggtccgtccatgtattaaacaggttctggagaattctctggtcctctcatcatcactgccgttggcgtactaaaagacgttcagaatgacatcctgagatgagtctattccagaggaatcgctcttactaacatcccctaaggttgatatcttatcatccttatgcctttctacagtaattgatattttccttgatgaagaaagagtctcacgtctttagtttctgaaacaggttccatggacattttggatcttatttatagatttaccgtgaggaatccacctccagctaatataatagtcatatccgatccggaacctggtctttctgacttcctataaatgatgggatacaaccttcttcagccgtttccatataattcttttcaaaactttcttctggcaggtgtgtgtttgtcctctatctcagtgttgtaggtataaccagcaaatctgttgctgaactggctacttttttttcccacagattcaagggcacctgaggaggataagtgcagtgaaacgggtgactctgcctgatgggtttgctcactatgctgccgtgatcttgctgtccaacacgaataggctataaaatttcacctctcatctctcaagtagagcacataaacggaaggtaatcaagcatcctagttacaagttggtgtcatagttctagactccaactcaacaaacccactagattccttggtcagcaaactcaatctcctgttacgaatttggcgcgataaaactttagtagctggtttctatttttaatattatgtctgctggaaatacaaagagatttgaggattttgataaagcctgcacattctatctagtaatacgcagcgagcagaatcaatctaaaaccatcacatttaaccactgtttctttacaatgtataggaaaaaattacttactaatgaaagcatcgagtctagcaaaaaagcaccagtaaaaacagtaggaaacaaaaaatccagtggcaactccgagaataaaaataaacttcaactcctcttcatcctctgtatccgctttatttgtggttgtagcaggcagctttgttgaagccttgcaggaagtcagcagtatgccaccgcacaacaaggggtttcctttaaaatttgcttgtggaaaagtatcaaactgacttcctgtgggtattggcccgtcgagactgttgttcaccacgttgaaataagacatataatggaggcttgttagcgaccaaggaattctaccatataagtgattgttggacaggtcaagcctctctaagctggtgagtttcgacaactcacgtgggatgatgccagacaaatagctttgagaaagctcgaggacatgaagaacctttaactggcccaacttcgatcggtatacttcctttcaggttattccttcttatgtagatcccaggtgggaggctaaccagctgattgtattgttattgagttgtaccattattgggactgacaaaaactggcagctttagatagttcctttctgttgcgtcgtaggccttttgggacatcagagcctttagttggaataaatccttcggcagctctcctgaaagaagattttctgagagatcaatatagaaaag

SEQ ID NO: 156023 - DNA, 413 bp, Arabidopsis thaliana landsberg
tagtaatgctacagtccatcaagatgagattcaaacagagcatgcaacttctgctactcatttgatctcccatcagacgatgcctccacagacaagttctaatggttctgttttagatcagctaagcactaagccacgaggaatcaaatatgttagcttcattcctctcattggtaacttcctttcagcggtgaaaactcagttcacaagttcatcagacatgatggctcgagttcacataagaattttctttaatgtttgggttttctgttagggaaacgaacatgcttgctggtttctcgttgatggtgaaggtagaaatcatggtccacattctatattggagctttttagttggcagcagcatggatatgtttcagatgcagccctggtaagcttttatgaatatagac

SEQ ID NO: 156024 - DNA, 522 bp, Arabidopsis thaliana landsberg
tcttttttcttccgtttttccacacattgtctctacctttccctttttcagatttgaccctttgttttcaaaagaaacgatttttagtagccgccggggaatcaggagaatggtgtctccggagaatacgaactggcttagtgattaccctttgattgaaggtgctttctctgatcagaaccccactttcccttggcagatagatggctcagctactgtcaggttagttttttgttaatcagattcaagggtttctgggttctgtgttttgtttctttcaccatctattagttttgtttcttggctttggacttttggtgttttaggattggtagttatatctggagaagttgttatggatgtgtgatcactcagttggtttttagatgctcttgttgtgatagagatattggacttctgcataaatcaatcctctgttttttattttgtctccgttgtgcttaccttcctgtgttacctaaagaagtggacgactttagatgtctaccaattgcgacagga

SEQ ID NO: 156025 - DNA, 440 bp, Arabidopsis thaliana landsberg
catcaccaaaacacaacaatccgatcagaaaatatgagcgaagaactaagtcaaaagccatcatcagctcagtctctgtcactgagagagggcagaaataggtttccttttctgtccctgtcacagagagagggcagatttttttcttctctatctctttcagagagagatggaagaaagttttcttttctcagtatgttctcttttctcatgccactgttggaggttattaagattattattgcttctgtggcctccgtaatcttcgtcggtttcgcctgtgtaaccctcgctggttctgccgcagcattagtcgtaagcaccccggttttcatcatatttagtcctgttctcgtaccagctacgatagccacggttgtcttggcgacaggattcacggccggtggctcttttggagtgacggcacttggtctcatcat

SEQ ID NO: 156026 - DNA, 239 bp, Arabidopsis thaliana landsberg
tcaggctttaggttaggcgagggaagatattggcgataatttccggagagatctgaaacttatcagtgaagtacgagcaccgtttcgtggcgttagaaaattcttttattttgcatttgcagcagcagcgggtatctcaatgttctttaccgtaccaagactggttcaggcaattagaggcggtgatggtgctccaaatcttctggaaactacgggatatgctgcggttaacattggag

SEQ ID NO: 156027 - DNA, 2776 bp, Arabidopsis thaliana landsberg
atgtcgtctgttccttccatagcagcttatctgtctcttactaaaggactctgccaaatgggagaaatagatgcggtgatgttattagtccgtgaatgtctagcaaacgttgaaagtggtcctatggagtttaagtacgctcttacggtttgtcatgtatgcaaaagtagtaatgcggagaaggttatggaggtagtacacgagatgaaccaggaaggtgcctttatcaaatgaagttatatactgtgcgattatctctggtatgtctaagcatggaacaataaaagcagcaaaagaagttgttgattctgaaaatcgcacaatagatttgtttaaagggggtaaacaaattaacttaactctctctcgctatttagtgaccaaagattcaatgaaaagaagaacaaggttgcttagagacaaagttagggttttgcccaagtacaaagaagaaaactagggtttttagtattaagtttcggatccttgaaatagaggacaaacccctctatttatacgggattaagacggttaaaagatttgttaaacttctatttcttcgaggcttgaatcttctaatttcctttatctccaaagacttcctattttcaaaggagaaaacttctttttcttcgaattaggaagtcggctagacggtctccctacttcgggctaaagtcggcaaatgagctccttattttggcccattaaaaggctaaaccgggataccccggtttgactgaaatctcagtctaattcgtagtttctctggtttaagccggtattgtcggaggtgctaattccggcaccaacaattagtcccccccagttcgggaaaatccaaatgctaaactcgagtttttccgaattaaaagaagtgaatattcggcttatactttaggaagatgcgaattaaaatttgatccgttgaacctccaagatacgtcagtttagcttggcacgcgtcgatgatataaaacaaggctaagcttgtgagttaggtagtctgatggacctcatgagttgttgaggagttgtgggatgctctcctggatgatctgaatgcctagcagagaaatgacctgactgatgagccgagcagtgagataggttaccaaatgatcttgctaacaagctgcaaggcaagctatcagatgatctgacgagcgatctgggatataggttgctgaatggtttgtcttgcgatctgcgagatagccgggcagatgagctgaaaaaaacatttgcgatgagctgcagacatgccattatcatttgggttagcaagatacgtgtgcttttgagctctttttttttttttaaggtgcgaggaactctcggcttatcctgttttgaagacttaaagcaagacgaggtctcggtttttgtgaaacattttcacataatagcaagcgttgagctcggctcaatttataagtgtgactgcgagcgttgagctcggattaactgcaagaattatttttatcttttgaatgtagctcgatgctaggtgaactaagctttttgagtcgggactcaatttagagcttgacttcaacaatcaaaaaatgtaaagcacgaatacttaatcttgatgggagaagaaatggcgagaggctgagctcagaattgctgttccaaaggtagagttgcattgttcgtctatgaagagtcgttcttatcaactagtgattaccttgcagcagagagaaatactgtgataactctttgtcgaattcgacgttaaggtgtaggttggtctttctagaaagctgagcctcggggcttcgaattgatatgcagatcgccatgaacattcttttggattgctagaaatttgctttctaatttggttgatcgtgcagtgaggatctgcgtttcgctggttgcatctgttgcaaagaaagagtcataaccttcagtgtaaatttctgattgaggcgagattggcttcttttgaaagctacttttcgaggcattccgtggataggttacacaccacgcagttcgtcggaatcttcctggaaattgatttcaaagtcgactggttttgtaacttttgatcagtgtttcgtctggctgtatctgctggagagaagcgcatgtaactttcggcacatagcttcgattggaacaatattggactatatggagagctgtctgtctgggcaatctttataaacttctttggagctctccacattgttgacttgtcttgtagaaaaagctcaaaatgttagctgttgacaagttgagctaggaaagctgctaggcgacttgttgaagaactccaagctgttgacgagctattaggcgggcaatagcaagctcggaaggctgtcggcgagctgtaagctgggcgaactacgagccagagaaactgcagacgaactgtgagctaggaaagtgcagactcaagctagacgaactgcgagctaggaaagctacagacgaacagggagctaggaaagttgcagacgatctgttagcttggcgaagtgcagacgagctgctagctaggaaagctacagacgaactgggagttagaaaggctgcagacgagctgttagctatgcgaagtgcagacgagctgctagctagacgaactgctagctaggaaagctacagacgaactgggagctagaaaggctgcagacgagctgttagctaggcgaagtgcagacgagctgcttgctagacgaactgcgggctaggaaagctacagacgaactgggagctaggaaggctttaggtcggttgacttatgtcgaccact

SEQ ID NO: 156028 - DNA, 3642 bp, Arabidopsis thaliana landsberg
atggcgaggggagaatcggagggagagagctcaggaagtgaacgagagagttcgagctcgagttccggcaacgaatcggagccgataaaggggaaaatctcggaatatgagaagcagaggttgtcaaggatcgctgagaacaaagcgagattggatgcactcggcatctctaaagccgccaaggctcttctgtcaccatctctagtttcaaaaaaacgtagagttaagcggaattccggtgaagaagacgatgattatacacccgtaatcgccgatggtgatggtgatgaggacgaagacgaggagtttctgtgtaattcaactcgtaaaagaaaggtaacaattttgcttgtgtcaacttgtatccgatgaatgaagcagtgaatgatggttactctctggcttgaaggcaatttgtaattgtgtttaatgttaatgtgccatttgatctttactctggtttcttgtgacttgtatttaagaaccagtcctttgcattcaagagaagactctcatctaggaagattttgaatacatcagttttccttggtgaggatgatgatgacttagacaaggtattcacattgtaatgctgcaaattcgatagcttcagaattgacatagacatgaataaggtactggttttagtgcttgcaggcaatagcgctttctctacagggctctgttgctggaggctctcgtacgaaaaatacgagaagcgataaagaggctgcaactacgaagaagaaaagacagggttttttttttacatcaagtattagtgtattactgttacttaacagtctaggaggatgtccttgatgtgcatttgtcttgtctcattcgtaggaattgatgagcaagatgcagatgacacaagatgaattggtcatgtacttctgtcagtttgatggtaatatatcgattgtgcaatttctatcttttgtgtttgaatggtttttaactccattgagtctctgcgatttttgtcagaaggtggaaaagggttcattactcggagagatgtggcgaaaatggcaacggtgcatgacttcacatggacagaagaggaattacaagacatgattcgttcctttgacatggacaaggacggaaaggtgggtactaagttgaaggtattcacgtttattagagaaacattattgctaaacatctttaattttgggcagctaagctgtaacgaccgcgtcccgcgttcataaagaggccaggttgttttaggagaaaactagaccatggtcaagaaatggactaaaatacttagtcagaagaacgagaaagttcaagctgaaccagataggtgagctggacaagctaagatgaactagctagctaagctaggtgagctaaaccagctggaagactagctagctcagctaggtgagctgaccgacagctcgactgagctcggtgagctgatcgtgtactgacccagctgggtgctctggtcagctgatactcgagctgggggactgtggtagctcacgggtgaagaggtgtctcgatcaaaaggtgtaaggtcgagcgggtaccaacgaacggttgcatcgcccaatagatgcaaggaacggatgtgacctttcgaaaggatgcaaggaacggatgtgacctttcggaggagtgcaaggaacggatgtgatgcttcgggaagcatccattcgccccctatataagggaggacgcccaaggcatttagaataatctcacaatctcacaataatctctcattatctcacaacatccaaacaccataaaacattcttaaaagagtcccaacacatcctagagttgttggtcggaaagggggtgcagctcggcgagtataactcgaccaaactgatgcgcatactacctcccggtccaacggttcgatggagtgtagaggatggagagggtagaccattcgtcttagagacgaatcggatctggtagaccgatcgtcgaatcggatcggccagaccaatcgtcggacggatcggatcatccagacggatcggatcggacagaccgatcgttggacgggtcggatgggacaggccgatcgtctgacggaacgggtcggacagaccgatcgtcggttgggatggatcgagaaaagtgtttgaggaagcacaaggataagtgcatccgaacacacccaagggtcgcccatggatgcaatcttaccggtaaagggagaaagcaccaagaataggtaaggaacgttgttcactatatgggatcaatatcgcggctgccttcatgtatctatctcctcagccatggtgaaaccgatcggagatcggtaagaccaaaggatgactcgacggataaccaacgggaaagtccacggtgggaaccgatggacaaaacggatgttggacccgcaagcaaacctaaggccgacggaggaaggatttcatgggctagcctttgatgatccggtggttgaatccacggacccttgggtgtgataaggatatcgttcggaccgcatggatggatcattaagctggaagctttatcgaccaccatggaccggacgggtaaacggttagtaaaccatgggcggtcgtagtgttaaacgaccggaacggaaacatggatggttcgataagctgagtgctgaatcatccaccatggaaccgaaggggcgtacgtttggaggacggatggacgaatgagccaagagcttgattcggccatcgtgaaccaagggaatcgtatgatccccaatctctatcgtagtacttagaccagtggggttggttggttgtatggctaagtaacgatagagattggttcatcaattcacgatcggatacgagtcgttgaacgaatggagtaaagcgacaaacgggctaaggaatcaaatctgcatagtggccaaggtatgtaacgatctagcttactagttaggatagacgtttgggaattgaccgtgaaaataggacaaaggaatatgcgattgttaggcctagaatggttagcgaacaatatgcatgtcttgaccgagtaaaggatcgatctaagtctaagggacaaagacgatgaaaccggtacaagagttggttagaattaaaccaaggttagaaagacttccgctgtgtaataagaaagcgattatagaatttagcctcgtaaaggccattctatggttaatcgcaaaaaattaagaggttcggtcgggaagaggcgcgaacttgagtacacggtcgccggacgccgagacgtccgggacggggtctcacattcttacacctgcagattttagaataccatttcgttttcagcgaagacagttcccagttgttccttgctttggaatgaccattaacaagagccagggtcaaagtttatctcatgttggcatttatttacccagaccagttttttcccatgggcaactatatgttgcggtatcgagagttaagagtcgacgaggtttgaagattcttattatcgatgaagagggtaatcgtggtaaaacaactacaaatgttgttttcaaagaagtattccaaaatctgccaggtatgtctcacagattgtgaactcatcactgttattcaatcactatctcaaatcttaataaggctaaccccctttactctatttctaactacagattatggaagttag

SEQ ID NO: 156029 - DNA, 975 bp, Arabidopsis thaliana landsberg
  unsure (1)..(975): unsure at all n locations
atgagtctcaagttcattcttatagctttgcttctacttttatgcatcacattttccaattcgaccgtcgttcctttttccaaaaaccggaaaattagtaagtcttcataactgcataagtgcaaatattgttattatatggtgttaaaatgaggtttgtaatatagttttaacgtgtaacaagccaatgaagaagaagaagaagaaggtagagagattgacattcacaaaggaaagaagatcaccgtaaaagtcagccgttcgcctcctgcaaaaggctggatttgttgcaatgattaactaaaaggagctatgtgaacattttcataagatcccatccttcaatttctatgaagataatatcgaccaagatcaaacttcaaagcttgaaattagaaacgtgtatttgctatatctcaaccactaatttaaggggctttcggcccattacacgcatgggaagattcaattatgttgattttgtaagttttggggctaaagtgtaaattattgaaacttgtaggcttgatttcattattccaagtttccactttttctcctccgccgtagccggtgcttcttcttcgtgaaaatctttcgtctgagattttttctttactagttgaataaaattgaagatttcgaagactacccaaaacccgcgttttacaaaaagccagatactttnttttttttttttttttttataatnncattaaaactacccaatgggcttgggccgaaacttacaaacaattcggtccagttacaaaattagggttttctgacacatcgccaggaaaaagaaaaaagctcgccgcctgttgaccgtcgctagcagagcgaccaaaacctagatccggcggactcaagtcccacagctttgtggcccgctccgagaatcgtccaccaccgacgaaagattccggttttcgtctgtagagacttaacttcaacgcaccaacccaccacaag

SEQ ID NO: 156030 - DNA, 2829 bp, Arabidopsis thaliana landsberg
tctataattcttttttgttactcgacctcatactcgaccacccagttgtctggcaacagactgtgcagtcgaataactgtgttatactttctgtctgttactcgacctatcactcgacctcacccagtgctctgcaaagagctgtgttggtcgagtgttttattgtttctgcttgaatttctgttttctgcatgttcatttagaactgctagaacacaccaaaacctgttattgctttgcttgacttagtgacttctgatcacatcttgattgttagcatcacacccatttggattgacaacctaaaatactacaacgacatgatagtgctttaggattaattgatcttaaaaacctattatcagctaccaacagcaaaatccaccaccagggttcactcaacaaccacaacaagccccatcagctcaagatcctgaaattaagcaactcattcaacaaatcattcaaggacaagctactggcgctatggcttttgataagaagatagctgaattatacaacaagatcgattgttcttacaacgatctgaatgtcaagtttgaagctttgaattcaaaaatcaagtatgtggagagtcaatttgtatcaacctctgctctggagcatcctcaacaacttccagggaaagcagtccaaaatcctaaggactatgctactggtaatgctatcaccatccaccaagaagatgagtctccaccaagtcgtcagactccccatactgaggaaaatatgattcaagaaggggggggggggggattcaactcaaattgctgcacctgccacccagcaattcatctggactataaagcacacacctttgctgaatactcaccatcctggaaaaaagttcaaaattgaaaaactcaagaaggatcagaatcaagagatgatcagcagtgcctctacccaagaaacatacaagaagaaaatcatccaagaaaagcttgatgatcccggttcattcactctgccatgctctctaggaccattgacattcaataggtgcctttgtgatttgggagcatctgttagtcttatgcctctctctacagctaaaaggctagggatcatggaatacaagttctgcaacttagctttactcttagctaatggttctgttgcacatcctcatggtctaatagaaaatctgcctgacaagattggaaatgttgagatacctacagattttgtggtattggacgtagatgaagaaggcaaggatcccctgatcctaggcagaccattcttagcgtcagttggaacagtcatagatgtcaggaatggaaaaattaatctgaaccttgaaaaaggcatcaagatgaagtttgacatcagaaaagcttcagggaaatcaacaacaggaggtcagagttttgggattcaggacatggatgttgatgaagaaacataagctggaaccctaccaaaagtcaactatacttctcaactcagcaagctgaagagaactattgaccacaagaagagagcaatagaagggttagctcagactgaagatgactggtatgagatgagaaaaaaatttaaatggcaaagcagagtcatagagggattatcttcaagggtgatgaacctgaaagatcaactatggatgtttgaaaaaagagttaataagctttcaaatggtattgacccaaagaaaatggaaactgcactagctatcaaggaggacgaagatttcacaatagaatggtttgcaccagaagatcagaaaggagttcacttagaggaaagaagcctagagaacaagttgttgagtgaggaggaaatccctattccgacttattctccaggagagcctaaacagcccaccaacccctctactgaagaagaacacttgattcttgattttgttgatgaagaactcctcgagctctagattggacataaagctcacgaagatacaattggaaagtcaattcataagatggaagagttaaatagcaccattctggaacttcaagaaatggttaaaggctaccccaactttgaaattgaggattggtcaaaggagcctggttcagaagaagaagactactctgctgatcaaaaagaggcttattttgaagaaaaatcaaatgagtactcatcataccatatgtcaacagaggatgcagagtatgattcaggcactgaaaattcaaccatgaggacttctatgttcctctcttcgaccttttttatgactaagctctgtaagagtcaagcttagtgacttaaaacaagcttacttgggaggaagtcccaagtctatctttgtgcatatctttatttttccttgttgtttttgatgcattttgttagtgttttcaggatataagtatgaagagctgagcgaagtggattctggctctgagggtacagcaatacactcgaccacagagcaatcaaagacactcgaccttgttttggcttctccacgctaggagagatcactcgaccgcggtgctagcctgagtataagagagaggtcgagtatccacaaagcagtgttggccgtagcagaagaagagaggtcgagtatactcgtggcggtgctgaccgccacaaaggagatgaggtcgagaacccacagggcggagatgagacacaacagggagtttctggcctaatagcaatcgcaggcagccattgacgagcaactacgttcattcttcgactgaggtaagcgcctcacttcaccattgtattataccatctgttgtgatttgtttcttcatttttttttgtttctgtgattagatttgtcctgagtactctcttccaagtttattcgcacagtggactgtg

SEQ ID NO: 156031 - DNA, 1245 bp, Arabidopsis thaliana landsberg
gctgcagcggtggccgagaaagcagcgaaaagcattgcagagatgggagaagtggataaagactctgaatcttctgctaaggaagaagagaaaactgaagaagctgatacagagcaggatagtgatgatgagaatgcgaagttaaagaagtcagctcttgagagattggagggtgcaagtgaagagtcacttcttagccaggcaagttttttttttttgcttcttatgtacaagtcattgttcatgctcatggtgataatgttggaaatgcgttaatgcctttgcctacatagacctttgttcctccatatgttattttctgttggtttgttgttggcttaagtcaagtcattatttttcgtttgcttagacgttagaatttacaaggtatctcgatctttcatcttccagggtttgaaggttttcgatgattcagttgagagtttcacttctggagcttggcaagcatttggaaatgcgttaaaagggggcacaagtttggtgcaaaagtatgtttcttttaatttgtctctgttttactgaaagctttaatcttaactgtgttcaaagtacaaactttgtgaacgaattggttgaagccgctgagtttataccctgacaagaaggaaagtaatcctttagtttgagggttgtgtttaaagaatttatcaatgccccatgatctttcttaaggaaagtctgcaccgaaataaattacgtcaattgtttagcattccgtttctgagtctctgagcatttaatactttgttgacacaccacagaatgagcatactcagttcatttactttaatagattcttcttttggtaaattagctcatttttgtttcattagtaccaataaaatgttggggaagctatatgtgtgatttccttagtataagaatctacaatggttgccgggcttaatgaacctagaggtcgtctgtttcatgtgtacagacccgttaccctaggaagaagatcaagttattgatgctccactatttctcttgtaggcttgaaaacagtgtccagcaaggttcttcgcctagggaagctggatctggtgcaccgtctctactagaggtttgtgctgtttgtgttttcttctgtctttcatagcttaacatttcatttatcccatacttctgatcttcagacaggaaaagcattaactgcgaaaggaatgcaagtacttgaatttgtgggcaaggaaactatggatttactgattacagagactg

SEQ ID NO: 156032 - DNA, 303 bp, Arabidopsis thaliana landsberg
attagatcaaggctatcaatctttagggctcctgcagttaagtgtttaagatttagtaatgttttgcctagtttgagcaataattgtattgttcgactgtatatggaacctcccgtagcttgtgtgcttcctttaggtctgtgttctatgttctctacttccatagctgattcagagcaagtgggatttactcggagtaacattgagaaagatgatgagagtgacattgatcttggttgtagtataagtgatgagcttgtttcagaggatgttggaaagatttcgaagctggtgaaagattgt

SEQ ID NO: 156033 - DNA, 240 bp, Arabidopsis thaliana landsberg
tctttctgacacattaactacttatccttcttgcattcttctctctctctacacccaaacaaacacacttataatatatcaagatagaagatgtctagcagaagatcatcacgttcaagacagtcaggaagctcaagaatctctgacgatcagatttccgatcttgtttctaagctccaacacctcaaccctgaacttcgccgccgccgttctgacaaggtatacacttcaaaataacaa

SEQ ID NO: 156034 - DNA, 338 bp, Arabidopsis thaliana landsberg
ttgcaataaccttctctccttggcaaggttctttttttggcaagaaacaaacaccaatgaggaatatgcatactaaccggagatcaccgggtccaatcacgtcggcagcaactcaacgccggctaaaaccggagccagaaccgacggtgaagaaattcatcaagattattctcctctcaacaatcatagaaaaaatgatggtacagtaaaaaaatatttcacccactttttgtatgttcatctttttcatctaaaaacaataataatctgaaacttgcttgcatgtgtgaatttttgacagaaagttccggatagatttgagaggtttgatcctaaac

SEQ ID NO: 156035 - DNA, 463 bp, Arabidopsis thaliana landsberg
gttcatgtatcacttatgcgagtctaaagtcagtttttttataaaaatagttgactagaaaattaaaagacactgatgttattagtttttcattatagttgaggagatattatcgaagggagtgagtttgcatagcaatacgtgttatggtgatacttgatttccattaaagattttactagctaatcgtactttgattacaatgcagcctgcacctgccacgtacgatgatgtatttaaatcaatgtttgagtacattgaccatctttttactttagtgcgtccgaggaagattctttatttggctataggtgatcttgtgtttcctttttatcatctgtctgttttgctctgtgagatgtggttgattaaatatactgttgcagatggagttgcgccgagagcaaagatgaatcagcagcgttctcgacgtttcagagctgcaaaggacgcagcagaggct

SEQ ID NO: 156036 - DNA, 166 bp, Arabidopsis thaliana landsberg
gcagctgtttttcacgatagcgttctcggcggcgccgttaacgttgtacataccgccgataagatgtttgacggtgtttgtggagacgatggaggagatgggaatggaaggtagggtttatagccggagactttttcctcgagccagaattgcttggtcaaggctt

SEQ ID NO: 156037 - DNA, 518 bp, Arabidopsis thaliana landsberg
tatgttttcgactgcgttgcgacttatgctcgtcggagacagcgagggatctcgttctgaacggtagcggaacggtcacgaacgtcagcatacgtcagccatttgcgactggagcggttgtgacgctcaaaggaacgttcgagattctttctctctccggatcgtttcttcctcctccggcacctcccggagcaacgagtttgacaattttcttagccggaggacaaggtcaggtggttggaggaagcgttgtgggtgagcttacggcggctggaccggtgattgtgattgcagcttcgtttactaatgttgcttatgagagacttcctttagaagaagatgagcagcagcaacagcttggaggaggatctaacggcggaggtaatttgtttccggaggtggcagctggaggaggaggaggacttccgttctttaatttaccgatgaatatgcaaccaaatgtgcaacttccggtggaaggttggccggggaattccggtggaagaggtcctttctga

SEQ ID NO: 156038 - DNA, 241 bp, Arabidopsis thaliana landsberg
cattttctattttcttctgcgcctcaaaaaatcataattttctcgggaaaattaaaaatcatgtttaagattttctcgagaaagtataaaagggaagaagaagaagaaaccatgggaagagctttcgtgtatgtaattctcggaggaggtgttgctgctggttaccagcttctagaaattcacccgactaaggtgtctccgatgacgaactctgaatcatttccaaagaacccgtaagctc

SEQ ID NO: 156039 - DNA, 612 bp, Arabidopsis thaliana landsberg
atggaacgagtagcttggttagaagttgtcggaaaattcgagacggagaaactaactcccaacagtttgtacgaggttgtgtttgtggtcaagctaatcgattctgctaaaggatgggattttcgggttaacttcaaattggttttgccaaccggagaaaccaaagagcggcgagagaatgtgaacctgttagaaaggaacaagtgggtggagattccggccggtgagttcatgatatcaccagaacatctctctggcaagattacgttttcgatgttggaggttaaaagtgaccagtggaagtctggtcttattgtgaaaggtgttgctattagacccaagaattagaaaatccaaacttgtaagcttaaacaataataagaacacgaaatttattatgatgatgatttatgtacacgaggcatgagatttatttgctatatacagacacaaagacacacttgacgacacattacaaagggaagatgcgcttttatgcattaacagagacactttacaggattgagctctacatgctggctaccatcgctttgcggttggacggttaaggttgcaccagcttcactttgcgggtctttgatcctcttaccc

SEQ ID NO: 156040 - DNA, 473 bp, Arabidopsis thaliana landsberg
  unsure (1)..(473): unsure at all n locations
gattaccctgtggagaaacttgcttgctacttgtcagacgatggnnnnnnnnnnnnnnnnnnnnnnnnnntggctcaaacagctagctttgcaagtacatgggtgccattttgcaggaaacacaatatagagccaaggaaccctgaggcctactttggacagaagcgtaactttctcaagaacaaagtcaggctggattttgtgagggaaaggaggagagtgaagagagaatatgatgagtttaaggtcagaatcaactcattgcctgaagcgataaggagaaggtctgatgcttataacgtgcacgaagagctaagggccaagaagaaacagatggaaatgatgatgggaaacaatccacaagaaactgttatagttccaaaggccacttggatgtcagatggttctcactggccagggacttggtcctctggagaaaccgataactctcttttttgatcatgctggaatca

SEQ ID NO: 156041 - DNA, 1033 bp, Arabidopsis thaliana landsberg
aaggtcaaaaaacacaccaccgcttaaccccaattaccaaaaaatggcaaagcttcaaaatttctcaaattaaacaatctctttacttattcttcttcttcgaaatcgccgccggcttatgctgtttccgatcgttgtctcttctccggtgtatctccggtggtatcttccacgacgaattcataattactatgaagagtaactccaaggtcaacatcaacaacaacggagataatcataatcaaacgaagaataatggtactaatggctttttgcccaattcgttaaaattcatctctacttgcatcagaactgcttcctccggtgttcgctcagctagcgcctccgtcgctgcttccctctcttctgattctcacgagcttaaagatcaggttttgacctcaattttgattttccccaattcgtgattctctattttggaatttgggggtttttgattcattttccaattgggtttatgtgattttgatcagattaggaaaaagtgtgagtcttttttatcgagataggtttgacttgttgtgatccttgtgtttggtgaagcaggtgttgtggtcttcatttgatagattgcacacaagtgaatcatctttcaagaacgttctattactaggttatacaaacgggtttcaagttcttgatatcgatgattcaaatgatgttaccgaattcgtgtcgaggcgggatgatccggttacatttttacagatgcagccattacctgctaaatgtgatggagttgaagggtttagatcatcacatcctatacttttagctgttgctgatgaagctaaaggttcaggtcctattgttactagtagagatggatctgttagaaatggttatgaggatcctcttgcactctctcccacggttgtgcgattttattcgcttagatcgcataactatgttcatgttttgaggtttagatctactgtttatatggttagatgcagtcctcggattgtcgctgttgacctcagcccccaggttagctttttgtgtgcttatc

SEQ ID NO: 156042 - DNA, 3474 bp, Arabidopsis thaliana landsberg
tggactatgtgtaaagtgggtggaagcgatggctagtcccaccaatgatgctagagttgtactaaagctgtttatgaccattatattcccgagatttggagtctcgagagtcgtaatcagtgacggagggaaacatttcatcaacaaggtttttgagaatcttttgaagaaacatggagtaaagcacaaggtagccactccttatcatccacaaacaagcgggcatgctggaaatctccaacagagagataaaaacaattctacagaagactgtggggatcacaaggaaggattggtcatcaaagcttgataacgcactatgggcttacaggacagctttcaagactgataagtgtgtattttgcatgttttgagcatccatttgtcatcactttagcatcatatcatcactgttttataccatttcacatcatttgtcatcactttgcatgttaaggatagttttgcatgcatgttgcatatttgcgttgatttcaggtgatttggagctgttgacgagctatctggaagaagcggacctgatcacgacaaaccactcgaccaagaggtcgagtaggagcttcaggatctcaagagaccactcgacccccaggtcgagcagaggacatcaccacttcacttcaccactccaccacgaggtcgagtgccctcatctccatcaccagaccatcactcgatctcttcactcaacctggaagtcgagtatcttctgacaccactcaatcacatcactcgacccccaggtcgagtgccttcaccttcactgccagaccactactcgacctcgtcactcaacctagaggtcgagtatcgccatcacaacacttgactgcatactcgatgactagcttcagagcctttttcattccgcacacaaccagacactcgagcacaaggaagaaaagaagactccagctattcactcgacctctcactcaaccccctgggtcgagtacagttcttaacccgtccaaatacttcgtcgttttgagtattagggtttcgggatatttggctataagtagcatgtacttctcatttttcgcagacaagaagtttttacctagttttatttccgcagaccttgtgttctagactttttgtaatccggatttctctttatctattcagtattcagcttttgttcttgatttcttttactgttgttcattctgttatcatcctgctgttacactgttgttatcatgttttcaacttgttcaacgttttatgctttctgctatgatgtctgagtagtgaataggtttctgaggatgggttagagtggtgtagaattctcagtatgctaggtggttgagtattgattgatagatcccttctggattagttgttcttaatgcctattgctttctaatcaactggaatttgagcctagacattttcgcgcccaaaaggtgttcgatgaaatgtctgaaccactaattccagagattggtggccctgtaccaaggtattggttgcagggagcgttttggctttaacttgttgattcgtaatgcctgttaggttagctctcgtcaatggtgattgagtctgggactaggttaacttgagggtctttgttgcggtggcacttagatttggttaatgaacttgttgtctagggataatttattgagcatgtcaatcacttgtaaactgaggaaacgaaactactcaattaccccatcctcgggaattctttatctaattgaattctttgtttactctactgttgtttactgcatcttgtcatctgttgcttaatttctgcaattctttcttgttactcgacctcatactcgaccacccagttgtctggcaacagactgtgcagtcgagtatctgtgttgtaattcctgtctgtaactcgacctgtcactcgacctcacccagtgctctgcaaagagctatgttggtcgagtattttattgtttctgcttgaatttctgttttctgcatgttcacttaggattgctagaacacaccaaaacctgttattgcttggcttgacttagtgacttctgatcacatcttgattgttagcatcacatccatttggattgacaacctaaaatactacaacgacgtgattggtgttttaggataattgactaaaaacctattatcagtaatcttgaatgtgataaatgcaggtgattgaaaatctttaattggagctgccattgtgtgttgattgggtatcaagtactttttctaagtgatccaaatccttctctttttcgcagttccaactctttggaaagattgtaggaaaaatctatttgctctatatgttaagtcttgttgtgagtaatttacgtcagtaattctttaaagattttaacttttttaccaacttcggttgatattgctagaatctgtcaagagtatagagttggatctctcaagtttttctcaaatgtttaaagattcaaaaacagaggttttctttaaacaaaaattcgtatggttagtagtgtttacaaatccctagatgaaaaaattggtaaacataacccatctttgttggattttgaacttatttatgagtatgctatttggaacatagttttgtttgtctagtgagacatataaccatcactctccttattgtctcatgtgtaaaaagcctctgttgcagaaagagtctctcgtttatgttgttttgcttctcattcatttctacagttttaacttgtgttacattttcttgtgttgagaagctgataccaaggtcttactacgaacatttaccgcgtcgtttacccaaaacagcgattctcacgggaactggtggaagagtttggaaagtagcaatgatgagcaagcgagagcaagtgtatttggcacgaggctgggaaaatttcgtggccgataacgagctaaaagatggagagttcttgacgtttgtttttgatgggtacaaaagttatgaagtaagtatctatggtcgcggtagctgcaaagagacgcgagcagtcgttcatgttgaagagatctctgatgagtcagaaagtgacaacgattctcttggtagccctagcaatgtttcacttgatagccttagcaacgattctcatcatagcactagcaacgtttctcttcgaagccttagcaacgattctcttcatggtgatgctgagatagagagcgacagtgagtattctcccgagaacctaccctcagcctctatatctgttgaatccgttgaggtggtgaatccaacaacaagcaggcagagaagttgtaagtaaacattgttcttttaactgatgctttataaccgaagctgtttagaatttgatctcaaatgggaattttgcagacaagaggaagaccattgagaatccacatctgtatttggatgatccaaacaatgtctgttttaagacgtgtcttaagcttagaaagtttgagctggtaagacttcattagatattattatctcgt

SEQ ID NO: 156043 - DNA, 591 bp, Arabidopsis thaliana landsberg
accacgatggagcctcacagaaaacactcggtcggcgacacaaccctccacacgtgtcatccttgccggcgcaccattccatatagaatctacgccgtatttcacacgtgtggcatcatagccctcatgtatcaccatgtacactcacttctcacagcaaacacaactctaatcacgtctctccttctcctctccgatattgttctcgccttcatgtgggcaaccacaacttccctccggtataaaccggttcgccggaccgagtaccctgagaaatatgcagctgaaccggaggacttcccgaaactggacgtgtttatatgcacggctgatccgtacaaggagcctccgatgatggtggtcaacactgccttatcggtgatggcttacgagtatccgtccgataagatctcagtctacgtatcggacgatggaggttcgtcgttgactttgtttgctcttatggaggcagctaagttctctaagcattggttgcctttttgcaagaagaataatgttcaagatcggtctcctgaagtttatttctcatcaaagttacgttctcggagtgatgaagctgaaaatatcaag

SEQ ID NO: 156044 - DNA, 1590 bp, Arabidopsis thaliana landsberg
tcttttgctctatgagcttcgaatctaaacttttataatctctctgggcaggggcacaaaagttagcaagaatgggggagaacagcaactttttcagggctgagttgcagaagatggggtttgaagttcttggagacaatgattcaccagtcatgccaataatgctttacaatccagcaaaaattccagcattctcaagggaatgtttgcgagaaaatgttagtttctcttgcttttcttaaaaaatatttttttttgcttccacacaagagactcacctcctatgttcaacggataatgaaatttgtgaacagttggcggtggtggtcgtcggtttcccagctacacccctattgctagccagggctcgtatttgcatatccgcatctcactcaagagaagatcttataaaagccctacaggtaaatgaaatcttgcattgagttcactggttctcactcccatatcatttaccacgaagagccctagtagtattagtataaaacacgagttctcgggtttctagataggtctatgtaaataaagcctttctcagaaagggaatctgcagttcatccacaagatggattcacacgttttaatattctccgtgttatgataggttataagcaaagcaggtgaccttaccgggatcaaatattttccggcagctccaaaaaagcaagaagtagagaaaaatggcatcaaattggattaaacccgtaaggcaacagtttctttccaagagatgtttggctagcaattagctgtagtgtacaattatctcgctgttcgtctttgtcttgtcgtgaaacatgtgattgttgtcattcttctctctttattatttttattgtttttgtcagagttaataattgtatagtgtccctctatatattgttgccccaaaatttttacagatgttatcgcagtcatctttgctccacgaaattaggggcccaattcgttggaccaggtccagaagtatttatgaattgttttgttttggtcttccagaccacgaatgtgctagcagaagagtggttctcacagttaccaaataaacttctatcatgttggaattgcattcataattatccttgaatttaaaagtttgtatatgcaattcaaggggacgttccataaagaggtttgtgaatactgatgcactcgttagtcatttcatgtcttcgtcccagcaaaccacatacaagtattgagtaattaataacttatgtcacactcctcttctgtaaaagctttgttgatggtactctgccactattgatcttgctaggagcatgaggctaagcatatatccttgggaacctgagaagtgagaccaaccggctctcgatccacaacttcttcggtttgttctgctacgagatctcatgcttcttctcacatttttgtccatacatgtaactatttaaaagattcgagttcaaatattttagaattttggatatggactaaacatgtaactaaaatttgatttgaatataaagggattaaaatctttttcgaaaggttgccgtttttgtcatatacgaatactaaaaatagtaaggtccagtcaggggggcc

SEQ ID NO: 156045 - DNA, 464 bp, Arabidopsis thaliana landsberg
aagaaagaaacagagtttcgccatggcagagaaagagaagaaaacaaaaaagaagaagaagaaagagaagcatcaatcttccgacatctctttcaagccttcttcagacgtaaaaggactcaaattcggcggccaaataatcgtcaaatcattcacaatccgacgagcaagaacactcgagcttcttaaactcctctctctcccatcttcatcatcaccgccgcttctttccacggcggcgtatcttccgacaaacttcacaatccttgcacaccacgcatggcacacactaacactaggtctcggaacaagacaaatcccaaagtggtggtcttcgtgttcgaaacagaggcgatgaaatcatccgttgtggcggcggaagcaccactctggccatcggagacccccctgggagatgtgaacaagaagatgataagaaagttaaagaactgggagatggcaag

SEQ ID NO: 156046 - DNA, 787 bp, Arabidopsis thaliana landsberg
acggatgagtcgacagtgtaagtctcagtgtatcaatataggtaggtactgtgctcctgatccagagcaggactttagctcgggatacgatggaaaagatgtggtcgtggaaaacttgagacagctttgtgtttacaaggtggcgaatgaaaccggcaaaccttgggtctggtgggattatgttactgatttccagatcagatgtcccatgaaggagaagaaatacaataaggagtgtgctgattccgttatcaaatctcttggtgagtgtgtctgttatatgcaaattaaagaaagacaattttggggagaatgatgcatagttactatgtctttacaggaattgatagtaaaaaacttgacaagtgtatgggagaccctgatgctgacttggacaatccagttttaaaggaagaacaagatgctcaagtaaattactgttcccacatctgaatttgactcttctgtacgtaacctgttttgggtttgacatattatattatgtaggttggcaagggtacaaggggtgatgttaccatattgcctaccttagttgtcaacaacagacagtaccgaggtttgttccgcagtgttcaacttgagacttcaatatatgtagtttagcttattttataatcgttccattgcaggcaagttggagaagagtgcagtactcaaggctctatgctctggttttgaggagtcaactgaaccagctatatgcctcagcacaggtatgttttacatacccttacccagacccagtggtcggtcatcaaattaatgg

SEQ ID NO: 156047 - DNA, 1272 bp, Arabidopsis thaliana landsberg
attacaattaataagaacaagatcaagaatcaagaatcaagaaaatgggaagagcaccgtgttgtgataaggccaacgtgaagaaagggccttggtctcctgaggaagacgccaaactcaaagattacatcgagaatagtggcacaggaggcaactggattgctttgcctcagaaaattggtatgtattacttaaaactcacttttgatttaaaattggcactgagagtttccaaatagtactttgagaccgtggtcgtgttaaatttgtgtgttgatgatatttatttacatggtataggtttaaggagatgtgggaagagttgcaggctaaggtggctcaactatttgagaccaaacatcaaacatggtggcttctccgaggaagaagacaacatcatttgtaacctctatgttactattggtagcaggtactatatacttacatatatatcatcatatgcatggatgaatattattaattgacacacttattcttgacttagagactcactatgtatctttgtttaattctaggtggtctataattgctgcacaattgccgggaagaaccgacaacgatatcaaaaactattggaacacgaggctgaagaagaagcttctgaacaaacaaaggaaagagttccaagaagcgcgaatgaagcaagagatggtgatgatgaaaaggcaacaacaacaacaacaaatccaaacttcttttatgatgagacaagaccaaacaatgttcacatggccactacatcatcataatgttcaagttccagctcttttcatgaatcaaaccaactcgttttgcgaccaagaagatgttaagccagtgctcatcaagaacatggtcaagatcgaagatcaagaactggagaaaacaaaccctcatcatcatcaagattcaatgacaaacgcttttgatcatctctctttctctcaactcttgttagatcctaatcataaccacttaggatcaggagagggtttctccatgaactctatcttgagcgccaacacaaactctccattgcttaacacaagtaatgataatcagtggttcgggaatttccaggccgaaaccgtaaacttgttctcaggagcctccacaagtacttcggcagatcaaagcactataagttgggaagacataagctctcttgtttattctgattcaaagcaatttttttaattataataatatattattcttaagatgaaacgtacatcattattattaattgggggtacgtaacgtatatatgga

SEQ ID NO: 156048 - DNA, 361 bp, Arabidopsis thaliana landsberg
atgaatgacaagattgcagagatcagaatgatggcacgtgaagcacgtaaaagtgagggtaagcaagaagaagatgatgaaactgggattgatattgagaaagagatagaagcaagattgtctaacatggagaaacggttgaattcacagaggaaaggtttggcgggattgcgcgtagaaccgttggatgaatctggaaatgatcagaaaagtttgatgtttgagaagaagtacaagtttaaagctgagaagcctccgatgggtaatgtaaaaggctttggtggaagtaaaggaagtgatgagattatgtctgggactgagaagacagggaaaaatggaagtgctagtaaatcacgaaacg

SEQ ID NO: 156049 - DNA, 1265 bp, Arabidopsis thaliana landsberg
aggaggaacaatcacttgtatgctcttggctctgctcttcttagggacatggccagcaatcatgactctaaccgaaagacgcggtagacttcctcaacatacttatcttgactacacactcacaaacctgttagctgcagttatcatagcgtttacactaggcgaaataagtccaagcagaccaaatttcaccacacagctttctcaagtcagttacacatacattcatacacatatttgttgttggtttttgaaatgcaaagtttttttgtcacaggataattggccgtctgtgatgtttgcaatggctggaggaatatttcttagccttgggaccttagcaacacaatatgctttggcttttgttgggttatctgtcactgaagtcatcacagctagtatcgccgttgttatcggtaaactcttctcttcaactactcttaactgatttttttcctctgttcttattaactcttttgttttcaacaacaggcacaactttgaactatttcttggatgatagaatcaacagagctgaggtccttttcccgggggtcgcttgtttcttgatcgctgtttgtttcggttctgctgttcataaatcaaatgcagctgataacaaatccaaactccaaggattcaaaaggttaaaaaaagattcactatactaggtctttgttttgttttcttttggtttggtttttaacctaatctgatcttgtttcagtttagagactacttcttccttccaaatggaaacaagttctataaaagaaggaaaagcaaaagtagggactgcagattttcttattgaggttgagaaacaaagagccataaaggttaataataatacacacagcattttcctaaacagaaataactgatattcactgatactcaagatttgcgttgacaggtttttgggaaaagcacaataattggactggcgataacattctttgccggtatctgtttctctctaatctcacctgcagtaagcttagcgacaaacgatcaatggcacactttgaaacatggagttccaaaactcaatgtgtacacagccttcttctacttctccatctcttcatttggggttggtctgatactaaacatcatatttctctattggcctatacttggtctcccaagatcatctttcaaggcttacctaaatgactggaacggtcgaggcttggctttcttggctggatttctctgtggatttggtaatggtcttcagtttatgggcggtcaagccgctg

SEQ ID NO: 156050 - DNA, 985 bp, Arabidopsis thaliana landsberg
cctcctctcgggctttttcttctctacttggactgaaactgaaactgaaactgaaacacttctctctctctctctttctcgcttccacgaatcgagagttctacaaattcgcttcctagggtttctcaattcttctaatttcttcatttctatggcgagtcaatgagcgaaatggcggctagctccgcaatctctcttctcgatatcaaactccgacgattcggcgttggcgcaagtaaccatgaattgcgcctaactaagtggttcaaaggtgatcaagccggagctccgacgagaagattcacctgcttcgcagatatgttggcaccgattcgccgctctgagaagtcagaggaacggcgttttgatcagaagatgagtgctcacggtgccggaatcaaaacttcttcctctgcagtgccatttgcttctcctaagtaagacttccttatcttttatggggaatgtttatgtgagtgtttttgttttcaattgttgttttttttggcagatctcgatttttgtctaagcaagaaaagttctatcctcgttgtactccaaggcttactggtcctcagtctcgtgatactcctcctaaaagaggtaacactacgtaaaagtaattgaaattgaaatcataaacgtttaagtaaagacatgagaggatgaactctttaaccctttgaatcacccgtggtgcgacggtttctgtgtgatgtaaggatcacaggatacaacttctataaactggtttcgcaccattcgaaaacacaaatcattcacacaattcaattttattaagcccacttaacttaaataaaacttggttcaacagtcacaactaaccatgctttaaatctcaaattaagttgctaaaaagaattaccaaaatctcggccagcggaaacatattaaactgaaaatcaagacttttaaaaatagttgttttgtccttcatcgagtaatagtttatgtccccgactaa

SEQ ID NO: 156051 - DNA, 440 bp, Arabidopsis thaliana landsberg
tttcttatctttgccctttccaagagataagaggttttcaaagaacaagggtttaattgatttggctcctgaaagcattcaaaatcgatgagtggcttccatgtcaagactaattccaaaaccaaaaaaaacatttcttttgtagtgcgcctaatgggtaatggcaaccattataggtcccccaaatctcacatctctccttttttccataatcaagaattttctaaagaaacaaacaaacagagatttatgaaattgatatacttcacttagcaattaattgtggttggatcgggtagtcatggatcccacaattatgacgtggactccacactctctttgatgaaaagtttcaatgaaaagtttgataaatctgaagaatttttgttaattttatatgaatcttgaaaacaggaaccatatccattttctaattgatc

SEQ ID NO: 156052 - DNA, 591 bp, Arabidopsis thaliana landsberg
aaagcaaacttttgtctctttttaactctcttaactttcgtttcttctcctaccttcttttaccaacctttcctttctcttacacacatatatatatatacatatatatagagagagaagaggacaaagagttgaaagatgaagactctcatgtcttcatagaaacaagtgatatgtgcgctaagaaagaagaagaagaagaagaagacagttctgaagccatgaacaacatacaaaattaccaaaatgacctcttctttcaccaactcatctctcatcatcaccatcatcatcatgatccttctcaatctgaaactttgggagcatccggtaacgttggatctggtttcactatcttctctcaagattccgtctctccaatatggtctctacctccacctacctcgatccaaccaccatttgatcagtttcctcctccttcttcttctccagcatctttctacggaagtttcttcaacagaagtcgagctcatcatcagggattacagttcgggtacgagggttttggtggagccacgtcagcagcacatcatcatcatgaacaacttcggatcttgtcggaagctttag

SEQ ID NO: 156053 - DNA, 966 bp, Arabidopsis thaliana landsberg
tcatacgtctgaatatatgtttatgcatattttgttagatattttttgataaagttttcaggtattggggaattggactagggtctgatgtgtgactgctcaccagattcttagctttttgatcattgtatttattcatatatcttatgcatataatatatatcacaactacaaaaaattctcaactactacattaagtaaccttctattaaaagcgaggttagaaatcaaatcaaaactagtcatatggttttgatctgattcttgaaatgatatacaacggacaaaaatacataaatacgcttctgtttgtatttccttttaaacatttgtccatatactataagtctataacataacctaccctcttaaagcatgcacttggcagcattttacatatatctacattaaacaacccaccgtgactgtgattcgcacgaaaaaagaaaaacccaaaaactgaaataaattggaaacaaagattagggttgcagttaaacttctaaccttcctaaaaatttaatttattttttaaaaaacttactaacaatccttaattcttttatcaaaagcaaaaaaaaaaaactgactaagaatccatgtttcatgaagattacgacaagaaccacgattatttctctatgtcttattctctcatatatacattgttatagattaaattaagtttgtgttgcatgatcttgttcataaaagtgtaaatgttattaccggcatttttggggagagatctccaagaaccttcaccgttggattgaatgtagttggagagaatctggtcctcctccgccgtccaccgccctctcttgataccgaccttctcgcaacacggcgctcttcccattttctccggcggttatatgtgtttattccactgaccacaaaagtcaaggcaatggagagagagagagagtgtgtaagtgagaaagagaagttactgagtgacag

SEQ ID NO: 156054 - DNA, 420 bp, Arabidopsis thaliana landsberg
aaataggtgttcatgagtttttccaggtgacctaatcaggaactttataaagaatagtgcaagtcgatttagccttttgtgggtgcgtgatcttattcatagttaggaagttatattttaaattgactgctcatgtattatcttacattgattattgatcatatcttacagactctttcgcttgcaagaaggcctcaaagaacgtgaactctgtgtttttttccggaacaatcatttctgcaccatgttcaaggtttgtttagtttgcggttatttccatctttgaattgcaacaggttaatcccaactaaattcttcttgttgctgtcatattttcagtatgaaggtgaactttatcttttggctacagatcaaggttacctgaatcagcctgatttggtttgggaaaaactaaacgag

SEQ ID NO: 156055 - DNA, 2074 bp, Arabidopsis thaliana landsberg
ctgataattactcatttatttctccggttattggattcaccggatgccacgaacatgaatgatctaaaaaaattgaatcttttgaatctttcgatcaagagagacaagccaatcttgatcaaattcaatcctcacgcttctcgtgatcgttcaaaagtcaaatgcatcgtctttggggataatggtttgttgttgaacatcagcaatacgcaggagcgtgaattacgagtgtgccactacgaattctcatgggcattacgcacttgttgtcctaaaccaggagaaagtcaaaccgaaacacgaaccagtgttggttcggaagaattggtggtggattgttttacccggcattgcagtttcggttattgtagttgtggtgatcattgtttcggtcaagttagtgaggaaaaagaggttaagagatatggaaagagagtcggagaagagtgaaacgatcgcaaatgtttggattggtcgcagtagaatgccggcggcgacgatggttagaactcagacatgtttggaatatcatcaacaatataaaaacgacttagttttaactcacaaaaaaaaaccacgggtacccataatctgatagggtaaaacccgtgtaaggctttaagtaaataagacctgctcgttttgagcccgtaatttttctgatacaaaaaagagatctatgggcttaaaattttaggtgggtttcgggtatccagtgaattttaacccatcattaacatctatatatatatctatatatacatttttgcagccattttgtgaaataaatcctggagttgcaacttatttacaatggctgccactggcttttaattattggtttttttcagcaataaattgattaacaaacgaaaaacattccaaatatattccaatcccatatatcacgcagatttttccaaaatttgaactagatttcggcaactatttaaacaaaaaatatttgacaacccaaaagacaattgcaatcccttaaaatgagcaaaacacagcctaactacatttattatcaattcactaaacttatttttacaaaatgtgaactagatttcgacaattatttaaaacaaaaatttgtttgacaaactaaaatacaattgcaatcccgtaaaatatttattttaattatatatttaaattagtggtgtacagcggttttttttacgggacgagtttggcggaacgggtttggaaggacgttacttaataacaactgtaaactataaaataaaaatattttataaatagatataatttgcaaacttttatatatactgatttaaaaaaataaattattttcgcggtttaccgcgggttaaaatctagctttctgacataaacacaaacccaaattagctaagaattaatgtaaagaacataattgtatcatcagcaccaaatgtcgtatattctcatgtgattccattgagtaacaccaaagttttcgtacgagattatgagcaaaaagacaaaaataataataataaattaaacacacaaattttttaattgaatgtatatataaaaaaatctcctccggtgagcttcttctggaaccagtgaagatcaaaatcaagacaacgacatggttactacgtttgcttcgagatctcattctctctctgttccatttcttctataaagccagtcctcatcttctcatcttatctgcaaatgcaaattcgtctgaaacctgattattccttcttcatcgcctcttcctcaacgatggcttcgacttcttctttgggaccttctacactactctcttacggttctccttctcgtcagtttcctgattttgggttcagattgattttgagtcacgaaagtgttcgaattccatcattccggcgatttcgggttcactgcgagtctaaggcgagttcaaattctagcctctgttttgttatctctaacaattgtaatctcgcttttgggtttttggaattgaatgataaagttcttcgctttactttcgaaactagtcaatttgaggaagaagtgatcattatctgttgatgactggcttttgaactttacaagttttagc

SEQ ID NO: 156056 - DNA, 508 bp, Arabidopsis thaliana landsberg
gcaaaatcgaagatggttcctaagatcgcatcaatggcgtctactagacctctctgttcaattccttctatcttcctctctttctctctcctcttcgacgactgtcttctcttcttcttctccaattccttaatctccaatccaaatccgagcatttcacacaacactctccaaaacggtatcaatgtctatgtagctgagcttccaagatccctaaactatggtcttatcgacaaatactggtcctcttctactccagattcacgtatacccagtgacccagatcacccgacccgtaaaacccattcacccgataaatacccaccgtacccagagaacccgttgatcaagcaatacagtgctgagtactggatcatgggagacctagaaacctcaccagagaaacgaattggatcttttgctaaaagggtttttagtgaatctgacgctgatgtagtcttcgtgcctttctttgtgacgttaagtgcaaagatggagcttggaaatg

SEQ ID NO: 156057 - DNA, 959 bp, Arabidopsis thaliana landsberg
atgttatttgacgtattcgtcgaatatgttcttcatcgaacggaacaaatcaaacaaaaaaagaagcaagtggatccgtcacgtgtcactttactattgacctctgacgtgtacacggacgtcaagtaatttccttgcaccgcacgcttccttcctctgcaagtctcttactttttttcgcttccctcaaaatgtctcttattaattttctatccttaaatgtgaaacagacaaaagtgtttgccatgtgcttctataaagcctatcttctatttctcacatttttaactcatcacttctaaaaccttttctcaaatctctctcactctctttcaccggaataaaattctctaggtcatcggaaattttttacttcagccgacaatgtttccttcatcagatttctctttctcaccgtcgtcgctgttctcagcgtacgcatctttaaccggattcttgatgctctttagatcgatgctccatgatttcgtaccggagaagcttcgatcttacttctccagcttactcgaccggtttttcactccgaaatcaaagtatctcactgtgatcatcgacgagaacttcggattgaaccggaatcaagtcttcgacgcggctgagatgtatctcaggagcaagatcggaccggaaacagagcggttgcgagttggtaagatccctaaacagaagcatttcacaatctctatcgaaagaggcgaagagatcctcgatactttcgaggagtcggaggtgaaatggagttatgttcaatcggagaacgagaaaggagataaagtgaaacgttactacgagctcacattcgagaagaagcttagagacaaagtcttgaactcttatttaagccacgttgtagcggaatcagaggagatcaagaggaatctcagggtggtgaagctctatagcagagatgtgtatgctagtgatgatgatgatggaat

SEQ ID NO: 156058 - DNA, 624 bp, Arabidopsis thaliana landsberg
  unsure (1)..(624): unsure at all n locations
ggatcgccacaagcgagttcccatggcggtaagtagaaccgtaacagctaaaacaaccaacgataaccaaagtttctaatctgtgaagagttgctgaaacttgtcaagatgcttcacgatcactaatctgttcttccttgtattactgtgcttctgcaggttaccnnnnnnnnnnnnnnnnnnnnnnnnnnnnnnnnnnnnaagagaagttagcttagtccatgaaaccagattttcttccaccatggtccaattctcttgcgaagatcgatttgcacagaggtaatgaattctacacaagtgacataaaaatcatgctcaaggaaaagagattacaccactgggaggtacttaacgttccaatcaccattaccttaaagttattccattgctcacttcacctgtttttttggacaagaggaaacccaagctatcgaaatgtaatattagactaaacttaattcagattttctgtcattgttaccgcaggaggaagattttaaaggtggaagaagatgcgtacaaattttgtaagggttaaaaacccaaaaaagtaagtggttctgttttgggtatgttttgatagcatgtgtttaatttagatgaaccaattcaaaccgaacc

SEQ ID NO: 156059 - DNA, 4714 bp, Arabidopsis thaliana landsberg
atgacagatgtgacttcctgttatcaggctatttcgatcgagtggcaattgacggtgagagctcaggttgcgatcaagtgaaattgacagaggagagacagggttgcggttgagtggtttctgaggttctgttttagtggataacaacttgcaacaatgaaagagttcagagcgtttttggtggtgaagtagagagatcgcaaatgatgaagaaaagtgaagagtagtgatactgataacactgtattttactcattttaggtgtatgtttatcatcatttagctttgcatttgctcactgtatcatatcattttgcatcacatttagcttattttgcatacttaggcatttaggatcatcttgcatacatattgcatgttttggtgtgttttcaggtgcagaataagcttaaaaggattctactcgaccctctactctatccaactaagagggaagcagcagagcaatctactcgaccagtttactcgatctagacagctacagaggaggcaacaattcacttgatccctttactagatccacgcagccacagaggaagcagcagatcggtctactcgcccctcttactcgatcctctactcaaccccttaactcgatcaagggcgaccaactctacaagatttgttgatctatcaaagcgtcttcagatcctcctcattccccactcaaccagacatctgagcatacggataggagaggaagaagcatctactcgaccaattgatcactcggagcatggaggcaaaggcgcagactttgcatcaccctttttactcgatccccaagatcgaggaatcgtctgaaccgcctcaagtctcttgtcttctagtgaatctagggttttcaacattttagtataaatagatcactttggggtttgtccaaaggatctagcttttatctcttagtttttctttgtgttcttgaatcttcaaaacttaattactcttaatctattttgttttttcatttagttgtttaagtaaagttgtttagcttgtttagatctacattttggtataatttcagtaatttttgggtttgtgttcttagttatgttgcttgaagagtgattagggttcttgaggatgaattagattagggtaatctctaggttactcaggtggttaagattagattagatcccttctggattcgcttggcccctatgcggttttcgctggctaatgtggagattcgatcatagacgtccagcgtccaaaagacgttcaaatggatgtttgatctacgaattccagaaatttgtaaggtatagaccaagagattggctagtttgtttattggctttggtagattgttgcttaaaccctgctcttctaagtttcatcaatgagagttgagattaggaagtggtagagttatgggggtctctatcacgagagtggattgacccggttcttgaatctatcgtctagggtatctacctttcacctcttagccacctgatgaaccctagagttgcccttatcaatgaatccattcttaggacttctattcttcttagatttatttgtattcaccccatgattgcacttttatttacctgttatttgtatcccctgttgattgcatttaggtttcttaattttgtcacctgttagttctactcgacccaatgatcgagtagggcttttaagttcttatttttacttgtttgaatcctgacctaggattgttactagaaacccaccatctttataatctggcttgacttagttgtttttgtacacatcttgattgctagcaatccagtggactggattgacaccctctataactgcatcgacatgtttgtgttttaggggaattgaactgaatctcacacacattcaccataagtagacctgaaaaacctgcttatcaatttggcgccgttgccaattttttttgcattgttacattcaagatatcagaaacttttaagatctagttcttttacatttctcaaattactaactcatatcagaaacttttaagatctagttgtttttgtggtacaggtactaatctttgtgcatgcaaactcaatccaaaggttctgcacacctattaccattcaaagacagaattgacaaaataactcttgagttacaagaaaccaagacaaaggcagcttgtgatcataacagaccagctgctatggatcaacagtatagaccggttgacgttcaagacccacctaatgttgatcaaccaagatacattggtgttggtgatgccccaaggaatcatcaccaaagacaagggatagtgccaccaccagtttagaaaaacaactttgaaatcaagagtggtctcatctccatgatccaaggaaacaaatttcatggtttgcccatggaaaatcccccggaccatcttgacagctttgataggctatgtggccttaccaagatcaatggtgtcactaaagatatgtttaagcttagactatttcccttctctttgggagacaaggcacaccactgggagaagactctgtccccagactccatcaactcatgggatgattgtaagaaagcttttcttgccaagttcttctctaatgcttgcacagctagattgaggaaggagatctcaggcttcacacagaaaaataatgaaactttctgtgaagcttgggagaggttttcaagaaggcttcattattgagcacactgtaccaaggagctttaccaaagatcagaaggctaggagttagtcgaaaatctagcacaatctgatgggtgatacaatgaagaatatgatcgctcagtgagaggaactggaggcagtgaggataaacagagcaaagatatcaaggctctgaatgaaaagttagacaagctgttgctggctcagcaaaagcaaatacactacatcactgatgaagagcacttccaaatgcaagagggggggaatgatcaaactgaagagctgtgctacatccagaaccaaggagggttcaacaagggatacaacaactacaagcccaacccaaacctctcctacagaagcactaatgtagctaacccccaacatcaagtgtatccacctcaacaaaatcaatccaagccttttgttcagtacaaccaaggttatgtccctaaacaacagtttaatggaggctaccaacagcagaatccaccaccagggttcactcaacaaccacaacaagccccaaccagctcaagatcctgaaattaagcaactcattcaacaaatcattcaaggacaagctactggcgctatgccttttgacaagaagatagctgaattacacaacaagatcgattgttcttacaacgatctaaatgtcaagttcgaagttctcaattccaaaatcaagtatgtggagagtcaatttgcatcaacctctactctgaagcatcctccgtaacttccaggaaaagcagtccaaaatcctaaggactatgctactgctattgctatcaccatccaccaagaagatgagtctccaccaagtcatcagactcccaatactgcggacagtatgattcaagaaggggggggggggattcaactcaaattgttgcacctgccacccaacaattcatctggactatagagcacacacctttgctgaatactcaccattttggaaaaaatttcaaaattgaaaaactcaagaaggatcagaatcaagagatgattagtagagtcaacacccaagaaacatacaagaagaaagtcatccaagaaaagcttgatgatcctggttcattcactctgccatgctctctaggaccattgacattcaataggtgcctctatgatttgggagcatctgttagccttatgcctctctctacagctaaaaggctagggatcatggaatacaagttcttcaacctagctttactcttagctgatggttctgttgcacatcctaatggtctaatagtaaatctgcctgtcaagattggaaatgttgagatacctacagattttgtggtattggacgtttatgaagaaggcaaggatcccctgatcctaggcagaccattcttagcttcagctggagcagtcatagatgtcaggaatggaaaaattgatctaaaccttgaaaaatgtatcaagatgaagtttgacatcagagaatcttcacggaaatcaacaacaggagttcagaattttggggttcagaacgtggatgttgatgaagaaacagaagctggaaccccaccaagagttaactatacttctcaagttagcaagctgaagagaacttttgaccacatgaagagaacaacagaaaggctagctcagactgaagatcctacagaagatgactggtatgagatgagaaaaataaataaatggcaaagtagagtcatagaaggattgtcttcaagggtgatgaagctgaaagatcaactttggatgtttgaaaaaagagttaaaaatttttcaaatggtattgatctagagaagatggaaactgcactagctatcaaggaggacgaaaatttcacaacagaatggtttgcaccagaagatcaaaaagtagttcacttagaggaaagaagcctagagagcaagttgttgagtgaggaggaaactcctattccgatttattctccaggagtgcctaaacagcccaccaacccctctgctgaagaagaatacttgattcatgattctgttgctgaagaacttctgaaactctaa

SEQ ID NO: 156060 - DNA, 181 bp, Arabidopsis thaliana landsberg
tggatgtgttaaagggttgttcatggcgttaaacccaagaataatagcttgtggaaacagaagagcagcttttgcggcggctatgagatttgtcgttggacctgccgtcatgctcgttgcttcttatgccgttggcctccgtggcgtcctcctccatgttgccattatccaggtagttttt

SEQ ID NO: 156061 - DNA, 622 bp, Arabidopsis thaliana landsberg
caggggaccttctgcagcattttttgactgtcatatttgataggctgggcaagggagagtcatcaaatgatgattttgagttgaacataatcattcaggtaaccaaatttaatgaacttctttcttagagacacttctctcatctttatagtctccagtaaatagattcactgtttgttaactgtttgcttctgtatcactgttttctgttgccgtatatagtgtttatacaaacaaactaaatttgaaattgtacaatttacaggaatcaattagaaattcagctgataccatgctgttaagcagtcctgatgcattggtggtatctatttccagagaagggtgtttggacagagacaaagatgataagggtgacataatacccctttcttcaactcgtaaaagccgcgttaacagctttggaatagattgtctcgagtctctcaaattcacatacaaggtctagagaaacaacttagtcttccatccaattcgtactggtatatctcataggccacatctatgtgtatttgaagagctgaactgttttcttttttaaggtgccatggccacttgagcttattgccaatagtgaggccattaagaagtataagcaggtaac

SEQ ID NO: 156062 - DNA, 3416 bp, Arabidopsis thaliana landsberg
ttggcaaacacaattactcttggatcggccatggctactactgttcatctcagctcatcctccctcttcagccaatccagaggaagaagagacaactccatatcttccgtcaagagtctccgaaaacgcaccgttttatctctctcttctgccctcacctcacaagacgcagggcacatgattcaaccagagggaaaaagcaacgataacaactctgcttttgatttcaagctgtatatgatccgcaaagccgagtctgtaaatgcggctctcgacgtttccgtaccgcttctgaaaccccttacgatccaagaagcggtcaggtactctttgctagccggcggaaaacgtgtgaggcctctgctctgcattgccgcttgtgagcttgtggggggcgacgaggctactgccatgtcagccgcttgcgcggtcgagatgatccacacaagctctctcattcatgacgatcttccgtgcatggacaatgccgacctccgtagaggcaagcccaccaatcacaaggtatgttgtttaattatatgaaggctcagagataatgctgaactagtgttgaaccaatttttgctcaaacaaggtatatggagaagacatggcggttttggcaggtgatgcactccttgcattggcgtttgagcacatgacggttgtgtcgagtgggttggtcgctcccgagaagatgattcgcgccgtggttgagctggccagggccatagggactacagggctagttgctggacaaatgatagacctagccagcgaaagactgaatccagacaaggttggattggagcatctagagttcatccatctccacaaaacggcggcattgttggaggcagcggcagttttaggggttataatgggaggtggaacagaggaagaaatcgaaaagcttagaaagtatgctaggtgtattggactactgtttcaggttgttgatgacattctcgacgtaacaaaatctactgaggaattgggtaagacagccggaaaagacgtaatggccggaaagctgacgtatccaaggctgataggtttggagggatccagggaagttgcagagaaactgaggagagaagcagaggaacagcttaaagggtttgatccaagtaaggcggcgcctctggtggctcttgccagctacattgcttgcagacacaactgatacttttcatggactgatcaatgcatctaatctcctaacaagtccttttacttggatctatggtcttgtttcttataaatcatctatgccgtgtgatcatctctctcatttgttttcaagttgtattatgtttttgaatcttaataatgtaatgcgaaaaatatcaataagatttgctcataggaactaaatcgtagcgtaaggattcagatgatcagaactaaaacgtgagcgcaggtttagcttatgggttttcttcacccaaaacagagtataaagatctgaatttttgttattgaagcagcagcaagaacgaattccagacaaaaaccacagttgacccgatgtggttcttgttgaatgcagaccatgatattcacaaacactgctgtatcgtaacttggaacgaacttaatgccagtcagagatagagattgaacattgattgcttggattctcaattaattcaatcatattaaatgattgtctaacattctcaacataattcagtcatattaaatgatttgtctaatgaatgcttttaatgttcactaatgtgcccaacccaaacattacagaatttaataatagcttggattttcccactaaatcaaactaaatcttcgtcagacattttccctcgcaatatgtgtccaaccataaaaaaaaaaaaaaaaccactaattacgattcgtagttactttattttgttttattcaaatcagccatttgaaagtttgaagcatcagcgcaaacattaagaacagagtttctctaaatagtttttcgtctttatcctttttacagtaacaacatggaagcaacaagaatgggttttggtggtcttagcgttcctctctctctcacgcccaacctctctctcattcctcagcgtttgcttgacaagcacaatctttccctgaaaccggtaaagatacaccacttggtatgtgtaaggtctactaagagtagtgatgatcttgagaatactcgtccattgacgtactattctcccactctttggggagatcactttctctctgttcccctcgaccacgctgtaagtagatagatataagaagcacaagatgaccccaataattgttggttcagacaacatgaacgattttttttataaattgcgttgtatatttaataattgtaggaatttgttgaactagaaagagagattgaaactatgaagccgctggtgaaagacatgctcatgtcttctcaaagcagcgacaaggagaagattcgtctaatccatttgctcgttagcctcgggagctcttatcattttgataaggagattcaagatatccttaaacacagtttcacaaagttggatgacataatagccaaggaaaatgatttggaaacaatctccattatgtttgaggttttcagactatatggacataagatgtcttgcggtatattgacaattatttaaaccagttaattagatcagtttttttgtttcacaaatatatataacaaagcatataatggtttggggtagatgtgttcgagagattcaaaagcgaagatgggaagtttaaggaaagtttagttggggatgttagagggctgctacagatgtacgaagccgcgcatctaggagcaccatctgaagatataatggatgaagccttgagttttgcgcggtatcacttggaatcgttggtaagccacgaaacaagctccaatctctttaatcatgtacaaaacgaattgtatagagctcgatatcatagcatagagatactagtagaacggcagtacatttcgttctacgaacaagaagaagatcacaataagatgctactcagattagctaagctcaatttcaagttattgcagctgcattacatcaaagaactgaaaacttttatcaagtaggatcgcgtatattcattgtcgatttttttgtgaactttcataacaatattgaataattctcttctttattttttcgggttttttgtgtatgctcttttggaagatggtggatggagctagaccttacatctaagtggccaagtcaatttcgagagagaatcgtggaggcgtggctagcaggattgatgatgtactatgaacctcaattttcaggtgggagggtaattgccgcaaagtttaactacctccttaccattttagatgacgcttgcgatcactatttctctattcctgagcttacaaggctcgtagattgtgtggaaag

SEQ ID NO: 156063 - DNA, 347 bp, Arabidopsis thaliana landsberg
gtcgtcgtttacatgttttcttgtagtgtaaggtcgttggattgaagaagatccggttttgttgagaggagaagtgaagcggcttgaagggaaggttcagaatcttacttcggccctggaggcgaagaaaaaggagaatgttgaagtctctgataaggtaattttgttcatttcgtttgattagaatggtttataagataaggttatgtgaaatttttttttttttttttgtgtctcagttgcatcagtgcaatgagcaattgaaggaggataaagtgaaaaggtgggaggctctacaagaaatttcaaccactcagcacttgcttaagttaaaatctgaggtttga

SEQ ID NO: 156064 - DNA, 388 bp, Arabidopsis thaliana landsberg
atgatagtttgatgccgtcaatttgatttatgtgttgttcctggacctgggccaattcttgattaggcctgcattaaaatattctgccaacggctagaaactttttctcttcttctataaatttactttttttggcctaatcccggaggttcttcattatttcgtcagaacaacattgaaaagttaccgttaaacactctaagcgctcttcttcatcttcttatacacttctcttccaacaagaatctcaccaagaaacttcttcacttttacaaaggtaatctctttcttccttctgatttaggttcacattatagactgttcttcttgcgattgcttgttcttcttttcgtatgtcgctacttgattcgttctgggcttctggggt

SEQ ID NO: 156065 - DNA, 1509 bp, Arabidopsis thaliana landsberg
caccacctcaccgttccttatccatttggctgacgcaaaatcgaatcggaaccctaaaatctctccgaaagccatgtctcctcctcctgctgtagtcactgaatctgccgatggacaacctgagcaaccaccggttaccgccattgctgaagagctggagaaaaagcttcaggttaagacgattttacgtagatttgtcacggtttttacttcttagtctcacgctcgaggatttgtttttgcagactgatgaaccgattgtagaagatgttaaagatgatgaagacgatgatgatgatgacgaagaagaggaaggcgacgatgctcaaggtgcttgttgattcctccctcttttctcaccagtgtagcccggcttttagagttttgttcgtcatcaatcattacttaattttccagatagtgttctttagaaatgtcattgaatattaatcatattaatcattggccttgttcgttctcacatttgtagtttcgtgtatgcaaagagtgtcacatttcaaagaattactgcatagttatgtagaaatggttgatttaaatgtttctgttaacatatagagatgtgggagatgaatcattttgctgatagattgaggccaagatttatggatttacttgactaagtttcggagaatagagatcccaatatgtttatagcatagtgaattgttcttaaaattgaataaagttttgttgttgtaggtgtaagtggaagttcaaagcagagtagaagtgaaaagaagagtaggaaggcgatgttgaagctcggtatgaaacctgtcactggtgttagtcgagtaaccatcaagagaacgaaaaacgtaaacctttctctgttttctcaataagtttagatttttttctgcgtgtgtgattctaatgatacactacattaatgttatcaggttctcttctttatctctaagcctgatgtctttaagagcccgcattcagaaacctatgttatattcggtgaggccaagatcgaggatttgagctctcagcttcaaacgcaagctgctcaacagtttaggatgcctgaaattggagccacatctcagagagcagaggcatcgacagccactgtagaagcacaggtggaagaagatgaagaggaaatcgatgagaccggtgtggaggctcgtgacattgacttggtcatgactcaggctggagtttcgcgtagcaaagcggtcaaagcactcaagagtcacgatggagacattgtaagtgcaataatggaactcactacttaagagttaagagagattgagtctctatgctttattcacttgcagattgttttcaaatacttttggatttatcaggaaattggattattgttgtccttacgagtatctaatctagtttgtttgttatgatgcttatgcggtatctgagttgtactcggtttttcacgacaatgtattggagaaaatacatatcaaaattcgactaaacaaagttcgagaaacttccaaattctag

SEQ ID NO: 156066 - DNA, 872 bp, Arabidopsis thaliana landsberg
acgaatttcagagaagattatgagaagagaatcttgcaatcacttgattctaggcagctgagccgagatggacggatgaggaaccccgatgagaagcctctgattgctccagaggcagcaccatcaaaggcaacgccttctgaaaccgaggttgtccctaaagctaaggcaaagccgcagccaaaggaggaaccagtttctgcacctaaaccagatgctactgttgctcagaatactgagaaagctaaagatgcagtaaaagtaaagaatgttgctgatgatgatgatgatgaagtatatggtcttggaaagccgcagaaggaagaaaagccggttgatgcagctacggcgaaggaaatgagaaagcaagaggagattgctaaagccaagcaagccatggaaaggaagaagaagctggcagagaaagctgctgctaaagctgctataagagctcaaaaggaagctgagaagaaagaaaagaaggaaattaccttttcttttttgttgtacctcaatgctctttgcattcttctctctccattctaacagttctcgccatctttttttgtgtgttgcaggagcaagagaagaaggccaagaagaaaaccggaggcaacacagaaaccgagactgaggaagttccagaagcttctgaggaggagattgaagctccggtgcaggaggagaaaccgcagaaggaaaaagtcttcaaggagaaaccaataaggaacaggacccgcggtaggggaccagaaacgatcccaagagcgatccttaagcgtaagaagtcgactaattactgggtttatgctgctccagcggctctggtggtactgttgcttcttgtcttgggttactactacgttctctag

SEQ ID NO: 156067 - DNA, 545 bp, Arabidopsis thaliana landsberg
tgcatttagaaatcaatgcagtcaatcttacatttttcaacattcattttctttcctttatttttatttctgtttagatgtgtttatcatgtgaagtaataaagaaaagatcaatatatatatatatatatatatacaaggattacagaacaaataaacaaagaaatatcatctctaacttacaaaacattagctctcttttgttgtgatatattgatcatggccaagatatcatgttcttattttctcgtactcatgcttgtgttctcaggtaatttcatgctttccacttccaaatataaaaaagtagtttttaatctttacattacataaaatatttaagcgtgtacacatatatatagtttcatatcataacatatggtattttactattttttcagttttttcattggttgaaaagactaagggtaaaagacattgtagcacaatcattcttccagaatctccatgtgtccctcaagattgtgttgagtactgctttgaggagtacaatggaggtggaacatgtattgcatccaaaactg

SEQ ID NO: 156068 - DNA, 542 bp, Arabidopsis thaliana landsberg
gctcatgaacgttccaaaaaacgtatgtctgaatcgtgttcaaaccgccttgtttcgctctcttgatgatgtttggccacatctgagcaaaacccacatcacatattctcaaaaatgtaagtaaaacaaaatttaaagataaaacaactttaactaacgagtgtatgaatcatttacttcaggagtgctacgagggtaatgtatggagccagagtaaaggattcgtctctgtccattactgagaagtgctttccggtcataagtaactccacattgcacagatccaacacctagaatcataaaccctaagcagaaccagagaatcagtctcgaagcagaatctccagtccccatctcccgcattcaccttcacaaagagaagaaccaagctacttcttccgtgtctgtgttggtctttcttaataaggagagagaaggaaggaaggaagaagaagaagaagacgaaggagaaagagaggaagaagaagggggttttattgcacttcacaagtgtctcttactcgcatcatcactgcgtggcc

SEQ ID NO: 156069 - DNA, 1891 bp, Arabidopsis thaliana landsberg
cacacagtcgctagatatgtctctctcgcttctatcttcttccgccgccgctgctgcggcgtcaacatcgggatcatcatcttctccggcggctgcttcgtcttcctcaacaaccacgtcatggttctccgggatcgttcgtggtcgtggtgataaatccggcaccgcgaagctatctaaaagctcttccatggctggaggaggaagcggaagcgcagattacggtggaccaatcaaagggaagaatcaatttctcggtgttttgttcaaatacggtcctaaatcaattcaggttcgcttctcgatttcgatttgttaaattgaattgcttttgagttacttccaagcaaagacacaaaattttgaataataaattatcatttcgtgattctagggttgcttaaatatgtgtgttgttatattgcttcgtgactgtttttagcaaacattgtgttcatcacaagcttgtttgctgatcatgtttaaggttcgttgaagaaagtcaatgaaaatttaggtcaacgttccaagccatgtgagaccttgatttcaacttttgcatcaagttagatgattttagttgaccacttgtagcagctttgatcaaagtttacaaagatggatcctttttgaaaatcagaataggtttactatagattgttgggtatagtaacatcagcttccttgtctgtttatgcatcaccaggttgcttttaagaccggagagtataaacaacaagtgatatttatcggtggattaactgatggacttttagctactgagtatgtagcttcttctctctttgacctaaatctttatcttttgggagaaattgtgtacagtgcagataccttatcgaatcatgtttgcttcatgtatattaattgatagaacatttgcaaattggctgtttcagttacttggaacctcttgcgattgctttggataaagagaaatggtcacttgttcaactactgatgtcttcttcatattctggatttggcacttccagcttgaaacaagtaagagttatttcatataatttcatcttgccttgtaatattgttagtctctgggaaaaaactaagaatttctccattccgcaatatactaaacaatatatctttgtttcttctgatgaaggatgcacaagaaatcgaccagctaataaaccacctcatcaacaaagagaattctgaaggtgttgttctgcttggtcatagcactggctgtcaggtgattggttaagccctcaaacactttttgatcatggttctgaaagaaaagttatgacagaaacttgtgtcttctcgcattttgaaacaggacattgtgtattatatgggaacaaatgctgcatgctcccgagctgtccgggctgcaattttacaggtgcgagtcctagattctttgacttctgttctgcgttctctcttgaagctacactttttattatgtgaaaggcctcgtatcatatgttctgactgtagtgtagctttgatcatattgcctattgcaatgtttacttaggcaccagtcagcgatagagagtacaaagcaacgcttcctgaaacacctgctatgatagacttggctgcaaacatgataaaagaaggtcgaggagaggagctaatgcctagagaagctgatccttgtgctccaatctctgcttataggtcaatatctatttccttctaccatattcgtagctttgaaaatggaaaaattgtgattcgaacatgtctaaatacaaaaatcaatcttttgcttgcttcctgcagatatcactccctctgcgcttacatgggagatgacgatatgtttagttctgaccttagtgatgatcagttgaaaactagacttggccatatggctaacacaccttgtcag

SEQ ID NO: 156070 - DNA, 2564 bp, Arabidopsis thaliana landsberg
atggaaggtggtgtcagacgaagtacaaggattaagtcgagaccgctcgaatactggagaggtgaaagattcttgtacggacgcatccatgagagtaagtcacatattcgttttacgacatcgatttcaatacggatgtttttcaattcataatttatctactatttccataggtttgactactgttatcggcataaagtatgcatcccctggagaaggtaaaagagattcgcgcgcatctaaggtgaaatcattcgtctccgatgagtacaaaaagctggttgattttgccgccttgcattgatatgaagaatgataagcctaggaaggaaatgatgaaccatcctattgtgatcattattgttagtatcttgtgtcaatgaccttcacttaggtccaaacttgtcactgtctttctttaaaactgcaacacttttaagactttgcaaatgtaacggaggttttcaactttcagtttagtctcttccatgagactttgtcaacttgcatttgtcactttagtctttgcctctttgatatttctttagggcacttgttgttatcacctttctcgcttaaatgctgcctttgactattttattataaaactataatctcttaataaaagtcaaatataatttatttagggttgctactttgatttaaactgaattaaccagatcaaactcaaatcgtgggtcattgtcgaattaaagtatctctttagaagaaaaacggtatacaattttcttgattctttttttcgccattttcttgaaaattaactctatgatacaatgattatatcaatagttattaaatacttttttcttcataagtttccaaaacagaaacgaaatgtccactcttaacttagctgtttagactttttcacttgaactcaatattcgtaacccctccatgatccacttttcttggatcgtgtcgtggaaatgaaagttgaatagcaatatcgctattgatacatatggtcctaatcttttaaaagaagtagcaacttgattttggtacaaacagtttactttttaggtaaaatgccaatattggcaagaacccacaaatttggaagagcacaattaaacctgacgttattacttcttttgatacgcttcaattttctttgcgaataaaagtatatgaatttcgacttcgagtaaaatccgcctctgtctttagtgacctttctcgaattttgccacccgctttttacgctttacttcaggacaagcttacagaaacaaggagatacatacaagtaaaaacaaacaaagactcgagactcaagagtcaagactcaagactgaagccttttattattatctagttttgaaaatcaaattactaatttatctccgctatagtttagtttagtttttggtaaacatgtaaagaaagaaccgctatagttttactggtaaacaaaagacaaataatacacctcagcaaattggataacgatcatacaagttgatgaaaaaccacgggctcgttacaacatttgattagacgtcgaccgtacaaaacaagaatagagtccttcttttgtcacgtagtaaatatataaatgttactatgtgttaatctgaccaaagatatatttgacaagttcaaaataaaaccgattgtatggatttggcaaatggcctattctagatcttaatacgtaattcagtatcattcgtagtacccagtcgagttaaaatactactcgcaatcgttcttacatcatcaataaaaatattgatctgattcatttggtgtttcataataactcgacttttttttgttgtacttgtttattttcttatctatgtacgtatgattgagtttttctatgtatgtttattgcgttgacctaaagaatcagccgactatgcttgcctttgagatattgataccttatcgtttgttattttccaattattgtcaccagacgccgtgtcgtttttccaacgattaccagctagaatgccgtgccatttttgctttcctttgtttgatctgactactccaagagttatatgcctacatgcttacaaatcaaaatatatgaaaagtaatgggaattgtgaaactgttgcgcgacttgtgacttgtgagtctcaatggtttggtttagtggtgaaaaacgttttttaggctataccaaattttcaagattggtttagaaatgggaatttggagagtggacaatccaatttgttttcctatattatttcatttgaatggaaataaagatatcagttgcgtaaatgacacgatctggatttggggatgttgtggaccctagaacgagtccaagttgcatgggacatgcagtttcccaaactttgtaatagtatcatttcatgttttttgtttgtcattttcttatcaaaaaataaaaagtttatggttagaaccatgttttgactcctaccatagagagtaaaggatggcttaataaacccgcgcatggaacgttacgcatgctaaaaaaatgtttggcaaaagagatgatcggtccgaaaaatgagattgtcgacattcggataagggcgtaa

SEQ ID NO: 156071 - DNA, 2723 bp, Arabidopsis thaliana landsberg
  unsure (1)..(2723): unsure at all n locations
atgtttaggatagttttgcatgcatgttacatatttgtgttgttttcaggcgatttggagctgtccacgagctaactggaagaagcggacctgatcatgacaaaccactcgacccagaggtcgagtaggagcttcaagatctcaagagaccactcgacccccatgtcgagtagaagacaccgccactcgatcacatcactcgacccccaggtcgagtgtcttcacctccatctcttgaccaccactcgatcgcatcactctaccaggaagtcgagtatcaccatcaccaccactcgactacacactcgctggcaagcttcagagtcttctttattccgtactcaaccagacactcgagaacaaggaagaaaagaagactccagctattcactcgacctcccactcgaccacatgggtcgagtacagttcttaatccgtcacaatactgcgtcgttttaagtattagggtttcagaatatttggctataagtagcatgtacttcacattttcgcaaacaagtttttatctagttttattccgcagacactgtgttctagaccttttgtaatccgaatttctctttatctattaagtattcagtatttgttcttgattttagtttactgttgttcattctgttatcatcatgttgttacattgttgttatcatgtttttaacttgttcaacgtttatgctttctgctatgatgtctgagtagtgaaaaggtttctgaggatgggttagagtagtgtagaattctcagtatgctaggtggttgagtattgattgatagatcccttatggattagttgttcttaatgcctattgctttctgatcaactagaatttgaacccagacttttccacgcccaaaaggtgtttgatgaaatgtctgaaccactaattccagagattcgtggccctgtacaaaggtattggttgcagggagcgttttggctttaacttgttgattcgtaatgcctgttaggttagctctcgtcaatggtgattgagtctgggactaggttaacttgagggtctctgttgcggtggcacttagatttggttaatgaacttgttgtcgagggttaatttattgaacatgtagttcacctgtaaactgaggaaacgaaactactcaattaccccatcctcgggaattctttatctgattgaattctttgtttactctactgttgtttactgcatcttgtcatctgttgtttagtttctgcaattctttactgttactcgacctgttactcgaccacccagttgtctggcaacagactgtgcagtcgagtatccctgttacagcatctgtctgtttctcgacctgttactcgaccacacccagtgctctgcaaagagctttgttggttgagtgttttattgtttctgcttgaatttttgttttctgcatgttcacttaggactgctagaacacaccaaaacttgttattgcttggcttgacttagtgacttctgatcacatcttgattgttagcatcacacccatttggattgacacctaaaatactacaacgacatgatagtgctttaggattaattgatcttaaaaacctattatcaatttggcgccgttgccaattgggtgtttgtttgttacatttgagattgcagacttgcttagatcaagttctttttcaattttcaatctggttgctaattgtgtgtttttcttgttgtcttcttgatccaggtacacctctgctgtatgcgaactcgatcaacaggcaatcagaacctccttttcaacgacaacattgaccgcatagctcgcgaactcagagaaaggagaaacacagtcaaccttgtacctcagcaaccactcgatatgactgacgaacagaatcaacaaaatggcccttccaacattggtggtggagatgcaccacgtgatcaccgttagaggaaaggaattgcacctcctactatccagaacaacaacttcgagattaagagtagtctcatctcgatgattcaggggaacaaattccatggtctgccaatggaggatccactcgaccaccttgatgaattcgataggctctacaacctaacaaagatcaatggtgtcagtgaagacggattcaagcttcgtttgtttccactctccttgggcgacaaagcaaacatctgggagaagaatctgccccatgactcaatcaccacctgggatgattgcaagaaggcttttctatcaaagtcttctccaatgccagaactgcaagacttagaaatgagatctctggctttttacagaaggctggtgaaagnnnnnnnnnnnnnnnnnagcgtttcaagggttacaccaaccaatgccctcatcatggctttactaaagcctctctactcagcactctttacagaggaatcctaccacgcatcagaatgcttctgggtaccgccagcaatggaaacatccagaacaaagatgttgaagaagactgggaattggctgagaaccttgctcaatcagatggcaaaaaaaacgagaactgcgataggaccgtcagaggcacagttgactctgatgacaaacacaagaaggagatcaaagcaccgaatgacaagctggacatgatccttcttagtcagcagaagcatgtgcacctccttgttggtgacgagcagtatcacgccatcactatttgccatgaccctcggatcggggttgagcggctcggatcacgatag

SEQ ID NO: 156072 - DNA, 345 bp, Arabidopsis thaliana landsberg
agaactaagcctaaagtatgctgtttcacgaacgatctatgattactaaacagaggaatctcaatcttctttaggacttgatacgacatcaacgagatactgattcaacttctgtccaaacgtcttcacagagaatgattcagcgacatggttcctggcttcagctcccatacaattcgccaactcaggattctcgatgaatctagccctcgccgagctgaaatcttctggagttggttcacaaagatagcctgttactccattctttaccgtctccacggggccaccactgttgcaggctatcacgggtttgtatgcagccattgcttctaatggaacaatacc

SEQ ID NO: 156073 - DNA, 176 bp, Arabidopsis thaliana landsberg
ttcagtggccatagtccagatacaccatgatgaacaaggcaattcttgctgcccaagctagtgtcggcggtaaagtcaataagacatacttctttgaagctaaagaaaagctatgctgatttgacaatagggtttctccgaattagaggtactattgtaaagatatcagccaaaca

SEQ ID NO: 156074 - DNA, 270 bp, Arabidopsis thaliana landsberg
cttcataagaacaatcctcaccaaacccatcttcaaatttttcttcttttgaccaccattgcatgcttacccgattgggaaactctttgttatccttattgatcttcttccaacggcgatttcccgatccaaattttgggttgattgaattcaaagtttccgtttttacaaaccaatttcgggaaagttttcatcttttttttatggctgcttacgcgaattatctccgactcgcacgacttggaggaacaagttcaggtgtaaacctgt

SEQ ID NO: 156075 - DNA, 83 bp, Arabidopsis thaliana landsberg
gtgcaatctcatctgttgcaatatggtattaggagaaacgaataagaaagtgatcaagaatgtgattaagctcttaacgatgg

SEQ ID NO: 156076 - DNA, 174 bp, Arabidopsis thaliana landsberg
tcaaatcaagtctaaagcatggttatgtttctggttaatgttctcgagtgtgtgtgtgttacctggtagttgctaagggtaagagtcttgaacccagctgcacagtagtcgaaataatattcccatgtccttaagaatttctcgtcgaatccaagatcaatgatttgtctgcgc

SEQ ID NO: 156077 - DNA, 388 bp, Arabidopsis thaliana landsberg
gcaaataccctatttcaaaatagaactcaaagttgggattactctgcatgaacaagcatttacataacatatagtgatcaacatcgacactatcacccgtgggatactagttataaaattgaaattgatgcatatatagatgtggatattcaaagtcccaattggctctgcatctccaatatagtctttgccgatttctgcagcttctcagcctcttcatcagtcatatgcacattggtcacagcaaccacaccattccttccaagcaaagccggaagactgaggaaaacatcaccaccatcaacaccataaaatccacgagcaagaacagtaaccgggtggatcttgcgctggtcacggaggatagtacgagccagattagcaactg

SEQ ID NO: 156078 - DNA, 193 bp, Arabidopsis thaliana landsberg
tgtgctgtatagcacggatattaatattttgtataaattaaattgtatattttgtttgaattacataaaaaattagtataatataaaagtaatgccataatatttttcaatgtttttactatttgcatataatgttacattggattgactttgtttaaaaatgttatgtttataataaatacaacatatgtac

SEQ ID NO: 156079 - DNA, 89 bp, Arabidopsis thaliana landsberg
ctcaagccctgattcttctgtggagtttcatgaggagagaagtaagaatcataacaggaaaaaggaggtgcaagagtcttcttcagtga

SEQ ID NO: 156080 - DNA, 335 bp, Arabidopsis thaliana landsberg
caaacattctgcgtattcaccaatcatcagcctccctaagatattcgcctagagctctctcatcagtcgcctcgatctccgtcaccggaaattccatccctcctccgatcgtgacgtctccacaagccaagaaggtacagtatttttatgaatatcactttaattatacacatacccaagatctaattctaattggtaattttcctctgcttctatgtctcccttgacaaacgggattttcttttttccgattaagattataaactcctctcccacacaatatgtgtgtgtgggatttaacactattttcaatgatatatatgttcataatattt

SEQ ID NO: 156081 - DNA, 249 bp, Arabidopsis thaliana landsberg
gtcgaaagaaaagattactaaattttaaccaaaacatatgaccttcttaaggttcacatgacatcaaaaatcatcccaaacgaagaagacgaaaaagagcaaagaattcagattaactaagtacttaaagagtctatgactatgaggatcagagaactacaacttggcatgagctagagagtcttggaatggtaaggagtttcttgagcaaggcagattcttcatttcctctgaaatcacccaagcgta

SEQ ID NO: 156082 - DNA, 358 bp, Arabidopsis thaliana landsberg
agctcttgtagctcccttatccggtcgctgatccgtgtccttcgtacgtctgcaatgaaaggtagagataaatatactctgacccgctcagaccaatcctctgttcaatgaagcatacagtgcatcattaaacatccgtacattgaaagtacagatataagttgtatcactaagcttcaatgtataaagttaagagagccttgatcactacacttccagaactctgaaaataaagattgtatgttgtttaccctctcggcaatgctgcgaggatgagatgcgcacccacgtatagcccgaaccctagaagcagcagagtcctccataaggttctccatgttcatatccgacatgcttg

SEQ ID NO: 156083 - DNA, 977 bp, Arabidopsis thaliana landsberg
tgaaatcgggagagcaaccacatatactcaatatacaaccgccggaatgatgatcgacgatgagattgttcaccaaatcaacttcaaaccggatcttgtggttatattgttcaattctttgtaacaccaggagcttctatcatgtggctatctcatgagctcttaccaagaggtagaatccagctctgtctcaagtatatctcttttaatgcacttggagttttctgaaatttttgctcaaaaaacatgagttgtggcaaagcagagcctttatctgacatagagatggcgcttaagaacaagctaataaatgatatgttgtcttaagttttagtttctatctgaatgttgcatgtttggtcagaatgtacttcaccttctagtatttcggctttaagttttagcttctagtatttcggcttttagtatatgtgtaataactttgagactgaatgtttggtctgaatgtttgtgtttggtctgaatgtttagtctgaatgttttctgtttatggattaatgagatgagtatttgtgtttggtgagtatttgtgtttggtgaatgtttggtctcaatgttttcagtttatggattaatgagatgagtatatgtgtttggtctgaatgtttgtagtttacggttttgtttcatctgttaatgtcatgatatgcttcattttgcaggactgggaagaatagaaattgtgccaacatcaattgtggaagataccagattctttaaatgtatgtactgttgtgagttttatcgattaatgagtttggtctgaacttaaccatatccattaatgaatgaatgtatgtgtttggtctgaacttaaccatattgattaatagatgaatgtgtgtgtttggtctgaactcaaccatatcgattaatagatgaatgtgagtgttttgtccgaacttaacaattttggttacaatcgagtaatgagttttatttcatgagtttcatct

SEQ ID NO: 156084 - DNA, 181 bp, Arabidopsis thaliana landsberg
gccacgaagagcgctaaggcggagaagtctgaggataggaagattgtagctgttaagtgtgctaatgtatccgagtgatggcttgtacacgtcagcatccgacgggtcatcgaggttttcagtgcatcgcatggtgcacaaagtctcctctaaaccattagctatttcatgtggttgttgg

SEQ ID NO: 156085 - DNA, 500 bp, Arabidopsis thaliana landsberg
tgctaattcatttaatgtgtgcattactgtttaatcaggtctgcaaagatgcagtagactcacggtggaacaagctccaaagaaataaagatcttctgaagcgagaattaacttggcagtacgaattgttttgcccataattaccaataccattggctaactctttagttatgtgattttcatatgctattttccttgattggtgatcatcaaagcagattcaaccatcatttaagaaagaaaggtatcagtggaaatatcagagtctcttatgaagacaaaactttgtccatagaggtaactggtgccatattgctacaatttgcatgtgatatgtctatattattactttaatttactggttggttgcacttttgtattcgacaggtaaagatgcctcaagatgcaacaaacagtgctgttcgagatactagaggactttcaggtgctgtttctctgctctagatttgcatatgaattatttaagacttaaattcact

SEQ ID NO: 156086 - DNA, 100 bp, Arabidopsis thaliana landsberg
atttttttattgcatgagaattagtttgttggcaccgatgaagcaacaacttgtgtaggccttgttatccgcaacagaaaatctggaatgtaagcattta

SEQ ID NO: 156087 - DNA, 239 bp, Arabidopsis thaliana landsberg
aataagacaccggtctatgaacgtccagacctgtatgacgaaattgataactattttggatgagtgaaactcataatcgatgaatcccacgtgaccatgtcaatatgatgtctatggatatgttaccttgatgatgttgatggtaataataataaatcctgatggtgatgatgaccatgcatgaatcataaatgtaattcgtgttgtcacatatgcttgtttttttttttgtttgtttt

SEQ ID NO: 156088 - DNA, 754 bp, Arabidopsis thaliana landsberg
  unsure (1)..(754): unsure at all n locations
cgcataaacccccatcggccagagaaaatgagcaatttgggatctcgatcttctaccgacaaagagcttatcagcttctcaaggttttggttaatttgagctacagatttttggattatcgatgatatctagcttcgagaaattttcgaattttctcacatgaggcgttattttggaacagatctttgttgagctattggctcgaactagttgactaagatttagaagtcgattttttgtgtatattgtgtaagataagcaaatgtcttcttctacgaaaggatctgttaagaagagttcgattaaacatagttgcaacttagctgaggttaagaggaagctttcaaagatcagtgatcatcattcacatgtagagtatgcttatgccttccagagggacaatagagaaagagtagatactaggttgagtcaaatcctcagtagggatgcgttgatatcagccgttgatttgttgtgggatcgctcgggttttgtttcactgaaagaagggaattttgattatgtagatagggatgaagttagttcagaaaaggctaagtctcaattgtcatcgactccacagtctagggttagattattgggagtggctgaaaagatgtatagtttcgatccgtataaccgaaaaagtttgttgaatcagactgatggagctaagtctatatgtggtnnnnnnnnnnnnnnnnnnnttccgttcgaggctagatggaagacgttgtatagctggatggaagga

SEQ ID NO: 156089 - DNA, 240 bp, Arabidopsis thaliana landsberg
gacaagaggctccgccctaacaggtatgggaaactctggaatagagactttgcttttcgtggctttctgatatagtatccactaatttacattgctgctagatggataacagcggagacattggatcacttggatcacaatattatatcgggatttctgtaaaactatattggctcgatggattgacaatatggaatctgggttctcttgggacgtccgtggctcatttggcaacacaag

SEQ ID NO: 156090 - DNA, 348 bp, Arabidopsis thaliana landsberg; identical to SEQ ID NO: 65721

SEQ ID NO: 156091 - DNA, 176 bp, Arabidopsis thaliana landsberg
gttaacacactttatataaaaatcaagaaacttttttttttattatcactgtttttaaaaatcaacagattttatgtgaacttatgactgtctttgtcaaaaaaaattgatgtaaactttattttaaagtcggcaaacttttttaaaaaatcaacaaacttttttgtaactttaaa

SEQ ID NO: 156092 - DNA, 257 bp, Arabidopsis thaliana landsberg
aacataggtattttagaaagaaaaaaaatcacacaataaaagattctaataaggtaatcgatatcctctactaagctcactcgtgatagtatcacgcaagccttccatggctctatcaccggtaggctcatatggaatgtgctcaccacgatcatcatcatcgtcattttcttcttcatcaccatgagtatgatattcttctgtcccttgccaatgcacaaaatcataatcttctcgatgtgaatcacgtatgaagt

SEQ ID NO: 156093 - DNA, 273 bp, Arabidopsis thaliana landsberg
agcgataaagtcaactcgttgactaaaatgaaagatttcccgatagcaatctcccttctgttcgctctactatcgccggttcttctaccttgctccggcgattccaccggcggcgtcgaggatgattctccagcgaccgtatgtatcgtcgggagtgggatcggaggctcatccgtagctcacttcctccgtaactactctgtttccaccggcttaaatcaagcaaagatcctgatgtttgagcgtcacgagatagtcggtggacgcatgagg

SEQ ID NO: 156094 - DNA, 697 bp, Arabidopsis thaliana landsberg
ctccgccttgtgcaactctctctgcttcgatccaagtactctcctcgtctgatcaaattctttctctcttcgcttacttctttcactcgcatgtatttgtgcattgtttgttttttatctaatggatgcgagctttgaacttcgcagaagggacgatggaagacgctcgccgccggattctccgttactcctcttcccgccgttaacttcagtctccggcgatcgattcctcggattcttgcttccgctagttcctcctcctctccatcgtcttcgtctctcgaagctggtatttgtttatatctttgatgatcgtgtttctcattaattaataaatacgatttctggaaagacaaaacaaaagtatgggtttttgaaagattgactacgattcaagctttctttttatgtgggtttgtttttgtaatgtcttgaatcacttgttaggaaactatgcttgacaaagttgctatttttggttaaagtaggaacctttcttagttcaggaccttctggttgctttagttcttagctgaacagtgttgatttatggttgaatttgaagaaacacattgtgtatttggtgtttaactttgttcttggatgatatcgggtttcctaaagttctcaactttatattttctcgaatgcttttaaatgatcattgagttgtttgatgaaaattgtgttttttttt

SEQ ID NO: 156095 - DNA, 272 bp, Arabidopsis thaliana landsberg
cggcgaaagaccaaacggctacgtatagaggacaaaaaaactaaaactaaaaagctttgcaagatctttgaattgtttcatcagccttggttggtgtttttgaaaatcttcatttgtccctttttgtccgaccattgagatacaaaaatgcgtttatattgtagtaatattttattttcttttttttgttaattaggcgttatattgttaactgcgagagacaacaaagagatcatctcgatctgaacatttgtaagagtgcaatgtattag

SEQ ID NO: 156096 - DNA, 159 bp, Arabidopsis thaliana landsberg
  unsure (1)..(159): unsure at all n locations
ctgcctctttttgctctgagctcacctatggaaaccctacaaagatctttctctcaagatttctgaaaatggatatataatctcactgatttttttttttttttttgttcctggtttcgttttctatatgtttatggatgagttgtantttccatctcc

SEQ ID NO: 156097 - DNA, 88 bp, Arabidopsis thaliana landsberg
  unsure (1)..(88): unsure at all n locations
cttcatactctgtctctgatctgattgtggtngatttttcttatgaagattttcgaatgttcaaagagcaaaccattggattaaatat

SEQ ID NO: 156098 - DNA, 200 bp, Arabidopsis thaliana landsberg
atcgaggcaaagccaaattaagttgtcacaacaatgttgtctcttctttcttctgattcttctctattatcactcctctttctctttctcatcccttgtgtgtttatcacaagctatataggcttgcctgtgttcttgctaaaactcatcggactcatcaaaatcaaagctgctcgagacaacgagaaacggtatagttc

SEQ ID NO: 156099 - DNA, 204 bp, Arabidopsis thaliana landsberg
  unsure (1)..(204): unsure at all n locations
aaaactacatccgggcaagtatcttgaaacagtgtgtggttctccgttttacatggctcctgaagttcttcagtttcaaagatacaatgaaaaggtgtgatattgtttttatgcagctccattgaatgataaggttttccagttttnggtgtaaaaaaaaaaacggtgcngtttaataaatccaccgtaggagcaatccttttc

SEQ ID NO: 156100 - DNA, 267 bp, Arabidopsis thaliana landsberg
cgaacacaccaccttctctccaatctggatctggttcctcttcttcttggtctcttctccatctcatcggagctgatctcgaattgttctccgttcatttgttacggtggagatgacatcggatcaccgcgacgctcttttctctctggaactggaatcgcctgatccggacgaaggaggtgtagcagacggaggagaatctgataccgacgaggatttgcgcgacaacgatgatgttgttatgccgggaacgaacgaagctgaagc

SEQ ID NO: 156101 - DNA, 329 bp, Arabidopsis thaliana landsberg
cccattccaaatttcatcccaatccaaatgatcggcagctgctaacacatctcgtggtaacaaaaatatattgttctgaggtatattaagactcacctccacttattataaatgggaccagcccttcctaattcacacctttggtgaaagaattttttttgtaattccttacataaggattcagaaaatataggatccccacctacacaagaaaattgttgattaactccaaaatagcattttcttttggtcctattttttttttctccttatcggtcaagaaagatgttcccttccagggtcgagcacattctctagaatttctcgta

SEQ ID NO: 156102 - DNA, 187 bp, Arabidopsis thaliana landsberg
tgcccaaggtgccaaagaaaaagccagtggttaaagtccattgatatctctggttaaagggaattgtttaagaccaaaaatgtttcatggtattggaataattggtgtgtggtgtgtttttcatgtaatcatgaatcacgttgtatcattatcataaaatcttaataagagtgtgttttgtatgctt

SEQ ID NO: 156103 - DNA, 435 bp, Arabidopsis thaliana landsberg
aatagaagtgcttggcatttgtaatcatctaagaagtaagcaataaaagagttaccaagttaagtactcttgttctgttctcttcacaaatacacaaaaatacttaggcttgcctttctagttgtctcattcccatcttaaatctctttggtcatttttcccaacaagatctgacaaaggtaaagaaactaaagcttttcgattgataatgtcttaataaaaatacaagaatcgaagtaattttcagcatattcttcgatttcttctgaaaaaacgaaaccaattcatcataacccattgaaacatttcgtcaaatacctggcaggcaatatatcttagcaatgcccttgtgtctttagtttggtttgagaggattaccgaggaagaaatgtcttggtgagagtcggattgggtttcacctgaaggagaaaaagt

SEQ ID NO: 156104 - DNA, 378 bp, Arabidopsis thaliana landsberg
tagtaaataagttaaatgatattgaagatgagaatttgtagcaaagatgatgtgagagactctacagtagcaaccaaatgtgtgtatgaaggaaaaacaagtcagaccaaaacaatagtctacactctccatgtgaaatcatacaggactcaagataatcctcatgacagaagtaaaggaagaaaaaacccgcaagggtgaaatttggtaaccgaacaaaaaccgctttgaaggaggcacaagtgaaggaagcttaagctggcttttattctccagggacagggactccttgctttagcttctcccgcttgagcttctttttggaaacgggcttcttcttccttggaggtaggttcttctgagcataaacgtaaagca

SEQ ID NO: 156105 - DNA, 735 bp, Arabidopsis thaliana landsberg
gattgcaactctctttatagcgggtttcatggttctaacgagatatttcagcaatagagagaaagtaatgatcgagctgaaagtcatggcaccgcctccctatgaacacaatggaacagcttttagcggtccaaaacgccatttcacagctcgaacagttaatccaagacgcaaacattgttctcctcaagttccgagctttattactttcgcttttcccacaggtctctctctaccttcaattccaactttttaagcgttttccagacgtggtttttagttttctgcaaccacttaaatgttatcgaaaaaaacaggcgagtgagaagtttgcggttgcgattgtgatcgctgcaacgatgatggcattggtgccttggaacaatctgattttggtggtgtttcttgaactgttcacaagatactcaccaccacgaagagcaagcacggaacggttgatgcggcggcttaaagagtggtggtttagcattccggctgctccggtccttcttgaacagagcaaagacgataacaagaaaaccaagtaaaaacatctgaaaaaaaactacgtcggttttcgtcccaggagagtacgaaaaaaacagagaacatagcaaagtgtaatagttacgtatgtttgtatatttacatgtatcatgtatgttatagaaaatagttaatgttccgtggtaaaatcacatttagctgaataatgatatagaagcaaatcctctt

SEQ ID NO: 156106 - DNA, 652 bp, Arabidopsis thaliana landsberg
  unsure (1)..(652): unsure at all n locations
ttttcgtgataaataatcctttacagaaccagaagtatatacatacatacaaggacgagtaaatacaatccatcgttacactgtggtttctgccttatggaagattatcaaacgtataaaagtgttgcgcctaccatttgacatcgagtgttaaagcttcttgaggaacaagtaatgatggaaactttgtgaatgacatgttagacatcaaactgctccatgcttctgtatccacttcaatgaaaggcactacttttctcagcctcactgctttcaacttatctccttcgattttcgccgttacttcaaaccaaacccgttcgatcttcggttttgttctccatgctacttttttacttatcacactctcattcttcccaatacttctctcgatctctaactgaaaccggaccattcctgatgcctttagtttagctgttacagaactcactgtttgtcgtgttccattccctaaagagttcagaactttnnnnnnnnnnnnnnnnnnnnnnnnnnnnnnnnnnnnnnnnnnnnnnnnnnnnnnnnnngtgtgagctttataataacatttttctgcatataaatggattgcctcatctgataagtacgaagtcttgatttgcgtagttgcatttgaagtcctaaacgcaac

SEQ ID NO: 156107 - DNA, 279 bp, Arabidopsis thaliana landsberg
ctaagagaataagacaaaatctccagaaagggtatacactgtggtacaagggtggacgttaacaaggctacaaagagcatctcaaggtctcagggagtagcaacatgatcagaattacaataaaagaatggatatctcatttcttcgcactcctaattcatcaattcctacaagactcagaccgctacttggtaatcacgtcccagcgccatatagtcccgtcctcgcagcaagcaagaatcgtgctacaatcccatggaagaaacagtgtgtcagaat

SEQ ID NO: 156108 - DNA, 363 bp, Arabidopsis thaliana landsberg
  unsure (1)..(363): unsure at all n locations
gaatcctcccaatttgtctgtctctctttcgttttctctgctaacagatctctctaaatatctgctacttttgttcatatctttttacttttcaaactactaattttcctttcgcttcttctattaataacaacactctctctctcagacttcttttctttttnnnnnnnnnnnnnnnnnnnttcgcaatgacctcagtttctgtgtaccataattgacctagcagattctgtttttaatggtagattctgacccggtggaatttccgacggagaaccgccgtggacagctattcggcaaatacgaggtcggaaaattggtgggatgcggcgccttcgcgaaagtgtaccacgggagggacac

SEQ ID NO: 156109 - DNA, 480 bp, Arabidopsis thaliana landsberg
ctatctcccgatctcatcactctcacacacaacaatctctctcttcttatctctcttttctctcttcccaatccttgttgtctgaatctgtagctaaccatgtcggagagaccaagccgtcaccagagaagaccttctcagagcgtttttccgatctcccttgacgatctctccgatatctctctcgcagcaaatcctccttccaccgttcctactaacccgccacgtcaccagatccctccgccgtctcctgcagctcctccggctaaccgtagcaacaatgacgacaatgttagcaaagatcaccatgggaacgcctcttctaattaatatcgcttttttttgtctttggttttaatataagtttcagccttttaattatcgcataagcctttcttttttcttaataatcagattttgtctttctttactattgtatgataatcccatgaatcaatcgtagtttcgtaattcgggttt

SEQ ID NO: 156110 - DNA, 273 bp, Arabidopsis thaliana landsberg
tattttaaattctctatttattgcataactggtttatatagaattttcccactgatggtctcgcaggtaacatattctgatggcgatgttgaagagcttaatctgaaaaaagaacgttttaagataatcgaggataaatcttcagccagtgaggtgaaaatttcttacattctatcattcaccattctttatatttaccaaaatttcaatgtatctggtttccctaataaaatctaagcaggataaggaagatgatctgcttgagtctactcc

SEQ ID NO: 156111 - DNA, 521 bp, Arabidopsis thaliana landsberg
agtagaattatcagcaattatttgggtagctgtaacgaagagcgaaaaccaatctggttgtaacacaacatatatgatgttttgtaattccgtgtcaaaagagaattgttcctctagctagctaggattaatctgaagaacatatgcagttaatagatgatgaagttgtgtatactatagcaatctcattaattggcatatatgaacgaagaaggtcagagcttggggatatagtgagcgtcactccatgaacgcccgcactcaacatgggggctccaattgctgttgacatgggaggctttgtagcgtttccagtcacgaagaacaagagttagatcagagatcttagcaaggatgtggcggcaacagttggcatggacggtggtgacaacgcccatgtcatggctgtcttggcagaagccactgaattcggtagtgttgaggaagccaacgttgaggccaagctggttaaagaaaccagagtctaggagactcttaaggacatcttgttccttcatgcc

SEQ ID NO: 156112 - DNA, 153 bp, Arabidopsis thaliana landsberg
atccacaccaaagactatatggcctcccattgctccatgagagtaatcctcctcagattctccaatggcgtctcttccagatccattaacaactccactaaccatcgtcttcttagtcttaccatgaccaacactctctcgtctctttcctca

SEQ ID NO: 156113 - DNA, 536 bp, Arabidopsis thaliana landsberg
taaagtctatcatttaatagctaactgctatagcttataatatggtcactgatgtgtttgtgagcaatgccacagctacaggagcatctgtcctggtattcaattctgaaacatagaatccgggagttggatgttcgaattttgtcagtctaccctttttgctctatgttttattcagtaacttttaatgtgttttctatcccacatgaaaagaatttgttttcactaatcattttttctattttacaacatctaaactgctactagaatagaatccaaaagtttgcccctgttattgtatacatctcattaacacgaatctttgttttgttgacattgttaatttttttcaggtgtgatgtttcttggagatcttgtaccctgatttcttacatctttcttgttggaagtttgggactcacatcctaacccttgctatgctgttgtgaaatatgcagagattcaggctggaagctccctgttcagacaattgcctttgcagaaaggccatgagaattttattaatgttactgata

SEQ ID NO: 156114 - DNA, 556 bp, Arabidopsis thaliana landsberg
ggttcacatttttatacaatatcacattttcactcaatcttcctctgcgtctctcaggtaatttaattctctcttttctctcccatcactctgtctcttctctttattgggttttagataaaatgatggaataataatttcatggattcaggaggaagaagatcattcagttgaagcacacatttaaagggttttgttgagaggcaatggaagggggagaagagtttcaagaagaagaagtgtggtcagttttgagagaaagtgaaactcaaggtcctgaaatgaaaatgtccaaaagtaacaatctcttctcagcctcttcctcatcttctgcgaggtacattcctaaaggcaacgaggtctctggaggggcaaaacagtcatctgctccaatgaatattcctgactggtccaaggtttatgggtattcaaagaagaacacaagcagccacttgcattcatgggccattgacgatgatgatgaaggctcaatggttcctccacatgagttagtagcaaaaagacttgcaagaacgcagatctcatcattctctat

SEQ ID NO: 156115 - DNA, 141 bp, Arabidopsis thaliana landsberg
gacaagtataagtacttaaggaacttcaaatgagataattcatttacatttttaaaaataaattgaaagtactttctccataatctaacattttaaaatggtcccagctcttcttcatccatcccaccacaatttccacct

SEQ ID NO: 156116 - DNA, 241 bp, Arabidopsis thaliana landsberg
gtaatgatctctcaaagtatatgaaactttattcaagcgttagaaagaaaaagacattgtcatgtttactacatagttgcttcaggatctatcaacaatcacattaatttctgcaattaaaagttaaaaaaagaaaagagagaggctcaattatgtcagagaaagatgggacttagctgcatcatctttcatctttgtgccatccactgcaaaatgtctttcctgactacaccattgaacc

SEQ ID NO: 156117 - DNA, 293 bp, Arabidopsis thaliana landsberg
agagagtacttattatttctgaatttggactcataacaaaatcaggaaagaatggttctttcaacataagccagtaccaaattttagaattcctactaggaattattaaagtaaagactatgtgacattctcaatatggagtttcattttatgatgtctgattagtttttatctttttgcaccatcaaaacttcgcagagatcgatcattagaccttgacatatcaaatgatgaccttaagcggcctcatcatcatattgtcctcatggtccaatatctgcaatgcaaaaaca

SEQ ID NO: 156118 - DNA, 565 bp, Arabidopsis thaliana landsberg
ggaagcataatctcaagaatatgcctccaataaaattcgtttgtacatgaattccttaagtatggcagaatactacgtataccccacataatagtttaatctaatttaaattagtgtaaattttccaccaatcaatttattaattacttaaaacaacaaaagtagtgaaaaacaattaaaaacacatatctccctcaaaatacccatagtaggctacaactgtagatttcttgtttcacaagacacaagaaaaaaaaacctaacttagaaatcattagaaggaagtggttcatgtccattactaccgataaagatagtatcataaacaatagctgcaatggctgcaccgataaaaggaccaacccaatagacccaatgattcgtccaaatccagctaaccacggccggaccaaatgaaaccgcggggttcatcgatgcaccgtcgaaagcaccaccaaccagaatgttagctccaacgattaacccaatcgccaaaggcgcaatgattccaatatcacctttcttgggatccacggcagtagcgtaaaccgtgtaaactaaccca

SEQ ID NO: 156119 - DNA, 221 bp, Arabidopsis thaliana landsberg
accattaatgttcaacagtctcactcatctctaggagttgtccttttcatgaaggtggacgtgttggttcgaagaggtggtagaagatcaaaatggttatataagaaataaggtttggtatcaattatcaaaaaaaaataagaaaataaaataagatttaagtctttgtaaccagtattctagaaggtggtgctttgaataaagtagtaataatttgagaa

SEQ ID NO: 156120 - DNA, 297 bp, Arabidopsis thaliana landsberg
caaaagccaaataatagaaagagtatggaagaagatgatggagacgcgtctacgccgttttggcttcaatcacgccgcaataacacttacttccgccgcactgcaagtctcggtggccgtacaaccaccatcgccactcaaatattcttcgccggaacagctgcaatcctcatagtcgtcttcattatccctcctttcttctcctctgtttctcagattttccgacctcatttagtccgtaaaagctgggattatctcaacttcgttctcgtccttttcgccgtcctttgcggcttc

SEQ ID NO: 156121 - DNA, 753 bp, Arabidopsis thaliana landsberg
aacttgtgaaccttgtttctgcttacaaaaactgaagagcccatttcaaacaaggcccatattctgattgagcggccctattttaccaaaccacctactaatgaacactctcaagtcacctcattcgagttggaagttctctttaaaacaattattttcagacacagagagactcagacaggagatatgaactgcggaggaaaggtggtctgcgttaccggagcttccggctacatagcgtcttggattgtcaagcttttgctcctccgtggctacaccgtcaatgccactgttcgagatccaagtttgttcccaactctctctctcttctttattttaaaaaacaaacgactgcaattattagggacgattatgagtagcacaaatagaatcataatcggaatctggctgaaaaatctgacggaatcaaaccaattatgtctttacttaaattacatacataacatccaaatcgttctttttttttttttttgagacaaccaaattgaaatttgggactttgattagctgttgtgttttgaatgatgacttattaattagacaatatttttccgacctttttaattaaattaccaaatacggaaagttcagagaactcattcaggttcgtaccaagttttgacttttgagggtacaagtaaaatcattcttttgaactttgaactttgaagtgcatgttgacgttatactcttcttcagaggacaagaagaaaacagaacatctttctggta

SEQ ID NO: 156122 - DNA, 156 bp, Arabidopsis thaliana landsberg
cttctcccaaatacgagctcggtcttcaagagaaaacaggaagagtataagtttgaatgcatcttccaagatcccattgattttcaccgtgctatacaacatatcaaattggtttagatgatccaaaaggtcctctattgataaaccatggaactt

SEQ ID NO: 156123 - DNA, 461 bp, Arabidopsis thaliana landsberg; identical to SEQ ID NO: 57509

SEQ ID NO: 156124 - DNA, 326 bp, Arabidopsis thaliana landsberg
gaaaaaaaacattctaaactagttttttggtacttctctctctaaaacctctcccttctctctaaaagtagatctagatctcagtttgcgttgcctggctctggtggcttccatagcgccggagttatgcctctcttgctctgctgtaaagtttatgttgcttttgcttagtttatgtgcgttgtggtgtagggattttcgaatggttcttagatggcttatgttgtttttgtgggttggtctctgttgctaatagcgcctcttgatccggtcatgttttagccttcttctcgtttagccttttaccagggttggtggttgctttc

SEQ ID NO: 156125 - DNA, 355 bp, Arabidopsis thaliana landsberg
gactaggttaacttgagggtctctcttgcggtggcacttagatttggttaagaacttgttgtctagggataatttattgagcatgtcaatcacctgtaaactgagaaaacgaagctactcgattaccccatcctcgggaattctttacctgattgaattctttgtttactctactgttgtttactgcatcttgtcatctgttgcttagtttctgcatttctttactgttactcgacctgatactcgaccacccagttgtctggcaacagactgtgcagtcgagtatccctgtttcattttctgtctattactcgacctatcactcgaccttacccaatgctctgcaaagagctgt

SEQ ID NO: 156126 - DNA, 237 bp, Arabidopsis thaliana landsberg
aatcagcaaaaaccctagaatatcttagagcttcgcttcactttcaagctcgagactttgagaaagatgcctccgaaagccaaagctaaagatgcaggtcccgtagagaggcctattcttggccgtttctcttctcacctcaagatcggaattgtaatttttctcttcatctctcttttagaatccaagttgattaatttcgaatggtgaatggtagatttgctcatcgcaatactt

SEQ ID NO: 156127 - DNA, 139 bp, Arabidopsis thaliana landsberg
gtcagatataaattagggtttcagattttttagattttatctcttcaattcgagccagtgaattgccgcaaccacctcctcctcttcttccctcaagttagttactttcgtcttgagttttctaaattctctatctata

SEQ ID NO: 156128 - DNA, 219 bp, Arabidopsis thaliana landsberg
cactatctctatcgacaaagataagagaactcagaagcttctactcttaaaatggcaactttctcttatttccaaaactaccctcattcccttcttgatcctcttctcttccctacacctcactcctccattaatctcactagtctcatcgatcaaaaccatctctatccactaccaaacatttccacagttgaagacatttcctttcttgaatataat

SEQ ID NO: 156129 - DNA, 184 bp, Arabidopsis thaliana landsberg
atttaagtaaaagaaagaaaaataactttgaattgtgaattgaatacaacaaaaacaatatgcacgcattacaaatatttagtcttgttttttattagccgttaagggaagtgagaccaaaggtgacacttgtggtacgaatggtagcttcagtgggtaactacgattacatcattgattatga

SEQ ID NO: 156130 - DNA, 510 bp, Arabidopsis thaliana landsberg
accaaaaccacgtagtactgtaataggcacacagcattaaacaaattcaacattggcgaacatcaagtaataacaaccacatttctatggcaatatgatcacatcttaacaaaagatagactacatgaactaaagcaaaaccaagaactatatttacatataactgtgataagataacaactttctaaaggtaccgtaatccgtgatccggtttcagtcggtttcgtggtcaggagcgtgagagaaccaagcagggatagttcctttacttctaagcaatctagtgaaagctgaatccggcattttcgatttctcttcttcctccaactcttgttcagattttggtaaaccatcaggaatatgaatgtgcaaattcattcctttctctctatctgattcttctcctacatgtaaaccattcttggttttgttatctttctccattgaagcaactccatgtaaacacccgattaacgatttcaaaccacctgtttgcaaaatcaaattctc

SEQ ID NO: 156131 - DNA, 139 bp, Arabidopsis thaliana landsberg
aaacccactctgcttcttcttcttccaaacatctctcagcagagctaaccatctctcttttgtaatggcttcacttatttcccttggtcttcttctgttgctcactgtatcttcagcagagtccaagactttctgggtg

SEQ ID NO: 156132 - DNA, 344 bp, Arabidopsis thaliana landsberg
aaaaattttgactcaaatgagttgatgggtcaaatgagttattgggtcaattggtttgatgagtcaaatgagttggttgtaatggttaatggtttcaatggtttacccaattaacccatcaagttttataaaattgaattaaaccaagtaaaatctttaaaccaatgctaatttaagcttaaccaaagcatctaaaccaatttaataaaatcaatattttccaaatttcttaaatatacaagcaatgtaattgaaaaaaagtaaactcgtgatttttccaccaaaaaacataaacccgtgatttttccgccaaaaacgtaaacccatgattttcccgccaaaag

SEQ ID NO: 156133 - DNA, 149 bp, Arabidopsis thaliana landsberg
gaaaaaaaaaactaaaccgcttcatcccggtttaggatgggttacatacatatacggtttcagggtttagcggaatcaatcatctggttttgatgctaaacgacgtcctatagagtaagaaggtctttttttttcttttcaaaaaaact

SEQ ID NO: 156134 - DNA, 3794 bp, Arabidopsis thaliana landsberg
ttattttgcacacttaggcattaaggatcatcttgcatacatattgcatgttttggtgtgttttaaggtgcagaaggagcttacaaggaatctactcgaccctctactctatcaaaccagcagcagcagagcattctgctcgaccagtttactcgatccagacagctacagaggaggcattagattctactagactagttcactcgatccaggcagctacagaggaggcagcaatatactcgatcagtgcactcgatccacgcagccacagaggaagcagtagatcggtctactcgcccctcctacttgatcctgtactcgacaagttactcgatcaaggaaaacctattctacaagacttgtgaatcgttcaaagcgtcttcttattctcctcattccccactcaaccagacatttgagcatataaattggagatgaagaagcaactacgcttacatacgaacactgctatcttgtttatagcagaacgcactataaggtcatttctaatctcaatccccaagatctagcattcatctaaaccgcttcaagtctcttgtcttctagtgaatctagggtttttgagattttcgtatatataggtcactttgggatttgtccaaaggaccaagcttttatctcttagtttttctttgtgttcttgaatcttaaaaaccttaattactcttaatctatttcgtttttgcatttagttctttgaacaaagttgtttagcttgtttagatctacattgtgacatgatttcagtaatttctgggtttgtgttcttacttatgttgcttgagtagtgattagggttcttgaggatgaattagattagggtaatctctcggttagtcaggtggttaagattaggttagatcccttctagattcgttggcccctatgcggttttcgctggctaatgtggaaattcgaccataggtatccagcatccaaaagatgttcaaatggatgcctgatctacgaattcgagagatttgtagactctagcccaagagattggatagactgcttattgactttggtagattattgcttaaaccttgttcagctatgtttcatcaacgagagttgagattaagaagtggtagagttgtgggggtctctgtcacaagagtggattgacctggtttttgaatctatcgtctagggtatctgcctttcgcctgttagccacctgatgaaccctagagttgcccttatcaatgaatccatccctagaacttctattattcttagatttatttgtattcactccttgattgcacttttatttacctgttatttgtgtcacctgttgattgcaatttagttcttaatattgtcactgattggttctactcgacccaatgatcgagtagggctcttaagttctcatttttacctgtatgaatcctgacctaggattgttgctagaaacccactatcagtataatctggcttgacttaggtgcttctgtacacatcttgattgctagcaataacagtggactggattgacaccccctatagctgcatcggcatttttgtgttttaggagaattgaactcaacctcacacattcagcacataagtaggcctaaaaaacctacttatcaatttggcgcgattgcgaattcattgttgcattgtttcattcaagatatcagaaaaagttaaaatcaagttcttttacaattataaagttactaactcatatttttgtctgcttgtttttgtggtataggtactaatctttgtgcatgcaaactcgattccaaaggttctgcacacctactaccattcacagacagaatcgatagaatacctcgtgagttacaagaaaccaaagcaaaggcagcctgtgatcagcaaagaccagctgctatggatcaatagaacaaaccagttgatgttcaagacccacctaatgttgatcaaccaagaaacattggcgcaggtgatgccccaaggaatcatcaccaaagacaagggatagtgcttccattagttcagaacaacaactttgagatcaagagtggtctcatctccatgaaccaaggaaacaagtttcatggcttacctatggaagaccccctggaccatcttgacagctttgatagactctgtggcgttaccaagatcaacgtgatctcaggcttcacacagaaaaacaatgaaagtttctgtgaagcttgggagaggtttaaaagctacaccactcagtgccccattacgatttcaagaaagcttcattattgagcacactctatagaggagctttaccaaagatcagaatgctgcttgataccgcctccaatggaaatttccggaacaaagatgtagcagaaggctgggagttggtcaaaaatctagcacaatctgatgggtgctacaatgaagactatgatcgctcaatgagaggaactggaggaactgaggataaacagagcaaggatatcaaggctctgaatgaaaagttagacaagctgttgttggctcagtagaagcagatatactacatcactaatgaagagcacttccaaatgcaagaaggggggaatgatcaaactgaagagctttgctacattcagaactaaggagggttcaacaagggctacaacaactacaagcccaacccgaacctctcctacagaagcactaatgtagctaacccccaagatcaagtgtatccacctcaacagaatcagtccaagcctttttgatatgtctataatttacatgttttcagtgttcattcatcatcattttgagtctagtttcatatcactcatcattgttttatatcatttctcatcattcttgcacactttgcatgattagaatagctttgcatacatattgcattcctgagttgttttcaggtgatttggagctgttgacgagcaaagtggaagaagagagccggaatcagaggacatactcgacttccaggccatgtacatcgagcaccatactcgaccccctggtcgagtaactttggagccattcttcccatctactcgaccccgtggtcgagtaacctcagctcaggccactcgatgacgccactcgacccccaggtcgagtatcacttcgccatccacctgaccacactcgaccgtccactctaccatattactcgacccccaggtcgagtatcatcactcaccaccagtaccatcactcgaccaagcactcgatcacatctttggagtctactcaaatccacactcaaccagacaagctgagcacaaggaagagaagaggagaagaagaagtgtttggaagcagcctggagctccattagatcacgacgcccatctcggtccattatcactctatgggccgggcgattaggttactagcccgtctactatcattttattttgttttgtataaataggtgtccgagggttttgtcctggtacatctagtcgacattgagtttttgcttcagttttattttctgttttactctggctgcgccgcttttgcttctgcaacctgtaattcgagatttttccaagttattcagattccgcatttgatttcatctatcatcttgtttctctactctttatctctttgcttatgcaatatcatcatttatctgcgtttatgtctttgagcatgttgtttgagtagtgacatagagttcttaaggatgggatagaatagttgtggaatccttagtctgtagaatggttaagttttagaattgattgaatcccttcacgactagttgtgtttactgcctatttctttctaatcaactgaaattccatcta

SEQ ID NO: 156135 - DNA, 774 bp, Arabidopsis thaliana landsberg
tcatgttgtttttattcagagacttatccttcaatgaattaagtggtgacataccgttttcgatttcgaagttgaagcaacttgagcagctgtaagtagctagttattctgctactagtcttcatatgtcattgctaaaaatatactctccatgtggaatatggatttttactttgtccaggattctgaagaataaccaattgataggaccgatcccttcaacactttcacagattccaaacctgaaaattctgtatgttccccatgattcttacatgtcttactacttttagctatataggtgatcatacatgtgtaatttcaattgcagggacttggcacagaataaactcagtggtgagataccaagacttatttactggaatgaagttcttcagtatctgtaagtgtcaatgttttttgaagtctgtcaatgtctcttcattacccggtgataattgttgtactatgatgagcagtgggttgcgaggaaacaacttagtcggtaacatttctccagatttgtgtcaactgactggtctttggtatttgtgagtcttcttgcacatctgaatagtatgatgagttcttttgtaaatatcaaatatctgtctttgttttgatattgaatcagtgacgtaagaaacaacagtttgactggtagtatacctgagacgataggaaattgcactgccttccaggttttgtatgtgcctctttctctacttctaaacatcatactgtaatttgggttacttaagaaaatctacttaa

SEQ ID NO: 156136 - DNA, 546 bp, Arabidopsis thaliana landsberg; identical to SEQ ID NO: 69060

SEQ ID NO: 156137 - DNA, 569 bp, Arabidopsis thaliana landsberg; identical to SEQ ID NO: 78047
  unsure (1)..(569): unsure at all n locations

SEQ ID NO: 156138 - DNA, 256 bp, Arabidopsis thaliana landsberg
tggtaatggagattttcgctctaagtcattgtggcttcttcttctttatttagaaaccaattcatcaactccttcgttatttctaaatctctttgccactacctcttgttgctgcaattgaattggctcaaatcttcttcacttggtcgacgtaaagacgactttgacttggtttttaacttcacttctccgtcgaaaactatcccttctcttccgatcgaatcaatcggctctctctccacacaaaccaaggtaa

SEQ ID NO: 156139 - DNA, 489 bp, Arabidopsis thaliana landsberg
aaaaaaaaaagaaagagatagagcagcaaccgcagcagcatcgaagatcatcgatcggtttctctctttcattaatcagatctaattgatacccaaccttcttcatcggaggccgtgtaagctagcttctccttcttcatcttttcttacacttatttgatggttgtttatgtatcgattctatggattaagagcttttagcacatattaatttgtccccagtctcgtcgtatatgcagacgtatttagcgcttatggtttgatttagatctgtttaatttagcgtttcaacctaaaattgttgacaactcaaaatcggaatcccccaaaaagtgtctgttgacttatgaatatggccatctccaaatcggtttttgatccatcatcattaaatttggtaatatatagatctcacgaggaaacatgggcggtagatttggagtcctcctagtcctcttcctctagagctggtcttgtcatgctacaaac

SEQ ID NO: 156140 - DNA, 339 bp, Arabidopsis thaliana landsberg
ttagtgtttctttttaacaaaaacaccacaattatatttttggtaactgatctccacatacatcttattgattggtttcggtaaaccggaacgcaaccaatttcaaaccgtaatcaaatcaatttaaactacggtttcgatttctgaaataagaagctgagaaaatttcagagatctcaattctcagtttgatgaaatttaagagagatcgagagagagagatgaaacttacagtgcaacagccatgcctgagacaaactccgacaggaggaagaagaattgcgatgaagatctcgcagcaaagctcgcaactactcgccattaatttacggagattag

SEQ ID NO: 156141 - DNA, 374 bp, Arabidopsis thaliana landsberg
gcccaaggagaatggaaacaaacggagcttgaatcagtcttcactgacaccattgatctttgttaggttgcagagcctatcgaattcatccaggtggtcgagtggatcctccattggcagaccatggaatttgttcccctgaatcatcgagatgagaccactctaaatctcgaagttgttgttctggatagcaggaggtgcaattcctttcctctgacggtgatcaggtggtgcatctccagcaccaatgttggcagggccattttgttgattctgttcgtcagccatatcgagtggttgctgaggtacaaggttgactgtgtttctcctttctctgagttcgcgagttattcggtcgatgttgtgattgaaaa

SEQ ID NO: 156142 - DNA, 201 bp, Arabidopsis thaliana landsberg
ggtacacttatttacatcaaatgcttgggctttgatctaaagcactgtcaaactctgctttgtgttgaatgaatggtctagcttttaccttacatggtggtgtaaagtttgaaccaaaagttacaaccctttcgtagcaggttctatagcaagcagtaggcctataccggaaatagccatatcttgtagctgttggatatt

SEQ ID NO: 156143 - DNA, 256 bp, Arabidopsis thaliana landsberg
gactgatcagattaggagtaatttgtcgatcatttcttgtggatggtttggtaggatgattctatatgcgaattatatcgtatcggttttcacttcgttgctttggattcatccgttggcagaggttttagtgaagagaagtggtgatcctgggactagtggtagtagtcagagtcagagtgggttggttggtaatgtaggcatgttgagtgatgattttgcgaagtttcgggttttgtgtttgttactttcgggt

SEQ ID NO: 156144 - DNA, 63 bp, Arabidopsis thaliana landsberg
cacaacgaagaagaagacctaaaagatcgggacatgaaactatgatcaaatcagaaacagatc

SEQ ID NO: 156145 - DNA, 155 bp, Arabidopsis thaliana landsberg
agaaaaaacaggtaggctcatagaagggctctggtttagatactaggtgaacttatcaagcttattaacaatgcatgttttagcatatgaattctcgacttctctggttatctagctttaagtatagagagtttcgcggaacgccacaggctact

SEQ ID NO: 156146 - DNA, 80 bp, Arabidopsis thaliana landsberg
cctctgcctctcatctcttgttctctccgcccatctctgctctcttttattttcccagaaagttttttttttttttttcc

SEQ ID NO: 156147 - DNA, 92 bp, Arabidopsis thaliana landsberg
tttttttttttttttttgtttttttttgttgtttttgtatttttttttttttgtttttgtgtttttttttttttattttttttttttttttt

SEQ ID NO: 156148 - DNA, 373 bp, Arabidopsis thaliana landsberg
attaaatcgatgcataaggaggttgagaaaatgatgcaagaaacaaggtcaacatctttccaagggagattgcttaaacacaatcttgattctgaagtcgttgatgctcttaaagatcttagagacaaattatcagaaaacgaaacaaagagatgacaaaaagaccaatccgggttatataaacaattaacaaggcttggtctctccatgtaacttctgtcccaagtaagtaagctaatctgacttgtaaaaaacagaggctgcagaggaaacgagggagatagagagagagagctcaaatgctttgttattgttgtatttgtgtctgaattctttttgactaatctatatatagattcggtttctttggtcc

SEQ ID NO: 156149 - DNA, 251 bp, Arabidopsis thaliana landsberg
cgccagcagaatccaaaatcgccatttcgaaaagcgtttgacgaaacagcgtcgggagaaaagaggcgtcagagagaatcgagaagcatgcagaagaaattgaaagaggaaacagaatctaatggagagggaaagagaggattgaaggaagaagctaagaaatcggtgggaatgggattcgtgtctggttccttatagaaagagaagcaaagttttctttgaagagaagaagatataataaagggaaatgg

SEQ ID NO: 156150 - DNA, 86 bp, Arabidopsis thaliana landsberg
gatgatgaaacctgagtttctgagacagaaggaagagcttttaacatcccttctgtttatggtcggattccaactccggacttctt

SEQ ID NO: 156151 - DNA, 73 bp, Arabidopsis thaliana landsberg
aggcttggatttaagaagctggttcatcatcaagtagaatcatcttcttctgtttcctctcctatctaaaatc

SEQ ID NO: 156152 - DNA, 225 bp, Arabidopsis thaliana landsberg
aaggaagatatataacatttatcctatgtttcaataattcaacaatcaaatcaaatcaaatgtgataaacaatatctataactcatcaaaaagcttaagcccccatatatcctcacaatacctaacaaaaggaacaactttccccgattcagttccccaggcgtcaggttcacatccatgagtcggaggagtaaggaaacaaggctccatcgacgtggatcgaac

SEQ ID NO: 156153 - DNA, 356 bp, Arabidopsis thaliana landsberg
gactaggttaacttgagggtctctgttgcggtgacacttagatttggttaatgaacttattgtctaaggataatttattgagcatctcaatcacctgtaaactgaggaaacgaaactactcaattatcccatccttaggaattctttatctgattgaatttattgtttactctactgttgtttactgcatcttgtcatctgttgcttagtttctgtaattctttcttgttactcgacctgatactcgaccacccagttgtctggcaacagactgtacagtcgagtatctttgtttcatttactgtcggttactcaaccagtcactcaacctcacccagtgctctgcaaagagctgt

SEQ ID NO: 156154 - DNA, 281 bp, Arabidopsis thaliana landsberg
ccagagctgcatcaaaaacgaggaggatcaaaatatcggtagagaagacgagtattcaatcaagatccaaatcagcgaaacagagaacacaaagatacacatcaaaggatcaaagaacttgcaagaaatcttgtgactctcttgtgttggttgatgtaattattacttatacaaaaaaaagtgaaaaactttacgagattattgattctttaaggataatctcaagtagctttcacttcaaagaagagcaaaggtacacagtaaagaacaatcacaggatc

SEQ ID NO: 156155 - DNA, 96 bp, Arabidopsis thaliana landsberg
tttccgggcttaccctttaagtgttcgatgaaattcctctgttgggttttgggaactgtgagaatcgttctgtgggagtggggttggtgggtgata

SEQ ID NO: 156156 - DNA, 400 bp, Arabidopsis thaliana landsberg
  unsure (1)..(400): unsure at all n locations
acaatctccaaaatacataaatttgttcacatccttccgttttttgttnnnnnnnnnnnnnnnnnnnnnnnnnnnngtcacaagtcgccggcacttcacaatgtccctatatatgctccgttcatcttctccaaacatcaatcatcactctttccttcttccttcttttgttcctccaaattcaaacaccatactttatctcctcctccttctcctcctcctcctcctcctatggctgcgtgcatcgacacctgccgcactggtaaaccccagatttctcctcgcgattcttctaaacaccacgacgatgaatctggctttcgttacatgaactacttccgttatcctgatcgatcttccttcaatggaacccagaccaaaaccctccatactcgtcctt

SEQ ID NO: 156157 - DNA, 316 bp, Arabidopsis thaliana landsberg
ctttcccaaatgtcgtccaccaccggccattctcctttccgggtatagtattttcacgtcgtttcagtcgtcgtggtcgacggggaagaaagaaatgaatgaatgttcttttaggaaaatgtagaataatacacctaccgagacgaaagccgaaggtgagtctcgtaggtggacgtatcgaaccgaaataagatctcagattgacatcttgatacacaaatttaccataataataaatagagtcaatagtgacaccgccgtagaaagagccgcttattttttgcttgataggggggcttccattcaccaacaaaga

SEQ ID NO: 156158 - DNA, 252 bp, Arabidopsis thaliana landsberg
cctctcttcttcttcttcttcttgttcttctttctttgggttagctgagaaatggatgtaatgaagcttgatcacgacagtgtattataagagcttgagaggatcaccttgaaagctgctgaagttcaagataacattttacgtggcatcttgtaaagaaacaaggacacacagtacttgagtaagtacatgaatggctctaacgatcttctggagtttaaacgccctgttcccatcattacatacaaagat

SEQ ID NO: 156159 - DNA, 439 bp, Arabidopsis thaliana landsberg
cggcgttctgatgctgacgtggccgatgagagctgatcagtacactgacgcgtctctggtggttgaagagttgaaagtgggtgtgcgtgcttgcgaaggacctgatacggtacctgactcggacgagttagccagagttttcgctgattccgtgaccgggaagcaaatggtgaggatcaaagccgtggagctgaggaaagctgcgttggatgcgattcaagaacgcgggagctccgttaaggatttagatggatttatcagacatgtcgttagtttaggactaaacaaatgatttgatttagtcaaacaaaattctaattatgtttttttttttcccttaatatgttcctcacgaactaaaaaaatctgcatgagtgtattttactaaattgttgtaagatgataaataagtgtttgtgattgtgattcataaataaga

SEQ ID NO: 156160 - DNA, 111 bp, Arabidopsis thaliana landsberg
cttttgacaaaccattttatttcatcgacagtgaagtagtgtacatatgaatacatatatcgaatagatatctcgtatgtgtatgtgtgtgtgtgtgtgtgtgtgtgtgtg

SEQ ID NO: 156161 - DNA, 392 bp, Arabidopsis thaliana landsberg
ttggtttcagttttcaggttgtgtaatgaaagtaatcgccattgtgtctgttgttctctgcaatggggctgctcacggagctgttgttagagagtgaacaaaatgtggacttttgcaaaacccctgtaggagaagatccaaatgttggactattcgttgtactgtttagtacttcacctagaggacctcctaaggagtttccccatgagattggtatccaagtattcacctttttcacagtaggctcgattgttgtttcatcggtttggatcgataggtcaagctcgcgggatagcctgagaggcgagagtgttgttttttcttgagcattgttgttgttgtgtgtggaggaaggggatgatgatgctattggaattgacattgagagctgt

SEQ ID NO: 156162 - DNA, 614 bp, Arabidopsis thaliana landsberg
tgtttttttaaatttcttctttgtttcatgtcggactttttatttttccatcgcctcactgtctctcacgggaatgtagggttgtccaggaagaactcttctgcgtttgtttgatttgagctaatcagaaaggtgatgatgctactctctctgacatatttccgtgatttttttagtttctgtcgtttcattttctcagttcttgttctacttttattctgttcttgactcgtgttaatctctttgtttggttttgtctctgtgatgttaaagttttaaaacctctgtattgtttgattcaacaacccattcgtaatctgtgaaaccatagtttgatattagaaaaagattggagtccaattaaattgagtctgaatttgaattttctgacgatttggttatggaattggcaggtgaaattgagaaaatggagggtgaagttgctactaacggagtgattctcaagcataatggtgtaaaggatatttctttagaaacttgttggccagagaagaagaaaccggttgaggcaacgagtcttagcagtggttcatcagacatagaagaagagatttgtgtggaatgttcttagcgagtggcttatcaaagaccga

SEQ ID NO: 156163 - DNA, 1116 bp, Arabidopsis thaliana landsberg
tccgaaaacaacctttattttaaaaaatccgaggccatacaattcaattttaaatacatcttttgaattataagaaacagattttcttctagttttgtatttcttttttcaaattcgtttcgttagaaacattaaaatctcttaaaaatattttgggaacaacaagaaaagtgaaaagaaaaaaacagagtcaagacttgatgactccaagagtagaagcttgaagcgacaccgtatgactctcatctccaatatgaatcccatgatcaccgatcggaatccttcggttcccggctcggtccactacacttaagtacttacacacgtgtatattcacctgcacacgcttcttctccccaaccgccacgtgtactctctcaaaagcaaccagctgtttcttcggagcccattctccacccggcggagccgagaacacaagcattgtgtgcgtcccatctctcgagccaacgttagtaacttccacgtggactccgagagagagacgatcacacctagcgtgcgtcacacggattgatttccctgaaacggtgccgtttctaccacgaacagctataggaatcacttttggcgcgtcggctatgttgtgagtaaagcgcgtgtaactcaaaccatgcccgaacgggtaaacaactggaccgtcgtagaaccggtaagtccgacccgggatccgcttcgaatggagcggccgcatcgacatttctgtcattggtaaattggttaaataatcttgcggataccaagtcatcggaagctttcctccgggattagcactgccgaataagatatcggcgattgcggtaccaccttcctgacccggatacccggcccaaacaatcgctggaattttccgatccttctcagcaaaagatatatcgataggcccaccagacatcaatactaagataactgggcctttagcggccttagcaactctagagacaagctcttgttgtttccagcaaaagcaacgtttcgtcctgaatccgcttcaatagactgatccaaacccatccaagaaggtgcatcagctcccgaccgcttcacgcggcatagacaattatcatcatcagtgaggccaccaaccttttataatgg

SEQ ID NO: 156164 - DNA, 655 bp, Arabidopsis thaliana landsberg
agttgtgcaactgtggtcgagcaaggatacctcgtgctacagaactcgttcagcttgaagagcctaatatattcctcagcaggcaatacatcgggtttgtgcagaagtttggtggctctgcgagtatgcttaggcatgtactcgtcttccagatcctcatctatcagctcatacctctctgtcatcgctctcttccctcgggttatctcagcttttcttctgaagctatcatattctctcttttctctctctggccttgaagatgacgactctgtctcatccatgttgtagtccgggtcaacagaagaactgccactgtaattactcatgattcccttgtagaaatttagaactcaaagctcaaatgtcaataggtttgtctcaaagatagcaatgaaaccaaaattgttatcaaaaggcaatgaaatagaccaaattgatcgagtacaattctgtactcgagtagactgagctgttcctgagtttcccttagacaaattggatcgagtgacttctctaaatttgagtggtactgctcccggaggtcgagtgaatagtggaggtcgagttcagccgtgaagcctagaggtcgagtaacctctctaaagttgaaaggctctgttgaattcaagaacaagaagtcaagttgctgttg

SEQ ID NO: 156165 - DNA, 309 bp, Arabidopsis thaliana landsberg
ctttctctcacacaaagagttttttcttttaagacaaaaactctttcaaggttttaaatctttgaaaaaaatctctaaaactaaaagtgatcaatgaagattcggaacagccctagttttcatgggggtagtggttacagtgtcttaagagctcgtaacttaacattcaagaagtgagttcttgatcttataccgaacaaatccttcattatttttttccggtttattttcggataaggtttctaattttctagtttcattttctcatttaaaccacagagttgtgaagaaagtgatgagagaccagtc

SEQ ID NO: 156166 - DNA, 747 bp, Arabidopsis thaliana landsberg
gaaacctccaaaaaaaaaaccctcagagaaagaagaagaaagaaccaatgagaggactctccacaaaacccgttgcgataatcatcgcaattctcaccgtccacttcttattcgccgccgtaacctcccaatcctccggcgatttcgtgccgatcgagtcaaaatgcaacggtaccatcgccgagtgctccttatccacggcggaggaagagttcgagatggacactgagatcaacaggcgtattttagcaacaacgaagtatataagctacggtgcgctgaggagaaacacagtaccatgctcacgacgcggcgcatcttactacaattgccgacgtggagctcaggctaatccttactctcgtggttgtagcgctattactcgttgcaggcgataatctctttctctatgtactttaaaatttttactctcaaattcttttgttttgatttttatacaatttttcagattattatttgttttgattggtgtttactatgtttatactttgcattgcaatatagtttcatacagtctcaatataagtttgatatatgaacagaaatatatatagatgtattatacatttctgattaatatatcaaatgttatgtatgggtgctttttgcatgtgctgaagaaagaaccaggtgttcatattggaatttatatggatattaaaattgtagttgtttcatttttttttatatgaagaggaaatatttgtgtgatgggaagaaatcaaa

SEQ ID NO: 156167 - DNA, 276 bp, Arabidopsis thaliana landsberg
gcatgtacaatcacctgtaaactgaggaaacgaaactactcaattactccatcctttggaaatctttatctgattgattggtttgtttgctctgttgttgtttactgcaccttatcatctgttgcttagtttctacaattctttcctgttactcgacctgatactcgaccacccagttgtctggcaacagactgtgcagttgagtatgtttgtttcatttactgtctgttactcgacctgtcactcgacctcacccagtgctctgcaaagagctgt

SEQ ID NO: 156168 - DNA, 288 bp, Arabidopsis thaliana landsberg
tgatcgatggtggtttagcgaacatctagaacacggagactagcataaggttcgttgaactctttctcatcagttttttaagtattttctcaattatttattactatttttatgtcctttcctccattgacctgtaaactcacacgattgtaaattactcactgattacatacactaatacatgtttatatgtgtgtaagtgttcttcagcgctaatctattttgtcacttctgcaggacatggttcaatttccacgacgagttcctttttctgtttctgctgcctcc

SEQ ID NO: 156169 - DNA, 727 bp, Arabidopsis thaliana landsberg
  unsure (1)..(727): unsure at all n locations
cgaacagcgaccaattactctctctactctctgcgctttaatttgaacttgtggagagagaaaagggttagatacagagagatagcgaaagagaagaagaagaagaggtctatcgacagagcaaacttcgtcaagagatccgttaaaaggatccatttggagctccgattcgagctagagtcaataatgagcggaagacagagatctgttgcagcggcggtgcatcaccagaggcagctctccgataaccctctcgatatgtcttcatccaatggcagatggcttcaatccactggtcttcagcattttcagtcatccgccaatgtaatctcagaatctgatccttttcatcgattcaaaattttgaatttctctgtgaagatctgttagttcaggagatagataaagttttccggtgggacttatttatctccgatctgaagttgtgggcaaatttgtttttgagtatatatgcattttctcgatgagacttgtgaacccaagttttttgaaatttaatgaacaggattatggatactatgctggtgggcaaggaggtggtggtcaagcagcaagaggataccagaatgctcagagaggaaacgagttctttggggaaccaactactcctcaatacggtgctcgtcctaccannnnnnnnnnnnnnnnnnnnnnnnnngagtttagtcctgggctcttagatctgcattcttttgatactgagctt

SEQ ID NO: 156170 - DNA, 419 bp, Arabidopsis thaliana landsberg
taacacgacacgtttaatccatccacacaccataattcaaaaatcttcaagaccctttttttttgttgggtcacaagcaagattccatatcaaaccagaaaagcaaaaagaacagagcatgaatcttctacccataaatatatacaagccacaccaatccgcgattcaaatgttgtaaaagttcagtggtggccttgtccattattatcttcaggaaaatatggttccaaaaacttggcacatgggttaggatcttgatgcataatccttgcaccttgttcgaactcttccctcaacactctctgatactaaacttgacgaccacccgacccagatcatggctcgtctcaaacggattctctatgcatatcaagtgcctatcgttccccacccatctcatccagtccttctctcgcttc

SEQ ID NO: 156171 - DNA, 105 bp, Arabidopsis thaliana landsberg
cttcatcgattccaagagaagaaacgaagcatcagtgatcttatcctctcatagctaccaccgaactaactctctccatcaccaccataaccattgattctactg

SEQ ID NO: 156172 - DNA, 336 bp, Arabidopsis thaliana landsberg
atcttcttgggtttggttgggtcactcttcacgtttggtttttaaaaaagaaagaaagaaaagaggggtgggggtgttgtaacccctttgactaaaatctaatgaacttttttaacacaacaaaactccttcacatctgaaagggttcttcttctctcttagactctttgaccttttattctccgccgtccgtttcatgatctgactctctggtcttctctacttcttcttcttcttctattctttcttacttcgccactgttgtgtctgaacatgccacgccctttcttccataagttgattttctcatccactattcaagaaaaacgtctggga

SEQ ID NO: 156173 - DNA, 125 bp, Arabidopsis thaliana landsberg
tgtctgggaagttaatccgtttgactatcttttttgctcttgtacttcctttactgtgcaatcctatttctgatagtgttatcactcatcaatgaaatgcatccgtgctattactgtttaaagaa

SEQ ID NO: 156174 - DNA, 218 bp, Arabidopsis thaliana landsberg
atcgtattaaaaaatttggataaactaccatttattaagaaaatgattgattatcatcagtttgtaacttcgtaacaacgaaaatatgcgtgggaaaaagacgggatataaaacaaaagtcacatagttacgattttattgtcaatcttgactgtgttgctttcgacatgtgaccattgtttcaaacatgaatggaagctcaatcatttttgttctat

SEQ ID NO: 156175 - DNA, 411 bp, Arabidopsis thaliana landsberg
cactcatatataaacacatatgcacactgtcactaatgcttctctctctctctctttctcttttcctatatattgacaagcttgcgatctctgttcgctagatctgtctgaaacagtgaggggattcctaggtttcagagcaaagtaatgtctccactcaagtacttgtgttttagaaaggtactcttggtggtgctctattccaggctcttccttttctcttcttcttctttctttgcctcatcaagtgatgatcatgaactaccacgaatagatccttattttcgagtgagaagaatggtggtgaaagaactggattcaactggtgatgatgaatgaaaccaatctttcttcttcttctaagaaaaagaaggctcttaactgattctgggttaatattcatcatcatca

SEQ ID NO: 156176 - DNA, 772 bp, Arabidopsis thaliana landsberg
gatgcagattgctcaagaaattgggtcagaagcaaagtctcagagggacttcttagatgaactggtatgttgttgagagatgtcgctttagttctttctttatccatcatagtaaagttgaatgtaaacaccttacatcagcaacatgcattttagtctttacactgtaggctaatcacttattattatccgagttatgggttacctttatcttgtttcaaatggctgtcattatttgtggaaactacagcttcattcccaacgtatgtataaattataccatagcttacaaaccaatgaaaatcttgataaaagggactgtttagattatgttcagacttatacgcagggactggtctgaactctggtgggtactgggtaggaatatatatcttcaatctcggctagttaagtgaatgcactacaaaatggttgcagcttatcattgagtctatatataccggtttccttataaaggagagtatgatgttgaagatgaacattgctcttatttgtttctagtttttctttttgttacctaaagaacatcagctagattttgttgcgtgagactgcattaagtgctgttatacagaattactctaggatgcaaataacaagggggagaaatggtgttcttgtctgaaacataaagctttttgtttttgtgtgacagcaaatgacattgatcagagcgcaagccggggtgaagaccaacataaggaaactaaacatgagcataatccgtagtggcaacaaccacatcatgcac

SEQ ID NO: 156177 - DNA, 530 bp, Arabidopsis thaliana landsberg
ggcaaagacagggtatgagccggccaaagaaccaacaaaaagagcaagtgttaaagagtgaaacaatcacaagaatctcagaatcaaaaaaaaaaagctacaaactcattgcagatagtcaatcatcagcttgcagctttctttccgccattgtagtaacccaaataccatctcgcaaacttcttgagacccgtctgaagatcggtggtgggtttgtagccgagctctctctgcgcagaactgatattagcatgagtgaactgcacatccccgttcctcggcaacttcataatgttcctcttggccttgactttgagaagtctctcaagaatggtgacaagatcagtcactggaacgggcgaagtgttgccgagattgaaaacccgtaactgagccgcaccgcgcttcttaccaccactaccagtgctcttctcagccgtgtccaaagcccctaaacaccccttgacaatgtcatcaatgtaagtgaagtccctagccacggttccatggttgaccccctcaaagattga

SEQ ID NO: 156178 - DNA, 189 bp, Arabidopsis thaliana landsberg
  unsure (1)..(189): unsure at all n locations
agagtgattntcactaaactaggtttattctgtatttgagacttgcaagttntagagactgtacttaaaagtttgtagtttggaagggccttcttcagttgtatcagcaatttggactacttcactatatcgctgagaaactagtaatattgtaatgcattgtgagtttcaacttttgttgtattagtg

SEQ ID NO: 156179 - DNA, 404 bp, Arabidopsis thaliana landsberg
ctgaagagagagatgaaatcatggctagcctttgtgaggaaggacaaagcttgagaaaaacccattgtctaaaaccctgttctacctccatcgatggctctgtagccgatcttccccgtcttgatgatcaacaacccatttatgattattgtatgcataataccttttctgggttttgggctgcagatcatcatttcttcctatcatggcttggaaaaatgcatgctttgtatgaacccatttggaaaaaagctgggatttttgaagcaatcaaggcatccgcttacaaaatcataaaagacacgtccttgattctctccattgccgagaaatggtgttttgaaaccaaatctttcatctttccatggggtgaagcaacaattacgttagaggatgtgatggtg

SEQ ID NO: 156180 - DNA, 763 bp, Arabidopsis thaliana landsberg
tgttagtcggagactacgtaaacgacagagctgcgatgattttgggtgtaagaaagaattggggtctcgccgtctcggggaatttttttgttgaattcgttcgttgttaacattgcaggtgcacaccaagcgttcgataaaatagccaagtgagcagtttcatgtttctacgggcacctactacttgtgcgacttattagtatgaagacttacatgctcccatactttgaaacttgttgtaagttaaacacaatctctgcccaatttttttttgtgtggtcttgactttggtagacaagagagtaattgatcttggtgcattatatacacttcatctcctcccatcaacactataaataaaaaccaaaagctcctaaaatttgtattatgaagttttagtctatgcgatgcttgtcatgatattgagctttcaccatgtaaatattgactcttttatttccatatataatagctacatgttattgtatgaaactatactcaaccatgtctcaaatcttgcaatgcctcttgggttttacatagctacatcttcgtgtccattatgagagtcttcatggtatatggattctgattatcttatcttatgcgtctgattggttatctattttaatctaaagggaaaggcattgctcttgcggcagctctcggcaaagctagagcctgcatggagtcctcatgttacaaagcatatcaggaatctcggttatgtcaaacctttttccaggaacaggggaacttcctg

SEQ ID NO: 156181 - DNA, 84 bp, Arabidopsis thaliana landsberg
ctaaactatgcaggaaggcgttgattttgtactttcgggctttgttaatcctgagaggagcacactgtggtcacaagccttgac

SEQ ID NO: 156182 - DNA, 576 bp, Arabidopsis thaliana landsberg
cagacgcagtaatgtcagacccgcaattgagtttacagctgaaatcagcagctcagagtgcacttaagaagatgacaggagaggttcaagacgaggtccccgtgctaatgagtggagcaggacatgatgcaatggctatggcacacttaaccaaggtaattgactttcaaaagtcatccacatgtttgtttcaggccttataagctataagccatgtgggttttgtctcttggttcagacactaacttaatgggagatttcttttggtttcggaaggtgggaatgttgtttgtccggtgtcgtggaggaataagtcattctccggcagaacatgtattggatgacgatgttggtgcagccggtttggccatcttggagtttctagagtctcaaatgtaaaacatgacaaatatatgagaaacagagtggagtcttgtctcatagagactccatgaaaaatgtatagtatcatttgttgttatttgtcttctctctgtgtactctttggaactgcatttgtatagaattagtccgatttttaaaaatgtatgatatattattagcttatctttcatg

SEQ ID NO: 156183 - DNA, 212 bp, Arabidopsis thaliana landsberg
gcttcacctgaaacctctcctctgccacatctctctttctctctcacacacacattattgttttttttataactccaatcttgaatcttgaggatctctggtttcttcattcaaagggggagactttttgggttttttagactttgcttgtcttgtttggggtttgtgtgtggtgatgtcttatagtaattcaaacccatgaaaattattca

SEQ ID NO: 156184 - DNA, 636 bp, Arabidopsis thaliana landsberg
  unsure (1)..(636): unsure at all n locations
agtaacatcgcaccgttttcaaaatttggcacagacaacanacaacatgcattcttaaacataaatggctaaatattagtttctctctcttctctatcatgtatctttgagagagagaaactttctactttgtttatagtttctgatctaaatcagatctacaaataaattttcgttttaacggataaagcttccggcgttgtccggtttatctttccgattagatcggattttttgtttgtgttttagtttttctttttccacatgtttacaagatcaattcggtttgctttcttcttcagaagaattctgctttcaccaaactcatcttttcctttataagggagtaatatcttcaccgtccattgaagggacctacaagataggtattaggtgaagctttcctttgaagactagatgataggttggaagcacctatcacgttcatgaagaagaagaagagatcaaaagggaggaaggctcgtgtttggtcgaagaaggaagaagaagaaagtggctaagagtctgttttgaagctgaagtgtgggagagcctctatttgagagacagggttcacttatatctaaataatgtcaaacgttgtagtttcttattacattagtggcaagtgtatgt

SEQ ID NO: 156185 - DNA, 564 bp, Arabidopsis thaliana landsberg
tctctctctttctgtcaactcactcctgccatattttgttttgccttcacctccattgtcctgaaacttttgttgcgatgggtaagatccgacccggaccggatccaaaagcggcattggtctcagatattttagcgctatcgagatcaccaatctcttgcattcacatcaatcgcatctcatccggttcatgtttcatcgactggtatctcattctcggtgtatgtatatgttctttcttttctttcttttttctcaatttatctaaataagattggacgaactttttattgcgttttattcaagttagaaaaataaagaaaaagagaacattatgaacaaaataacagattcaggaagatgcagaggtgaaggtcatacgtaaacgatatcacaaattaggtctgattctatttcatgttacgttatcaaatattcaaatttgacttttgattagctataatttttttgttatggtataaatctgagctaataacatgctttatttatgttcagctttgaaggttcatcccgataaaaacaatcacccaaaagcagatatcg

SEQ ID NO: 156186 - DNA, 130 bp, Arabidopsis thaliana landsberg
tacttattcgataacattataataagatcaaaatgtcacaatgctaacacattcattacttgagtttccaaaattttgtaatgagagacaaaactcaaaaggacacactgaaacaaatgtcaaaatgtta

SEQ ID NO: 156187 - DNA, 1449 bp, Arabidopsis thaliana landsberg
ctcaagaggtcttcttaactcacacaagaaccaacacaaaacaaaaaaaatattaagaaagtgatattatgacttgcagccaaacactcggaaacaacaacaccaagaaataccagatctgcgaggagatcggccgtggccgtttcggcaccgtctctcgcgtctacgctccggccaccggtgatttcttcgcttgcaaaaccatcgacaaggcttctctctccgacgaccttgaccgtgcctgtctcgacaacgagcctaagctcatggctctcttgtcctatcaccctaacatcgttcaaatccatgatctcatcgacactgattcgactctctccatcttcatggagctcgtccatccctctgtttcgatctacgaccgtctcgtctcttctggaaccttctttgagtctcagacggcgtccttcgctaaacagattctccaggcgctttcgcattgtcaccgatacggcgtcgttcacagggatattaaaccggagaacattctggtagatctacgaaacgatacggttaagatctgcgatttcggttcagggatttggttaggtgagggagagaccactgaaggagtcgtcggaacgccgtattacgtggcgccggaggttttaatgggatattcttacggagagaaggtcgatctatggagcgccggcgtcgttttgtacacgatgctcgctggaactccaccgttttacggcgagacagctgaagagatattcgaagcggtactcagaggaaatctccgttttccgacgaagatattccgggggtttcatctatggctaaagatttcctaaggaaattgatatgcaaagatgcttctagaagattctcagccgaacaagcattaagtaagattctaaaaccatcagatttgtttctctgttgaatttttaatgtcaataaatttcatctatttttttaacagattatgttatcttatccacactgatccatttttttagtaggttggtttaatgataaagtgaactaaatttggtattttgtaattttgttttgttgcagggcacccatggatccaaagagcaggagaaacagaggagagattcatctagaagattctctcggagaaataaataagtgtcaagtgatagcttatcatctctctcggtggttttttatctaacaagtatggaggagtgtcgggcatgtaaatttgggttatgggcattttagattccgccagcctaccaacctagtagaagagaagactctggaaaagacttttaaccgaaaaaaaaggagctgaataataaaagaagcttgtttgttgtggctgcttctgagtttggcgatgagttttttttttttttctgcatttgttgcttatgtgaattttgtttggcttttgaaagtctttttaggggtagagacggtaatgtagagaggataacaaatctttttccg

SEQ ID NO: 156188 - DNA, 271 bp, Arabidopsis thaliana landsberg
aaacactaaaataagactctataataacgtaaatattcatatgaaaaatataaataaggaatttataatactgattccttgtattagcaaactatatatataaaactaaaataaaaaccaagaataagataattaaattctcaaaataaaatgatagacgtacaactagttcttcttctacttccaagttccaagacaccaacgttaaaaggcgtttttgtcctaagaaagaaccaacatttcttgtagctaaaaaaggtttgagtagtca

SEQ ID NO: 156189 - DNA, 152 bp, Arabidopsis thaliana landsberg
atccgccggactaccgcctcaactccttcctcatcctcctcctcaaccgttgcggttatacattctccaacggtgtctccaggagcacatccgtcatatctcaacccactagtaacattccctgtagatgcggttgcggaagttgccgcgag

SEQ ID NO: 156190 - DNA, 1900 bp, Arabidopsis thaliana landsberg
actaacctattgacatttgagctttgagttctaaatctctacaggggaatcatgagcaattacagtggcagttcttatgttgatcctgactacaacatggatgagacagagtcatcatcttcaaggccagagagagaacagagagaatatgaaagctgcagaagaaaagctgagatagcccgggggaaaagagcgatgacagagaggtatgagcttatagacgaggatctggaagacgagtacatgcctgagcatactcgcagagccaccaaacttctgcacaagcccgacgtattgcatgctgaggaatatattaggctcttcaagctgaatgagttctgtagcacgaggtatccttgctcgaccacacttgcacaactcggattgttggaggatgttcaccacctgtaccagagttgtcatctggacactctgatggcttatccgtatgtagcatatgaagatgagacaattcaattcttctccactctgcaagtggagctctaccaaggtatgacctctgatgagttggattgtgaaggattgggattcttgagattttctgtgtatggtcatgaggataggttatcaatcaagcgcttggaaggattgtttggtttccccagtggaacgggaactaagcccaagtatgacagagaagagttgaaagacttgtggatcaccattggcagctctgtaccgctgaattcttccaggtcaaagagcaatcagatacgcagccctgtcatcaggtacttccagcgttctatagccaatgtactttactcccgagagattacagggactgttactaactctgatatggagatgattgcaatggccctcaagggaactcttcgccaaactaagaatggtatgtctctccaatgtgaagtcaatgacacacctctctctgtactttccatctatgtggatacaagagctgggctgtcaacaataaccacaagagagcacgaggcgctctgtgcataggtggtgttgtgacaccgattctgatagcttgtggagtcccaatcatttctgctggactcgagccgcgagcaatggatatcgagcacctacgtcactacgaattcctggagtttgcaatggttgacgacttccacaggttcaggtttgagcactctacagacaggagagctagcatattgatttttggcctgaggttacacggataataaagggagataatattgattttcggcctgaggttggacgcctctactatgagaacgctccgccattggatgaggatgatcttctagaagaagctgcttcggatgggttggatgaagatagagcagtggagttcgacactagcatgtatcactttggtgaacatgtacctccagcgaggcagagcaagagcttgactgaagctcataagaataacagtaaattgcagaagtggtgcaagaagcaggacaagctgatcgccaagtgtttcaagcttctgacagataagctgagttgctcttcctccaccactgctattccacaggtacagcctcctctggagatgccatcgaagggatttaatgtacctgcgcacaggcctaagcttagcgagcagagagtcccacatgtccaggctaggcattcgtcattcgaatcccgagagcacaagagaagaaggaaggctacactcactcgatctagcagcagatcacgcctcattcactcgaggagatcactcgaccgcggtgctggccgcagaagaaggagagaggtcgagtatcctcagagcggtgctggccgccagagagctgatgaggtcgagtacccacctgctggagctgatacagaacaaggtggttcgtctatagcctgggagcaatcacaggcatccattgacgaccaactacgttcattctttgac

SEQ ID NO: 156191 - DNA, 656 bp, Arabidopsis thaliana landsberg
cttccaatagcttctaatattttaactacaaacattttaagtttccactaacaatgggtctaatcgccggcgaagtgcgtgcgttcgttttggtgttcgctttggtcacagattttactatgggagaagcagagtttggtgatgagaagcccttgttttctcaccctcaccctgatcctctcctccacaagaggggctttaaaaaagaattcggcgacttaggtggcggtggtggtatcagcggtggaggcggctttggagcaggtggcggttggattggaggcagtgttggaggctttggtggaggaatagccggtggatttggtgtaggaggattcgaaggtggagccggtaaaggagttgacggtggcttcggaaaaggagttgacggtggagccggtaaaggagttgacggtggagccgggaaaggatttgatggaggagttggcaaaggagttgacggtggagccggaaaaggatttgatggaggagtcggcaaaggatttgagggaggaatcggaaaaggaattgagggaggagtcggaaaaggatttgacggtggagcaggtaaaggagttgacggtggagccattggaggaatcggcggaggagccggtaaagaaattggtggaggaattggcggcggaggtcactga

SEQ ID NO: 156192 - DNA, 117 bp, Arabidopsis thaliana landsberg
ccaactcatctcttctaaccttcacctccatctctctccctttttctttcaaataagaaaaacgcacgatgtctcctaactccaaggatttagggaaaaataaatataagtagcgag

SEQ ID NO: 156193 - DNA, 129 bp, Arabidopsis thaliana landsberg
agagaacccaccattgaaattgggggaagaagagaagagaggctaacacaaaaaaaaaaaaacccttctttttggttggcttactcgtgcccttgacggcttactttgccggaaatctgaattatcctt

SEQ ID NO: 156194 - DNA, 637 bp, Arabidopsis thaliana landsberg
gagtcacttctcatcttcacccaaatatatcagtaatctctctataagttatctagttttcccattttcatctctaatctagcattttgaccaaacacacctatttttctcctttgcaagacggttttcaaataactatcacgttatattactaatggaaaatctacaaaagatgatctccgagaagtcggtagtgatctttagcaagaactcttgctgcatgtctcacacaatcaagactctcttcttagaccttggcgtgaacccgacgatctatgaactcgatgagattagcagaggaaaggagatagagcatgcattggctcagctcgggtgcagcccgacagtgccagtggtgttcataggagggcagcttgttggtggagccaatcaagtcatgagtctccatctcaatcgctcccttgttccaatgcttaagcgagctggagcattatggctttgacttcaaaataaatggaattgcaaatgacttaggttctgagaaacttattaatgtgaagaagaaaagtaagaaaacatatacaaggatgtatgtatgagtttatttctatgtatatctatctaagttttcaaaagatagattatgcggttatcataaaatcagcaaccgttggat

SEQ ID NO: 156195 - DNA, 302 bp, Arabidopsis thaliana landsberg
tttgacatcattcactgagtaacaacaatactttaagttagttcccttgtcataattattaaccaaagtaaatatcatcacacctatcgtcaaagtcgtcacatctcaaacgtgcttcaatctcttcatccttggttgcacactgaccaaccaaccctcacgacgatttttactttccgtcattgagccatgtctcctcttcaaaccaaagttgaacagagccatccaatggcaaaaccggaaatttgtgcaatccaggacatcaacaagcgacagcttctgcatctggctgagactcttga

SEQ ID NO: 156196 - DNA, 737 bp, Arabidopsis thaliana landsberg; identical to SEQ ID NO: 40719

SEQ ID NO: 156197 - DNA, 602 bp, Arabidopsis thaliana landsberg
acttagattttgtattgttggggtaccaccttcaagcacccgttgccatcagtggagtcgatcgagtttatcagatctctgcaacaattctgggaatcgtcacctcagattagacctccagtaagaagtgagaaagcatggacggtgaagaattgagctaatgagctgaaccggatccggtgaaattgcagaaccggatcggagaagaagaattttgcatttgtgcatctttatttttaattgttacgtttcagccccaataatcatagatattgtagtgaagaccaaatttcatggtggatcaatcaaattgtattttcaaattttcgtagtgtaataacggaaaaaggaataaaaaggtcactgagtaaaattaatgtatcagtggggatggtgttcgtccgagacttgaagattatcgatgcctttaactactgattcgtagtgtcttcttgtggatttcccagcctccccaggagagtttctcgggatcacgccgcggctgacgtcacctgtacggcttctctgcaacaactcctcgctgcctggaaaattgtcccggctgccacttactgcagttactctcctcgatgatcctgctg

SEQ ID NO: 156198 - DNA, 65 bp, Arabidopsis thaliana landsberg
cttgataccaattttatacagagagacttataccataccaattggaatctattcacatcctaaac

SEQ ID NO: 156199 - DNA, 3104 bp, Arabidopsis thaliana landsberg
ttgagcttcttgagaaaatggttgaacacagtgtaactcccaacgccaaatcctatgaaaaactgatactagggatctgtgaagttgggaatctcagagttgcggaaaaggtgtttgatcacatgcaacgaaacgaaggaatatctcctagtgagttggttttcaatgcgcttcttagctgttgctgcaagctgaaaaagcataacgaagcagcaaaggttgtagatgatatgatttgtgttggtcacttaccgcaactagagtcttgcaaagtcttgatttgcgggctgtataaaaaaggagaaaaagagagaggtacttcggttttccagaatttgcttcaatgtggttattatgaggatgaattagcttggaagatcatcattgatggtgtggggaagcagggacttgtagaggcattttatgaactattcagcgttatggagaaaaatggctgcaagtttagctctcagacatattcactgctaatcgaaggacctcctgatagcacataaaggggtttctatattatatcaatttgccagaggctcatgcaattctttggaactcagattcttttgatccatgactcgacctgaaaaatctgcaagttgccttgtttcttgtgatattgctacaggtcatacaataaaggtagcgcacaaatattcatattttctggctaaaatgtgttgcattaccattccatttcacgctctaatctttcttttctgaattttgatttacttgttttcaggttcaaactttggcatagccgttcctccgattcatcttagatctttaactaaacaacaagtatgaatattgctgtcaaaggctcaatatttacttattaaggcactggagctgtaaattctttaaatgagttgtctttttacttaaagagaaggcccttgaagcaaactcgttgagctttcttcttgaagcaaactcttttccttctgcctagcttctctgcttcatgcgtggcagcttggttctaattattaggtatggaacctaacattttttaactcctgacaacatttttgtcttctgttgcttatatttaatctcctatgcagagtagatcaaaagagatgaaaaacagaccaatgtgggctttgatgtttgtagacgcccagatgattattgttgtcttttggttttcatttttgatatataccaaaacaatttttaatcattttacactcatacaacgatataagattcacactttaagtctaattattaccaagtgaggacaaaaggatttgaagatattgaagatattgaagattccacatggtgatttcagtttcaaatctttgaaaagtattgattggaaaagttgttagaattttagaacttgcataatcatcgtttcttaaagtttttgtttgctgtgtctctgaaaccggatatgtgtaaccggttttgagcttatgtggttcctctgttcttgaggatgtaagagctttagttctaataaaatctctcagagaaaaaaaaaaaagattcacacttttcaaataaaaacacatctgttaccgcatgtcgcatgattccaaagacccacgacagatagagattttgacgtgtcaagagtacatctacttagccgccattgtgactaccagatgttcaaacagaagaagaagaagagctttagagaatcagtctgagtcttgcttgtttatcaacgaagagagaccatggccgagccaaaaccgaagcttcatgttgcagtgttcccatggttagctttaggtcacatgattccttacttgcaactctcaaagctcatagcaaggaaaggccatactgtgtccttcatctccacagctcgtaacatttcacgtcttcccaatatatcctccgacctttccgtgaatttcgtttctttgccgttaagtcaaaccgtcgaccatctcccagagaacgctgaggccaccactgatgtcccggagactcacatagcttatctgaagaaagcatttgatgggctttctgaagctttcacagagtttttagaagcttccaaaccaaactggatagtgtatgatatcttgcaccattgggtcccgcctatcgctgagaagctcggcgtgagacgagccatcttctgcacgttcaacgcagcttccatcatcatcatcggtgggccagcatcagtcatgattcaaggtcatgaccctcgaaagactgctgaagatcttatcgtgcctccaccatgggtcccgtttgagaccaacatagtttaccgtctctttgaagctaagaggatcatggagtatcccacggcaggtgtaactggagttgaattgaacgataactgtagattgggtttggcttacgttggctctgaggttattgtgattagatcatgtatggaactcgaacctgagtggattcaattgctcagtaaactccaaggaaagcctgtgattccaattggtttactcccggctacaccaatggatgatgcagatgacgagggaacatggttagacatcagagaatggctagacagacatcaagcaaagtctgtggtttatgtagccttaggaactgaagtgactattagtaacgaagagattcaaggtttagctcatgggttggagctttgcaggttacctttcttttggacgctaaggaagaggactagagcttctatgctactacctgatgggttcaaagagagagtcaaagagcgtggagtcatttggaccgagtgggtacctcagaccaagatactgagccatggttcagttggtgggtttgttactcattgtggttggggatcagctgtggaagggcttagctttggtgtccctttgatcatgtttccatgtaacctagaccagccgctagtggctaggttgctcagtgggatgaatataggcttggagattccaaggaatgagcgagacgggctgttcacgagtgcttctgttgcagagacaatcagacatgttgttgtggaagaagaaggaaagatctacaggaacaatgctgcatctcagcaaaagaaaatattcgggaacaagagattgcaagatcagtatgcggatggttttatcgagtttctggagaatcctata

SEQ ID NO: 156200 - DNA, 432 bp, Arabidopsis thaliana landsberg
aggatcaaatgaataatttacatagaatgtaaattaattcctctcatttctgtgttttgtcaattctcttgtacaatacacataacaaccaaataaagaacatataacccaccaaaaagataaaatttggaattttgtttttttctcaatctatcaaaaaggaaacttttgaaatttggagatgaataataattattatctcaaacaacgattcttttgcctttgaccttagaagccattcttctctctttgttaatatcgtttcttctccttgtggttgagtcaggtgctccaatgggagccaaagggcctgaccaagtttgaaatggctctttggagtatgatgatgtgaatgagtttgtgctatacggtatctctgatggatccagtcgccttgaagatcccacctgaaaaccgagtgacccgtcttga

SEQ ID NO: 156201 - DNA, 620 bp, Arabidopsis thaliana landsberg
acgtagaaacgtaaaagttttgaatagtttggtactttagtgttgactgttgaccgcgacgaatccgtcggaaaccggaatcaccatggattttcctccgacgaagcttgattatcatgtagacatgttcaatcttcagtctcattccagatttctctccttatttaaggtcccgtcttcatagtaaccattctcgaagctcctttttaacagttctcaatgcttgaatccttcactctctgattcaggcgcaagatggacgcatagctctaatactagaatcagcggtgtttcatccacaaggtggtggccagccgtcagacaccggtttaattgttttctccggttcggatttgaaattttccgttcaagatgttcgatcgaaagacggaattgtatatttgaatctctatcctgatcttttcccgttgagtgattagtgcagatggattctagaatgttcgaaattttgaatggtgtgtgtgttttcgcttttgaaatcgtaggttctccattacggagttttcgaaggttcggatcctgaaagtggaattgatagtgagaaagggaaagaagtttacttaactgttgatgaatcaaggcgtaaactcaattccagg

SEQ ID NO: 156202 - DNA, 372 bp, Arabidopsis thaliana landsberg
tggcaaaaaaaagtaaaaaaattaactgttaaatgaaacataaagagaaaataaacactagctaaacaaattatggcaaaaagaagaagaagacgagaagatacaaaagttaggtttggttgggtcaaactctaatcaaagcctaaagcttttgtacctaatgaaaaacataccaaacataaaaaagctaatccaaaacactatccatttccttctttttgagattatgactttctatcgtacaaaagatgataaagatcatcatgactactctcatacaaggcttttatgattgccaagagggtgtttctctgagagaccaagtctataatcaccaagcttagacttgttagcagaagatttgttttgaga

SEQ ID NO: 156203 - DNA, 206 bp, Arabidopsis thaliana landsberg
tgattcccatgtagtgagttctggtgaagatgcttgtatccgcgtctggagctttactcctcgataagacttgacgtaaattataaagatctctggaaaagtcctatcttgtctctttggaaagcttctactacttttgaaggctttttgtgaatcttccgtttggccgtggctgtgttgatgtgtgtgtctgttttttttttgtc

SEQ ID NO: 156204 - DNA, 5560 bp, Arabidopsis thaliana landsberg
aaaaagatcatcttaacagtgctttaaccaaaagtggtgaagatgggtttctgcatttggaaacattgggataccagaagctgttagactcccataaagcgatggaagaatcagaaccctttgagaaattgaatggaccagcaacggaggtaatggtaatgagcgaagaagggtcaactcgagttcaacctgcactctcgaggacgtactcgaccagccactcgaccttgtctgccaacgaatctggggagccgatcattccaacttcagatgactggtctgaacttaaggcaccgaaggttgatctcaaaccacttcctaaaggtctaaggtacacattccttggtccaaactccacttaccctgtgatcattaatgctgagttaaatagtgatgaagtgaacctgctattatttgagcttagaaagtataggagagcgattggttattcattatccgacattaagggaatttcacctagtttatgcaaccataggatccatcttgaaaacgaatcctattctagcattgaaccacagaggaggttaaatcccaatttgaaagaagtagtgaaaaaagaaattttgaaactgcttgatgctggtgtcatctaccctatctctgatagtacttgggtttctccagtgcattgcgtccctaaaaagggtggaatgactgttgtcaaaaatgaaaaagatgaactgatccctactagaactataactggtcatagaatgtgcatagattatagaaagttgaatgctgcatctaggaaagatcattttcctttaccattcattgaccaaatgcttgaacgtttggctaatcatccatattattgctttcttgatggatacagtggtttctttcaaataccaattcaccctaatgatcaagagaaaaactactttcacgtgtccttatggaacttttgcctataagagaatgccatttggtttatgcaatgctcctgcaacatttcagaggtgtatgacctctatattttcagacttaatcgaggagatggtggaggttttcatggacgatttttcggtctatggcccctctttctcctcatgtttgttgaatcttggcagggtattgaccaggtgcaaagagacaaatcttgttcacaattgggaaaagtgtcatttcatgctacagtgggaaagagttccaccaactgaacgctgtgaaggaggatctccatggtatgctgatcacgtcaattacttggcatgcggagtaaagcctcccaacctgaccagttatgaaaggaagaattttttcagagacctccaccattactactgggatgagccttatctttacactctctgtaaagataagatctacaggagttacgtctcagaagatgaagtagaaggtatcctactgcattgccatgactcagcatatggtggtcacttcgcaacgttcaaaacagtgtcaaagattcttcaagcaggcttttggtggccaacaatgtttaaggacgctcaagagtttgtttcaaagtgtgattcatgcaagagaaaaggcaatatcagcagaagaaatgagatgcctcagaatccaatcttggaagttgagatctttgatgtatgggggattgattttatgggtccattcccatcttcatacggtaacaagtatatactggtcgttgtaaactacgtatcaaagtgggttgaagctattgctagtcctaccaacgatgcaaaagttgtgctgtggctattcatgaccataatcttcccgagatttggagtttcttcggtagtaatcagtgatggtgggaagcatttcatcaacaaagtttttgagaatctcttgaagaagcatggagtaaagcacaaggttgccactccctatcatccacagacgaatgagcaggttgagatctccaatagggagataaaaacaattctgaaaaaaactgttgggattacaaggaaagactggtgtgcaaagctcgatgacgcattatgggcttacaggacagccttcaagacctccattggtacaactcctttcaatcttctctatggaaaatcatgtcacctacctgttgagctcgagtacaaagcaatgtgggcggtaaaacttctgaactttgacataaaaactgctgaggagaagcggttgatccaacttagtgacctcgatgagatccgtctagaagcttatgagagctctaaaatctacaaggagagaaccaagtttttccatgacaagaagatcatcactaaggatttccaggttggtgatcaggtgatgctattcaactcttgcttgaaactctttctaggaaaacttaaatccagatggtctggccccttctgtatcactgaggtccgtccttatggagcagtcactctagctggtaagagtggagacttcacagtaaatggtcaaagtctcaagaaatacttagcagatcaaatccttccaaaggtgacatcagttcatctcaaggaacttcttgatgattaaaggagtaaaggagtcaagctaatgactttaaacaagctcacttgggaggaattcccatgactatctctgtaaataaatttttattttcttgttatttttgatttgtcttggttgtgtttgtggttctcaggaacaaaggaacaatgtggagatagagtaaaaattcaaaactgttactctacagaagacctggagatcgagtgtatagcccgttggagtacaaaattttgaaaatcttctgttacacctagagaccttgcactcgagtacattggtcgagtatgtgtgatgtttaaaaacctaaaacttttaaatcatcatcttactcgaccaacagaagctacagatacttgcagggatttcatgcagtttacagtaagttttctgcaaattttctcagtcaacagattgtgggccacgcgctgaggataagctggagagataatctaaaactcaaactcaaccactctttttgaaacttcactcgacttaaccatatccactcgacctacctcttttcatctcaccaccgacactccaatttctctacaccacgaatcgccgcccaaataactactcgatctagaataaatcactcgacctccgcgaatcacttgacctccccgccgccgtcaccatttcattccctccgtccctcgaccagaccacttcaatcaattccttagctatactagaccaattcatccacatcaaccgccgtctctttcaaaagaagctactcgacctcgtttcccaatctcgtagccgcactcgaccgacgccgcctcagccgatttcaagaattcactcgaccaccataaagcactcgacccctgcaaaagcaactcggcttcttgttcttgaattcaacagagcttttcaacttcagagaagttactcgacctctaggcttcacgattcactcgacctactaaagcattccaactcgaattcggagaagatactcgatccaattcgtctaaggggaactcaagaacagctcagtctactcgagtacagaattgtactcgatcaatagggtctatttcattgcatattgataacaattttggtttcattgctatctttgagactaacctattgacatttgagctttgagttctaaatttttacaggggaatcatgagcaattacagtggcagttcttctgttgatcctgactacaacatggatgagacagagtcgtcatcttcaaggcctgagagagaacaaagagaatatgaaaggttcagaagaaaagctgagatagcccgagggaagagagcgatgacagagaggtatgagcttctagacgaagatctggaagacgagtacatgcctgagcatactcgcacagctaccaaacttctgcacaaacccgacgtattgcctgctgaggaatatattcgcctcttcaagttgaatgagttctgtagcacgaggtatccttgctcgactacacttgcacaactcggattgttggaggatgttcaggacctgtaccagagttgtcatctggacactctgatggcttatccgtatgtagcatatgaagatgagataattcaattcctctccacgctgcaagtggagctctaccaaggtatgacctctgatgagttggattgtgaaggatagggactcttgcggttctgtgtgtatggtcatgagtataggttatcaatcaagcgcttggaaggattgtttggcttccccagtggaaggaaactacaccaaagttcgagagggaagagttgaaggatttgtggttaactattgggaacgatatggcgctcaactctgcgaggtccaagagcaaccagattcgaagccctgtgatccgctactatcaatgctctgtagtgaatgttctgtaatctacggaatctacaggtaccgtgtctaacaaagacatggagatgattgattctgcactcaagggcattctccgcagaaaaaaggggaagaaggtcctgaagggcgacctcaatgatgcaccaccggttatgcttctgttgatccacctgtgtggatacaggaagtgggcgcacaccaacgggaagtgtaagtggtgttgtgacaccgattctgattgcatgtggtgtacctctcacgtctccagggcttgatccgaggatgatggatttagatcacttgcgtcgttgtgagtttctggagcacgatatggttggcgatttctatcgctacaaattcgagcactccttgacccgaacagccaacattctgcttccctgcaccgaggccacaaccatactccagggcgaaaacattgacttcaagcctgcgcgtgattacctctactttgagagcgctccaccgactgatgacaacgtccctacaatagaagctacagaggatgagattgctgagacagatgaggatagggaggaggagtacgatacgagcatgtatcatttcagtgagcatgtacctctagcgcgggagaccaagagcttgagcgaagctcacagaaacaacagtaagttgcagaggtggtgcaagaaacaagataggctactcatcaagtgcttcaaggccatcaagtttctgacaaacaagctaagctgctcctcttctaccacagctattccgcagggagagcctcctcaggacatgccctcgaggagatatgacgcgccagagccaactcgccactggcctgagccaagtcaccacaggcctgagcctagtgaccgagtagtcccaccagtccctgcgaggcattcatcattcgagcctcgggagctcgggagaaagaagaaggctgcactcgctcggtctggcagtaggagtacacgacttctccagtcccgtagcttacgcgactgcggtgatggccgcagcataagaagagaggtcgagtatcattagagcgctgctggccgcgacgaaggagcagaggtcgagtacccacagggggaagcaatcacaggcagctattgacgaccaactccgctccttcttccactgaggtaagcacctcactccaccattgtaatataccatctcctgtttttatttttttctgtgatgtgttttgtcc

SEQ ID NO: 156205 - DNA, 462 bp, Arabidopsis thaliana landsberg
gctataacaatttatttatttatttctattaaataatcatgtatgtgtttacatatgtatactctcactcacaaaatcattacattacatgcgtatgcatgaagattttgtatacgtgaaatccttacgtatgctaataacagtttcttcaaaaaaaccaaaaatataacaactcaaaattacgatataacacttttttcatttttttctataaaaatcaagcatacccacaatacccgtactcgcatttaaccccggacgcacatttcctagtgcatttcccacaatggttagggttaaagttaacgtaagtgcaaacgccaccgcaacaacgttgcccaaaaccgcatttgtgaccgcatcgaccacaattgttcctatctcctagcacattccgacaatgcttcttgcagcaatgcaagaggctcgtccctttattcgcttttacgccattgcaaatgt

SEQ ID NO: 156206 - DNA, 373 bp, Arabidopsis thaliana landsberg
  unsure (1)..(373): unsure at all n locations
acgagacgggagaaatatataaaggtacaacaaacataatagaaaggtacattaatattaaaactcaattgtggagaaactgatactctcacaaattatatgaccagagataaaccctaaaccatggaacttatcataatcacaagaaccaagcctagagaaatcactcccggagcaacggaaccggccaaattgcgaacagctgcggcgggccctggagccggcgcaagaacttctgaatgggagggatccactcccggagtaggcgctggcgatgacaaagccttatgnnnnnnnnnnnnnnnnnnnnnnnnnaaagccttacggaccggagacgctgagggggaaggggaaggagagggatgacgaggag

SEQ ID NO: 156207 - DNA, 180 bp, Arabidopsis thaliana landsberg
ttgtcatgcataacatgattatacatatggctataatatattacattgatttctcgttgtcatgatcaatcgagaaaatctgccatatcaagatgattatcatcatcttggcctttaaaggaaggttccaactcatcacagatgagattagtttcaacatccctttcttttgccttttat

SEQ ID NO: 156208 - DNA, 498 bp, Arabidopsis thaliana landsberg
aaagatcctaaactttctcatgaatcagaaggtcttaagattcataggctctcttgttttcagcatcaatgactgtttaaaagtatcgaaattttaattgaatagaaccggagataaaagagccgcggtttcgtctgaagtgtcttaccattcttcaagccagttttgagcatcttgatcttctgttgtgtcaagcgatttagaagtttctagagggagaacgttatcattctccagatggtgatgaattcgcgagattatctcttgaggaacttgtaattggcggttactaatagcttcccatttaagaccattgaaccagggatgtttcttgattgattctggacctcgttggctaccaaaccgcaggttttcatcaacttcgagcatctacacaagagttttgaagatgcgggtaagacaatgagaaacaggagatttctacttttaatagatgtgaaattggaacttaaagatgagacctttgtgatgagatct

SEQ ID NO: 156209 - DNA, 809 bp, Arabidopsis thaliana landsberg
cagagggctgtttcatcttctgcagatggcttgaaagtaaaagagattgaaggagaccctcttgtgaatgctgatgccttgaaatcactaatcaggctattacgacttgcacaggttagagtaattctgtttttacgctacccccttctagcaactaaacaaatcaatgatttttgttcttatctattgacttttctaattgaagtatcataagtactttcttatacttctgttggttctaacaatgatgttattttaatgtaccagccgttgggaaaaggacttctgcagaggcttcttttaaatctatgtgctcacagttttacaagagcaaatctggttcaacttttactggatatgattaggccagagatggaaacatcaccgagcgagttggctttaactaatccgcaaagactctatggctgtcaattaaatgttgtttatggtcgatcccagctgttgaatggtagtaataactaccgaaagtctttgtttgctattctcgcaagcgtccagagcactgactgactttctttgctcttaacacaggtcttcctcctttagtgttccgtcgggtgcttgaggttttgacgtacttggctacaaatcattcggctgttgctgacatgttgttttattttgattcgtcacttctatcccagttgtcaagccgaaaaggtaaagagaaagttactcatgagacagattcccgggatctggagatacctctggttgtcttccttaaactgcttaatcggcctcagcttttgcagagtacatctcatctagcgctggtatgtttagct

SEQ ID NO: 156210 - DNA, 137 bp, Arabidopsis thaliana landsberg
tttaaggtgaagtagtgatgtgttttggtttgactatctaccaagttgtgtagcttatatattaactatactgggacaaaaatgtcagtacgcgctttgatgatggtaagatatatacaagattgattctcatttgg

SEQ ID NO: 156211 - DNA, 256 bp, Arabidopsis thaliana landsberg
atattaatccagagtggcttcccaaatgataagccctacttttaatacagtgttctctctctatatgtaactcccactaaagaacatagacggcaaatttgtttttattgattcacgaagctataagatcttttgtaatgtctactagaatcacgcagcgagtaccagaactttgatggttccttgactattcgcagtcaacatcgtgggactatcactcttccagcaatccgcactaataaagtaggaacctgcc

SEQ ID NO: 156212 - DNA, 436 bp, Arabidopsis thaliana landsberg
  unsure (1)..(436): unsure at all n locations
gattatgatatgcatgagagattaattcactaatgtaacttttttttcacacataagccgaaaaaacatagatcacacgacggctaaaaatctagaaaacgacgtcggatctaacgaaactactcgacaacgacaaagactcatcacagagacaacttcttcttgctctcagccnnnnnnnnnnnnnnnnnnttcgcaagagattgaagattgcatcgtacgataacgtcaacgaagtcacaagtctcttcctttgtgttccctggaggaacatcaacgacgtaagactcgacaacgacggtcccggagatcggagaagggtgaaggcgtcgttacggatcggtagttagagagccggtggtcaccaccaacaacgctgaaaccgatgatgtggcgttcgtcgtcgaggatatcgagtctctcggtggagcttgca

SEQ ID NO: 156213 - DNA, 113 bp, Arabidopsis thaliana landsberg; identical to SEQ ID NO: 80266

SEQ ID NO: 156214 - DNA, 177 bp, Arabidopsis thaliana landsberg
gtgaaattcccttcctctgacggtgatcacgtggtgcatctccagcaccaatgttggcatggccattttgttgattctgttcttcagccatttcgagtggttgctaaggtacaaggttgactgtggttctcctttttctgagttcgtgagctatgcggttgatgttctcgtcgaaaa

SEQ ID NO: 156215 - DNA, 429 bp, Arabidopsis thaliana landsberg
tttatttatcgagcgttaatatatatatatatatatatatataatatatatatatattgatagaaagaagttgtttcaatacaattttacaaaagtaacaaattatatgaatcactcaatctgaccgtaccaaaccccttggatcttcacatcttttggtaccttagcacccaagtcagtatccgatggctgaagactctcgaacactccgatcacttcacctgtctccggtttgctctttgtgatcttcaaagtgatctctccgacggaagccgccgtgttcttgacgttttccttggatagctcttcctcgtctcctctgcctccggcaggcaaagccactgcattatcgtacccagtggatccaccacgaccctttgggtccaaaaaggacgagccacggtacgatggaactaagaacttgccact

SEQ ID NO: 156216 - DNA, 70 bp, Arabidopsis thaliana landsberg
gtcttactatgctaatatgaagttgaatccgaggttgccacctcctttgatgtctagggaggattttagg

SEQ ID NO: 156217 - DNA, 261 bp, Arabidopsis thaliana landsberg
aggttttgctttatcactaataacataggacacgtttgtgtacaaaagattcagcatttgatggttttcctttgcaaagactacttggtggggtgtataaaaagggctttctattaacattgttacttaagcttgaagttagtaataagtttaagaagaagatcatgtaattttcagtgtgtgattttgtctcttttctcttgtgttttagttatcttttttacttgttacaattgttactttttttttttccggatataa

SEQ ID NO: 156218 - DNA, 450 bp, Arabidopsis thaliana landsberg
cacgctcatattcaacactttcgtgctctgtcaagtttttaacgaattcaatgcgagggagatggagaagaaaaatgtgttcaaaggccttcacagaaacaggttgttcattggaataatagcgataactattgtgcttcaagtcattatggtggaattcctaaagaagtttgcggatacagtaaggcttaacgggtggcaatggggaacttgcatagcacttgcatccctttcatggccgatcggctttttcacaaaattcatacctgtttctgagacaccattcctcagttactttaagaatccaagatccttatttaagggttcaagaagcccatctctcaagaaaccttgagaagcctaccatagcagatgcagttctctacggatggctggataattgatgatcaggagcacagagtgggactcgtctgataagataacttccag

SEQ ID NO: 156219 - DNA, 197 bp, Arabidopsis thaliana landsberg
gtcttaatcttcaccaatctctcgaaattacctgcgaaatacttcttcccgtaacgtttaccttccacataactactgattttaccattatgagaattaatacccaaatcaacatcacggtaattgaaaaacgattgtctcggattcttggaaacaaatggtgtcatgaattggtacaacttcctcgtcaattccat

SEQ ID NO: 156220 - DNA, 390 bp, Arabidopsis thaliana landsberg
gtcaaaaacaacagaacctatctttatttccttcagagagagagagataaaggaaaaatcttttgttcttgtctgaaaaaaacctcacgacagatcggaaagagtaagcttatcaagaaatcattgttcaatcagacaagatctgtaagaaaattatctcacagttctttgttacaattttttttcctcaaattgtttttgaaagggttttattatgcggttaaacatcaacaaaatctctgttcttttatatatatgaacaaaaggagatttcaaaaaaaaaaaattgatgataccttaagcatttctagttaattgaaataggtttagttagtcatattaaggatcttgtttccaactatggtgaattttagtaattaaatatttttg

SEQ ID NO: 156221 - DNA, 724 bp, Arabidopsis thaliana landsberg
ttgccttgttcaaatccacagttcttggtcttatcgatgttcagacatcttctccaggttcttcaaacacttccattaaaggtattaacttgaaatctgttcctcaaatcgcttttaactcgataaagttcaaatttttaatttgtcgtcttgtatcagttgctatgggaaagctagagtatcaaacttcagattcaggagactacattttgtaatttctctactgatccttttgaatttctaaagtttggaactttttgagaaattttgacagtttattgtttcttcttggattcaatgtggcacagtccagttacgaggctccgagagaatttgattgttactctgttagatgttaatggaaaccaaatattacagaaaggtgtgttctttttacaactctagagatcaaattagtggttttattagattttctgaatttgagggtttttggaggtagagatagagacaagaatgataatagagagtggtttcttggaagaaaaactttcattcaatggctatggaaatgttcaattgaaaatgcagtttgttctcagtgaggaagatcgaaatcgcatacgtttcttggtaaagcaaattcattatgttctgtttcattgagctctgcaaaattccaatcttgatgattccaattggtactgtgttttgattgttttgaaagagacaatctgcattgcgaaagaagcatgaggagcttgac

SEQ ID NO: 156222 - DNA, 623 bp, Arabidopsis thaliana landsberg
cacgagaaaccaaaataagcatataaactaaacattaaacaccaaatatcccaaaggaaagacgactccacaagatgataaaaacacataaatttccggacattaaaattcaattaaaaaggtggtcttgaaggtgttccagctccccatccaagcaaatgaggatcaccagaaaacccataaccacccacattacctcctaactgtccctgaccggtcactccagacggcggagatgctgatggagcttgttgcatctgcggtggccctcctcctcctcctcctccgccaccaccaccttcttcttcctcctcctcaatcggtagtctctcgaaaaccgcatttgagaacgaagccgccattagtataaccggagctgatgcaataaggggagccacaacgcttcctccgaccacctgaccttgccctccggctaaaaatatagacaaaccaccggcaccaggcggtgcaggaggtggcaaaacagtccccgttagcgaaagaatctcaaaccttccatgtaaagtcacaactcctcctcctccggacacaccaccgccatttccaggagtgactggctgacggagagtgacgttagatacggtgccgtttcctcctaaaac

SEQ ID NO: 156223 - DNA, 209 bp, Arabidopsis thaliana landsberg
atcttccgtcaaacgaacctgatcctgattcagatccagatctctcgggtccgattcaccaatcgatgcttatacatgcgatcattttcggatgtatgagtttaaagtgagacgttgtgctcgtgccggagccatgattggacggagtgtccttacgctcatcccggagaaaaagctcgccgtcgtgatccgaggaagtttcattactc

SEQ ID NO: 156224 - DNA, 407 bp, Arabidopsis thaliana landsberg
gtgtagctcgagtgcagatgaagaaccagaaagatagagaagagaagatgttagaacaggtgactattttaggttatgaacaactctgtcttttgatccgttgcaacggctagttttctcatgtgttatattggcagaatgtgattcttggcagatttggtgggggtggaagtagcagtaggaaacccgcagagagaaagcgtacgccagaagagagagtattgaagtcaactggagggattttcaaaggcggtgttcttgatgttaagcatttgctacgttctggtccttcaagtagtagtgacagagatttcaagacgaagaaacccagtagggtcgagaagaacttgggaggaggaggtgatggaggaggcatcaagtctaagggaaaaaagaaaggaggcaaa

SEQ ID NO: 156225 - DNA, 138 bp, Arabidopsis thaliana landsberg
tgtgatgcaaataaatgagatgtgatcagaagtcactaagacaagccaagcaataacagtattggggtttctaacagtcataagtgaacatgaagaaaacataaataataacagaattcttaaaatcactcgaccaca

SEQ ID NO: 156226 - DNA, 714 bp, Arabidopsis thaliana landsberg
gttttgaagcaagttgttggtttttgattcagtgatgggtaacttttgttttgtttgcttggctctgttttaatgtcagggttatgattgatacatggtcaagtaatcgccaagcgttcaatgtaggtgcggcttttaaatcacccattcttttgtgctcagtgattgtttttttattttattgtgctgatgttgttgcttcttattgtgagtaccagcttttcaaaagcttgggcttgattgtgcaaattggcctgaaccagtttattcagacttgttgaggtatatatatcgaagtttgtgacttgtgttttccggttgggttttggttcattgaagtttactttataatacttaagaattgattcttttgttgcaatcggtttataattcatctatctgtgaccttgaagaatctatttgttttcaatcatctccatttccatctcttatattctgtttctagggattaaaaaggtccagttcttgtactagtctatagatactaacttgataatttggttccattcaaactttttatgcttcctttcataatcaacggctgtttcctgttcgattactcttggtatgagtagacgatttagattgagttcattttacaattgcatttcgttgtctgaaagtgtttagttggttattaccagaaaaggtgctgctgatgaagagaaaatgttgcttttgtatttcaaccag

SEQ ID NO: 156227 - DNA, 345 bp, Arabidopsis thaliana landsberg
ggtaaaaaagaagtctaggaattaaaaatatcttacatgtcaggctaaagattgctacatgactgtatctcatggaccccaacttcatctctgtgtagcgttttccaaccatcatggtattgaaagatcagacatctgtttcatctaaactaagcttggcacgatattgacgacctttgctttggaaactggtgcagctctctgattctcgtattgcagtatccccatcttctgttgcacttggtctctcttcttctgccaactctccagctacgatagggttagtctcattacagttactactgtcttcacttacgtccttggtcttattctgaggaataaagt

SEQ ID NO: 156228 - DNA, 233 bp, Arabidopsis thaliana landsberg
gttggaaatatataccctaaattagaaatagagaacccaaatataatattttaaatttatttctaatttattttggttgaatatattttatataaaattatggtattattattgtccataaaacttgtttttgtgttacttttaagaatttctcaaataattatttgagtgctatttatgtctaaaaaactttttaatgctatttttttcaaaaaacttaaaagtgtgctatt

SEQ ID NO: 156229 - DNA, 358 bp, Arabidopsis thaliana landsberg
aagcttcaacgtgaagtagagaaggttatgctggagatgaagtttcgtggtgtgcctagaaacacatagactttcgatgtgttgattcccaatctttgtagcatcagcagaactgaagaagcaatgccagtgtttggtaggatgggtgaatggggttgtcaaccagatgctgagacttatcttgttctgattaggagtttgtatcaagcagcgaggatcggtgaaggggacagaatgatcgataagatgaaatcagcgggatatggtgagcttttgaataagaaagagtattacgggtttctcaagcaccttgtccgggattgagaggcttgagcatgcgaaaagaaagtttcagagc

SEQ ID NO: 156230 - DNA, 406 bp, Arabidopsis thaliana landsberg
ataacttaaaactttaaaactgaacttaaagacaaataagaactaggatcgtaatcaatcgtacggtgaagatcaaagacagaggatgttgtcaagtctctctcaatcaaccgaaataagaccaattctcatctttgcccttgccgccaccaccagctgcagtttcatcgcagtagtaaacgccaaggttattgatcgccgcggtgagagcgtttgttgacgtttccatggaaagataaggcatgttgttgaatgacttagcaagacacgatgcgactactagtttgtcgttccccttatcacaagctttgttgttgttcctctgctcctcggctcggtgtgtaagagtctgaaacatgagctcacgctcatgctgcattgctctgaggcatccgcagaggattgg

SEQ ID NO: 156231 - DNA, 310 bp, Arabidopsis thaliana landsberg
tcaccctcccccttacgatttttggtagagcaaagaagatgataatctgttcttaggtagataaagaagaagacttcttcgaagccagaaactgaataccaaatcgctctgtggtcacatttttttcctttttgttaaaatgttttgtggcagtttgttttctgtgatatgatttatagacgaaactatgtttgtttaggtgaagtctttctcttctctactactttagagagttatcttctttttttggtaattaattaagataactttgtaaccttttttttattgatctatatatattctaaagacg

SEQ ID NO: 156232 - DNA, 149 bp, Arabidopsis thaliana landsberg
tccttgcgaacaatatagaaagtggtagtgtgtaaagtttccctcatcatttgtggtttctttttctcactttcttcggtgtagtaaaatttaagttgtatgtataatagttctatcatatacctgctttctaaaacaaaacaaaaaaa

SEQ ID NO: 156233 - DNA, 57 bp, Arabidopsis thaliana landsberg
ctctctctctcagaaacttcgacggaagaagaacaaaacaacaacaacaacaataac

SEQ ID NO: 156234 - DNA, 166 bp, Arabidopsis thaliana landsberg
  unsure (1)..(166): unsure at all n locations
cgtaggtgaagtcttagcgataagctttgtttcttcttcttcttcttctttacccatggatttttaacgaacaagagaagagaaggaccaagttttcttcgaaaggattganacttgtttctttctcttcatctgcaacaaaaaatgatcaagctttgctcatgac

SEQ ID NO: 156235 - DNA, 309 bp, Arabidopsis thaliana landsberg
ggttagagtttgaagagttaccaaaaaaaagatagcgctactctctctttctctctggcaccattatcgaggctcctccactgattaatttttccgatgccggtgaagcttttgcttgccggcgtcgggatttcagcttcctttcaccgctgcttcacatcttttctttctttgtttgttctcctttgaaatcattctccatcatttttcctctgtttaacctctatcaaacctctttaaacgttttgtacgacctcacttcgcttctcggccgatcttcatcatcaagtgaagaagaaaagaagagtt

SEQ ID NO: 156236 - DNA, 183 bp, Arabidopsis thaliana landsberg
  unsure (1)..(183): unsure at all n locations
aaagaagattactactatttcacaagtaaacatacacccaaagcccaaattccaaggcccaaagcccatatccgaaagggcttcttttgtaggtttgtttatcgtgtacccgaccaagtactggtgagagagccaaaagatattatactctctcaatcgttcaccaaaaattcancccaccat

SEQ ID NO: 156237 - DNA, 214 bp, Arabidopsis thaliana landsberg
ttttttttttgatgatgatgacgattaaaagttatttttacacaggtaaaaaaaagtttccctttttgggaaatgattcaaaatagaagttcttttctggtgacttattatgtctctctgttggagaaatcagaatctgagaatgggttgaaacttgagagacccaaaaaagcagaatattttagtgtaaaaaactgactcttttatttctctg

SEQ ID NO: 156238 - DNA, 658 bp, Arabidopsis thaliana landsberg
gcagatccaaaactgtcggcactaaatcagataataagtgaacccaatgctgtaataaaattcctcaaaaaagtaaaataaaagggcaaaagaggaaataagaagataaatcgtgtcgcaatcttagcaaaacctataatcaccagagtcaatcgtagcgttcgcagccgccggaggaatagcaaaatgccataacctcccggcggcgttgactctatacttccggcataaaaactcctcggcaaaagtcttctccaccctccgattaacatcgtgcaagaacacgtgcgtaactcccggtttcttccggttcctagccataacagccgccgagaaaatcgccgccattcttcccggagcttctgcgaagtaacctttaggagcatcgaccatcagcagatcccactctgtatcgtagaactcatcgggcagtcccgtgagagctagcttacacttctcgtttccccggagataagatttcgccggaaaacacttaggctccgttttgtacgaacgtagaagcgaatcggcttgttgaagctgcgtcctgtaacgcacgtgatgcgcacgtaagaaaggagagtctttggtcactttctgaaaccattcaagatcttcttccaagaacaaggttttgccacgtggatttaaagaagcc

SEQ ID NO: 156239 - DNA, 384 bp, Arabidopsis thaliana landsberg
ttagaaatttgttcaagcagaacttcatttgctaattttctattacagaacaaatgtgttgtatcgtatggttaaattaaaatgaaaaaaaaaaaatcaatcgcaggaagtaacagagagcccaacccggagatcgttagatgttccagacacatacattcggtgtgtctcgatttcttctcccttccggtcacttgtggccgccacatcagcagctgccgcgtaatggattccgttgttgacatcgtctccggtggagaaaatgatctccctgagaataggttcgtgtccgtttagaagatttcccatactgagcacttttctccaagactggttagccgatggaggcgagaacagattcgacaccacttgtctttctcttaa

SEQ ID NO: 156240 - DNA, 137 bp, Arabidopsis thaliana landsberg
tatgatgaaacagatgagatgtgatcagaagtcactaagtcaagccaagcaataacagttttggtgtttctaacagtcccaagcgaatatgtagaaaacaaaaactttaacagaattactaaaatcactcgaccaca

SEQ ID NO: 156241 - DNA, 364 bp, Arabidopsis thaliana landsberg
  unsure (1)..(364): unsure at all n locations
cacttcgtctgagaaaccaagaacttggggggtgttggccggagttggggcgagaagacccatgggagaagtaacgagatggatgaaaggacgagattccaacgaaatcttggtgagatctgcttcttcctnnnnnnnnnnnnnnnnnnnnnngacttggcctctcaagagagcctcaccagatccaggagcgttattgattctgctcatgttcctcttcccaacaactactgaggacagtgtctgcatcgccagacctacgatcggtgagtcgttggttatgtcaaacaacgcagacctgtcttttgcaccgtttctttgtaccgacttcgattgacatttatctgaccaatcatccgctttc

SEQ ID NO: 156242 - DNA, 76 bp, Arabidopsis thaliana landsberg
atgagccctggaacggatgcgaaagactggacgtggtagactgtatcggccaagagcaagagtagtgaaagtgaga

SEQ ID NO: 156243 - DNA, 308 bp, Arabidopsis thaliana landsberg
tggaggtatttctcattggttatactttggtcctttttcactagtacaatacaaagagaaagaatgatactatattactgtaacatgaaacaattctgtggtttgcgagtgtctcgccttaatatacaatttaccatttcactgagaagaaaagaggacctatggggatggtgcagaagatggtgttgtggctcgaagaagttgttgcagaaaccgagctgcaagacgttggcctacaccgcctgcaacacgtcctccaagtcttcgtgcctctggttgttgtaacacctgattttaaaaatataaga

SEQ ID NO: 156244 - DNA, 1201 bp, Arabidopsis thaliana landsberg; identical to SEQ ID NO: 26811
  unsure (1)..(1201): unsure at all n locations

SEQ ID NO: 156245 - DNA, 271 bp, Arabidopsis thaliana landsberg
cagaatcttggtttagtcttacgagctgacttcaatgcaggtgaggaacgagtagaaacagagaacagtctgcataatcaagggcaagagttgtccacatcttggattcagtaaagaaagcttcagagttttctttatatgtgttctagtgtttatagctttgtctcaggattattctctcattaaacacagtttttgatctatccatttcatagcccatgtagcaatgaagaagattaggtttcataataagttaataagcccagtcaaa

SEQ ID NO: 156246 - DNA, 225 bp, Arabidopsis thaliana landsberg
agaaagagttcctaacccgctatcaccgaggatgatgaccttgaggagggtacgtctacgggacggcatcgaatcggatctaaaagagagagattgaagaaatatctgcgatctctggtggtaaattttgttgaagaagacggtgtggtgggtgttttctctgtgccctgaagagtcttctagctgttcctgatctgtcttctaatttcttttgtgactattatt

SEQ ID NO: 156247 - DNA, 457 bp, Arabidopsis thaliana landsberg
aatctagttttttggaatacagatgcagatctttgttaagactctcaccggaaagactatcaccctcgaggtggaaagctctgacaccatcgacaacgttaaggccaagatccaggataaggaaggcattcctccggatcagcagaggcttattttcgccggaaaacagctagaggatggccgtacgttggctgattacaatatccagaaggaatccaccctccacttggttctcaggctccgtggtggtatgcagattttcgtcaagaccttaacgggaaagacgattactcttgaggtggagagctctgacaccattgacaacgtcaaggccaagatccaagataaggagggtattcctccggaccagcagaggttgatcttcgccggaaagcagttggaggatggcagaactcttgctgactacaacatccagaaggagtctacccttcatctt

SEQ ID NO: 156248 - DNA, 406 bp, Arabidopsis thaliana landsberg
aaaaaaggaatgagattgcatattacattattacatcttttgtaaactcttatatagtaatgtcccacaaacaacattatagatgatacacacgtccctatggacaaggaaaaaaatgaaaagggacaacatagaatgttagtagtctcacacacaatgaaagctcttaatcccctaactttggagatggctcactcattgtcctctctctgttactctctcccacaacaaaaaaaaatgaaggagaggctaattagagaacaggggagaagttgaggcgagaggtgtaagtagctttgggaacccagttactggggatgacgtcggaggcagagagtgtcttgttattggacaaagttgtgagtttcacggagaatggtcccttgagtggtccttcgacgatgca

SEQ ID NO: 156249 - DNA, 456 bp, Arabidopsis thaliana landsberg
atcgtttcaatttctgaaattctaaacgcaatcagtcaatcaccccaatccaaatttagggtttcttttctctttctgcgatcgatctctggtaactcataacttgttgttgaatcgcgaagatggcatcaaacggattctactctgctcagagaaacgcaaacgctggaacaacgatgaagagacgaaacgacaatcgcggttacggtggcggaatcggaggttatcaagaggaggggaaccgttacgcgccgccgcaaaaacgtttcagatcgcaaccgcaacagcaattccgatctggtcataatcctctgtatcatcatggtagtaataataataataacgtgtctagggtttcttctcaatcaaataacaaatacggtgttgatgtgattgcttctgattcaagttttgctttacgtaacaatgattctaacaccaacaattatcagaaac

SEQ ID NO: 156250 - DNA, 608 bp, Arabidopsis thaliana landsberg
cgttcaagaaccaaaacaaaacacacaaaaaaaactcaaagtgaccaaaataaccaaaaggagaaatcttgagaaaacctttaaaaattcttaaaaatggggaaaggaggaaactatgtgacggtggcggcttccgaagtggacgagctacgacggaaaaatggagagatggagaaagctgtggaggagatgaggaaagagatgttgcagttgtggaggaggacacaggtggctgaggaggctgaggagcatctttgctctcagcttgccgagcttgaagccgaatctttagaccaggctcgtgattaccacactcgcatcatctttctaacaaaccagctctctcgtttctcctccgactctgcctctccctagaatagatatttgtgtaaaggataggttcttagattgttggatcatatatgtatcctcaaattggtttatatcattgccaaatatgtagaggtttttatttttgtctaaatggggaatttctccttggaaaatttcaatataaacaaaaaaaaatcattgttgttactggctcatcttgggattagtcgggcgcttcaacaaaatccaaatatcacgtagtaaatctttaaaaa

SEQ ID NO: 156251 - DNA, 773 bp, Arabidopsis thaliana landsberg
gggattcttccatggttactccttcatcacattactcatgattcttaaccatgctctcaggtaaaagctgcttaagaggccagacttttttcttaactctgatgtaagttagtgaagctaacaccaaaacactcttttattgtttgttttgaagtggcattgctgtgtcgatggtgatgaaatatgcagacaatatcgtgaaggtagtgtatttgcaaaaaaatgcacattcattcccctgtcactttttgacacagggtttaactttatcaatcggtatgtaggtttattcgacatcagtggcgatgcttctcaccgcagttgtctctgtattcctcttcaattttcatctttccttagccttcttcttgggttcaacgtaagttaaccacatttgcttttgctaatacaatcatctcaacttttgatatcaaaagtagccaccaacatttatgcacataagagccactgactgcgtaaaaggtgtctcataaaatgcattactgtgtttgcactttgcagggtcgtctctgtttcagtatatttacattccgcagggaagctacgatagtaaagatcttcacacttacatctaccaagaaaacaccattattctagtacagagataaagcttttgaacgatgtacgattttgtttttcgtgtaggtatattcacatttgtgcttctgtattgatttttttttccgtctcatgaaaccttctattctcatttgtacgatgccaaaacttatcaagaatagttacaatttcag

SEQ ID NO: 156252 - DNA, 280 bp, Arabidopsis thaliana landsberg
tgttaagagaaatagaagaatggcattaagtattatggtacacgagttatagttgaagaaatgatgtcacacaccaaacacaggaaaaccaaaaggtacaagagcttttttagcaagttaaaaatcaattcttcttaagggcattcccaatagctaatacagagatgagaaaaaaagaaaaaaaaaaaatctagactgtatctagagagtttcactttcaaaaaataaaattaagaaaaaaaccatgtcgagattctgacaaaacgatgaacacccaact

SEQ ID NO: 156253 - DNA, 353 bp, Arabidopsis thaliana landsberg
tgccggctaattttacgcttccggatgtgtaatcgtcgaatttgaaggtccattgtgagtcattgtcccttttttataaatgattatcggctatcctcctctcctcacccaagcttagaggttcatgctatagcaaatgcatgtcacaatttccagatgattctgttttttattaaggggctaaatgtaatttggattgttgttgtttggaagcaggtaggtaggtgtctttgaaacaaggacgaataattcactgcacatgtgattccttgagagagccagatcgaactttctacagaagaggctgtgatatatcatcttcttaagtcctcccctcttcttcttcttcttct

SEQ ID NO: 156254 - DNA, 198 bp, Arabidopsis thaliana landsberg
gaacaaacccttcactgcgccagtgttgtgcggctctgcgaatcttcgaaaatgggtaaatccttcttctccatcccttcgtctagatcaaatcctctcgtttcttagatcgatttagcttttctattgttcttcaaatgatgtttgtgttacggatctgttattgcgagctacttagcttaatgatatgattgatat

SEQ ID NO: 156255 - DNA, 238 bp, Arabidopsis thaliana landsberg
ttgaagttttaaaatcttttatggaccaaaatgatgttataaactgttactacacaaactttgtacgattcttcttaatttgaggagttaatgccactacgatacgttgccctccctttctttttcttcttcttctgtcttcctcaaattttgttatcttcagttttcctcatgacgtgattcatttaaagacttcactctctctaaaattagtagccttggaacattggaggtggtg

SEQ ID NO: 156256 - DNA, 186 bp, Arabidopsis thaliana landsberg
tgaagttacttgtttcagttcccgatgatcaattcttagtttttttggcttgttttcttcgtttctctttcatcaggcctttggagttttgtgttaccattttcgctcgcgtcattactggtggtagggttttcttcaaaagcttcttaatccgtcggaattgcttttttctctccctcagtgtcg

SEQ ID NO: 156257 - DNA, 704 bp, Arabidopsis thaliana landsberg
cattggatcatttgtttaaaagctttacgcagctaagcactcgcgtggaagaccttgagggaaccttttagcgtccgtacagtaattgtagatcatgtagttactctgtacccatctcatctgttcttgacccgtcgagtctagctcctgagacaaccacgaaccagtactcccttgtcctgacacgttagggcatgaagactgagccgttgatcacgacgcaagcttcttcgttgaagccactggtaggaagcagtgaagggagctttagaccagtcggttttgacgagaccaccccttgtggcccattcttcagcgttccatagactagagtacattctcattggctggttcttaggaaacagagttccttaagattccatgttcttgaattctcttatgggagttccatccacggagaatctgaatagatagaaaaaacaaacaagattagattcaaaagagtaagtgtggtttattttttataaagttgggcttacatagtgcgttgtgggttccacaggatagagtaagtgtggaaatcactagcggggtcgatccagagtatgaagtgttgttctctatcgcctttgccctgcgtaaagaccttagtatctagtgtgtcaggttcaccacagtggtttccctaagtatcatagtcggtcttgtgcgatgtaggttctgaggatttccattgatgctcc

SEQ ID NO: 156258 - DNA, 175 bp, Arabidopsis thaliana landsberg
ataaaatattatattttttctgaatatgatgtaattcaatttttttaaaccggacatatattattcaacctatgaagaaataatatgtgtcaatgtcctaaatcgaaaagaaaaattggacaatggttcagaaccatattataaaggaccaaaatgattctgataacgaaggagc

SEQ ID NO: 156259 - DNA, 235 bp, Arabidopsis thaliana landsberg
gagaagaaacatatcctttgaactataaacttttgatgatttattcacacgccacacaaccaaaacaagctttgatcaaacgcacaaaaaacacagatatgtctatagtcagcataaaagtcctgagatatataccagcactgggcggaaggtatgaccgctgtagcatgacgtgagggccaaggataaagattgtgcaaaggaagaatccaccagatataatgctaatggtgac

SEQ ID NO: 156260 - DNA, 117 bp, Arabidopsis thaliana landsberg
aatacataccgatttgttgaggataggaaagtttctctggaggtttggcaaagtctgcaatgttggcaatgctaataccccacttgaacgttggtgcccagaaatgaactgataaaa

SEQ ID NO: 156261 - DNA, 436 bp, Arabidopsis thaliana landsberg
  unsure (1)..(436): unsure at all n locations
aggcttgtgtttacttcggccgttaagagacggagctatgcggttacagtgacggttaatacaaggaatgttgtgttgggagaaacaggtgctgtgtttgggtcagtcacgtggtttgatggtgggaaacacgtggttcggagccccatcgtggtgacccaaatggatacgttgtgattccgggtcgggtttgggatgatcannnnnnnnnnnnnnnnnnnnnnaaaccctttatgtggtgtagcaataactgtagaattttgagttagttggcttttatttataatcttaattatgttctgtgtttttcttattcctaatgagattttatcctatcttttatctatagttaagcaaaatgagaggaaacaatgtttaatacttgtattcattataaaaaagaaattatgaaggcaaaaaaatagaagttgaaaga

SEQ ID NO: 156262 - DNA, 201 bp, Arabidopsis thaliana landsberg
tggagatgctgagaaacaagagaaagctgctgatgattaggaagttggatcagtgatttgtgtatcaactatatctgttgttttatgtcaacttttagctagcttttagggagaacaattgttacattcctgttttatcctttctgtcaactgtgggattattcagatgtaactttggatttagctttgagcttcaattcc

SEQ ID NO: 156263 - DNA, 143 bp, Arabidopsis thaliana landsberg
acatttattcaatatggccactctcctgcaaataggttcaggtgtgatttatagtaatgcccttaggaagacgcttcgacgtcctcagtcttctacatgcatcatagtgaccgaaaccacaccatgtaataagtctcccacag

SEQ ID NO: 156264 - DNA, 187 bp, Arabidopsis thaliana landsberg
catatgatagagtttcacgagctgtttttttattcctctcttatttttcaaggagtaacattatatatttacgtttttattaattcccctataaaaaaccattaggtatttaaggtatattgtagtctcactctcaggccgatcaaatgggacttattaaattatgattccatcttaactaaaaaaa

SEQ ID NO: 156265 - DNA, 3839 bp, Arabidopsis thaliana landsberg
atgcacactcggtccaaaggatctgcacacctactatctttcaaagacagaattgacagactagctcgtgagttataagaaacaaaagcaaaggcagactgtgatcaacaaagaccagctcctacggatcaacagaaaagaggagttgagatacaagacccacctaatgttgatcaaccaagaaacattggtgcttgtgatgtcccaaggaatcatcaccaaagacaagggatagtgccaccacctgttcagaacaacaactttgaaatcaatagtggtctcatctccatgatccaaggaaacaaatttcatggttttcccatggtagacctcttggaccatcttgacagttttgataggctctttagccttaccaagatcagtggtgtcactgaagatgggtttaaactaaaactatttcccttctctttgggagacaaggcacaccactgggagaagactctgaccccagactccatcacctcatgggtcgattgtaagaaagcttttattgccaagttcttctctaatgctcgcacagctatattgaggaacgagatctcaggcttcacacagaaaaacaatgaaactttctgtgaagcttgagagagctttaaaagctacaccactcaatgcccccatcacggttttaagaaagcatcattattgagcacactctacagaggagctttaccaaagatcagaatgctactcgacactgcctcaaacgaaaacttcctgaataaggaagtagcagaaggatgggagttggtcgaaaatctggcacaatctgatgggtgctacaatgaagactatgatcgctcagtgagaggaactagaggcactgagaataaatagagcaaagatatcaaggatctgaatgaaaagctagacaagctgttagactcgagcccctggtagagtagatggttctatgacttcaacaaaccactcgaccccctggtcgagtagatggcctcatcactgcacatcaccgctcgacccccaggtcgagtaccaccaagacaaccactcgatcacatcactcgaccccctggtcgagtatcatcacgtccaccacatcaccttcactcgatcatactactcgaccacatggtcgagtacctacatcacctccagctcatcactcgaccactcactcgaccacctgggtcgggtaccattcttaatccgtcccaatactgcgtcgttttgagtattagggttttgaaatatttcgctattagtagcatgtactttatattttcgttattctaagttttattccgcatacactgtgttcttgacattttgtaatccggatttctcttaatctatttagtattcaggatttgcttttgatttcatttactaagttgttcatcttgttatcatcttgccattactctgttgctatcatgttttcattctattcatcgtttatgatttctactatgatgtctgagtagtgaataagtttttgaggatgggttaaagtagtttagaattctcagtatgctaggtggttgagtttgatttatagatccttctggattagttgttcttaatgcctattgctttctgatcaactggaatttgagcccagacatttctttgcccaaaaggtgttcgataaaatgtctgaaccactaattccagagattcgtggctctgtaccaaggtattggttgcagggagcgttttggctttaacttgttgattcgtaatgcctattaggttagctctcgtcaatggtgattgagtctgggactaggttaacttgagggtctctattgcggtggcacttagatttggttaatgaacttgttgtctagggataatttattgagcatgtcaatcacctgtaaactgaggaaacgaaactactcaatgaccccatcctcgggaattttttatctaattgaattctttgtttactttactgttgtttactgcatcttgttatctgtggcttactttctgcagttctttcttgttactcgaccttttactcgaccacctagttgtctggcaacagactgtgcagtcgagtatctgtgtttcattttctgtctgttactcgacctgtcactcgacctcacccagtgctctgtaaagagctgtgttggtcgagtgtttttctgtttctgtttgattttctgttttctgcgtgttcacttagaactgctagaacacaccaaaacctgttattgcttggcttgacttagtgacttctgatcacatcttgattgttagcatcacacccatttggattgacaacctaaaatactacaacgacatgattggtgttttaggataattgactgaaaaacctattatcattccactccaaattttatggttttgaaatgaatctcaaagacttgtccatggcgtgtttatgcacctaaggtagatttttctgacagctttcaagtgcgaaaggcaaatcagagacacacatgaaagattgatcaaaggcgtagataccaccatttagcaacaactcaagtcataggcgaacttatgcaatctcgttttcttggtattaaacgttgtccaaatgttgctgtgattaggaagttcttgcttgacaactatcattttagtatatcctactagaaagcttggtgggctagagaggtgataatggagaagtctttgggatctacggcaggcaatggcaggcaactatgcactgattccagcttacgctggactcctttagcaagcaacccatgtagtttgtgctttacagagtatgatgatgagccaaatggtccacgccgtttcaaatactaattcatcgccttcgcatcctccattaaagggtatgcctatatgcgcaaggtcattgttgttgatggaacatctatgaagggacaatatggtggttgtctcatatcaacatgttgccaagatggaaattttcagatcttcccactggcttttggtatcgttaacagtggctcaaccttatagctcctatgggaatgatagcgcatatgaatggttttttcagcggctcaacattatagctcctgacaatccgaatttaatgtttatatcagactgccatgcaagcatctacacatgcttgagtaaggatagacactacaatgcctctaaggttgtttcatataaaatacaaatatcgaattacttaatctccacctaagctgggtctgttttggtggagcaatgatcgaattctttaatatttggtgaaggggtatacgcaagccaaccacgctgcttgtacggttcacctttggcggaatgtcaaacatctctacaagccaaaaagcctctgccgactaatgtctgaagcagcgtaagcgtttcatgtcactcatttcaatcggatttttctgaagagacaaaaattaaaccctagaggtgctgcatatttagttgatttgggtacgtttgttttactctctattattatattggtcagcttccatatagttatagtaaattggttgacaggattgtagattacataaccatgtatattgtaatgtgtatagggttttcagaatggaccagagtgcattcaaaaggtcggcgtttcaatattatggatagtaacacatgtgagtcgtggaacaacgttattaaagaggcacgcgagtacccacttatttgcatgctggagtacataagaacaactttgatggattggtttgctactagaagggctcaagctgaagactaccactttagctccgagagtgcatgaaagagttaaggaaaactatcaagccgccatgtcaatgtctgttaagccaatttgcaacttcgagttccaggtccaagtttagactggtgaatgt

SEQ ID NO: 156266 - DNA, 319 bp, Arabidopsis thaliana landsberg
attgtaaacacttaaattgtcattaccatgaaatatgtctgagtgaagttaacaaaacaccttgaacatgtccaaagaatgacagaaatgaaaaagtttaaaaaatacaaaagccaacaggtttataaaaagcaaaccaaagagtatataccagagttttgaattaaacaagaaccatttttagtgttcctgagagtgatcgagatggtaatccatcacatcggatagggcttcgaggaatgcagcttcgctcgtccctggaagcacagcttcttgagcttcctctaccatttcctccaccagagacttcttgctaagt

SEQ ID NO: 156267 - DNA, 66 bp, Arabidopsis thaliana landsberg
tgctaaagtgatgatgtgtcaatcatatggaaagagttggccaactttcatatatatgattcttcc

SEQ ID NO: 156268 - DNA, 1348 bp, Arabidopsis thaliana landsberg
ttatcctccacctccacctcctcctcaaccaccggcgtttgcttaaacggcgtttgcgttgacgcgggagctcgtctgaatctagcgtgtccggttctagatctaccgagtagagaaatgaccttcttgaagctgttaacggcgacgtcagtcaccgcggttatctccgtctgactcttctccgttggttgttgactttgaccgatcagtttaagaaactcctccacaccgtgaatccctgcagaagcagcttctctcaaagcggtatcttccattttcgccgccgcggcgattgcaggaaaaccatcacctcctcctccgccgccgctgtagctgctcatcatcagctcaacagtcatctcatcaaatcagagaccaaccactcagattcttattaaaggtcaaaggacatgtagataaatacaaagattcaacagttttcttgtaagttgtgtttttggttaaagaagaagatgatgatgatgatgaggggaagaataaatgaagagagtgaaaaaggaggagagtcaacgatatgcgtttctctctctatatctttaggtatgtgttgatagtgcatcagtcaaatcgaccaccactcataggcttacacgtgtgatcatttgtcaagcgttttgacactcctcagcgtcaatgattttaaatttggagcaagtggagctcgaattatatatatatattcgttattattattcgggaaaaatctagatattttatatttttgaggctgattagatgctaaaaatataaaaatcaaatttttaattaaagaaagatctaaaaggaggaaggtctctctcttctctctatagtatttttcagagagagacttttctgatgtaagtttagaatcgccgtccgggtttcttccggcttccgtcgtctgggttttttctggctattgtctcccgttgatcgggatttagatttccttttgggcaatttcgaattcggtttcttcggatttgtttttgttttgtagctttaaaatcttgatgatgaaacatgatgacaggcagaatcttcagtttcgaagaggtgttctctttgcatgatttagtttctttctgctttgattggcttcaccgttgggttctgttttttttggctccaacagttttccggcgatgtgtgcgttctcgacaattaggttcgtttggatctactgtgtttaagacagtttcaatttctccacgactaaggttaggtcaaagctcgtttcctatgcaattaagatatgcctttgctgttcttgcaagagatttaattgttagacaagtttgaactactcagttttctctaatttcttttacccatttttgccgaa

SEQ ID NO: 156269 - DNA, 247 bp, Arabidopsis thaliana landsberg
tttttcttatttggtttgtttgcaggcattgccaaggagttttcttaatgttggagatccgccaaaaactgcacttcttagtgcaccaacctaagagcaatgaagatgattccatattttgatgatagagtttcttagcatatcttacttatctactatgtattatgtggcaaaacaaatgttataaaataaacatttatatttatatgccattagaaaatctttgaaacagatgacaaaaaaaaaa

SEQ ID NO: 156270 - DNA, 168 bp, Arabidopsis thaliana landsberg
cattgagcatatcacccagaagtttcgaaaagagattcatccatggacagagctgctttcccacatacagaggatctttcccagaaagcaccgaagatgatgaaataattgagacctgggtgacctaagattgacgcatcgatttcccacttttcccttctcttattt

SEQ ID NO: 156271 - DNA, 91 bp, Arabidopsis thaliana landsberg
ttcttttttcatttttcctctatatattcatatactcttttgtatagttacaccatgcactctacttaacatggactcctgcaaactctca

SEQ ID NO: 156272 - DNA, 211 bp, Arabidopsis thaliana landsberg
caggggacttattgttctgctacatggattaaacgagcataggtttgaacctagttatgcaccatttgagtttattctaatttccttggccttaggaatcttaacattggtttatttttttgcaaaattttgacagtggcaggtatagtgattttgcaaagcagcttaatgctaatgggttcaaggtctatggaattgactggatcggtaa

SEQ ID NO: 156273 - DNA, 68 bp, Arabidopsis thaliana landsberg
gttgaagagctttgacaacgatactcatattcggcctaaaatctgcttcatattgcacacacaacgca

SEQ ID NO: 156274 - DNA, 156 bp, Arabidopsis thaliana landsberg
aagaaaaacaaatgtatgactcaatgtgggatagaaacagcgatttgaaaagggaacataagataaatacttagagatcaaccgaggagagaaaagccctgtccaattagggcagtggcaagaatctcattggcagcttcagaaggatgtacactg

SEQ ID NO: 156275 - DNA, 489 bp, Arabidopsis thaliana landsberg
agcaaaagtatgcttatttatttaacattaaagcaaaagcatcaaccatcatcaaaatccaacaagatagtgaaagatccaaccgccacttgcaactacactacacaactctgaaatacaaaaacttgcaaaacacagcccaaaacagaaactaacacacattgcttaggtgggaagacagttttttgtacaaaagaaaaacattccccgtcactttatccactctgataaagtacacaaaaacaaaataaaaaaaacaaagtaaggtggcggaagatcaggtcaccatatttacatcacccgcatgtcacactccatcggaccatccctaacggtgctgactccttgagtcaccgctgtacaacctgcaaacaccccacgtgcggtcaattagtgaaccaacaactcgtgatctgaaccatccgatcaacaatctcaaatctcaatactcagaagaaaaaaacaacggctgtgattagcactctaaaa

SEQ ID NO: 156276 - DNA, 216 bp, Arabidopsis thaliana landsberg
ggaatttgtagtcatttttaataggaaaataagacatagttatctacaatataaagcctattcggtataataacagagtagaatctaacaaccccaaagctttcatagattgggttttgtagggatatttcagtttttactggaaggatcatgaagaacatcaacaaaggcttcttcctctgcatgcttttactcctctggtgttttaaacataaa

SEQ ID NO: 156277 - DNA, 123 bp, Arabidopsis thaliana landsberg
tgcatctcagagcacttgcgtaaccaatttctcattgtagaattgctccgctgctacaggccatgttaccattggttgccctgcagccactccttccagaagcgagttccagccgcaatgggt

SEQ ID NO: 156278 - DNA, 257 bp, Arabidopsis thaliana landsberg
caattaccttttccgactccagaacctgcacaaaggttaatctgatcatgggatcgccaccggaagcagaggaaccgaaattagtcttattcatcgggtccgttcagtgaatttaggaatcgcagattggagagtcagcaagcaagcgagaaacaggcaggtgtgaaggagaaagaaggaagctaaggaaaaggggatgattaggattaaatggtcagagtcttattccatgaatgaaaccctctgaccaaaagact

SEQ ID NO: 156279 - DNA, 103 bp, Arabidopsis thaliana landsberg
tatcacaagtagtcagcttaggattgctctttaaccgacttgtgggagttggtttagaaatatttgaattcatccggttcagtgtataagcagtaaatattgg

SEQ ID NO: 156280 - DNA, 349 bp, Arabidopsis thaliana landsberg
caccataccaacaccatcacatgtctatgcctccaccaccaccacaccaaggttgataataatcatcgcctcagtttcggaccaattcaactatatgtaaaccctttctttactggcaagtaatcccgaggattttccgttttagattcaatgaaacctaatagggagagagagaaagagaaagagagagggtgagagagagatcacaattaatattctatattgtcttgtctgcagagaatctcttatcttcggtttagagagagagagagcgtataaattaatgccaatgtgtgtctggtaaatataaccgggctgttttgtttgtgttgcggggtctgtgaatcga

SEQ ID NO: 156281 - DNA, 245 bp, Arabidopsis thaliana landsberg
ggcaagaagaaccttagcctctctttcttctttctctctctctgtgttctctgttctgtttcaactttactccctcagtttctgtacaatttccctatctagaagagagataaaaccgagaaggttttggagatagaatcttttgttcttcttttgtccctgcttgctcgatttttgttacgtgtgaagcaataaaaaaacggatatagctaaatcttccatccattcagaggcttctaaatctg

SEQ ID NO: 156282 - DNA, 176 bp, Arabidopsis thaliana landsberg
atctaaaaagcgcgcgctttggtgagccatggcacatagcgcactaaaggactctctgagccatggtggcgcttgtgccatttaaaactcagattggtagtcaattctcaaattatccaatatacaacttctttaacaattaaataccattgaccatgacaacaataacagaaaat

SEQ ID NO: 156283 - DNA, 293 bp, Arabidopsis thaliana landsberg
cacctttcctagtgcaatgggagtgtataatctttggcgttgatatctgttttatagaagcatggcgacacctctagcatcatagcccattgtaggaaaagatagactcctctctgtcgaggattgaacttcatcatggcatgtactttgtgaacttttagtctgcacaaaaaagaaataactctgatcattaccctgtttctggacacagtttggttgaccttttctttcccaagtgaggctgacaagggccagagccatggcacaatagtgatgatatagccacctgcaaa

SEQ ID NO: 156284 - DNA, 677 bp, Arabidopsis thaliana landsberg
tcagaaaatccatatagaccaaaggagctatttttggtatgtatgcattgcctctgttatctatttgcgaaaatctgaagattggtttctctaccgagtgttttatactttgatacttcatctaaagctctaggcttttcttattttccttgtttggattgtttgttttcgctctagggtacgccaaagaggacgctctctgaaaaaagaagaaggtaatcttcgattcaatgcagagagttttatcagacgcatgaaattagggttttagtgccacaattgggtatgttatacagatgaaaattggaaaaggtctggacttttctgaaattcataacgtttgagtcgtttagggaactgttatctaggctgtctaattccagatctagttccttacacattgattccaggaagtattgagcctctatgttttgattctagaggcttctgggtctaattcacagatgtagcaacgttcctgtattatgtctttgtactgttgatatttgcgagaccctcttctctgtgtggtttggttttgttcaaaaagaaaacattcaagtcttcttcttgatataatggttacaactggtgcttactagtatcgttttactttccctttgattcatgattctcttaattacagtggttcgtaacataatctgaacccgaggaca

SEQ ID NO: 156285 - DNA, 206 bp, Arabidopsis thaliana landsberg
aaaatcaaaagtgttacgattcggtatcatcgtctctctcatttgtgattttgtcaaaccctgctctcttttctccaagtgctctcatggtgcttccgctcttccggcgcgctgcgatcgcccggacttcctcgcttctcagagctcgtcttttcgctcctgcctccgaattccattctacgtacgcttattctctctatctagtc

SEQ ID NO: 156286 - DNA, 703 bp, Arabidopsis thaliana landsberg
cttccctcatcgtcgtctctttcttcgccaagtctcttttctcctcgtctctgcctagccgataaattcgccgttctccatcggtaaacgcagctgaggagctagataattctctgatatctgcgttacgccggtgtggaagcaaaatttaggttaatcggatctcaattatggacgaagaggcagcaaaacctagagactccaccgtgaatcagcaacatcaatactattacggaacgtttcaaggcgttgcgaattttcctactcctgctccaccaccgcaatttatgcaaccacagcatccgattactacgtttcctggacatgcttaccaaaatctccaaggttttaaaatctctctatccctcttgttaattttggataattactttgtgatttgtgattatttggtgattggaattgttaggtcatggtggtggtgtgaattatgctcaaggattcccagttgttgttcctggtaatcatttctggaaaaatcttctttcttttctatatcaatttgatcagatactgagggtagatttttgttgatgtgagagtaatgattctggttattgttgttttagattatacagtggttgaggtgagaccaatgatagagcatgaacttccttgttgtggcttgggcatgggctggtttctgtaagttccttgttatacattgtctcgcaatacgaatgcc

SEQ ID NO: 156287 - DNA, 548 bp, Arabidopsis thaliana landsberg
ctctgtctctcaaaccctcagggtaacgattcttcttattagaccaactgttgcttctttcgcatcgtagctctgagattgacccattgatttctcaactctttctcagtaatcagattcgattttgtttagtctcagctcagaacaatggcagctaaacctggagccgcaactccaacgtattcacctaaaatcgtcggaagaagtcggcttcctatattcaaagattccgacctcgattggtctcgtcctgatggccgtggcttccaccaatgccgacccgcatgtaaaaacacctttgattcctctaaattcttaatcgttagggttcttcattgtgaaattacggttggattcatatgactccagttatttgtgagactaaactagatttgaattttgtttcttttgtgaaaaatgcttctttcagtacttcaaactggtgctgtgagttctgcttctggttctgcttatgctgagtttgggaacactaaagttattgtttcagtgtgagtattattagattagaaacttgtatattcagggat

SEQ ID NO: 156288 - DNA, 250 bp, Arabidopsis thaliana landsberg
gaaacgaaactactcaattaccccatcctcggaaattctttatctgattgattttattgtttactctactattgttaactgcatcttgtcatctgttgcttagttcctgcaattctttactgttactcgacctggtactcgaccacccagttgtctggcaatagactgtgcagccgagtatccctgttacattttctgtttgttactcgacctgtcactcgaccacacccagtgctctgcaacgagctgt

SEQ ID NO: 156289 - DNA, 177 bp, Arabidopsis thaliana landsberg
gctttctcgatgacagattcaaagaatccacggatctctctcattctacgggtctggtttccgagttacagaccgagatttcccaattggatcagagattggccggattaaatcgccagctcgagtcaggtctcgctgcttacgcttcgttttccgatcgcgtcggtggtctatttt

SEQ ID NO: 156290 - DNA, 448 bp, Arabidopsis thaliana landsberg
tacaaacacatatcgaaactcgtatatatcaaatccatagagaaggaaacactaatcaaaacaaactgaacgttgaagaatcaagaaaccaaatgctcatataagaaaaactgatccaagaaatcagaagaaaaagaaaaatcgatacaacgtatagagagattgagagcattaaacgaataggagaaacctctgattggtcaagtagcttcagaggacaagatttcgagctctgcccaccaaagaggagaggatcttggagtagctttctcaggagttatgttgataacttgtttcagttgttccgatacatctttcattgaaggtcgttgtctctgttctgttttcagacattctcgtatcacatcgcagatcacttcaagctcttcttctttgaatgtctttaacgatggatctatcatctctcccaagtcgtctttttcaaggt

SEQ ID NO: 156291 - DNA, 136 bp, Arabidopsis thaliana landsberg
tttggaattaaaacaatggacgtttattatacaattgccaaatatgattgtttcgtccatatgaaaaattaagaatttaacttacactttttaattagagagatggatcttcattagctatagttgaaacattgtg

SEQ ID NO: 156292 - DNA, 360 bp, Arabidopsis thaliana landsberg
caaaagtggaggagctcgaaatagggagtaggaactatattagcaataatattgtccgcccttggaatgaatacaaaagagatataagcaaaagagttccaaagcaaagctaaatcatgaattgtttgcaaattgtgtctaagggggttagtaatgacaattgtggaattgttttataaaactatatgctaaatctcttttgtgttgcccctttgatataatagatgagtaatgactgttgttgttttccaatgataatgctccaacgtctgaattgttttagagaacaaattcaggcagaaactaattaaacaactcgatccggaagtatagactcacctaatatttaaaacgggaaag

SEQ ID NO: 156293 - DNA, 598 bp, Arabidopsis thaliana landsberg
gattcacagctagtcttgtctctgaagctgaatccaagcttcactcctctttctcctctcttccctttcactccatgttcttctttttcgccgtcgctccggttttcttcttgctactcccgccgcctctattctccggttaccgtctacgccgcgaagaaactctcccacaagatcagttctgaattcgatgacagaatcaacggcgctctctctcccgacgctgattcccgcttcctcgaccgcgtaagttcttcttaatccctctctctttcattcactgtacctgtgtctctcatagctcattttttaggtctcaattcattggaattagacttggaatcgttttaagctgaaattctgaacgtattgcaaggctactcacattttactacattggctcgaaaattatgtctcaaatttctgagctttagttacgggtcactcacagatggttatatccatctgcgtctaatcatatctgtgtcttcatttcgagtatggcttgtcttgtttgaccagtgtacattattagctggagcactatatggtagtagtctatgtatcaaagaacgaattttgacagtttcatctctca

SEQ ID NO: 156294 - DNA, 197 bp, Arabidopsis thaliana landsberg
aaaaaatgtcgggtcgtggaaagggaggaaaaggtttgggtaaaggaggagccaagcgtcacaggaaggttctgagagacaacatccaaggaatcaccaagccggcgattcggagattggctcgtagaggtggagtcaagcgtattagtggtctcatctacgaagagactcgtggcgttctcaagatctttctcgag

SEQ ID NO: 156295 - DNA, 393 bp, Arabidopsis thaliana landsberg
aaacagagaggcggcgacggagctacggcggcttccaagtcggcgaatgattataataataatgatagtctcttgacggatatgcaggaaccaagcatcgatacagataaactcagctacgagattttctctattcttgagagcaaatttcttttcgggtacgacgacccaaaacccgaacccgcgaattcggttgttgctgggtcgattaagaaccagagaggtaaaatctgtattctgagtatcgatggaggtggaatgagagggatcttacccggtaaggctttggcttatctagaacacgctctgaaatctaaatcgggtgacccgaatgcccgaatcgccgattactttgacgtagccgccgggtccggtataggtgggatttacaca

SEQ ID NO: 156296 - DNA, 230 bp, Arabidopsis thaliana landsberg
attggtcatcatccacaataatcatcattatataaaccgatttatgtcgaatgatttaaagttacatttactctgcatactcgtatgagttgaaacgagacagagaaacacaacacgaggctcaagttttcagatagccacactagtcattacccgaaacagagagtgtgaaagtatgaatcctacatgctactcacccaccgccatgaatgggattcccctgccaacat

SEQ ID NO: 156297 - DNA, 694 bp, Arabidopsis thaliana landsberg
cgccttcagaacggtgtcgctgctgctctcttccctcacaggtcccacctctctctttaccctctcttgagtttgattcaaaatttgatttttcattttcctgtgttgtcggttgcacgatcctggtaaattttgatgcaatgccatcaaaaaaattggctcttgttcaaattttcaaaaatgaatccatatcttttcgtcaaaccaaaagaacttaaaagaaaagagctttatactgtacttatgttatatggtaatgattctggatctgtagctgaatttggtaagttttcattttaatttcataaactttaaaccaaaacattgatatatcattttgtgattattggaacatgaaaattcatttgttcagatattgcccaaaatggaaacgtcttgattgcatcaatcataataagaaccaatctgaattgtggatttgtttggtcaatgatgatgttttcatgttctttagctatcagataatgagtgttatctttatatggtgtcatttgcaggtttttcatagccagttcagttaattgatcgcactattgttggcttagaccttgttgatgaagactcaagttcctagagaaatctccccacaacaaccacattacctgaagacatgatcacaaaccaaacctggatctagggagtgtggtgtacctcttaggccctgccaatcaga

SEQ ID NO: 156298 - DNA, 146 bp, Arabidopsis thaliana landsberg
catatgctgtcgcagactaaggttgcactggtctttttcttgaagctgtttattgcgtcttgccaaattattgcttagttgcagacaatgtcgaaagctaaagatgtttgatgttataaagttccaatattttggggattttctat

SEQ ID NO: 156299 - DNA, 396 bp, Arabidopsis thaliana landsberg
ccgggttagctcaaatctggggcgttgcgtatgggaagatcgttagcggttaccttaaccacaggttttgtccttgtgtgtttggtctttgcggtgcggatatttcagcttgtgacttacaccgttgcatatttccaatgtaaaagcctccaaggcagagacgttgagtcgctcagggatgtggaatatatggcattgtcttccactactctcacggaatgagtgccttgatatttcaagagaagggcatatatgatatttaatctgtggattgtttgtttgtttgagaatgttgaacttcacgatggatttggtaaagtattttgaataatcaaagttttggttacatacatgttttgttaattgttttaagatttggttgaatatatttggttt

SEQ ID NO: 156300 - DNA, 190 bp, Arabidopsis thaliana landsberg
acatgaacattgaccagcaacttctgtatggtctgatatcagatttggattcaacgcatgttctctcttcttcggacatatctggtcttgtcgtggtactttggtttatcattggttctctgggtcgttaactcaatgatctttctctgtctctctggaggacgttgaactatttctccattcacaaaca

SEQ ID NO: 156301 - DNA, 102 bp, Arabidopsis thaliana landsberg
cgaccagagagagagggagagagagagggagagagagagagagagagagagagagagagagagagagagagagagagagagagagagagagagggaatgatt

SEQ ID NO: 156302 - DNA, 891 bp, Arabidopsis thaliana landsberg
ctgctgggtttcatgaggactcgaacttaggtttcacaatagttgagtacatattccttttcattagtccagttttggctcgcatcgtgcctgccttctacataccgacaagattcttcagaatgcttctgaacaagttagcccgtgactttcacaactatcctgctcttggtggattggtccaaactctaatgagttatgtagttggtggagacagctcgaattgggtcggagtcttaggattgcctcactacaacatgaacgacatgccagctgtctccttccgtgtggcgcaacatcttgctcagatcaaacacaccggtaaattcaggatgtatgattatggaagcagatcagctaacatggaggtttatggctctcctgaaccgcttgatctaggggagtcttacaagttcatcgatgtgcctgtggatttagtagcgggaaggaacgacaaggtgatccgttcctctatggtgaagaaacactacaatgtgatgagagatgccgaggccgatgtatcgttaaatgagcctgagtatgctcaccttgatttcacattctctcaccgtgaagagcttttgagatatgtgatgtcgcggcttctgcttgtgaaacggacaccagttcaacagaggcagaccagtcagaaaggtatgaagttgaagaagaagaaaaaggagggtacagtagtgtagtagctgaaaccgatctatggccaatgttcaatgcctcgtagagtttggtgtctttgtattgtgatgttgtgtgtaagcttcatgtgtgtgttctatgccagtatcctatggcttggctataatagtgtacatataccgtaaagattgatcccttgatgaaatgatcttgttgtgagagatgcttttttcagcc

SEQ ID NO: 156303 - DNA, 221 bp, Arabidopsis thaliana landsberg
tgatgatcttgtttaggtgtaagtgtcattttcgtttttatattcaagcacttgaggaactatagttggatatagccacagcatatgacttaattggggtagagaccagaaccaccggcctcttctcaagagctagggagccactaaagaaccgctctgccgtttttgctttgggtgacaggataaaaattataaaggtatgcatcattcagcagttatca

SEQ ID NO: 156304 - DNA, 214 bp, Arabidopsis thaliana landsberg
  unsure (1)..(214): unsure at all n locations
tgtgaatatgagtccagacgtccacgctcaannaggcgtttaatgggcgttggatcctattattccagagatatcagactctaccccaagggattggctgtagagagggtattggctttaacatgttgactcgataatgtctgcttagttagagatcactaatgggaattaggtcagtgtctagctttgcttgaggatttctatcacggaagtg

SEQ ID NO: 156305 - DNA, 760 bp, Arabidopsis thaliana landsberg
ctcggttgtgattcagaagggcgcataggggaaaaacggttctcatttttctcggccaattcacttagggtttcgaaagtctctgtctcatcaaagcttcgaaaaggtagatttatggtttcttactctcctttctctatgatattccaatttcttgcgagcttgctcagtgttcttaccttatatttaccgaaccagtgcctttatattctatcacattcgaagttattggtttctggttacttatattgcttattgttctatgactacgacataattatcccaaagatttgttcttttctccgaatttggattagaaatggatatactcaaattctgaacatgcccagaagaatccttgttttggtcaatgttgggttctaattggttgtgttcgttgtttgctgttgatttgttttcttttcagaaagtgattgcattaagagaaacattgggataaaagatgagctttactcaggctaattgttttcgaccatcctactatcctgcaaggataacacgaccaaattgcatctccagtgtacctattaggtcttcagtacgctttgatcacttcccgcgtgcctcgtttactcttcgagctactgctgcagtgtctactcagttttcgcctcttcttgatcatcgccgtcgtttacctactgggaaatcgaaacaaagttctgctgtgtgcttatttggtgggaaagataaacctgatggtagtgatgaggtcagatgctttttcctcatgttaagt

SEQ ID NO: 156306 - DNA, 504 bp, Arabidopsis thaliana landsberg
gcaacttttgactaaaaaaagcagctcatagcagcggttatgcctttttccgccgcgagttcgagctccgtaagctcaatcgctgaagaaccgccgccaaagaaacagcatgatccatcgccgtcctgttcatcgtatctgttactacttccagacgaaatcattctgaattgcttagcacgcttgccgaaatgttactacccggtgatttcactcgtctccaagacctttaggcgtctcatagcttcaccggagatctacgttgaaaggtcattacttcgccgcaccgagcgtgtcctttatgttgtgcttagatctcacgctacagaaactccccgatggtacactctcaatttcaaaccctttggaaatgattcaaataaccatagattggttccaattccgtcgtttccttcgattccttgctggggaatgtcaattgtcgctattgattctgaaatttacgtccttggtggatgcattgataatgaattggtctccact

SEQ ID NO: 156307 - DNA, 140 bp, Arabidopsis thaliana landsberg
aggcattttctctgcaactgaatagtatcttgagaagcaacatcaatagtaccattgaggaaaccagtgtaccaagaagcagagagctttggagacctcttgcgaccaggatcactgaaattcacatagtacattccata

SEQ ID NO: 156308 - DNA, 560 bp, Arabidopsis thaliana landsberg
gtcgcacacaccacatgctctctctctctctctttcttctcctttctctttgtagctcttctctcttgtgctaagccaaaaatggaagctttactctattgaagacgagatccttctctaatttacaggtacccatcttttatttttaagtaatttccacaaagattttggttcttgcaaatcttgtagatatttggtatttacttagcacaaaaaagttttgtgaaacgaatgataatattaccataaatggtgagacatccatttgcggctgaggttttgctactttactcttttctctctctctatttccatttgtattgtcactcactcacatacaaaaacaacatcataatcagagatatgagtaaaagtgaaagaaaccctaataccaacttactctacaaggttaaaacaaatgttgctctttttcattagtcctatggatctcattcccaaaataaaagatgaaactttagtgggtttggttcatcatctcttatggggtttttgtaaattactgattttggtagatgtgttaggcaaaaagtacagacaaa

SEQ ID NO: 156309 - DNA, 70 bp, Arabidopsis thaliana landsberg
  unsure (1)..(70): unsure at all n locations
gttgctgaaaaaggaatgctgtcgttttggngcagtaggtggagaatgtttgatgtttgtgaattttatg

SEQ ID NO: 156310 - DNA, 2950 bp, Arabidopsis thaliana landsberg
catagcgattttggtttcattgttatctttgagactaacctattgacatttgggttttgagttctaaatcttttgcaggagaatcatgagtaactacagtggcagttcttcaattgatcctgactataacatgggtgagacagagtcgtcgtcttcaaggccagaaagagaacagagagaatatgataacttcaagagaaaagctgagatagctcaagggaagagagcaatgacagagaggtatgagcttatagatgaggatctggaaggcgagtacatgcctgagcatactcgcagagccaccaaacttcttcacaaacctgatgtattgtctgctgaggagtatatcagtttctttaaactgaatgagttctgtagcacaagatatccatgctcgaccacacttgcacaacttggattactggaggatgttcagcacctgtaccagagttgtcatatggacactctgatggcatatccatatgtagcctatgaagaagaaacaatttagttcctctccacactgtaagtggagctttaccaaggtatgacctctgatgatttggaatgcgaaggattgggattcttgcgattctctatgtttggtttcccaagtggaacaggtactaagcccaagtatgacagagaagagttgaaagacatatggatcaccattggcagctctgtaccgctgaattcttctatatcgaagagcaatcagatacgcagtccagtcatcaggtacttccaacgttctatagccaatgtcctctgctccgagagatcacagggactgttaccaattcgaatatggagatcatcactatggctctcaaaggcactctccgccaaactaagaacaatatgtctcttgaaggtgaaatcaatgacacatctctctctatacttcttcagatccacctgtgtggatacaagagctgggctgtcagcaataaccacaagagagcacgatgcgctctgtgcataagtggtgttgtgacaccgattctgatcgcttgtggagtcccaatcacatctgatggacttgagccacgggcaatggatatcgagaatctgcatcattgcgaattcctggagtttgcaatggttggcgatagggaccgtttcaggtttgagcactctacagataagagagccaacatccttctccccagccttgaggttacacgcataatagagggagataacattgattttaggcctgcgcttgggaacctctactatgagaacgctccgccattggatgaggatgatcttatagaagaagctgctgaggatgggatggatgaagtcagagaagtggagtttgacactagcatgtataattttagtgaacatgtacctccaacgagggagagcaagagcttgagtgaagctcacagaaacaacagcaagctgtagaattactgtaagaaacaggacaagctactccccaagtgcctcaagactatcaattttctgatagataagctgagcttcaactcttccactatagctattccacagggacaacctcctcgagacatgccatcgaggagatttgatgagtctgagccaagtcagcacaggcctgagcctagtgagcagagagtctcacaggtccctgctagacattcgtcattcgagtcctggaagtcactcgacccccaggtcgagtagaagacaccaccactctatcacatcactcgacccccaggtcgagtgacttcatctccatcttctgaccaccactcgatcacatcactcgaccacgaggtcgagtgtcttcacctccattaccagaccactactctaccacaccactcaactttgaagtcgagtatcaccatcaccaccactcgactacatactcgattgcaagcttcagagtcttcttcattctgcactcaaccagacactcgagcacaaggaagaaaagaagactccagctattcactcgacctcccactcgaccacatgagtcgagtacagttcataatccgtcccgatacttcgtcgttttaagtattagggtttctggatatttggctataagtagcatgtacttcacattttcgcagacaagtttttatctagttttattccgcataccttgtgttctagaccttttgtaatccggatttctctttatctattcagtattcagtattcagcttttgtttcttgattttcgtttactgttgttcattctgttatcatcttgctgttacactgttgttatcatgttttcaacttgttcaacgtttatgctttctgttatgatgtctgagtagtgaataggtttctgaggatgggttagagtagtgtagaattctcagtatgctaggtgattgagtattgattgatagatcccttctggattagttgttcttaatgcctattgctttctgatcaactggaatttgagcccagacatttccgcgcccaaaaggttttcgataaaatgtctgaaccactaattccagagattcgtgaccctgtaccaaggtattggttgcagggagcgttttggctttaacttgttgattcgtaatgcctgttaggttagctctcgtcaatggtgattgagtctgggactaggttaacttgagggtctctgttgcggtggcacttagatttggttaatgaacttgttgtctagggttaatttattgagcatgtcaatcacctgtaaactgagaaaacgaaactactcaattaccccatcctcgggaattctttatctgattgaatcctttgtttactctactgttgtttactgcatcttgttatctgtcgcttaatttctgcagttctttctggttacttgacctcatactcgaccacctagttgtctagcaacagactgtgcagtcgagtatctgtgtttcattttctgcctgttactcgacctgtcactcgacctcacccagtgtctgcaaagagctgt

SEQ ID NO: 156311 - DNA, 374 bp, Arabidopsis thaliana landsberg
gaagagacgaggagtcacggaggcgaaagaagaggatattgacaaggacagagagggagagagagcccaagataagtaaccatatctccattttctcttcactgttttttctttgcttcttcctcctttttatactacccgtgtgtgctcaattcgtgtaacaatttcttattggagcgtgttattcaagcataagttattttaggattttttttttgtcaatctctaaacacaattgtaaatgtatcctactttcgtatgtcataagtatatatgcaatgaaattcctaacaactaaactgtcttttgttagtagaattttatacaagtattatactattatgtgtgtttgatatgtttacaaaacactttac

SEQ ID NO: 156312 - DNA, 322 bp, Arabidopsis thaliana landsberg
taattttcttctatatatatctaatttcataaattctgtaaatagggtaaaatagaaaattatattaattaaaatagcaaaatcaaagtgttgtgaaacaatataaagcaccactaaacatgtgctataagaaattatattaaagcattggattagtgttataatagaatgatctatcatagcatacgaacaaaatgctaccgtatgtaaggagtctatcataacaggggcataacatagcgtttatagcgtttatgaaaacgctattgataacatataatagctcttctatctcgttaataatgcagatatttcttgtagt

SEQ ID NO: 156313 - DNA, 240 bp, Arabidopsis thaliana landsberg
tcatcacacagctctagccagaatcactcgcagaggtttgatcccttttagcttcactattttgtttaagttgtaacatatatagtaccagtattgacctgtttctctacttgatgcagttctgagaatcggcctagagagagtaagagaagatctggttggtataattgagtgagccacgttctgcatgatgatagtggaagtgttttgcacaacaatgtaatgaatgttgtataattt

SEQ ID NO: 156314 - DNA, 344 bp, Arabidopsis thaliana landsberg
tctttctgatgaagaaattatcttttacaagaccaacaagtatccaatggcctcgtgatattattggaacatctttcgtttcttaaagtcttgtttagttgaaaactctaaaaaaaacatctctacttacttgataccctgattgcattctttacgctattattgatgtgaaattgtttagagtcttgaaggcattcctccagcgacaaccaacgtttccccagtgatgtaagaagaatcatctgatgctaagaaagcagccgcagcagccatgtctcccgttgttcccaacctgataagcagagaggtctcttcaataccttccctatgagtatattcacaag

SEQ ID NO: 156315 - DNA, 71 bp, Arabidopsis thaliana landsberg
ggtgattgaaaatcttttaataggagctgccattgtgtgttgattgggtatcaagtactgcttctaagtga

SEQ ID NO: 156316 - DNA, 389 bp, Arabidopsis thaliana landsberg
gactcagagaggcagagagagagagagagaagagaagtgagtggcgccgtttggttaatcattttgaggagatggatccgacgacgccgttgcttacacacggtggcgaagtagaggaagattatgctccggcgaggagctggaccgatgtgaaacgagtcttatctacagagtcggccaagttgtggatgatagcagctcctgtggggttcaacatcatctgccaatacggagttagctcagtcactaatatctttgtcggtcacatcggcgaagtcgagctctccgccgtctctatttctctttccgtcatcggtaccttctccttcggtttcttggtattactctctttcactctctagcttcattttttttttactgttgtaata

SEQ ID NO: 156317 - DNA, 532 bp, Arabidopsis thaliana landsberg
tattttgaagactttgcgtatggacatttcttcagctgtgctcacgacgtgttgaaggcgtgtaatgcttacagaaacggagctacaccgggatatctggtgaagggggctccagatgtggaagagaatagcgcgggcatgagctctctgaagtttaggacagatgtggctacctttgtggagacagtgctgttgaaagagtttattcttctaggtgtccttggtctcgaaccggaagaagaagaaaaaacacctgagactataatccttgcagagagtcccaaatgtaccagatcaaagtccaagagagacagagtttcttctagttgatctccattgctcccttttttttgtccttaatttttcttaatttctgaagaaaccggtgacttaattagtttctcccttcttacaatcatggatcctctttttttctcttaactatgacataaatcttaaaagactattgagaactgagaagtcactctcatatgtacagttccctttatcagtcagatttattatagcctca

SEQ ID NO: 156318 - DNA, 155 bp, Arabidopsis thaliana landsberg
ggaataagttgattgaggatggtgaaccgctagcagcaagggaagaaagagtatctgaatgtgacgaggaggggaaggtggaaatggtgggcgaaggggtagttaaaaaaagcttaaaggaagcatgggtgaatctgacttcatttgtgaagagg

SEQ ID NO: 156319 - DNA, 394 bp, Arabidopsis thaliana landsberg
gtactgtgagatggctaggaaccgcaagcagagatgagctaatgacccgacttagctcagtggtcagtttggctagagagcaagagccattagaagagccgttgctggctactgaaccggtggagaacatagaggaagaagatgatggtaagactaacacggtcgagtcaagggttaatgaaccgacacaagagctagtggtgagtccgatcctttcgcctataaggcttccacaagttccatcattctcagagtttgttaaccggagaaaaatgaaacaaaacacattgatagataaatcttctgaaggttttgatgacaagaaaccggcaaagataatgaagcttcaataaataaaaatgtgctaaaccctcacgatttttgttcactagcc

SEQ ID NO: 156320 - DNA, 234 bp, Arabidopsis thaliana landsberg
taatgaactaaccatcatccaagaagtgattctccttaaccgcaccatgtcctgaagtttccatcatgagatgagtctcgatgccgtctttgttcagctctactcccttgtcaatcacgtttctataccctactctatacaaacaatgcctccctcctcgctccgttataaacctagttagccccatactcgttcttgcgtcagtcactactgtacttcctatacttaaaaaca

SEQ ID NO: 156321 - DNA, 496 bp, Arabidopsis thaliana landsberg
aggcagagaatcaaagatacttttcttgaacaagaccagtactaaatcgttttaaaaaggtactcaagtttcaactattacacttgctactgcttccttcactatcaaactacgaatcttaaagataaaacatgcgactaagcacacgcatgagatcaatcccaaaaggtaaacgtcactgggaaatttaagaacaaatccagagagcctatcgactcaatttatatagacagtgtcactatgtcttgggggtctatcaggaaccgtacctggtttgaatctggacgcttcatgtctcgccagctcaggaggcaccgcactgttgctctgaacaagcatctgcttcagatcatagaagacttcggtatcatgaagtgtcaagaacgaagtcgcaacaccacttttcccagcacgtcctgtacgtccgatacgatgtgtgtacatctctatatgtttaggcatgtcgtagtttatgacatgagccacatccggaata

SEQ ID NO: 156322 - DNA, 350 bp, Arabidopsis thaliana landsberg
ggaaacacagtccagatggttgtaccgtagcttcagcagcaggagatgtgtttctgaggttctggaatgtttttggagtgccggagaccgccaaaaaagctgctccaaaagcagtttccgagccattttctcacgtgaatcgtattcgttgaagctgtgaagactgacggacaaggaaacccatgatacagatgcaaaatattcaattttttttttcggattcattcttcatgaattgtagtgacaagaaaagtgcatattgtacaattatatatatgtaaatgatatatattgttgagtcaaacttatttgcttgcatttgaatagaaagaaagatcttgattatatat

SEQ ID NO: 156323 - DNA, 667 bp, Arabidopsis thaliana landsberg
cacaaacacaaagcaacaacaaacaccacaaaagcaaaagaagaaacaaacgcaagagttctcaagcaagctcaaacatggcactaatgaagaagagtctctctgctgctcttctctcatcaccacttctgatcatatgtcttatcgcattgctcgctgatccgttttcagtcggtgctcgccggttattggaggatcctaaaccggagataccaaaattgcctgagctacctaaattcgaagttcccaagttgccggagttccctaaaccagagttgcccaagttacccgaatttccaaagcctgagttgccaaagatcccggagattccaaagccagagttaccaaaggtaccggagattccaaagcctgaggaaactaaactgccagatattcccaagcttgaattgcccaagtttccggaaattccaaaacctgagctcccaaagatgccagagattccaaaacctgagttaccaaaggtaccggagattcagaagcccgagttaccaaaaatgccggagattccaaagcctgaattaccaaagtttccagagattccaaagcctgatttgccaaagtttccagagaattcaaagcctgaggtgcctaagctaatggagactgaaaagcctgaggctcctaaggtgccagagattccaaagcc

SEQ ID NO: 156324 - DNA, 134 bp, Arabidopsis thaliana landsberg
gaatgacattgacccatcagtctatgccaacttctattgggtgtcttctcagtactttaagttccgtcaagaattttctgatttcgggaaagggctctgctttatcttgcatacacgtctgtggaggacctttc

SEQ ID NO: 156325 - DNA, 669 bp, Arabidopsis thaliana landsberg
tttctctcaacatacggagctttcagttttgttcatggaacacttaatatccattctcaatcgtagttctttagttaaaagtgattcacataagggagagaatactagctcttcttctgaaacacatgtagaagatgatattcttcaagctgccatttttgctctcactgctttttttcggtagctttcataaaccatcaattttacttgagaatagatgatgcatttttgatgactaatatacttaattaaccaggggtggcggaaaaattggaaagaaagctgttgagacaagctactcttctgtcgttggggcacttactcttcattgggtagctgtcatggacttgcaagttctggtcagcaagacccattacggtagtcatcgacttctagagaactgtaggcagatatcgattgctactcttattttagtaaagcctttgtaatttgtttccctcttggcaggagtacttctaaattcatttcaggctttctgtgagtgtgttggtgatctggagatgggcaaggtaccttttaactttaacattaaattggttctgtttagtttctagtatgatgaactgatactctgtctttgcttagattttggctcgtaatggggagcaaatagaaaaagaaaaatgggttggtctaattggcgatatt

SEQ ID NO: 156326 - DNA, 159 bp, Arabidopsis thaliana landsberg
cgtcctgcgcatatgatagaggctattcctcccggaacaaaagggtcaaaaccctccacgccccacgccgggtttacgggttgtacctttccggttagtgccataagggtcggatacccatatttccaggaccatataatcctgttactgaaatgcgcc

SEQ ID NO: 156327 - DNA, 107 bp, Arabidopsis thaliana landsberg
cctctgactggaaaaagcttcctcagatcgtttcatcgtccaagcggaagaagcgtctccttcaatcaccgtggacacctccgagactgtctccgattgaatggtat

SEQ ID NO: 156328 - DNA, 243 bp, Arabidopsis thaliana landsberg
ggaattgaactgaactcacacattattcagcatatataagtaggcgtaaaaacctgcttatcaatttggagccgttgccgattcattgttgcattgttacgttgaagataccagaaacttttaagatcaagttcttttacatttttcaagttactaactcatattttcgtctgcttgtttttgtggtataggtactaatctttgtgcatgcaaactcgatccaaaggttctgcacacctatta

SEQ ID NO: 156329 - DNA, 687 bp, Arabidopsis thaliana landsberg
tgttgcaaatgcaaacgaaattaaacataggcactgtcttcagttagaaacttgaaaagggtcacttcttattattaatttctgtgggtaactgatacaaacaaacttatctctaggaaactggagaaactacatttgataccaatacaacaaaaataaatcattttttgtccgtataaatagtaaccgaaaactatatcaaaaccgtaacaaaatgtggtttctgtctcttttcactgtgtcttatctctctgctcactcttccatgaattcttagctgcatctgctgaaatagtcgtgcctccattaccatcgctgctgccatcttctccgggctttggtttggagaagaacgggtcccacacatggccccctgcttcccgttggccttcctccagcaacgcatacttccagctgttctcctccacgaagtagtcatactcggttcggccctcgatcatgttcttccttaaccgagtcaccttgtctatcacagcctgtaccgagacatcaaatgcatctttctgcgtctccagttctgatctcgggtctgcgtagatcagccttgggatgaggttgatgacattctctctcattatcttgacctgctcggctggaatctggaggagtcgctcctcgatgcttatgtttctcttccgaacatcatcctcggggatgaataccgag

SEQ ID NO: 156330 - DNA, 202 bp, Arabidopsis thaliana landsberg
atccccttattattaaaagtgaagtacaaattaaaattttgtctaatttggcctcaattttgatttcaattttggattttgttatttgctattcaaaatcattaaagataatttggtcttaacaatcttctaaactttatatgatctgattgaatctaaaccgttcaataaaattaattcccttcaatctaaaccgttcaac

SEQ ID NO: 156331 - DNA, 513 bp, Arabidopsis thaliana landsberg
  unsure (1)..(513): unsure at all n locations
ggcctaaagaaaatgaatggatgatcgacccaaccgcaataggtgacatatatggaccagaggtatttatagctctcactctttctcagcgactaaagaacatctttggttgctctattctctgtttcggtttccttttacagggtctggattttgtggtagacggaggtatannnnnnnnnnnnnnnnnnnnnnnnnnnnnnatgacaggaccatatcccaaggtcataagggaagggaaggtaatatattatctaaacattctgtgcttcatccatccaaggaccttaacttgaccgtgtggttggtttgtatagggacctatattgccgtggatggtggttgaggacgacgagtcttccctgcgccaagatcttatggcgtctggcacttaaaacagagacagacacagattaggtctttgtttgacatctacacacaaagacaccttgtagctggagaatatgaataatgtgaatacaattattacaaatgcgaattcaaaatccatac

SEQ ID NO: 156332 - DNA, 393 bp, Arabidopsis thaliana landsberg
attgcaaaaggttatacgactgatgcaacgtcagatcattcgatattgcatcatggcctgaaagtggttttttccaaaggttgcaatgtcgcagtaagtacttcattgttccactattttttcatgtataagaaagaaaaataataaagcctaaagcaaagaagtacaaaacatgtttcacagttgaaaactaaaagtctacatgttcatttgttaagttttataaagaaaactgtagtgcactgcttttctctctttgctttttgtaaattggttgataagatccgaaaaatggacccaatattgtaatgtaaccatcaagaagtgaaagtgaaagtgaaagcaacagtttacccacaccaaggacatatgttctatcatttcatagtctac

SEQ ID NO: 156333 - DNA, 318 bp, Arabidopsis thaliana landsberg
aacttctctctcttatctcgtctacttgatctctctactctctttcctctctagctacttctctcccttacgtctccaaggagatagattgacaaatctctgtccacaaaggaaaaaagctcctctgcatacgtattctctcttctatgtccttcatttatatgacttgaataacaagctaaggatgaggcagaatctgaaacaagagtcacagatcaaaagtagactaatctaagaagctatttccttatgtcttccgggttaaaaaaatcttggggaatttgtcttaagagatcgaaccctaacttatctatctta

SEQ ID NO: 156334 - DNA, 503 bp, Arabidopsis thaliana landsberg
  unsure (1)..(503): unsure at all n locations
taatctaagtttaatctctttgtctgagagaacttggaactgaagattattcgattgtggcaggttattaattgtgttaatagaccaggcgattttgtgggatattatggtcggttgttttaaagagagattacttctttcttaatgtattgatccgtattaggtaagaacatgtctctaatcccctaattattactggtggtctacctcttctagttgcgtattaattagttttattagactctttgtaacatttaattactcttacaatatattaagagactaattgtgttttcttactttgtgattataggaacgttgtgagagcttatgttctgatgaacttatatcttcctcagatgccttttacctcaaggtactaattttgtttcttaatctcttgtttactcttgattggttttgaacttaaatatgaggttaatttagggtttgtcttgtttatagacaagaaagccttataccatcactaaacaaagagagan

SEQ ID NO: 156335 - DNA, 717 bp, Arabidopsis thaliana landsberg
atcggagcttcagagagatccaaagagagagattgaggatgtctcacagtcacgggaacgcttcgtcggtgaacgatccacggcagccttcggcggcaaagccttacattccacggcctgtagcgccggaggatcttcccgttgactactccggattcatcgccgttatcctcggcgtctccggcgttatgttcagggtaaattttcatttctcctcttctgatcgttgctctgttagaaatcaattcagtcgtagaaactagtactccggttggtgacttagatcgtcggattttataagttgaactcaccgatttagcaacatcaatctctagctagttcgtgatgttttgagactggatctttccaatactcgctagtgattttgaatgttgaattgatttaaagcttacttccccaaataggcagattcatgactgtgtgattgcatcatattataagactagagaaaatgttagatcttgttgaaatttgagctcgagagattgagatagtcagtgtgaaagtggattaaaagatcatcatatgtggagtgagaaattcatcctctttatttatgtggcttgtgtatctctcagtacaagatatgctcgtggcttgcaattatattctgtgcacaatctctggccaacatgaggaacttgcaaaatccttaaagcagatgccatggctatgaaaatgtaatattcgctcatt

SEQ ID NO: 156336 - DNA, 402 bp, Arabidopsis thaliana landsberg
tttcaaaataatatgtatgaaattgaatataaatattcaaattataacccgttacttagtagaaagttttctaaaatctatttttgacctgttgtaatattttttcatgtattgaacagtttatattcgtttttaaaaatataaattatggcatatgcgaaaaaactctaattattttttttataatgatgatattatttttcggcaaaaatagaatcatataaagatgagaagtgaactataataattaataaaaaattaatatgataatttagatatcaaatctaatttgttgattttaattggttacttttttggaaattaataatgtatttcgtttttctaattaaattaaattaattaaaatttaaatatcaaatcttatatgttgattttgattgg

SEQ ID NO: 156337 - DNA, 245 bp, Arabidopsis thaliana landsberg
aataatggttacatgaacttagtggacataattgagtgaaaccgcctgagagtatcccagaagacagaagaatctttgtcggccccttcatgtgaagccaatggttctggatactctttaatcttcgccggcgaagtcgccatcatttctaccgtcgcttgagacggtgtcgattcgttgtccgactgacatcgctaaagagagacttttagtagagacagatatcttttttttgttggggaggt

SEQ ID NO: 156338 - DNA, 325 bp, Arabidopsis thaliana landsberg
tggttgctgattttaaaacagtcgaagagggaaacacagagttaaccgggacagtgagctaactagaagaacatgtagtgtttttggtttggttttttaaggatcaatataaaccgtccgattgtttcggattgctttgattttattacaagcgagatggcttcttcttctattgtttcgttgtatggtgtaatgttgggttttttcttcacttttttttttttggttttgtgttgtgtttatgatatgttttgcaatttgtaatcattggcaaaaatgataggtttgattttatagtgatataagaaaaccgggatacaaaaag

SEQ ID NO: 156339 - DNA, 220 bp, Arabidopsis thaliana landsberg
  unsure (1)..(220): unsure at all n locations
ataattccaagacgaaaaaaagactattcccaggtcaggcttaggtgtatgggaccatgcaatgtcgcattaattaaattatagcatatgatagtcgaanatttagataactttgtataattaattatatgcacatgcatgtacgtgactttgtagtttttgttacatttattaaatttttgggatgtgcaagtacaattatttactattgattagtttt

SEQ ID NO: 156340 - DNA, 206 bp, Arabidopsis thaliana landsberg
tatatggcccagagaaacaatttccataggaggattattacggacttaaaaagaaacaacaagggaaacagtgattacaacacaagattttaaagatgctgacaaacaaacaaacaaaaatctcacgggaagtggaaggtgaacgaataggagaggagagaaatggccataagagtcgtatgagacataacaaattagattaagct

SEQ ID NO: 156341 - DNA, 424 bp, Arabidopsis thaliana landsberg
gatcataagaacataacttttttactgcgatgaagaatcataatattcgacaaaaaagcataacagagatctcgagttcgagttctatctctgatatagacctaaatcccaaagcataagcattgacatctggttaaccaaaacaaactaccaacgttcatatgatgaaggtctgcctccaggacggctaggacggtcataaggacctggtctgcttctgtagggtcttccctcatcgcgtatcggtcccatatctccatatctgtcacttgtatcccttgcgtatctgtccctgtcatagcttctctctcgcccgcgatattcattctcaagatgatgttcaggcattccatacctatcactcacaaaacggtctcctgggggtgcgtatctacattggtaatacaatcaaagggcatgactt

SEQ ID NO: 156342 - DNA, 298 bp, Arabidopsis thaliana landsberg
tcaatcccatttggttccagggatcctaccaaatggctgagttgaaatttctcgcttcatcaaatactgccaagaggtacattgttccattctctattaggagctcattagagtttagctacaaatgacagatttggttttttgtctaataaccgtgtctcgtttgttattaggttgctcaaggattttgtagagaaacatgggaagggtttggaagttgtatatattgtgtccggattgctaaagaacggaccttccgattaccacgcaaggcttgcttctagtaccgagcttccag

SEQ ID NO: 156343 - DNA, 127 bp, Arabidopsis thaliana landsberg
tcaagtttcacagagtcaaatgttataagaacaaagtttggtcctctcttttggtcttcttagtatactttaagcccgcatgtgtttcccatgcaaggcactcatatagttactagtatatcttact

SEQ ID NO: 156344 - DNA, 359 bp, Arabidopsis thaliana landsberg
ttggtaatggctagttagttagaaataaacaagaagattagtagtattaagtatcaataatacaaccatgttttaagattacacgagattaaacgttacaagttgtaacttacaaccaaaccatgtaaaatactttaatagctgcgggctgctacaaaatgttctcacagccacttcagctactcactttctctttctgcctcatttccccctgtatcactcacaattaaaacaccaaacccaaaaaaaaaaacattaaaaaagtgaaaacacacacaaaagtcaaagatactttcccctgatttttctctcctttccatatataaaacttagtaaaaaaaaaaggaggaggaatagcg

SEQ ID NO: 156345 - DNA, 216 bp, Arabidopsis thaliana landsberg
tcccaaaaatttaaaattaatttttgaaccttaattttaggttcacaaaagaaaaggagtggggagggtgtgcaaataaaaaaaagtgctagatggaatgtgacacaaatctagataaggatgatgagtcattgaagtgggacctataaaataaagtattctagcctcgagcttcgtgaaattatcacaaggtaacaaattggtaattattgaaat

SEQ ID NO: 156346 - DNA, 3525 bp, Arabidopsis thaliana landsberg
ttattttgcatacttaggcatctaggatcatcttgcattcgcattgcatgttttggtgtgttttcaggtgcaaaaagagcttaaaaggagtctactcgatccattcactcgatccaggcagctacagaagaggcatcattctactcgacctctttactcgatccaaggtgctacaagggaggatgcagtttactcgaccctcctactcgatcaaggcaactgtagatgaagcatcagattgatctactcacccctcccactcaatccactactcgaaccatttactcgaccaagggtgaccatctctacaagacttcttgagctatcaaagcgtcttcgaatcctcctcatttcccactcaaccagacatctaagcataccgatagaagaggaagaagcatctactcgaccaattgattactcggagcatagacacaaaggcgcagactttgcagcaccctccttactcgatcctcaagatcgagcattcgcccaaaccgcctcaagtcttttgtcttctagtgaatctaggatttcaacattttactataaatagatcactttggggtttgtccaaaggatcaagcttttatcctttagtttttctttgtgtttatgaatcttcaaaacttaattactcttaatctatttcgtttttgcatttagttgtttaagtaaatttgtttagcttgtttagatctgcattttggtatgatttcagtaatttctgggtttgtgttcttgagaatgttgcttgagtaatgattagggttcttgaggctagattagattagggtaatctctaggttagttaagtggttaagattaggttagaaccttctggatttgcttggctcctatgcggttttcgctggctaatgtggagattcgatcataggtatcaagcgtccaaaagacgttaaaatggatgtctgatctacgaattctagagatttgtagattctagcccaagagattggatgtttagactgtttattgactttggtagattgttgcttaaaccctgctctgttatgtttcatcaacgagagttaagattaggaagtcgtcgagttatgggggtctctgtcacgagaattgattgacccggtttttgaatctatcgtctagggtatctgcctttcgcctgttagccacctgatgaaccctagagttacccttatcaatgaatccatccttaggacttctattcttcttagatttattcgcatccaccccctgattgcacttttatttacctgttatttcattcacctgttgattgcatttttagttattaaatttgtcacctgttggttctactcgacccaatgatctagtagggctcttcagttctcgtttttgttgtttgcatcctgacctaggattgttactagaaaccaaccatcattataatctggcttgacttagttgcttttgtacacatattgattgctagcaataacagtggactggattgacacccctatagctacatcgacatgttagtgtttaaggggaattgaactgaacacacaacacttcagcacataagtaggccttaaaacctacttatcaatttggcaccgttgacaattcattgttgcattgttacattcaagatatcagaaaaagttaagatcaagttcttttacatttatcaagttactgactcatcttttcgtctgcttgtttttatggtataggtactaatctttgtgcatgcaaagtcgatccaaaggttctgcacacctactataattcagagacagaatagattagaatagctcgtgagttacaagaaaccaaagcaaaggcatcctgtgatcagcaaagaccagctgctatggatcaacagaacagaccagtgtatgttcaagacccacctaatgttgatcaaccaagaaacattggtgctggtgatgtcccaaggaatcatcaccaaagacaagggataatgccttcaccagttcagaacaacaactttgagatcaagaatggtctcatctcaatgatccaaggaaacaagtttcatggtctacctatggaagatcccctggaccatcttgacagctttgataggctctgtggccttaccaagatcaatggtgtcactgaagatatgtttaagctcagactatttcccttctctttgggagacaaggcacaccatttggagaacactctgcccccagactccatcaactcatgggacgattgtaagaaagcttttcttgccaagttcttctctaatgcttgcacagctagattgagaaacgagatctcagacttcacagagaaaaataatgaaactttctgtgaagcttgggagaggtttaaaagctacaccactcagtgcccccatcacggtttcaagaaggcttcattattgagcacactctacagaggagctttaccaaagatcagaatgctacttgacattgcgtccaatggaaactttcctgaacaaggatgaagcagaaggatgggagtttcattatggtttttagagtctttctagtctttttcgtacgttttgagtcatttcacatacactcacacatctgggaactatggagcacaataaggaattttggaagcttttcagcaataaagatcttgaaggacgtttttcagaagctggtgtcgatcgacaccagacctatgtcgatctacactcttatcgttgccaagagaatattcgttttccaccaagcctttgagaagccctgaagtcttccttatttgcaaaataatccctgcacgtttttaggactatatacctaattgtttggtcattgttagacccagtttttgttcttgagcttttgttacactttagagaaaagaatccaatccctaaagagaggattctgaactcctttgctattattcttaattcatcaatgaaaactattcagattatggtttgtatttctattatcatgtctaagtaatcaccatgttgggtctagagagtctcaatagggatttagatggattagtagatcgaaaaccccttaggattattcatagtgttcttcatcttaattattcttattgttagttttagattgatcacctaaaacttgatattagataataggtatgcccgccataggtacttgttattagaactatgatagatgagcctagatatttaaaaaagaacatgtaggttcatagaaggactatgatttagatactaggtgaacttatcaagcttataaacaatgcatgctttagcatatgatttttcggcttctctggttatctagctttaagtatagagagtttcgcggaacgccactggctactctagaatcatagtttgagtttgagaatggtgcgttaacaatcctaatattagctagatctacgatttatctatctcccaagacaattccttagacccgatgctttaatcacttgaatctacaaatcgtttacttgcttatttatcttttacattcaattacttcatctagcttattaaataacatcataagtctattgtgtgaacat

SEQ ID NO: 156347 - DNA, 108 bp, Arabidopsis thaliana landsberg; identical to SEQ ID NO: 74066

SEQ ID NO: 156348 - DNA, 305 bp, Arabidopsis thaliana landsberg
  unsure (1)..(305): unsure at all n locations
ggcatttctcttgtagcgacaggaattgtgccagagctgcaacagcaatggcgacggaatcaatttttctcaagcctgtatctttcgcatggtttacgaaaaacccattgtatcaatttcataaaagaagacagctttcctatcgaattcgtcgttttcgattcggtgtaatttgctccaagtcatctgattatcaaggtaaccgccaattntcgactcttgtgataaaattcggaactttcaattctttagctgtctcaattgggtggtgatggttctgaatgatcatcggagtttatgtcaaa

SEQ ID NO: 156349 - DNA, 342 bp, Arabidopsis thaliana landsberg
gagatttgatattttattatgatgatgatcttgaatcttgatttgacactttgaacttagagttgcaacaaattacataataagaaccaataccatgagcatcatatatatggctctttttattacatcgaaatcgttgtcttcactgagacagggattgtaacatcatgaacaccatcagtccatgttaagcttccaaagaagtagccactgttgactttatgactcgttttagccttaaccgagaaagtgagtactctctttgctgcagacttaaacaccagagtggtcgggttcacggtgagagttataccgagaggagactcgatcacggctctatag

SEQ ID NO: 156350 - DNA, 137 bp, Arabidopsis thaliana landsberg
atttcctttcgatattgaagcttacaaaagacaatctcaaattgaagagaaatatatcataaaccggtttagagagcgtcgcaacaaaattgaagaagattatccacgtcgtaacaaaagaaaatacatcaagagag

SEQ ID NO: 156351 - DNA, 224 bp, Arabidopsis thaliana landsberg
gttgaaatatatgccctaaattggaaataaagaacccaaatataatattttaaatttatttctaatttattttggttgaatagatttatataaaattatggtattattattgtccatcaaacttgttttagtgttacttttaggaattactcaaataattatttgagtactatttatgtctaaaaaactttttaatgctatttatatgcaaaaaacttaaaagt

SEQ ID NO: 156352 - DNA, 243 bp, Arabidopsis thaliana landsberg
agtactgtagcttcagatgcaactcctcgaaaacccgtagaaccggcattgagccaatcgtttacattctctgattcatatccttagcgttttcagaaacaaaatggtgggttggaagaggaatttgcagactgttattcgtcaagttggtagaagagtgaagaacagtcacatttctacagcaaattactcttcttctactcggaatttagaatcccctttctcacaaggttgactttttga

SEQ ID NO: 156353 - DNA, 421 bp, Arabidopsis thaliana landsberg
gaaatttctgatatttacttttcctctgagttattatagatcaattatcttataaaatatatatttgttttaattttttttacattaaaattcatcatacttcaaactctataaataaagacttgttttatttgatttggatacaaaaaaatacatctatttttacttattatccatttaaaacataaaaaatgaaaaatgaaataaaaatagtggggtagaagtgttgaattttattaaacaaaccataatagagtataaaatttaagtgggtattgaattattatgtggaagagagaataaatgatgtggaaaaaaaaaaagaatacgtggagggtgttgaatgaaaaaaccattgttgatagcctcatgactgattagaaatcaacatgtcttttatttaagaattaataaaaattag

SEQ ID NO: 156354 - DNA, 334 bp, Arabidopsis thaliana landsberg
ccaaactagattttaacccgtggtacaccgcggagataattcatttttttaaattaatatatataaaaatttataaattattttatagtttaccattgttactaagtaacgtcctgccaaactcgtcccgccaaacccgtccacaaattttttttatttattttattaatgttgattttatttataatatgtttatgaatcattgtcaaaatattttattcgttgcgggacattgaacccacacatttttcgccaattagttaatatatgttcattcttaaaatttcgaatcacaaaatatgacgattttttttttgagattttttaaactcta

SEQ ID NO: 156355 - DNA, 368 bp, Arabidopsis thaliana landsberg
caaaaaagagaaccctgaaagaatttatgtgcgaaagatatggaaattatacatatatatctaaaggactaagataaagatatatgcacaacagaaatttctcttttcacaaccgaaagaatccatcttgcggaatttagtcaaaaggagcctgacatggtggagataaaggttcgatttttctctttttctttttgttctgtaatttcagtggggttttggaggagattaatatgtaacaattttggggttttgtattgatttagggtttacgtggggtttggttattgatcttgtttctttgtttgctcacgttactatatatgcttctgctgtttcgctttgccctcggattgatgaatcatatt

SEQ ID NO: 156356 - DNA, 998 bp, Arabidopsis thaliana landsberg
atagagatgattacaccaacaaactctagagaacctgtccgagatttctacaattccaatctaataatgattcccgacaaaaggaatcgaacacaaatcagttctgtctataggcaatgtaattagccaaagccaacaaaggagcaaccttatcagaatcaaaccctaaaagctgatcacgagcctctctattcaatttctcagcaaactctctcgatttctccaaacccataatcttaggatacgtcaacttatcagcaatcaaatctttcccagcagttttccctaactctttcgacgatttcgtcacatccaagatatcatcaaccacctgaaacaacaaaccaatacatctcgcaaactttcttaacctctcaatctcatcatcacttcctccaccaacaatagctcccaaaacagcagaagcttcaagcaacgccgccgttttatgcaaatggataaactccaaatgctctaaaccgacgtcgtttaaatctaacccttcactactaatatccacgacttgacccgccactaacccttctgttcctatcgctttagccaattctccaacggctcgaaccactctcaccggagaaacaacatcagaactcgtcgccgaagctaaatgctcgaaagcgaaagagagaagcgcgtctccggctaaaactagcgacgtcttcaccaaacactttgtggttggtcggttttccgcggcggagatcgtcgttatccatacaagggagatcgtcgtggatcaacgacattgtgtggatcatttccactgcgcacgccgccggtaacgccacggattcttcgccgcccactaactcacacgctgcgatacagagcacgggtctcactcgtttgcctccggcgagaagcgagtaacgtatcgcttcatggatcttgattggttctcggagcgagacgacggagtcgagagcttcattgacggcattagcttttccgatcatgtataacgtgaaattgaaagg

SEQ ID NO: 156357 - DNA, 265 bp, Arabidopsis thaliana landsberg
ttttttaatctctacaacaacgatcatggagattcgttcctaagaaactggaatctatcatccgttaagagaccgagcagatccgaaccattgacgtgacagtatttcacatcttgaagcggaagatgacttgacaatggcaaccgttgagaaatagtaaaagtcgaaggatcttgcaagatgagctcccgagtggactcgtcacaagatgcaaaaagttgtttcctttccccaccaaagtctataatcgctgttcttggcaaac

SEQ ID NO: 156358 - DNA, 322 bp, Arabidopsis thaliana landsberg
ccttaaattatattcaaagccatcaggagaattctttggttttgattggcacgatccaaagacacacatttgtcaaatcattttcgacgactgttattaataattaattcgttaatgacgcaccgttagtcaactccgcttcgtattaattactcctccgatctctttcttattcttctccggcgacacttcccttgcttctccctcttaagactctctctacgaatctgtaagcttcaaattcttacgccacactccaagattcgcttctgattatggacgtttctgttcttcctcagatctttactttctggattcacac

SEQ ID NO: 156359 - DNA, 303 bp, Arabidopsis thaliana landsberg
gattccatctttctccgtttccggcgataatcttcatcgcttcttcaggttcatgtttttccagattctttgatgccttttatgtatctctgactctccacggtttcttaatatgaattcttcttcgcttcatttctgattcgcgatcgtcaaattctctggtttgtttgaaattcgaatccgtgtttctgatatttcgattcctggatcatttggtatgaataatcagaaaaaatgtttggtgttgcatctgatgcgttgattctgctactatgctatgagaatttgaattgcaatgaatcg

SEQ ID NO: 156360 - DNA, 194 bp, Arabidopsis thaliana landsberg
tcttcttcttcctcttcccctaacattccattccccgtatgggtctcaccacttcctaactcttctctctctcttatctcttcttgttttagctatgaagaagcaatctcaattcagatccagtcacacacttctcttctttcttctctgatcatcaacaacaacgattcgggttctgtaattttactaattgg

SEQ ID NO: 156361 - DNA, 444 bp, Arabidopsis thaliana landsberg
caatcttcttttgtcattaactggcttgaatctttccaggaccggacacagctgatgcaacttctaacgtacgaaacggttgaagaagtagtcaagaagagagttgagatcaaagccagaatttttggtcaagacataacgattaacgacccagaaactgaagctgatccttcctacaaaatacaacctagcttagttgcaaaactctatggagaaaggatcatgcccctcacaaaggaagtccaaattgagtacttgcttagaagactggattaatgttttcaaagaaggaagcataacatttgtattgatcctatttttccgaaaaccataatgttgacataagctgcgcaagctagcaagtcaagttgattttattacagaaggacctaaacaaatgaacttgaatttgagttcactacaatgaatttatacttttgtagc

SEQ ID NO: 156362 - DNA, 362 bp, Arabidopsis thaliana landsberg
atggcccctaaatactacgaagcaattcaataactatctgaagaaacaaggttgagttcaaacttaatattaatagcgcaaaaggtccaaaatatagctcataacaatcccaaaagataagttttaaaacaaaagtgactcattgaaaagctgcaaactaaagcatggtttgttctgaaactggaaaacagagcatagtattaactatcaagcttgttgagcagaaagtctcttcctggcttcctcaatgatggtcaacttaatacctttaccctttggaagggacacccatggctttgttcccttaccgattgtgtacacatttcccaaccttgttgcaaactcatgtcctgttgagtctt

SEQ ID NO: 156363 - DNA, 345 bp, Arabidopsis thaliana landsberg
gaaatttttgactcaaatgaattgatgggtcaaatgagttattggatcaattggtttgatgaataaaataagttgggttgtaatggttaatggtttcaatggtttacccaattaaccattaagttttgtaaaattgaattaaaccaactaaaatctctaaaccaatgtccatttaagttgaaccaacacatctaaaccaatttaataaaatcaatatttttccaaatttcttaaatatacaagcgatgaaattgagaagaagtaaactcgtaatttttccaccaaaaaacataaaaccgtaattttctctccaaaaacgaaaacccgtgattttcccaccaaaaa

SEQ ID NO: 156364 - DNA, 1302 bp, Arabidopsis thaliana landsberg
tacgtgtctaattaaacgtcgtcgtttttgttagataaaaagaagaaatagtaaatatccattagaagaagaagacgaagcaaaggaatctagggtttatgctacattgaagcaaagatggttacgagcagcgatcaaatccaaaatggttctgaagagcaatcaaaaagatcagagatttacacatacgaagcaccatggcagatctacgcaatgaactggagcattcgtcgagacaagaagtatcggctcgcaatcacaagcctcatcgagcaatatccgaatcgcgtcgaaattgttcagcttgatgaatcaaatggtgagattcgttcagatccaaatctctgcttcgaacatccttacccaccaacgaaaaccagtttcatacccgataaagaatgtcaaagacccgatcttttagctacttctagtgattttcttcgtttatggcgaatctctgatgatgaatctcgtgttgagcttaagtcttgtcttagtagtgataagaatagtgagtttagtggtccaatcacttcatttgattggaatgaagctgagcctagacgaattggtacttctagtattgataccacttgtactatttgggatatagagcgtgaagttgttgatacccagcttattgctcatgataaagaggtttatgacattgcttggggtggtgttggtgtctttgcctctgtctcagagaatggctccgttagggtgtttgatcttcgtgataaggaacattcgacgattatctatgagagctccgagcctgatactcctttagtgcgtcttggttggaacaaacaggatcctaggtacatggctactattatcatggacagtgctaaagttgtggtgcttgacattcgttttccggctcttcctgtggttgagcttcaacgacatcaagctagtgtcaatgccattgcttgggctcctcatagctcttgtcacatttgtactgctggagatgattctcaagctttgatttgggatatttcatccatgggacagcatgttgaaggtggtcttgaccctattctagcttacactgctggtgctgagattgagcagcttcagtggtcctcttctcagcctgattgggtcgcaattgctttctctactaagctgcaaattctcagggtttgatcttttcaaagaatttctcatctcttgtcagattagattttactcattttctatcgtattaggggtctcgttacccttgttactatcctcaagatgtaaagactgttctcaatcgaattaatgaatctgtttgatcttgttgct

SEQ ID NO: 156365 - DNA, 268 bp, Arabidopsis thaliana landsberg
aagaatcctattttagtaaaataatttattacataaatggaatgcaatatgataatggtttaaatttacccaaattggtaacgattgcatcaccagcttgaatagataaaagcatttggtaacattcaattattcatagcaaggcggcaaatcatctggtggaggcagaatctgctgatttggctctctaccattcttaacaatgaacacaacattcataccccacgtttgatgtctatccaagtgacagtgcatgaaccaaacccct

SEQ ID NO: 156366 - DNA, 883 bp, Arabidopsis thaliana landsberg
tttagttggtaatcttcatggggttttttattattattatataacaagaacaaggaggcgaaaattgagtcgatgaactctataaaactcataaactacatataatcagcattgcttgatttcgaatccaatgctcaacaaagtcctagctgattccatcactttctctccaccaacgtccaatgcttctttactctgcttctcactttctcgccccaccgagcactggcttgaagtcggaatgttcacctgatcgtctgtcctggttctcattgatgttggagcggctgcagctacgagcattgagcttggaggaccatggcgtttcttaggcaccggcatgtcgtggttgtgtactcctttgtatgtgattattactgcttttgtgttctcgactgctgtctcaatgtgtttacgaactggacatcccgctgaagtgcatcggtagtagttcctgaatgtttgaaacagaacaaatcaatcaccatgcgtattagaagatgtcatatgtggataaagagatgggtcatgcgtttagttttctagaccttggatgaggatttcctttcaccattttctgcccgtatttacgccacctgtatccatcaccacagataccaacatcaccagctgcgtgtactacgaatttgtttttctttccaggtttggagacagaatctgaactctgtgagttatcttttttcagtctgaaaaatagagagaagaaagtctattaatttcatctttcaaagtgaagagtaagcaccgaaatgcaaaattctacaaacttgccttcgttttggctctggttcctccacagcttcgttctcacagtgtcttttccggtcaacgagtgtttgcgactcacagatgtattctttag

SEQ ID NO: 156367 - DNA, 357 bp, Arabidopsis thaliana landsberg
  unsure (1)..(357): unsure at all n locations
tgagtaaccaacctcatgatacaatcatctcacgaagcacacaactcnnnnnnnnnnnnnnnnnnnnnnntaagataaatttatagactgccacaatcatatcgagtatgaccaatttgatcacgaaacagaatcatcaacataactacaagcaatagctttctaaccggcgaagaagctgctattaaactaccggtaagataagtttgtgtcgaaagccccacgagtctacctcttctttccctaatgtactcatcaatcgcttcttctatttgcatccttgaagagaaggaagatacattaattataccgtcttgacctaaatttaacttcctccacaagcatctagccaaaaca

SEQ ID NO: 156368 - DNA, 349 bp, Arabidopsis thaliana landsberg
aaccccatctgtgctaccaggaaatgtgagatcatctttttcattttagataaacagaatacataaagaaacggattcaggtcacctggcaaccaaagtccgacaaaggaccaggcccggtcctatcattcttcacattgccattagagataatatcttcaaccatattcaaatacagaaactcctcatgctgatcaaaaaccatcttaggaagaaacaaaaacttcttcccatcaaattgaagagactgtgacccattgctttcatcagaagattcatcagcagaactctttacacggacaaaagtcgtgaagcaaaaccgaagtccattttcagttactggatacca

SEQ ID NO: 156369 - DNA, 93 bp, Arabidopsis thaliana landsberg
aggtttcttgggtggatgtgtgttttctctagtagtggctctattcgcaatcattcgaacacgaaacattttgcaggaggaaggccagaaaca

SEQ ID NO: 156370 - DNA, 133 bp, Arabidopsis thaliana landsberg
aaaacttcaatctctagttaaaatattaaggccaaacatcaaatgtcatacaaatcatagtttttatacatatgatttcctcgcaaatttatcgatatttccggttcaacatgaaccgttgaggacgggacac

SEQ ID NO: 156371 - DNA, 485 bp, Arabidopsis thaliana landsberg
gtactttggggtttagttgaagtgtgagagttggagagagtgcagcatagtgatgaatcaagatatggtgcgttacagcaggaaagattcaaggggtaacttattcctctcgcggacagttcctcctaaggacgtagtcaaaacaagttctctatcgaaaaccggaatctctagtctgtaggtatatgttgatctcaagtcttgaacaagagaaagctcgctggaagaggaggtttgggggattcaatgtgtggaggaagaacaagggttctttgattctttgtgatggcaagagaaggtgaaaaaatgattctgtaaataaatcctacgttggtagcatgtagcatgtagcatgtaaaatctttttcaatttaaatgtgaatgaataatcacattgtacagtagcagattccgaattctttaaatttgtatccatcaatttcttctgtcaattattaatcaaagtacaaacatcattttactta

SEQ ID NO: 156372 - DNA, 153 bp, Arabidopsis thaliana landsberg
gctcgattttggtttgatctcacttcagcacttgtcatgttgtaacattcaatctctgatatcactgtcttttacatgccattgagctcaaaaaacagcaatggcctttttctgctacgaagatcatatgaaagttaaattttaaacaaatac

SEQ ID NO: 156373 - DNA, 187 bp, Arabidopsis thaliana landsberg
tttgacgtgcaacaacatgttctttatttttctcttccattgaagaatcgtcaaagccatggttaggaaaccgtcgtcgaaggtttattcggtggcagctgctgcgttggtgatcgttatatatgttgttttctgctccgtgtttgatcgtcaattgttacaatcgtcaagtttatatcaaggtatg

SEQ ID NO: 156374 - DNA, 277 bp, Arabidopsis thaliana landsberg
ttttctcaattgaagaaggtgaagcagccaacaagttactgcaactgtttccacgatttttgcttttttcaagattctcgccgtcgggagttttctcggtgagatcatttcgctccgacggaaaattcaagttgcatatctgatcggagattgaaaagtgttggttcacgcagtatcgattcgtttgtttttgatgccagatctgatatattacttcaccgaagattcaggaactctttcttaggttgaattagcttgagtttagcttcgaatttta

SEQ ID NO: 156375 - DNA, 135 bp, Arabidopsis thaliana landsberg
cactcccttgttctaccatggcttcttctgaaacaagaatgaacaaggcttgagttaaagaagaagccatagcaaatggagtgaagttgagagcacttcaagcgagtcttatgcagatgaagtcaagcccatctt

SEQ ID NO: 156376 - DNA, 159 bp, Arabidopsis thaliana landsberg
ccttctctctcttaacccactcttattcttcagagagagaaggagaattccggcgagagctggtttttcgttttatacatagtttccggcttttgacggatctctctttccgcttagtcagattttaataattttcggtttagcgtgagatcatttccg

SEQ ID NO: 156377 - DNA, 214 bp, Arabidopsis thaliana landsberg
aaactttcgaagagaatgcggaagatgatggagcacgaaaaacatttacaggaaaattaatttgttcgagccttctttagggagttctggcccgataatgtataactaggttttattcttttacttcttattgacctgaatgttccaaaagcttctgtatttactgcaaatttagaataactctgttctattgccttatcaatgaagaaaaata

SEQ ID NO: 156378 - DNA, 464 bp, Arabidopsis thaliana landsberg
cgccattgaaatctacgtcatcctttgatctctagctctctccaaaggtctcttctttctcgtcaaacttcatatatggctctgttttgtccgattgtccgatcaattatctgtttcctgaaatcgtttagttgaattccgttaggcaaattagttcaaagttgattcctttttgtgatttgtgttgttgattctatacagatgcatgcgttgcttactttcggaatctggggaagttccaattcaatcgattgaagaaaaaggctgagcctttattggttttggaagaattggttgtggtgggatctatcatctatggatcggaaacgtagaggttgacagagagacgtttctaggtttgattgatctgttcaaataagaacacaatctctttgttaattttggtgttctttgagctctcatgtcaactagtgttcaaggagagacaatggatcttgatttga

SEQ ID NO: 156379 - DNA, 155 bp, Arabidopsis thaliana landsberg
gtggatacaaagtctaatactcttgtgagtttttcaaagaccgggcagtgtcaaaagggtttcaagtgcaaagtctctcatgatttgtacattcaaaggaagggtgagaagattgatatttacagtgatacgcgtgatgaaggtataaaagtgtg

SEQ ID NO: 156380 - DNA, 314 bp, Arabidopsis thaliana landsberg
caaaaagaaagagacacaaagagagagagagatggaggtaatgcgagttcttcacatgaacaaaggaaacggggaaacaagttatgccaagaactccaccgctcaggttgatcattttgatacaaatatgcattatattctcgtgtacacatacatacgagtgaattattgttataacttaaacataatttggttctagaactgtaataataatgacaagtgtatactgattatgtgatcgcagagcaacataatatctctaggcagaagagtaatggacgaggccttgaagaagtttatgatgagcaattcag

SEQ ID NO: 156381 - DNA, 312 bp, Arabidopsis thaliana landsberg
aattactcgtctcttttcaggtgggatgatgatgttgtattcaaaaaccaggcacgtggtgaaatgaaagctcttaagcgcttcatcaatgatacaatcaggaatgacttccacagaaaattcctgcatagatacatgaagtgattgtttgtcaagagtgttattgctacttctttgtatgatgattatgactaaaagcttttattctgtctggaattacgatgtctctgtactcaaacaacaaatgtttttaagctttatatcaaaaacttatgcatttgattttaatgtaatatctcacagattcctgat

SEQ ID NO: 156382 - DNA, 104 bp, Arabidopsis thaliana landsberg
atgtaaaattaacttaagagattaccgcatatataaaaaataatatttttaacaatgtttggtttctaaatatttttgtggatttctgttttttagttaattat

SEQ ID NO: 156383 - DNA, 425 bp, Arabidopsis thaliana landsberg
aaaaaatcaaattgcatttagatgggtttatgaaggaactagtacaacaaaagtcacaaaatacaaacatttatatcaacaatggagcaatgaaatatggcaacatacaaccaacacacaactaacatgcttacaagctcaaaagagtgagagactatttaccagaagcctggaaaacaacctaaacactgtcaccacatgaaaaaggactgcattcaaagaatgagataaatggttaattctaatgtgggcaacccgaaaaggaaagttttagggggttttcaatcttcttctgtcactgagaccgtctcaaatgtggggctgtggtatatccttcgaagaaatccaacactgcggtttcaagattttcagcagagtatttcaagtagttttcgggatgtcttccgctctctatatgtcccctg

SEQ ID NO: 156384 - DNA, 171 bp, Arabidopsis thaliana landsberg
acttgatttgcataatgaatcattaagagggatttgatggatcaataaagcaaatcatttgcaatcgtccaatagacgtttcaagccaggaggtttgtaagtgatacagatttgcagtcccaagtatgataaggtaagagacttgatattacaaccgttgcaaagcaaacc

SEQ ID NO: 156385 - DNA, 113 bp, Arabidopsis thaliana landsberg
gtgtttctattctactacatagtggtttccgtgaaagtcttgatcaactgatacagtcatatgctgaaaggagaggacacactcacgtagactgggatctgcacgctaacctg

SEQ ID NO: 156386 - DNA, 80 bp, Arabidopsis thaliana landsberg
tttttttggttgtttttttgtttttttgttttgttttttttttttttttttttttttttatgttttttttttttttattt

SEQ ID NO: 156387 - DNA, 500 bp, Arabidopsis thaliana landsberg
aactgtgatcggtaacttacagaactcgtcgaatcttcagagctcaatacagaatgggctaaagttttcaaagcgagtcgcataaaacaaattgataaaacaaaaagagagagcaaaaagtcacaatgataatggagctaacaatgcataatctgttctcaagagtctaaagacataactaagcgattcctgacctgcgcagctcagattcaccatgagcaaaatggcatctatctccatatgtacagttccctttagagtacctatcacagatcttggttttgtagttgctcccaggatgtggtttcccttcaggaccaccaatcccttgaggtttcttcactgatccaagcctccctataagctctctcaccatcccactcgctacattgatctgttcaaatgttccttccagctcgataatcttcaagtttgggtctctttcatgatctttaatcgataattttgctcctgtttcacggcatatctgtttggaatgg

SEQ ID NO: 156388 - DNA, 279 bp, Arabidopsis thaliana landsberg; identical to SEQ ID NO: 16841

SEQ ID NO: 156389 - DNA, 405 bp, Arabidopsis thaliana landsberg
gataattaaatcagagattaggactgcgcatatgagtaacccatttgagttcgggtagaacctgttcgggtttgggattaatgggtatatgatttactacccaatagaataattctaaatatttggttctggttcgggtcggatccatttgggtttgagtcagtttggataaaaagtttcaggccctaaaaatacccaaaaaaatagaaacgggtattttgtatgtagatagcgggtctccaaacaaaataacttttaattttgttaagttttaataaatttaattatatttgaatatattttactaaattttgacaaacataacaaataatttttgaatagtttagttgttttggatatttaggtccaaaattaattgacatatttagatttataattataatc

SEQ ID NO: 156390 - DNA, 338 bp, Arabidopsis thaliana landsberg
cataagcaatcatgcaactgatgatagagcagaagaaatgagatgatgtagcaattatttgtgtttagaagaagaggactgaccaatggtggggatggtggtgacaatctcaccaagcttgagcttgtacaaaatggtggtcttaccagcagcatcaagacccaccataaggatgcgcatctccttcttggcgaaaagcctgctgaaaagctttgcaaatgaaagccccattttttgtgatcgtgagatattgcagagaagacatttcactcaagatttagcatgaaaactatacgcaacaagatcaaagtcaaccaaaatatgagcatctcaaaatg

SEQ ID NO: 156391 - DNA, 420 bp, Arabidopsis thaliana landsberg
  unsure (1)..(420): unsure at all n locations
ggcaacgaaacggagagagggaattaggcaaattagaagagagaagtcgtagaccatacaatttgcacacaaactatatctctccactgactccaatcatctccttcctccgctcccatctgcgtctcaatggcttccttcaattcgttccccattcccaaacaggtttgttgtctctccttacatgtacatatcaatcgtatagacacgcgtgcgtccactctcgagctgatttctctgngtgtttttatttttcggatgatagattgttggttctttttcttcgtcgtcctcctttacttctcggccacgtattttagtgcgatcgagtttaacatcgtctatgacctttaccaatagtatgctggtagcccgatgacgctctcttcttctctttcttttgattctctttgaatttaa

SEQ ID NO: 156392 - DNA, 526 bp, Arabidopsis thaliana landsberg
  unsure (1)..(526): unsure at all n locations
tctcttctctgcaaacaaaaatcctggcgttgatagcgattggttaattgtcggtgaatcaacgtttttctgttacacatatcaatcaatcatcatcctcttcatactctcttcttcttcttcatcgtaatcattagcttcaattccgagttttctcttcgtcgccgttgtgctagagttttgtcagatctcgccgggaaattagcaatggcgttttagtctgtttacctgtgaagcttttgcgtaaacgctggattcttctcaaatctctctcacctgatctcttattagattgcgagtatgatttgtttctctccttcattatattcgggttgcttccacgatttcgttgcttgatttaggttttttttttgaatttgatagggatggcgctaaagcgagggctatctggagttaaccggattagaggannnnnnnnnnnnnnnnnnnnnnngcttgtgcttctcatatttttctgtgtttgggcacctctttgcttctttgttggccgaggagtgtacatcga

SEQ ID NO: 156393 - DNA, 437 bp, Arabidopsis thaliana landsberg
gaagtaaatgtggaagacgactcatgtatgtccttcgagttacaagactccaacttgatcttcagtcacaacccaatcaaaaacagagagtgccacagatctggtgaagattcaaattcatttgatgatcagagattcacatcagattgttggaacaagaacaacgatctactaccaacttcaaacattattgaggagatatttggtcaagacgattgggaagataaagatgataataacttgaaggagaagtaaataaaaagttttcttctcctctttcatggattctgcagattttttttttcttaagtgaattagataaagatgcataagtttgaaagtttcatctttaggagttctgtgttggttaaggttgaataagaaaggacttcctgattgatttgactcttgtaaaaatgctattcaaatccatgaac

SEQ ID NO: 156394 - DNA, 109 bp, Arabidopsis thaliana landsberg
tcctttcccttcgtctcccacttctcacttcacactgtgagtctgcgactatctccaagaccaagcttcatactttatttttgcaaattccgtttctaaacgtaagttt

SEQ ID NO: 156395 - DNA, 190 bp, Arabidopsis thaliana landsberg
aaaacttacgcaactctccttgtgctcaaatctgacattataatgacaaaacttttataaagatgtactcattagtcaaagtttccacccactaaaccggtaaggtaagagacaacttgcttgtctagctgtttccagaaaatatgtaaagactaaagactgagagcacattttgcagaggcaggggatt

SEQ ID NO: 156396 - DNA, 472 bp, Arabidopsis thaliana landsberg
gttaaaaagaataacaatttcaaatggtggattcagaaacccttaaacagagcttgtcaatatattcagaaaaggagaacaaaaaaagaacaaaaaaaaaagacaccaaatgcaaaacatgtttgttctccacgccaatcaagtaaaaaaagcctgtttccaatacctcacataacaaatgagaaatattaagcactcttctttaacaccaaaatgaaaactaatagtaagatcatgtctatgtttttcccaaatcagagtataattctcactttgtatgaacaaagaacccaactctattgcacgaagaagatggctggtatttaaaaggtgcacaaactcaggattccggtactggtgctggagctgctgctggaggtttcaggagaggctgcaaagcttttacaactatactcatatttggtctaaactcagattcgtattgcacacataatgctgccaccgctgctag

SEQ ID NO: 156397 - DNA, 78 bp, Arabidopsis thaliana landsberg
tttttttttttttattcttttttttttttttttttttcttttttttttttttttttattttttttttttttttttttt

SEQ ID NO: 156398 - DNA, 130 bp, Arabidopsis thaliana landsberg
cctgttaacttcctctgtggcttctgcttcaagttgactttgacaaactccaccaagatcgtcagctttgtcaaagggaacatcatcgccaagtacagttccagacaagtcatcatgatgcttctttgtt

SEQ ID NO: 156399 - DNA, 419 bp, Arabidopsis thaliana landsberg
agtaggaaaacactctacttaaaaaagccacaggataataataattttgaataaccaaactttaccaaatatcttggaataatgcctcatggccatcccacgtctggaataaaatcccaatttgtcttgccaagacaaacctcactcgataatcagagtcacttagcatcaacagaagtcgctcaatcattgtctgtattaaaacacaaacttaattcactgtacaacaagagactaaataaaataagaattccacaaggaaccaattagaatatttagctgtaaccggctaatgtgaaatttcaaaaagaaaactactagcggtaatggtaaaacaggaaaactgcctgtttacttgtttattataaacacactgtaatttttcttcattacttgaacaatttcgctacaagtaatga

SEQ ID NO: 156400 - DNA, 445 bp, Arabidopsis thaliana landsberg
  unsure (1)..(445): unsure at all n locations
tggtgtctgcagcactaatttgatgggcacatcatctgggtccaatcttcctcaccaaatgctacctccacgtcagcaactacaaacatctctttcgcttgtatcttcagatccccacttgtcacggtctaattctggcattgtgcgtgaatcaccagctgaaagtgctagctctcaagaaacttggccaacctcaaaatctattatgggaaggaagacagatagcggaaagacagggcctgactctcatgatcaacatgtggtccgccatgtttccattgctgataaggtatcgctacgggacatagctagagagagacttgacatagtcgctgagagaatgcagcgattaccagtaaaatctctcgtggagttnnngcctggtcttaaggcaatccgggggggtaataatgcgcggcctatagntgagtttatgtgttctgca

SEQ ID NO: 156401 - DNA, 269 bp, Arabidopsis thaliana landsberg
aaaacgaagaagagcttagatccagttccagaaaccctaatttcagcaaccgatcaaatcgccggaggaattcaaattctgaagacgacgacgatgagaggagagacaaaaagcatcggcttttacacggattgaattcacacgagggtcgtgattcttctaattccaaatctggcggcggcgatttggactccgatgcacgcaaccgccggaaaattgacggatctgacaatacggtagttatagagtataaaaattcaatctttatt

SEQ ID NO: 156402 - DNA, 78 bp, Arabidopsis thaliana landsberg
ttttttttttttttaatttttttttttattttttttttttatttttattttctattgggttttctttttttttttttt

SEQ ID NO: 156403 - DNA, 85 bp, Arabidopsis thaliana landsberg
ctcaccttcttctttatctaaggaaacaaaaacagagttttcttaagagaaatatcacaaacttttgtgaaaaggagataaccaa

SEQ ID NO: 156404 - DNA, 661 bp, Arabidopsis thaliana landsberg
acgatatcacaacatctatttttcttcccaagatatataccttacaagtgtagtgtttaatctttctagatatgatttggtccgcttgacaagtaaccaaaaagctttcttcctttttgtagaaacccacgatggatgaactccacgagacaaggttcttcctccaattatctatgaacactgaaacggcgtcgttcatgtttccactgaacatcacaaccacagaattagccacaaaggaatcgacccttgaacctagcttcacagcaactacattcatctccttacatctctctctcaggcatttcgtcgaacagattcaacgcatcaactaattttttgttcctcgtgtatccccaaatcatcttggtgtaacgactcacgtgaggagatggaacaagattgagattctctcatcgagtctttctggacaacgtggggattaaagcacgaaatggagtgtgtctctctcagctatcctaacttagttacacttggcagtatcgataaaagttttgaactcaagttaaatttcgatggtctgaaaatttaggtataaattgaggaataaattatggtctgagactgtgtctgattctgaattaatatcataaaaacgagaacccaagttgtaatatcattcagccactctccaaaacgc

SEQ ID NO: 156405 - DNA, 424 bp, Arabidopsis thaliana landsberg
  unsure (1)..(424): unsure at all n locations
taagaataacaacntgccggatatgtcggtgtttgatgtgaatttcaaatcgctataaacgcggctttaggttttgacagctacatggtaatgcgccatggtgctggccccacctctctgtctgatgatatgcagaatcttgacataaacaagacagatacacagagacttggttgttacttctgcaacgacgtggttgcacctcaggatgtaattccctggttccttcattttgaattgatttgtttcgtgttacctccagttcagtcctgattcgtcgtgacccactcttttcttgcatttgcagtcaatgactgatcgaactctaaaccaacaatgcactgttacacgcccgggtctagctcctattgcaagagcctctcgccggtgaactcttagtcggagtcctacaacacccacttgg

SEQ ID NO: 156406 - DNA, 281 bp, Arabidopsis thaliana landsberg
ggcaaaggtaccaaatctgtcaatcaaatatgataatcggtgtatcgctaaattacggcgttttttctacaactttactcttcagaagcacggcaacagatcttttctagctgtataggccattcctctccaagaacccggggattaacctccatggcggcatggaaatccaacatcgatacattagacaccgctcgcttttgttgacttgctaaactcaaacaaggctcgatcagccttctcatatatgcattcaacccacgattaagaagattagcaga

SEQ ID NO: 156407 - DNA, 259 bp, Arabidopsis thaliana landsberg
tgtgaaaccgccaactaaacaatggccaagaacttagattatggaagactgaatcacatgaatctaggaacaacatcattaacaatttctttagaatcttaatcaaaaactaatcgtttaatattcaatgtacatgtatctagggtacaacattatagattcacttgcccgtactaatgggtgagtcatgcctgtgacactgtaattctctctgagaaatcaagtatgaaaattcgtcaaagagtccctaaataaccgc

SEQ ID NO: 156408 - DNA, 141 bp, Arabidopsis thaliana landsberg
tgtgatgcaaacagatcaagatgtgaagagaagtcactaagtcaagccaagcaatgacaggttttggggtttctaacagtcctaagcgaacatgcagaaaacagaaaatcaaacagaaacagtaaaatcactcgaccaaca

SEQ ID NO: 156409 - DNA, 360 bp, Arabidopsis thaliana landsberg
gtttctttggtttattgtttgattgaagtaagaaagcagtaatggtctgtttctatttcaatgagatgaagacgaagaagactctcattggacttggattaggacagatcatctcgcttctctctactttaattgcctctattgcctctgagatcgccagaaaaggtttcccccttttttaaaaatccaacccatttttatacattcattgacttacaaaaatttgaattgttttttaaaagggattagtgctccaacatctcagacgtttctgggttatgtgtcacttgcaatcgtctatggaggtatcatgctgtatcgaagatccgcaattaaagttagtattgaacttcttttctt

SEQ ID NO: 156410 - DNA, 96 bp, Arabidopsis thaliana landsberg
gtttatatctctgggttgcgatgagatctgcctcgtgaagtcatgtatggcggtgattgatctttgcttcagctttgttttcgcttttcgtcaaat

SEQ ID NO: 156411 - DNA, 213 bp, Arabidopsis thaliana landsberg
actttttgtcgaaaataattgaattccgatatacgattttgtttttgtatggtttttgatgtttcagatggtggacagaacttggtttagaaaaagatgtggagaaggcaagaagccagccgttaaaatggcataggtggtccatgaaaattcttcaagatccgaccttaaccgaacaaaggcttgctctttccggggggggaggggttgttt

SEQ ID NO: 156412 - DNA, 80 bp, Arabidopsis thaliana landsberg
gttgtgttgagttaacagagaggttgaaagagaagatagaggaaacatttgggtgtgagtatgagctttttattgaattc

SEQ ID NO: 156413 - DNA, 328 bp, Arabidopsis thaliana landsberg
tcatcattctctcttatcttttgatatataaattttgtaagcaaaaagaagttgattcttgtaaacgttatatcaaaaaaaaaaaaaacgaaatttccttattggttagattgagattagtaaatggaaatcggatctaatttagattgcctctataaaactgaaaatcctcagcggttagattaataagagtatatatcaaatcatcatttaatgaagcaaaaatactctgctctaagagaaaaaaaaggaaataaaccaaaaaacgaaaaatatatcacgctcttcttcttcttcttcttcttcattcgtgagaaatcaccatcat

SEQ ID NO: 156414 - DNA, 244 bp, Arabidopsis thaliana landsberg
tctgaaccccgtaggacacttggtaagtataaccattatgaacacaacagacctaaaatcaaggaataacattgagagaaatgtacctgtaactctactgccttgtgaggctgaccataccattcttcatattctgcaatattacgcaaccggaagtcctgaaaagcgtattttagatgggcttataactgaaagaaaaggaacaaaaaaaaaacagttcttcaaggattaccgctgaaagatc

SEQ ID NO: 156415 - DNA, 511 bp, Arabidopsis thaliana landsberg
  unsure (1)..(511): unsure at all n locations
gtagtgtttcactctttgaagtaaatagtaaagaatataatttatacgaatntgtaagttctgagaggaataaataaaaatcgtaaacatctctaaaaatagaagagtaaagtcttgagaaaaccttttgtttttgttaattgcatgagaaaataacttaggatttaggaaactacctgacggattcttttcaaatttttaatctttttgaataacaatatcgtgagtaaattcgaactaacagattcctttgaagtaggttaagcttttatacttcaaataaaatataaatatataaaaatcaatcaaatcattcggccgtcaattttttttattttattaatatattattcttcttgaagacgaaaagaaaaatagagatagcgaatggtgacaagcacaactggaaccctaatttgcatagctcacagtctatcaatttattccaatcaaacatcttctccattcacacgtgatctacaagcttaaaacgttcaatgcaattctcagc

SEQ ID NO: 156416 - DNA, 395 bp, Arabidopsis thaliana landsberg
  unsure (1)..(395): unsure at all n locations
aattccgcaccaccacatccacgtgtctcaacctccactctcctacgtctctccaccgtcgccggcgtctgcagcgtctgcttcatcaattcctcgccgtctctctgaaagaaaaaaaggaaccacctttctctctctgttttgctcgatctgttgtaatttnnnnnnnnnnnnnnnnnnnnnnnnnnnnnttttaaaccgccatgaaactctccgacgttggattagacgttgtcaaaactccgagattgggtaaattgattgcgtttgcgtttctctcaatctcaacaatttttctcttcaatcacttctcagattccttctcttatccatctcttccttttcccatctcctcttcttcaaacgtcaccgaagctattcaaaccaacataaca

SEQ ID NO: 156417 - DNA, 404 bp, Arabidopsis thaliana landsberg
gataattaaatcagagaatagggctggacatatgagtaacccattcgagttcgggtagaacccgttcaggtttaggattaatggtatatgatttactacccaatagaataattctaaatattcggttttggttcgggtcgggtccagttgggtttgagtcagtttggataaaaagtttcaggccctaaaaatacccaaaaattagaaacgggtattttgtatgtagatagcgggtctccaaacaaaaaaaacttttaaatttgttaagttttaataaatttaattatatttgaatatattttactaaattttgacaaacataacaaataatttttgaatagtttagttgttttggatatttaggtccaaaattaattgacatatttagatttataattataatc

SEQ ID NO: 156418 - DNA, 251 bp, Arabidopsis thaliana landsberg
gcgagagagaaggaagaagatccatacgaagtggattgccttcagggtacgagagagagacatagattttaacaaacgatgtcgctgagtccgagcacacgcgcggagtaatggaagaagatatacaagacaggcgtcgaatgcgatgagctcaggcggaggatagacgacaatctcgtcgagattaggaaaaacaagcctgaggatagtcttctcaagaagcgtcgtgaaggaatgatgcttcacagcag

SEQ ID NO: 156419 - DNA, 290 bp, Arabidopsis thaliana landsberg
taaagtagaagaccttatctatactcgatttctttcgtttgagtgtcttagttaaaaagttactccctttctgggaattctctggtttcggttcttgcaattttttcggtggttgtttggtagctgtgaaaatttctgtgtctgggtttgtttgtttctgtttgtgtaattgctaactagatttctgggtttggtttgatttattgaaagttggaagggtaataaaagagacgaaaaaaaaagagagaggaaagtgtttgatgttttgcatctgattctgaatcgattaa

SEQ ID NO: 156420 - DNA, 75 bp, Arabidopsis thaliana landsberg
aactctcttccgacaataaatccataatggacacgtttcgtggaagttttgaagtcaaggagaatccaaagatgt

SEQ ID NO: 156421 - DNA, 233 bp, Arabidopsis thaliana landsberg
  unsure (1)..(233): unsure at all n locations
tctctgtgtaatcagtatgactctctgagnaggttcttcaggtcataattcaaactgtcaagagatctaatagctgattatgatgatagtctcatgagcaaaagagtcggaagaacagaacgtaagacggaagctgaggaggcaacaaccgaatttttctgaaagaatatgcgaagtctgtaaacaaaagatgcttccagggaaagatgcggcagcaatactaaacatgaaga

SEQ ID NO: 156422 - DNA, 436 bp, Arabidopsis thaliana landsberg
aaatatgaacattgtgatatgtatttgtgatatacataaacgaaagagactatttaaaataacaaacaatacaacacatacacacacaaacacacatcattgcaattacattatttaagtctcgtttcaaagatctaaatagatcatgaaatcagtttcttcgaagcacaatgaggtattgcattccgggtttggctttggctatctgaggaagcatttcttgtgtcttctctttcacaagctcaaaggttttctccataccatcttgcccaaatagtgaagctactgatcctccaaccgtgaccttaaaggagactgttaaaaactcggggtctaacggatactctcccttggcgtgtataatattttcgaatacctcaatcgtgaaacacccgttatcctcgatgatttgcttcaattcatcggcttgtggagc

SEQ ID NO: 156423 - DNA, 511 bp, Arabidopsis thaliana landsberg
tttataaattaaatgtcacataattccattaaaacatcaaaattgacaaaaacataaagtcctctatttgcctctaccattttttacttgaattctacaaagtataaagttatacagctgaaaccaggaaataaggcactgaatctacactggtatatcagtaatatttccggtttaccaaaaccgatgtgggtgaagctgctaaagcggacctgccggtttaacttccgtagagaggaagaaaactctacgagatttctattaaaagctagatgatggtcgaggcttaccttgaatggagtttaagtgctgagtaacgaaaataactgccataactactaagagacaacccaccaacgaactgaagaacagagcccctggctgtctggtttgaacaaacccgtaaaccccatttgaggtcatcacaatcacatccgttagaccatcgttcgagaagtcatcagtgataagtgcatgagtcggttgagacggtaattcgatggaagccaat

SEQ ID NO: 156424 - DNA, 290 bp, Arabidopsis thaliana landsberg
cacacccaaaagaatgagagacctttaacaaaaagaaacaacagaggtttattttaaaacagaaaatatgataaaaagagaggggggtgatagattttctctctcagttctgtctccatgttctttaacttcaaccccaccattgatgcacagcaacaccttcatctcttagtttgccataaagagccaaacactcccaataagccctaccattcttactctgcatctttcttccccttagccctaaaccctttggcttgcactccaagaaaagctcatccaccattttt

SEQ ID NO: 156425 - DNA, 207 bp, Arabidopsis thaliana landsberg
aaacgtcactagtttctggatggaccacattaagacccactgctatgtatcggtaagaccgcttcttcaaatccttttgatttacaaaaatgttgattctgtttgtgtactttcgaattcaattatctaaatatccaaagaattttgtgtaacatgagtgagttgtgacgtgactgcagtatccctcggttgaagaagcagcagcaa

SEQ ID NO: 156426 - DNA, 398 bp, Arabidopsis thaliana landsberg
cggaccattaggcatttctcgccacatttagctgcaaagatgaggcctccccacatgtgagtaattttttattcccatggaagagttacagatggtttttgttatttactacttgagtgaacaccttgcaggcctgtcattcgtgggcgatctgcaactagaaagacagtctacgtttgtggccaaccacgtttggtattcgtcttacttggcttaaccggtacttattatctctttatcatataatctctctcacctattggtatgcaacttctctgtgaactgatgcaaaatatatgattttccttatgtagccagttttgtccaatggaaaacttcatgtggtttgttatgggtcctctatgcacttaccactgcccttctcagtaagcggtcct

SEQ ID NO: 156427 - DNA, 404 bp, Arabidopsis thaliana landsberg
  unsure (1)..(404): unsure at all n locations
cttggtgaagggaagcctgagaatcaaaatcatgctatcgtgtttacgcggggagaagctatccagaccatagatatgaatcaggtttttcctcacttctttgtcatgtttcggcacatttctgtattgacattaagagagtcgtactgtggataagctaaacccgtcatgcatgtggccgatagtgattgtcttatattcctaaggtccgcttttggccatcatcaggttcccaaacttttcttcccctcattcaaaaaggattgataaccgggagattaatgaacaaattatgtagcaggagtttggtggccccttcttaccaactgtttttcttgatccactatattcttcatgttcttcaggacaattatctggaggaaagcatcaanatgagaaatcta

SEQ ID NO: 156428 - DNA, 78 bp, Arabidopsis thaliana landsberg
aaaaaaagaaaaaagaaaaaaaaaaaaatagaaaaaaaaaaaagaaaagaaaaaaaaagaaaaaaaaaaaaaaaaaaa

SEQ ID NO: 156429 - DNA, 282 bp, Arabidopsis thaliana landsberg
ggaaaaaattgagtgagcgccattgtaggagagcttcgggaaagaagaagaagaagaagccatgttcatggctcttgcttcttctaaagctttttcctcgatctttaatactttatctccattcaatcagtcgaaattggtgttagcttgctccggttcgaatcatgtaaacgccgttgatcggagaagaagaatcatgatcttcggttcgagtttggctctcacgtcgactctacttggttccaatcaacagagacttccgagggaatccgcaatcgcatt

SEQ ID NO: 156430 - DNA, 255 bp, Arabidopsis thaliana landsberg
  unsure (1)..(255): unsure at all n locations
ttagatcttccttctggtaaaaacccgcttgcttggaacactcgaatgaaaatagcggctggtgcagcaagaggactagagtatctccacgatacaatgaaacctcctgtgatataccgtgatcttaagcgttcgaatatcttgatcgatgaaggatatcacgcagaactctcagactntggattagctaaagtatgaccaagaggaagtgaaactcatgttttcacaagagttatgggaacatacggttactgt

SEQ ID NO: 156431 - DNA, 527 bp, Arabidopsis thaliana landsberg
gaattgatattgaactgatttagagacagagacgaaagatagatccaaagggcaatctctagagtggattgtgtgctctgagactcttcgtgtgtgtgtggttaattagctattgagattgagatcagaatgaaaatctctaaatctctctggactgttatgatttctattctcttctatcttacttctactccacaatgtgtcatttgctcatctcttgaagtcaccattgatatccattcaccaagcaatctcaagtctaaaggatccctagaacaagataaggtattacttcttccttctgtatggtatcttgtttccaataataaaagctttcatattactcttttttcgtcctttatatattacataatacgatttttactactctaaatttacacatatttatattatcttaaatttatatggcagttgagtcatcaaatgataaatagcataaagcttcatggcattctcttatgggtttacatgggctttcttatgccagtggggattctcttcattag

SEQ ID NO: 156432 - DNA, 393 bp, Arabidopsis thaliana landsberg
tacttctcttgctcaacgaggaaagaaggctgtgatcggagaccaccagagaagttaggtgactgaggagccgacggaggcacagatagaggcggcggatacgtcacaaatctcccaccaccactaccaccacctcctccgccgtctccagcaccaccaccaagtgacgtcatcatcatcatcacggctactacttcttcttcttcctcagctggttgttaccggagaaacaactgaatagatagatagaaaagaagggagctgggcggagatcgaggaggtgcggcggcggattagtagggagctaatctggcgcacacaaaggcttttagttgtagacctctaaatctacaatactcgtcggtggattggtgtttttgggcctttatagct

SEQ ID NO: 156433 - DNA, 236 bp, Arabidopsis thaliana landsberg
ccccattcaatccatacactatcccattcccaaatacaagtcttcacctagtcctagctaacccaaaaagcgtgggcaaggtctacatgaaagactgctcttgtcggctcatacctaacacgttataccaagctcaatcgaaaagacctcacaatcacacataaatgatcttggcttgaaataaggctaggctaagggtatgggaaactgctctaaaaatgagagacagctacttg

SEQ ID NO: 156434 - DNA, 176 bp, Arabidopsis thaliana landsberg
gagagaaagagacggctcataggttcaatggagaaagaggtggatcgctcggagaaacaaggtttgcgttcagtagtggagtgaaacccattggtattagggttttcgagaaatgaaatggtcgcaatttaaggagctgtgaagtgcaagattgaattgcattttcatgatgattc

SEQ ID NO: 156435 - DNA, 533 bp, Arabidopsis thaliana landsberg
agcaattgaaatttcaatttgagttggagtgtttgtaataggatgcgagaacttgtggactgaaagccgatagcgaaaagaagaatggataaagaaagcgttggagacggtcctacgacttcaatgtgatgagagtgagagatggaacacgtggtgctgtgaacgggatgttacctgatggacgagtagacacaagcacgatggtgtcgagggaggtttgggccgggacaacatactcggtcgcggcttgtatgattcaagaagggcttgcggataaaggttttaggacagcaagtggaatctatgaggccgcttggtccgaccgtggtctagggtaagctcttctcagaatcttttttgttgattcatcatgttcgattaacattttttttgggtgcagctgcgcatttcagacaccagaggcatggaccacgaacgatgaatataggtcactttgctacatgaggcctttagctatatggggtatacaatgggcacacacaatgccaaaacctaacagagaacaagaagta

SEQ ID NO: 156436 - DNA, 356 bp, Arabidopsis thaliana landsberg
gactaggttaacttgagagtctctattgttgtggcacttagatttggttaaagaacttgttgtctagggttaatttattgagcatgtcaatcacctgtaaactgaggaatcgaaactactcaattaccccatcctcgggaattctttatctgattgaattctttgtttactctactgttgtttactgcatcttgtcatctgttgtttagtttctacatttctttactgttactcgacctgatactcgaccacccagttgtctggcaacagactatgcagtcgagtatccctgtttcactttctgtctgttactcgacctgtcactcgaccacacccagtgctctgcaaagagctgt

SEQ ID NO: 156437 - DNA, 429 bp, Arabidopsis thaliana landsberg; identical to SEQ ID NO: 2890
  unsure (1)..(429): unsure at all n locations

SEQ ID NO: 156438 - DNA, 108 bp, Arabidopsis thaliana landsberg
tgacaattctatcgcatgtatcaaaacgacaaatcaataaacgtcaaacgatatcaacacgacttcgccggctcagctcatttcttaacttctgagagaagaccctac

SEQ ID NO: 156439 - DNA, 207 bp, Arabidopsis thaliana landsberg
  unsure (1)..(207): unsure at all n locations
aatctagtacataccagggtccttctgttnnnnnnnnnnnnnnnnnnnnnnnnnnnntgagttctcctaggtgcagaaggaggcttggagagtctatcatgttctgctgcaggctttgtactcctgtcaacaagctaacgccttaaaaactggaaaatttttgctttccagagacttgctcaatccaaaatctaaagcttggtatgc

SEQ ID NO: 156440 - DNA, 197 bp, Arabidopsis thaliana landsberg
gccaatcaaagatcccacttatttgcgttttttactgttggcagatagtgtaagtcactgtatccactatcctctcaccttttggggttacaacttgtaacttacaagtccagtgcatgcaggacaatgagactatcacacatccaatattagattagacccacatgctgagatccatcagtcataccaattttttt

SEQ ID NO: 156441 - DNA, 1347 bp, Arabidopsis thaliana landsberg
aactacgactatgagtttacacacaaacgtttctcaaaatcttgaataaccaaaaataattcatgatgatgttatattgggccacagacccgttagaatattttttgttgctgttattgggcttggtacctatatttacacacagtgtgcacaacttaacccttgctcaattttttcagcacgagataatcgatctccgtcccgataatgcaaaggtctactacgctaacgcttgactctgctaaggttctgcgttcgaatttgattcagcggccaaaagccagatctccattgctgatgctttctgcagaaaaggatggttgtcgtagtaatagtgtgtataacccatacaatgatagggtttacgagacgaagagtgacttttcagggtatcgattcctgggaaactcaggtaagtggtttctggtggtagattcccgaatgaaactctatattatagatgtatttagcgagaagaggatcgatcttccaccactagaatcatttaagggtagccattttaagattttgcgtgacggagaggagaatgtcaagcatatgcaaatggctgataacgatccatttcgtgatgaatttcctcatgctgccgaagatctgagaggtcgtttgtgggttgaagacaagaatggaaactacgttgttgtctggcagtttgaaaagaaccaatttctagggttttgcaggacaggggatgatcattaccgcgagattccaacacagctcgaggttcagagggagttacgaggtttatacgatatggtacttaaaggttacaatctttacgtctttgccacccgtgagttcattcgacacttggatttgtctggacaagatgaagatggtttcaaggatgtgtccgagaaacataggcttccaatgtggatgccacgtctgactatgaaggaacgtgaaagtaggaaccaattgaagtgtatcccatctaacaaaggcattgctgttacaagagcaggtcaagttttgcttgtctatacgttcgatttaggtacctctgaaagtcataggatgttccgtttgtacaagagggatcctaaagatcttgacccgaaaaccctcgacacctggcttcttgaggtgcattctctaggtgatgaggccctctttcttgatttgggtattactgtgcctgctgaccatacccttggtattgagcctaactccatttatttcacccgtggtgatcgtatccgtcacaaagaatcgtcatgcctcgacatctgtgtcttcaatcttataacaaagaccatcaaacgcttccacggtctctccaacttcaacttctacgatgctcagtggtttcttccttct

SEQ ID NO: 156442 - DNA, 592 bp, Arabidopsis thaliana landsberg
tagtggtccgagtctcagttgaatcgtcagagggtaaaacgggaaatttgtttctataagtttcacccaaaaaaaaggagtgaccttttagggttttgtattggatttggtctctctcatccttagtttaagtatgaggttctgctcccggaggattttttcttccggtggaagcggagccgatgatttcaaatctctcttgacgaaccactttttaaagtggtgatgaatcatccaatcatctcctccgtcaccaccactgccaatacttctgagcttcctcgattaaagattctactttacttggatctatatctccttcttcttcttcttcttcttcttcttcctctttgtttttgggttaagctctcttcttcttcttattcttatcgggagactatgatgattcttaagaagtcaatagaccagacattgtggtaacactctcctttcatggcggggctacaaggaagaaagagaactccttttttttctttgtaagcagccatggctgaagagttaatcctctaatttgtctgagaaaaggcgaatctgagtcctttcctgtgacatgcaatgattttatcaaaat

SEQ ID NO: 156443 - DNA, 110 bp, Arabidopsis thaliana landsberg
tacttattagccatagtccatttacctataaatgtggtttatgtctttagctcaccagcaccatctggtgattgatctacttgggaaagtatttgtaccatttcactttg

SEQ ID NO: 156444 - DNA, 64 bp, Arabidopsis thaliana landsberg
aaatcctcggatacaatggaaaacaaaacaacaagagtcttgtcagggaaattacaatggacaa

SEQ ID NO: 156445 - DNA, 213 bp, Arabidopsis thaliana landsberg
gttttttgttttagctggcaaagcaatcatgtaagagcaaagtttttatcttatagaatcttccatgtagcaagttttctttcattatttatgtgaatattgtttgtaggtaagagatacagttgctttgcttctccttgtgttttgtatacttgccccaagttgtttaaataataatattgagcaatgtaaagtactttattactttttacc

SEQ ID NO: 156446 - DNA, 190 bp, Arabidopsis thaliana landsberg
atgccgttttttttgtttcttggattgtctcaataagctgtgaatgatttacatttactctgatctctatgttgaatggggtaaggcttgtatgacagtttccagtacatggtttcgttatgtgatttctttgcttaataatagttcttctaagatgacactggagaataaagattgcctcttatgtgat

SEQ ID NO: 156447 - DNA, 235 bp, Arabidopsis thaliana landsberg
ggttaaatctttaatttcttattttttaagaccactaatattaagcatatcaaataatcctaatttaaaaagaatatatgaaaccaaaaatgttatgtggtatgtataatgttagtatatataaaattaaactataaaatataaatgtattagagaatgatacaatttgcaaagcttttatatataataaataattcttaaattttaaaatttactacattaaaacaaatcacag

SEQ ID NO: 156448 - DNA, 301 bp, Arabidopsis thaliana landsberg
  unsure (1)..(301): unsure at all n locations
tctngatgaacagagaatgacctgaattatattttcacgcaatccttttatgtctggtatagcgtttttaaagattactgttgcttgcattcgggtggcctctcatcttgtttaccttcaccaactatctgagatctccctcccttctgcagtccaagaggaaaaaaaaattaagcagatgattctcacatttatcacaaacatagacactgattgctagtttgctactatagtaataaaatgaattcatgagaatggttctatctcgtactgcccatgccatgattaaagagcttgttta

SEQ ID NO: 156449 - DNA, 530 bp, Arabidopsis thaliana landsberg
atccttcatgaatgtctttgatacattaaaaacatgttgaaagattcatggaatctggaatgtttgttttccaagttgtatatgacttgtaattcttgattttaggctagacaaaacagttatatatgttccataggtacacaaaaacatacaagtctaactttgagattttgatgtcttatctttacatattatgttcgtagaacaaatgtttgacatggagtgtgacgttgtaatgatcctctacacgtgtatatatcaacagtttgtatcacctatccatgtaaaagcagtgtctccttctcttagcctctgcttgcagcaaaattatctttaagcccttatgtatcatcagcttgatcattgaagaactgtctcattgcttgtatgaaaatatctgtgaaaaaacgtcagattgttgctaatgttctatctttgatataattaaccagccaggagcttacttggtcgacaaattgatatgtgaagggttgttgttatgtgagagaaggtccaactttgacggggtg

SEQ ID NO: 156450 - DNA, 136 bp, Arabidopsis thaliana landsberg
gtctttgcatttcagatgagcagcaggcgatcagtgaagagatcattggttcttgatgatcatgacgatgaggatatattctacaacttcaagatccttaaacctaatggcactagtgtgaaactcacactgaaaa

SEQ ID NO: 156451 - DNA, 137 bp, Arabidopsis thaliana landsberg
tgtgatgcaaacagatgagatgtgatcagaaatcactaagtcaagctaagcaataacagttttggggttctaacagtcctaagcgaacatacaaaaaacagaaattataacagaattactaatatcactcgaccaca

SEQ ID NO: 156452 - DNA, 261 bp, Arabidopsis thaliana landsberg
cctaaacaaaatgaattacgttactgcttaaaaataagatcaagccgtacaacaaaagctgtttgccagtcatgacaatgtatgacgtcgggctttttgccggactgaataagcaactctagcgcagctcggacaaaatacaaaaagcgtctgaaatcatcttgctctccataaaactgtcctctccataagaatatgcttggatgccgaggctcaatgacatgtacaggccaacctgtcaatagagagaaacttcaaatc

SEQ ID NO: 156453 - DNA, 199 bp, Arabidopsis thaliana landsberg
ggccttatctctctatgttctcgatgccctctctccttctcattcactctgcgtttatccctctcatcctcttcttcaacgtcatcttcagaatcactactcttccttctctcagaccgtctcttcaccctatccttatccctccgtctccgctccctctccttctccttacgcttctccctctcttcatcatcatctc

SEQ ID NO: 156454 - DNA, 261 bp, Arabidopsis thaliana landsberg; identical to SEQ ID NO: 65539

SEQ ID NO: 156455 - DNA, 267 bp, Arabidopsis thaliana landsberg
ggatgtaatgacgacatttctttgtttgaagatcgttgaagattaatagttaaaagtaagttatttagtgttcgtggggaatgaagattatgatatgagcaactaagaaattgtttggaattaaattcgatgtcagttttcaaacgtcaaaacgatggagaaaagagtataaaggttggtaatggaataagcttttacgagtcgtgtggatgagcttgtaagtcacacacacttatgagttatgaatttcttctaaacatagacgtg

SEQ ID NO: 156456 - DNA, 525 bp, Arabidopsis thaliana landsberg
tgggtatgttctgtttttcccgaattactctagctttttgtccaagcttggtttttacattgaggatatatttgtgagagagccttataggaggaaagggtttggtagcatgttgttgactgctgtggccaaacaagcggtgaagatgggttatggaagagtggaatgggttgttcttgattggaatgttaatgctatcaagttttatgagcagatgggtgctcagattctgcaggagtggagagtttgtagacttactggtgatgctcttgaagcttttgatcaggtcaacatctagagattgatgctgtgttgctgagagttatcgaatcagatcacttcctcttgcttttaaagtttgtgttttttttccttcttcttgttgttactttatgtaagtgttggcattgatgatgatgatgatgatgaattctctatgcttacttgttggatactgaatgagaaaaaaagaacccttttgttgaatgtatgaaatgtttcgagtttttaaagtaagagttatgt

SEQ ID NO: 156457 - DNA, 279 bp, Arabidopsis thaliana landsberg
acacccaatgtctaatcctatgcaaatgatcttcaaaagtaaaaaagtagaaaggtgatactatgtttccacagatcccctcctcacgttagcaactcggttggataacacggtttcgaaacaacagcaacaggaaaaggttcaataacgatctcaatctgcgacggtttaaataatcgatcaaagattattttccattaataatctataattaatttcataatcaacccaaactatatatccttcaataaattaagtagacttaatttaataaaataa

SEQ ID NO: 156458 - DNA, 563 bp, Arabidopsis thaliana landsberg
  unsure (1)..(563): unsure at all n locations
tcgattttcttgctctcattggagcattctttggtgttttattcgcttccgttgagatcggacttcttgtcgcggtacgtataatacattaggtgtanagttacttgacacacaagtttaagtttatgaaaataaattagaagcgtacgttttggttatatttatagatgagtttaaatgatttgtgtgcttctatgttgctaggtggttatttcgtttgccaagatcatactcatatcaattcgtccagggatagaaacgcttggaagaatgcccgggaccgatacttttacagatactaatcaatatcctatgacggttaagactcccggagtgttgatttttcgtgtcaagtctgcattgtnnnnnnnnnnnnnnnnnnnnnnnnnnnnnnnnnngtacgcatatatatatatatatatataaactacattttaattacacagtttaagaattgatttatatttgataaattgaaatccatgaatcttatcatgtatgcttgtctataggaatatgggatgggtcgatgaggaagaagaagaagaaaacacaaagaggaa

SEQ ID NO: 156459 - DNA, 94 bp, Arabidopsis thaliana landsberg
gcccatcattttttatttctcctgcgaattctccgacatagattttcttttgaatttctcctgctaactattgagctacggaaaggcggttaca

SEQ ID NO: 156460 - DNA, 162 bp, Arabidopsis thaliana landsberg
catagttctaaacctccccgcagaagcccaaatacctactaccggccaagccgctaagaagaaatgtaaagaacgagaattgttgaaactagcatattggaaaatcaatcggccaaaataaccgtgagcagctacaatgttgtaagtttcttctacttgccc

SEQ ID NO: 156461 - DNA, 234 bp, Arabidopsis thaliana landsberg
gtacatgaaacatgtgcattaatggaaagagattatatgattattacaaagattaaaacagcaaaaccgcaatcacactcaaatttacaaaatgacagaacacaaaaaaagagagagcctaattctattgagatcaaagttgggagaaatgaaggagaaacaaacaaacaaacaaaaaaaaatcccccatttagggagatagtaaaattaccagaaagatctaaactctttatt

SEQ ID NO: 156462 - DNA, 497 bp, Arabidopsis thaliana landsberg
atgttaacgcaaacataataattcattaccaaacacaaaaccatgatgttttacccaaaaaactggtttcaagcaacaaaacttattagtagtctccactgaaccaaattattaaggcgaattttaaaaaaagagcgtgcatgccaaaaatagtctcggaaagagacagcgacagcgacagagagactcaccatccctttgtattgcccctagttctgtcgtctgaactctctccgggacatgataaataagacaagacacagattcatatacgacgctgttctttttgtttttttattccagggattagagacagtaccggtagcccgaggaagaggaggaatgggatggagacagaatctccaaatccttcttgtttgaaggaagctgttacggtggatatataccttcttggaaaggtgagagaggcaagcaaaaatatgaaatttagacgtgtttttagccccttgtcttagctctcttcatgccgaggctat

SEQ ID NO: 156463 - DNA, 223 bp, Arabidopsis thaliana landsberg
tgaataccctttgccaaagaatgctttgttgtgtggtcgggcctccaacaaaaacatgtccatcatcactccttagatcctgttggcatgacataaaatatgagagaatatcttctgcacaatccaacacaaagagcttaaaaatagcttcactctttgtactagtaacaattaatacttaagtaatatatatttgtacatctttgtaaaaaaaaagaagaag

SEQ ID NO: 156464 - DNA, 73 bp, Arabidopsis thaliana landsberg
gcagccgaagcagcaattgaggtagcaagctcagactggaccctatttactacaggttgagcatcacttccat

SEQ ID NO: 156465 - DNA, 409 bp, Arabidopsis thaliana landsberg
tccaggaatcaggaagcaagaagcgggaggctcaagcaccaaccagattatggctctctgaagcaatatcttcagaaaacaaaataaagtttttatttgattttcttattaccatattatatactattaaataagaaatccaaagctttttatttaccatcctttctttcttccggaggagggagagcatgatatgggtctttcacgtgtgacattgatgagatgatgaattcaaattatatctcataccaaaaaaaaacacaaccaagagaaagaggcgtaaccttctgatttccttcttttaagagatcaataaaagctttcacattttctaatctgcaattcttttcaagatttcgttggctcctccaacaatccatcagacggagcagtttggcctccaggcaac

SEQ ID NO: 156466 - DNA, 597 bp, Arabidopsis thaliana landsberg
ttactagcttgttctataaaccatttcagggtcggtacttctgggtctagatacaggtacgtatgtaagtttaccaatgtcgtgtagacctgccttcatttattaatactctgctttggcacttctatgatatctctattcatgacagatgctaacatttgctgcagatatatggcagtggtctgaattgactagcttcggcgacttacctacacctcgtgattttcgtgccgctgctgctattgggagccaaaaaattgtgttgtatgtatcaaactttagacgtaatcatcttcttaggtttaagtttaagcttgcctgcctgcattactaaacctagatcgttggcaggtgtggcggctgggacggtaaaaagtggctgtcagatgtttatgttatggacacaagtaaaacttcatttctctattctagttttagttctgcaataaacggtttttatttgctgataatgcttactctcttggtatccattagtgtcccttgaatggctggagctatcggtttcagggtcattgccacctcctagatgtggtcatacggccaccatggtggagaaacgattacttgttttcggtg

SEQ ID NO: 156467 - DNA, 415 bp, Arabidopsis thaliana landsberg
cgatttgctgttctcgagaaaagcaccagccaagtgctagtcaagaatctaaagaatgaggtggttaaaaagagtcctctgcctattcccacagatgctatcttttatgctgggactgggaatttgctttgtagatctgaggataaagtagttatctttgacctccagcaaaggcttgttcttggtgagcttcagacaccatttgttaggtacgttgtttggtccagtgatatggagagtgttgctttgctcagcaaacatactatcattatcgcgagcaaaaaacttgttctccagtgcacgcttcatgagacgatacgtgtgaaaagtggagcttgggacgataatggtgtcttcatttacacaactttgaatcatatcaagtactgtcttcctaatggagatagtggaatca

SEQ ID NO: 156468 - DNA, 75 bp, Arabidopsis thaliana landsberg
gcttcttgttcgtgtttatggccaaggtgttgagcttttcttcaatagagacgatgagattcgtactttttagta

SEQ ID NO: 156469 - DNA, 232 bp, Arabidopsis thaliana landsberg
tgaaattggtttgttttttaatctctcttaaattttcctgtaaatctccatgaatttcctttcacacatcatcccattttttcttcttctttcctggttttatggttctctctagaagttggatcagatgattcaaaatgatcctcaggggttcttacatttactttttgttgattatttttccccttccttgtaaaggtagaagaaaatctaatcccattgattctgacag

SEQ ID NO: 156470 - DNA, 132 bp, Arabidopsis thaliana landsberg
aaaaaacaaaactttaccggagatgaccacggagcaagctttgttgtctatggaagctttacctttaggttttagattcagaccaacgggtgaaaaactcattaatcattacctaaggttaaaaatcaacgg

SEQ ID NO: 156471 - DNA, 225 bp, Arabidopsis thaliana landsberg
ttaacaaaaaaatcttaaaattaggataatccgaaattaacacaaagctgatgatctctcaaatccaaagttcctcagaaccattatgttaggactttccagacaaatactactacatagacaatctccttagtacttacatgcaccattgcttgggttgttccctacgatcataccagttccactgaagttacaagcaccatcagtgcggccgtggctctggaa

SEQ ID NO: 156472 - DNA, 510 bp, Arabidopsis thaliana landsberg
acaaaaattcttgcttcaattccgccgagtaagtagtaaccacatttttctcgctttgccgtcttctccggcgattttcagacactaattttctctccggttgttgcaatcatattttctgtcggaagatattgaaatcagaaaccgggaaaaatgacttcgtttcttagtttctccgccatttcagctcatccacctactttttccggcgcttcatttcgtcctcgctctttctctccccggtcattatctctctctataaactatgtttcttcattgaatttcatagattaatgtatataattgataaagtatcaaaatctctgcattggtgttttgaaagtcaggatcttttgcagaattgcgtaatcagtgaatccatgaagtcgagagattagagaaattgaaatttttgcttagttgataatgagaagttaaatgaagcttctttttgtgtttacagattgttcaagtcttgtgttaagtgcacttatgctgaacctggattaa

SEQ ID NO: 156473 - DNA, 218 bp, Arabidopsis thaliana landsberg
tgatagcaatacattttttcataaacaagaatgttacataataatcatacaacagtcatcatcatatacataaatgccaaacttggtttggtttagtgactctattaggccaaagactgataacctcgagccgctgcttcgctgttcttcttgcttgtatgtataccgaaagaaccttcttttctaggcttagagagcaacctggataagagaagaag

SEQ ID NO: 156474 - DNA, 85 bp, Arabidopsis thaliana landsberg
ggttgttgcaggagatcctgcaaatgatgcattaccttatctatttttaagccaactcttacaaaatgggaaagagaaatcaggt

SEQ ID NO: 156475 - DNA, 299 bp, Arabidopsis thaliana landsberg
tgttgtctagggttaatttattgagcatgtcaatcacttgtaatctaaggaaccgaaactgctcaattatcccatccttaggaattctttatctgattgattttattgtttacgctactactgtttactgcatcctgtcatctgttgcttagtttctgcaattctttactgttattcgatctgatactcgaccacccagttgtctggcaacagattgtgcagtcgagtatccctgttttatttcctgtctgttactcgacctgtcactcgacctcacccagagctctgcaaagagctgt

SEQ ID NO: 156476 - DNA, 250 bp, Arabidopsis thaliana landsberg
tgagaataattttttttataaattacaaaacaaaaaaagagacaaaacagcaaacgaccctaacaagatatacagcgttttgattaaatgattattcaaaagccattaagaattacgaaagcgatttcaaagttgaagaaaggacacaaaaaaaaaaaaaaaaagttgcacatataatatctcattttcacatcactatctctggcttcaagatgtttgatttgatctccttgtgtggcaaaacaactcc

SEQ ID NO: 156477 - DNA, 923 bp, Arabidopsis thaliana landsberg
cagaatagcagagatcgaaggaaagattcactttgggtatacacaaaaaacgtatgcttatgacccaaagcaaggtgaatgggaatgctgtgaaggcgaggttgcatttccgaggtcccaatgtgtgatggagagtgtattgtacacctttgctaataactacacttgggaggacgactacgggtgcaagtggtggtcaacgtatggatatggggaaaaggtaaaagggttggagtcactattagagatacacaagaggaatggtggctcaagtgataatacgactaaactagttgcctgtggtgggaaactcttacttttatgggaagggtacatgaagcataatcccaataataggaagaagatttggtgcgcggttatcgcgttagaaaagcgtgatggaggtaaggtttggggaattgttgagtgggttgatgttgtgcatatcgtccccacatcatgcaagctcttgcattgtctcgttgtctcggtttgattaacttgtatgatacaagttgtatccaggtatgtcagtccttaactccatctttggatcccttgtcttagttaatttgagttcatttagttttataaaaagttcatgtttcttttttttttccctgtacatatatgatgttagtatgtataacattatatatatatgaatggattgttgaccagttggaaagaggagaaggaagcaaaggcaaaaaggagtgcaacatggattacctttcgcctcatgatcaacacagtgtcttctcatgtagatgatctaaccatctttcaaactttgtgttagagtttcgtgacttctgacttcagtttgttagaaatatcctcctcatgagttgtgtctttaacatctttcaaactttgttttaacattgtaacttcatcatgaattctttgttttgagaaaa

SEQ ID NO: 156478 - DNA, 76 bp, Arabidopsis thaliana landsberg
  unsure (1)..(76): unsure at all n locations
tggtcatcaacatttgcatctttcagctntgagtgtagagatatctccctgggaacactatgtattggagtccacc

SEQ ID NO: 156479 - DNA, 113 bp, Arabidopsis thaliana landsberg
tctgtttcaaacgggcccgtaatttacatatttaaaatcaaagccacagtccaaaacgaaaagaatcaataaatgtgctctacaaataagttggaagcaaaagacgatagaaa

SEQ ID NO: 156480 - DNA, 127 bp, Arabidopsis thaliana landsberg
atggaaccaaatctcttcaccgatccgtttaagctttatggaacgcttatatcccgcaggagtcactaatgtaacaacctctgagagtttagacccttgtagcttcacgaaccttggcggaatcctc

SEQ ID NO: 156481 - DNA, 324 bp, Arabidopsis thaliana landsberg
ttttttaccagcaagatgttatcttggtccataaaatctttaaaactagttcaattttgattaattattttaaattgaccccattataaagtagaaattaatccttgtaaaatttggtttaagagcaaacaattagatattatataactttttaggccaatttaaatcaaaacaaataaatataaaataaaaacatgtctattgaaatgatttcaacctcataattttgtcctcttgttagtctatcatttttttatcatccctttttttttcattgaaatttacgttaaaaataaagtataggttaagacataatatacattt

SEQ ID NO: 156482 - DNA, 374 bp, Arabidopsis thaliana landsberg
gcccatggagaatggaaacaaacggagcttgaatccgtcttcactgacaccattgatctttgttaggttgcagagcctatcgaattcatcaaggtggtcgagtggatcctccattggcagaccatggaatttgttcccctgaatcatcgagatgagaccactcttaatctcgaagttgttgttctggatagcaggaggtgcaattcctttcctctgacggtgatcacgtggtgcatctccagcaccaatgttggcagggccattttgttgattctgttcgtcagccatttcgagtggttgcctaggtacaaagttaactgtatttctcctttctctgagttcgcgagctatgcggtcgatgttatcgttgaaaa

SEQ ID NO: 156483 - DNA, 167 bp, Arabidopsis thaliana landsberg
agcgtatcgtccttctttgttttgcgtcggctaagtagcgcctttagcagccgtttgctcttgctcggttgttgttgatgctctggttctttctgagcttctttctcgaacgcaacccgaaccgaagccgatcttcttggttctgacggatactgagccagaaaata

SEQ ID NO: 156484 - DNA, 195 bp, Arabidopsis thaliana landsberg
  unsure (1)..(195): unsure at all n locations
taattaactaattgcatatatattaaatagtgaaccctttctttcaaagggaagttttcaaattctcacactaacctattgaacaagaacatctaanaccctctcaaacacattcatttactctacttatgattttcttctactaatgtctttccctgaaaactctcctgatccanatgttgttgccatatcgat

SEQ ID NO: 156485 - DNA, 103 bp, Arabidopsis thaliana landsberg
acaaaattataccagttgtatatcttcgcgcgatacccttctcactgttaaacttgacatgggtgaaatatctgtagaagcgatcctgttcctgtcagaagaa

SEQ ID NO: 156486 - DNA, 118 bp, Arabidopsis thaliana landsberg
tttgattcagggaactctggcttttctgatcaggctttaattcatccactttctttgtcttccctgcaatcttgtactgcaaatctacactcaccgcagcttattatctaagaacata

SEQ ID NO: 156487 - DNA, 448 bp, Arabidopsis thaliana landsberg
aaccactagaatttcacatgtttctagttcatcaatggaagactaatattagcaatgttcgatatggtgtatttttgttcatgtgttttccaacataattataataactatggttgatgttctaattaactaatctcaccgtatacttgatgcagaaaatatctaaagtcttcttgaaatctcgttatgagagcaaggtgcataggtgttaaagttcattcgtggattgaggtgtagctttggtttaaacaagttcaagtgatttcatggggtagatcataacttcaccatgattcgcgtaaagaccaagggtctgatgttttcagtagagatttttttctctcacaaacaagccattttttgtctccctttcattataacattttgtatcactccattgttaggttttcttgggttttctcgtatggaaaataagtttttctgtaat

SEQ ID NO: 156488 - DNA, 92 bp, Arabidopsis thaliana landsberg
tacgttcgcaatgattctttatcatagaaggcaagaagctgtttgatttttttttgccaagctgcaacactttgaccgtgtacagggaccca

SEQ ID NO: 156489 - DNA, 321 bp, Arabidopsis thaliana landsberg
tagtgagagagaaaagctctgaagaagaaggaagttgttttcgagatgcgagctactaaaggaaccttctctgtacttcttctctttctccttttgattctcattctgcccagtctttaattttttttcctttttcttcttctttctctctatttcttctttcttcttcttcaatttcactcttgttgggtaagacaagaatcgtccaaagtctttttttttttttttcttgggtcgactggtattggatctggtacttcggcctttgaaagattggctaatactttgattttggggggtcacgcttagctcctgggttat

SEQ ID NO: 156490 - DNA, 530 bp, Arabidopsis thaliana landsberg
  unsure (1)..(530): unsure at all n locations
ttcagggttttcctcggaacctaaaagagttatattttgctggcactacgttaagagaagtgccccaacttcctttaagcctagaggtcttgaatgcacatggttctgactcggagaagcttcctatgcattacaagttcaacaattttttcgatctatctcaacaagtggtcannnnnnnnnnnnnnnnnnnnntgacttctgtaaaacacataccaagagggtatacgcaggtaatactctctctccttctgcctctctcttgtctacttacctctccattagctctctttctttccatcaccccctcaatcctttctctttctctgtccgcctatgtctcccgctctctatagtgcctgttatgtacacccaaccacaccctcctcatatcatatctgacttatttgtattgcaacaggaactcatcaacaaagctccgactttcagcttcagtgcgccctcacatacaaatcaaaacgccacatttgatctgcaaccaggatcttctgtaatgacacgactaaatc

SEQ ID NO: 156491 - DNA, 179 bp, Arabidopsis thaliana landsberg
gatcaacttctatcttcccattcatgtttatgcttcagtggaagctatgattctcatttgtctgcttttcttcctctgtttctttttccctttcagtatcaatgtttttcccggacccttccccattgtcgttgactaagtggacatcatcatcgctcaaattctcattataggaaacc

SEQ ID NO: 156492 - DNA, 73 bp, Arabidopsis thaliana landsberg
ggattataaagaggtgaatctgccacgtggcgtacgatgtgtgggctcttgtgttatcttcttggtgattgtc

SEQ ID NO: 156493 - DNA, 197 bp, Arabidopsis thaliana landsberg
gaggcaaaccattggggagattcttgacagcactcaagagctggttattattattactagagccttcaacaacagctctataacaaggaaccaacactaagaagccaccatcatttccttcatcatcactttggaaatcaggtccatgtggctcagtccatccaacagaccattcaggtccatcaccagcaacaaca

SEQ ID NO: 156494 - DNA, 246 bp, Arabidopsis thaliana landsberg
aatccacactttgacacctgagattccgtaacgagtagatacttccgcaggagcataatcgattttatggttaaatacattacgagaagtttttctatgcttatagcatttagtttgagctttttctgctgcgtcttttaatcgaccggaaaaacatatacggattccctccaccccttttggaatctccttcactattttagcaaaaatggaatgaaatgatcttcttttgttcttcagttgaaa

SEQ ID NO: 156495 - DNA, 336 bp, Arabidopsis thaliana landsberg
attaattaactatcaaaattgtttggtttagagaccacaagaaacacattacaggtttttacatcaaaacatgttacagataaattgctacacaaagaaagagctgaaaatataaacaaaacgagtttaagaaacgcatcggtatgtaacatgcgactcactgagctcgtctttgtatgtgaccttcatgacttgccctgtctctagtccatagtatcgcacaatcgggtctttgctcgataaccgaggaagctaaccaaaaaaaacattctaattcagagaaaagctggctcagagtcagagctactagtactagtaatgatccaaataccaaaa

SEQ ID NO: 156496 - DNA, 144 bp, Arabidopsis thaliana landsberg
gtcgggtttttatagcccacgtgtttcgggtcgggttatatcggattcgggttagaaaccctacccaaagcataagtaggcagaaagaattatcacgagtcatgtgtttggtaaaatgtatgtgttacgtgggctctggagagc

SEQ ID NO: 156497 - DNA, 125 bp, Arabidopsis thaliana landsberg
gatttttgtagctagctcctccaaatccaaatcgttgcgttaaggtttcttcaagtttcaatctttttgcaatgaattgcccagccatgactgcttctccttcttcttcctcttcttcttcctac

SEQ ID NO: 156498 - DNA, 387 bp, Arabidopsis thaliana landsberg
ttcaaagaacaataatttcaaaatttcaaaattaagaaagaagcttttgttacaacaaataagattactacacagagaaagactgaattcaagaaacatatgcaatgcgtctaaaaactgctctgaaagtctgtccaccatttctagcaactttctgtccttcctcagtagcactgcatagaagctcaacaacaggatcagaaacaagttcttcttgtgtaagagattcaaacatcggatgcttctctaagcaagacttcatccactcgccaagctcttccacatcagtgattgtgtaaataatcccaccagctctaagaacataagcatactcatctaacaaatgagtgctaatcactctcctcctatgattcttctccttaaaat

SEQ ID NO: 156499 - DNA, 111 bp, Arabidopsis thaliana landsberg
atttgcaaaccatggttttgggaacaaatctgattatggaattggcaggcagacgcccgctcactatggctctaacaagctcaattattttaccgattctgcaaccattgc

SEQ ID NO: 156500 - DNA, 444 bp, Arabidopsis thaliana landsberg
ttatactgatgaaactcattttgctagtttaaagttttcaacttttctccaaaggtaatgaagtatttaactacataaatcaaacccagtagtatactaaaagacattagacaaatgagagagacagcttcgattttcagacagctttaggttggatttgttcgaagtcgaaaacctcaaacatgagccgccgaacatcgggtttcccgtagatggtgtaggcgaggccgtgaatggcttgttgaacagcggttgtcgccggattcctaagtctccggttatgttcataccgatcatgaacctcctctgagtatattataaagttgtgaagacgtttttctctaagataccggccgcagaatttgttcattaatagacatctatgcttctcttgcaaccacttccctggtgcgtccaaaacgttcagccattgctatgtcctgc

SEQ ID NO: 156501 - DNA, 342 bp, Arabidopsis thaliana landsberg
acattatagaattaggaacagacagcgacaataattaaaatagaaagagagagataagtgatcatcatcgctttaagcagcatcgacttctttgcccttcttctccctccgccgcaagagactgggcttgaagccgacctcgagcaacttctcgacctcctcaaactgaagccctatggtctcaggaacgagcaaccaaatgaagaagagcccgatcgtggagaagccagcaaagagaaggaaggtaccagaggagccgagagcatgggtgagtgagaggatgctctcactcactatcaggttggagacccaattcgagacggcggttattcctccaccaag

SEQ ID NO: 156502 - DNA, 434 bp, Arabidopsis thaliana landsberg
aaatatatccgaaaccatacaagattttttcttggtaaattatatttgctaggaggaacactttaacttggctatataatcaacacttacaaaattcagacaaaaacgcactcatataacaactacctttctctctgtttaagcttccgagtctcctctatccatttggaactcttcaagttcatggtgtttctcactataccatttttgctcaatccaatgaaatccaaaattttggatcaaaagaaccaaatgaattcttccaaaactaaaggaaaagaagcaatccatggctgtgcccgggatatacagaatggcaacaagggtcacgactgagcgtgccatccatgcattagagaagcttgcttgtccttcttttcgacggtcctcctgggaacatcttcatgatccatcctagaaccacattcaaccac

SEQ ID NO: 156503 - DNA, 194 bp, Arabidopsis thaliana landsberg
ggacgactcttctattgggaatcggtcaacgtcctcaagtttatcatacatcttacggtttctaatcagatctttgattcatcaaaatcacctactagggttgacaaagtgcatgcttttcgatcattgatcagagagctttcacgatatatttgcacgataatggccatggctccagtaatacagctggtctt

SEQ ID NO: 156504 - DNA, 264 bp, Arabidopsis thaliana landsberg
tgcctgagaaaattttgcccccttttgcttcaatttgttgtttccttaaacccttcaaagcaaaattagggtttctcttggttttcgcaaattagggattttttctctcgttctcatgaaaagatgagtttgatttccaaatccttggcaagaattgaatgttcgccatttttttatccaagagcttcagaaatcactaccggaaaacggataacctctccgcaaatccgtttatacactgcggcggccgtcggcgggaaaact

SEQ ID NO: 156505 - DNA, 308 bp, Arabidopsis thaliana landsberg
tcaacgtgaaagagagaaaagagaatctctcagaaggtgagcctccaacaaagcgtgaatctctctttctctctctatctctctatctctctgtctccgagatcgcatcaccggaaatctccttactacggtggtggtggtgacagttgaccagagatggcggcggagaatgagagaaaatctccttcagcagtctccgatatgggagcttgggcaatgaatgtgataagctccgttggaatcatcatggcgaataaacaacttatgtcatcttcagaattcgcatttagtttcggttcgtcttctcc

SEQ ID NO: 156506 - DNA, 417 bp, Arabidopsis thaliana landsberg
tatcaatccttaaatgtctgatttcaacattcccagggagaaatctacaataagatatgtacagcaatcacattttgtatgctgctgcttcaaagactaatagtgtatatcatccacgagtcaaatcaaaatcagtgagtgggtttctcctaatgtcaagtgatctgccagagcctgagcctgaaccgggccacccccttattccctgagaagagaagttctgtggcgtctgctgacccgcagatgctgctggttcagctgcactacccggtgtggtctccatttcactattgttgtcctcttcatttggttccttttcttgtctgatggtcttgttattgttattatgagtctttgcccttgctccgtatacaaaactacatgccaccacctgaataacaaacaagtttttcaaac

SEQ ID NO: 156507 - DNA, 296 bp, Arabidopsis thaliana landsberg
cgatccggatgtaaacacatgaaactatgaaagcaagcaacgtggttatagagcaataacatttaagtgaacaaaagtaaaaaatggaagcaacgaggattttgacctgtcctttttttcgtcgttttggttgaggtgcatactctgtcctgttcctttcaaagtcagagacacacaggctgttgataatttgaccactttttgaagataatccatcgttttgtcgaggaggataaattttgagtaattcgcggtgcagcttctttttttggttggctttttgttggtttttttcc

SEQ ID NO: 156508 - DNA, 648 bp, Arabidopsis thaliana landsberg
ccaaactttcgtcttcttcccggctttactctctttctctctccaccgtcggctcagatctagacggaaatgtgccggtgaaatcgaatcatgaaaagatctcacatttcgtctcctcgttcttattcacgaccagcgatttcaatcttcggtgtcttcctcttgtttcttctggttttaacactaagctctcgaaaaccatcagattcatcctccggtttagctccaaatcgaaacttagccacaaaatcgacgattccgaggtttgcgtatttggtaacgggaacgaaaggagatgggaaacgagtgaagcggctgcttaaagcaatacatcatccgagaaattactatctgcttcatttggatctcgaagcttcagatgaagaaagaattgagctggcgaagtatgtgagatcggagaagaaaaagtttgagaatgttatggtaatgggtttagctgatttggttacggagaaaggtccaacgatgttagctagtacgcttcatggtgttgccattttgttgaagaaagctaaggattgggattggtttattaatcttagtgcttctgattatcctttaatgcctcaagatggtaaatgttcaatctttaaatcttttcttcatgttttgtgtcttagtttggta

SEQ ID NO: 156509 - DNA, 466 bp, Arabidopsis thaliana landsberg
agagtggacttagacttagagagataacagataaaatggcgacggggacgcgcgacggagaaaccgaagatcgtgtggaacgaaggaagacatagattcgagactgatgatcacgaagccttcatagagtacaagatgaagaatgacggtaaagtcatggatctggttcgaaccttcgtaccgccgtcaaaagcaggacttggtttagcttcgcatctatgcgtcgccgctttcgaacacgcctctgaacactctttctccatcatccccacttgctcctacgtttccgtatacatctcttctttcctcaaaaaattgagatgaatcagattcttatgaaaatatgtcgtgttttgcaggaaacgtttcttcatcgaaacccaacgtggcagcgtctggttcactcagaggatgattccaagaacctcaagtctagcatctgatcaagtcctgctttaaagccttt

SEQ ID NO: 156510 - DNA, 231 bp, Arabidopsis thaliana landsberg
acgcggtggggatatttaacatgattgttcgtttttaaaccgcgagaggctaaaccaaaacataacttagtatttctaggtaaaattatgtgctttgcaatattagtgatttctttctttggtcatgtttatctataagaagcattgagaaaaaatgaacttataaaagactttgatagaacaagttgcaaactccagaaaaaacttgagattatagcagattgtgatttg

SEQ ID NO: 156511 - DNA, 319 bp, Arabidopsis thaliana landsberg
  unsure (1)..(319): unsure at all n locations
aaaagaaacaccagagctatatggtgaatttctagaacttagctagnnnnnnnnnnnnnnnnnnnnnnncggaagccagacacaagccaaccaccaccgtaaaagagaaacaagatggtgtcagaagagagccgatcaaacgttgtcgaaaagacaaacgttaacggacaagagccagacatctatgctgagaaagccataggattctgttcagaagccatcgtgaacgatcaacagatgctgaagtagcaatcgttatcagattaagaagcttcgatcgtttcctctctctaaaggatagagatgagagaagagagaa

SEQ ID NO: 156512 - DNA, 97 bp, Arabidopsis thaliana landsberg
aaaaaaaaaaaccgaagtggtttcttaccaaaaaatcaaccaatctccttcacgaatttccatctgagaagaatttgaatcggtggaggtgagaatc

SEQ ID NO: 156513 - DNA, 200 bp, Arabidopsis thaliana landsberg
ggaaagtacacgctatggcgtttttaaatagtaatgataagtttattacaaaacgtctcaagtctctctcaatagggtctgatgatcatatacatacatacaaagacatagtcaacgaacttaaacaacagacgaatttatagttctctaaaaccatcaccagaaacacacttttaggttttatcatcttacccaagcaa

SEQ ID NO: 156514 - DNA, 628 bp, Arabidopsis thaliana landsberg
agcaaattaaatacactactacttcttgagcttttaaactatacaaacatatggctccaagaacctctcttgcactcttcgtttctctcaacctcctcttcttcacttgcacctctgcaaccacagggacttgtcctaaaaattccatagagatcggtacttgtgccaatgtgctcaatctagtggacctaacattgggaaacccacctgtaaagccatgttgctcgctcatccaaggcttggctgaccttgaggctgcggcctgcctctgcactgcgctcaaagctagcattcttggaattgtcaatattaaccttcctatcaatctcagcgtactcctcaatgtttgtagtaggaatgctccaaagagtttccagtgcgcgtaagttgaatacctatgacatacctatgaaacaaacgaatcataccgatacttgaacatgttttcttatctacttgttgttgttctaaggtgttttttttttcttggattgttaagaatgaacgtacgttctgatgcaataatggaaatggagttgtgtgtataattggcaagtttatatctactccttcgcttcgttgttccttggtctcttctttgtaattgtgtatttcaaatttgcttaat

SEQ ID NO: 156515 - DNA, 79 bp, Arabidopsis thaliana landsberg
ttttttttattttttttttttttttttttttttttttttttttttttttttttttttttttttttttttttttttttct

SEQ ID NO: 156516 - DNA, 66 bp, Arabidopsis thaliana landsberg
gactcagaaatgagatctctggtttttcacagaaggctggtgaaagtttatgtgaagcatgggagc

SEQ ID NO: 156517 - DNA, 125 bp, Arabidopsis thaliana landsberg
caattgatgctacttctgatttaccctttctctgcttttttctctcactctctcagttttctcctccttgattcctaaagtcttctcctttgcgtgcatttcttcaatttcagattcttcctaag

SEQ ID NO: 156518 - DNA, 133 bp, Arabidopsis thaliana landsberg
ggagattaaaattttccagagataaaaccctagagagattctcatcttcttttcttcaatctctctgagaatttctaggttttcgttaccgattgggtcaatctggtgaaactcaaggtgtgtgtgattatga

SEQ ID NO: 156519 - DNA, 300 bp, Arabidopsis thaliana landsberg
gcttggtgttccgaagaagtaaaacttattttccaaaaaaaagaagaagaaaaataattgctattttaatttcatggaattgtgtggtcttatcattttgtttgtttgtttgaaatcggggttccaagtcgaagcaagtgcacacttatccccggaacatgtggagcatgtcttttaatctttctctttgcattttgagtttgtaggaaataagcgtcctaacgaggaacattttagggaagtgatgttacgttactacttgaattttattatgaatgtaatcagtgagatgttttaagc

SEQ ID NO: 156520 - DNA, 148 bp, Arabidopsis thaliana landsberg
tagctgaagctaattcaacaagttgttatttttgctttcaattttcttactttttgatctctcttttccacgaaacctcttataatagatttctcatttctgggtctaaaatctactttctatttttgggcattgatttttattctta

SEQ ID NO: 156521 - DNA, 242 bp, Arabidopsis thaliana landsberg
atatcgtaattgagtttcttgtttttctttttctcagttaacattgagtccaccggatcactgcctccagaggttctcttcactgaagctgtgaagatattggaagctaaatgtgaagctataaccgacttttgagttctggtttagttcaattttgaattgtctgtctatcaatgtttctcctcctattgataaattaccaacaaacaacattgacatatttatttatacggttgttgttc

SEQ ID NO: 156522 - DNA, 338 bp, Arabidopsis thaliana landsberg
accggggatatcggatttaaggacataagcttgatccgtctgagaccaatcgactctacactgtcctaagctcctaaggctcgccagcaaaacctcagcttcaaattcccacaacggaaaggcgtctgacggatcaaagtacttcccgaacaaaaacgggctaaaaagagacccctcaccgaacacagccatctccgagcctcctcccccgctcaagaaccttcggaaaacatcatcgccgagcggtacgctccactttcccggcgtcttgtcatcagtgtggatctctagtttgaggcttccactactactcgtcatgagagaaattgagacgaatg

SEQ ID NO: 156523 - DNA, 291 bp, Arabidopsis thaliana landsberg
acagctctttgcagagcgctgggtgtggtcgagtgacaggtcgagtaacagtcggataatgtaacagcgatactcgactgcatagtctattgccagacaactgggtggtctagtatgaggtcgagtatgaggtcgagtaacagtaaagaattgcagaaactaagcaacagatgacaggatgcagtacacagcagtagagtaaacaataaaatcaatcagataaagaattcctaaggatggggtaattgagtagtttcgtttcctcagtttacaggtgattgacatgctcaa

SEQ ID NO: 156524 - DNA, 264 bp, Arabidopsis thaliana landsberg
tgtttcaagctgtcataaaaatgtcgtcttcttcttcttcctcgcttaaacccattaattcaatttcttcatagccagcaataagatctggcaaattaaaccattccactatgcttcgtatagttcaaatcacgcttctttgtttcgttctcgccgccgggatctcgatctccggcgtgatcgccgagaatgaatctatagacgagatccttttagcggatggattacctttggggctattttcctaaaggcgtgaagggatta

SEQ ID NO: 156525 - DNA, 351 bp, Arabidopsis thaliana landsberg
gctaaggaaagagactcttgattactttttaagactaaactgagagagtatgtaaactctgaacttcttttgaatttgtctataaccataatctataagcaatactacaaaactgaaaatacgcataaaccaaaaaaagatccttcatagtgagttcttcttcttcaagcagatttcaacttgtttgatgctgatgcaagttgagatagtgttctgtgtcccacgaacaacagaaacactcccaacaaagaaagtgccttgagagtcgtgaatagatccaactgtagaatgcaaacaaacaaaacaaagaaattgtgatttgatgcaatgattcaactgtaggaatgcaaa

SEQ ID NO: 156526 - DNA, 201 bp, Arabidopsis thaliana landsberg
taaatcatatagacagaataaaaatgtcaccaaagatttacaacaaatcctttacattgttagaaaaaacccaaccttatttccaattataaaactttacatttgaaagaaagaaaaaaaaaacaaagaagaactgagaccagatcttcaactatgtcagaatcttacaatatggatcatcataataatacacaaaggttc

SEQ ID NO: 156527 - DNA, 115 bp, Arabidopsis thaliana landsberg
cgaaatattcttttcagataagcgtaatctggtttatcatcaaaccgaagcgaccgacagtagtggaaataggatgcaaattcggatgggtaaccacgacataaagcccgcaggt

SEQ ID NO: 156528 - DNA, 264 bp, Arabidopsis thaliana landsberg
ctcttcctccatcggtggaaacttgttacccttgttcaaccgctcctcacgctaaagctccctctcctcctgagattattgctcctgttcctcttggaatttatgatggtggtcaaaagaatgttgtcaagaaacgtgtgtcttttgctgaaccggtagaagaagtcaaaccaatagaaaccattaaagagcaagaacaagaacaagacgaagattatgatgaagaaagtgaggacgaagatgatggtgatgatgatgatgaag

SEQ ID NO: 156529 - DNA, 105 bp, Arabidopsis thaliana landsberg
cgtttatgtgaaccgcaatggatgaacttttggtcatgttcttgtactatgacactgttatggaagctattgaagctctgggaataaaaaccaatttttataggc

SEQ ID NO: 156530 - DNA, 392 bp, Arabidopsis thaliana landsberg
acccattttaaatgcctagagtccatcacaaacacccacgatgatgtaatcaatgtggttgaagtatccaagaaatgatagtatacatgggatcttctgaccagagaatcaaagtatggaggaaaatagtcaatgaggacttgtgacaagctaggcaacttttcagtactagatgtaaggcacctataacttgtattgtgaaggtgaactcaaaattctccttaatatgtccaaaataaacttaagtttcagcagatggcatcatcgtaatatgaaaagaatcaatactaattatagaaattcaaagtgaactccaagagaagtgatataatattcttttcaatcttttacaaatcaatgttacatgtaagtgtttggacattatttacaac

SEQ ID NO: 156531 - DNA, 147 bp, Arabidopsis thaliana landsberg
ataaagagaataatactattatatgactaacatataccattggtacaatagccggtttaatcactcatcaaggaaggaatctaatacatacgtgccacattcaagcatggtcctcatgtttgttttgtttctaaagtgatccaggat

SEQ ID NO: 156532 - DNA, 847 bp, Arabidopsis thaliana landsberg
ttgcacttattagtatacatttcgttttgtctagtcaagaaaaatctaagactttttaatcctcccttgtcttctggaaatctgggaggattttaaggttcttcttgtccaaaaattaaaaaaattgccaattgtggattgtgtatcattcattgtcatcatctaatcttcttcttcttctacttacgagtttggagaagttatccgccattgaagcatttaaagtaagtttaatattatcttactataaagttagtattatgacttttaatcttttctcggtaattgccttgtttgtcgtcaaattattgaatcctcattttctgggtttttgtttcttgttgtcggatcttcagatgccggagaaaggaatgattttcccgccggtactgagccaattggtgattttacggccaatgcctctacttcaatgacggcttggtgctcttacatcactcgtctgtctcctaatgtgagtcgtttggagtattgacggttgttcgattcaaagcttcgttcagccatggagattcaatgcttactctgttcgaatcagtccttctccgtcgccgtttatgtcaacgaaacccaatctagtatcagagaaacctcaccgccaaaatctcaccttgatgatggctccacgaaatctggttccgaagaagacgaatctcacttcaaactcgacccgggtccagttcgagtggataaccgctggatctcagaagaatttcacggcgaatttgatgagaggttggttggctccgggaggagcgccgtgtagagaagcgaagaccgtcgagatttcagttcccggtgtcgacgggattgattctgtggagttaac

SEQ ID NO: 156533 - DNA, 551 bp, Arabidopsis thaliana landsberg
gatcagaaaagggttccccctttctccattgattattctgttgttcgattcttctctgtatgtttcgatctggctaattgatttcttttttcttttagttacgattttacgtttagtattttcattattgtcccctgttggatttcgattcagagtgtagtttctgctgatctatagaaatgttatatggtgaaagagttagatttataatctatgggatctgatgtcaaagtttccaactttttgtgaaatgtgtgttggtgacgttgagattcagttaatcagttggttaaggttttgttttcaggtgtgatttggtatcaaaatggcgtatgaagacaactttcagcaaagctctgaagctaaatatgattgtcttttatttggtaagataaaggaagaatttttaggattgggatttgaatattaacattagtttattgcaatttgatggtttttaagtttcaacgttctctggttaaagtaattgtttttgacattatcaaacagatatagatgatactctttaccctctcagttctgggttggct

SEQ ID NO: 156534 - DNA, 165 bp, Arabidopsis thaliana landsberg
ctataatacttaataaaaaaattaatatgataatttagatatcaaatctaatttgtttattttaattggttacttttttggaaaataataatgtatttcgtttttctaattaaattaaattaattaaaatttagatatcaaatcttatatgttgattttgattgg

SEQ ID NO: 156535 - DNA, 650 bp, Arabidopsis thaliana landsberg
agtcaatatcttatgtttttttttttcatgaactaatttttgtaatttttcgtaggcttacttccttgattggtctccttcatgcattagtcttgcattttcttaatacagcaaattatcaatgatcaaccgatcgacatagaaaaagagtagttaattaatttattatcatcaagttgagaagacatattcttattacattcatatacaattgatatcagtaatataacacaattacacacaaaaataaagatcttaaatcaaagtcaatgaatcatttctaactttacccaaacacctttgcttggtatgtcttgattcaccacaaaaatcatataataaccaggccatgcaatattcgccgacctcggagtcctcacttgaacctcatacatcggcgatttgccttttcttcgtaaacttaacattgtccaaaaccaaaaccctctgattcatcgcgaaactatgcgtcgtgaacgtcggaaataccataatcactttcgccggagacgtaacttttccggtgaccgaaaatttcaacttcaaaattcctcccatttttaatcattcacttgaagttcaagagatataatcttgggacgaagattccaaaacttccgctgtatgttaacccgaagagaaagcttttt

SEQ ID NO: 156536 - DNA, 129 bp, Arabidopsis thaliana landsberg
gagtctctttggtctatctgcactttaagatgattgtttgagttaccatgcattgtatttttacaagtttagctctcagcccttcatcaaaatgagaatcctcgagtatgatatgattttaatgaaaat

SEQ ID NO: 156537 - DNA, 207 bp, Arabidopsis thaliana landsberg
aaatctgtgttttctttcttttactaaaattgttggagcaaataaagctctcattgatcataaagaaaatgatacagtacaaagattgcattgactcagagacttaacaagaatccattttaagttatgacagatgtgaaactaccccttcccattaaagctataatgttttgaatgaagcatctgcagcttgcagaagtaatttat

SEQ ID NO: 156538 - DNA, 317 bp, Arabidopsis thaliana landsberg
atttccaattttgttggaaacgtactgaccagagagaagtaaagtacaaacagattacaagtacaaaaggatttcattctgtctgaataactgaaaaacaaacataagtgtttctctcttcaaacatcaagatatttagccactgtctgaacatctttatctcctcttccgctgaagttcaagaccactctcgtcccgtctgataatgtgggacatagcttctcgaggtaagctagtgcgtgtgaggtctccagtgctggaatgattccctctaaccgcgacactctcttgaacgctacagaccacaaaccaaaggg

SEQ ID NO: 156539 - DNA, 377 bp, Arabidopsis thaliana landsberg
gattttcagacaaaagtataatcaatcattctgtaacttaaggtttgatattcagacaaaagtacaatcaattcggcgattggtctcagaagatgcattcttgttctcatactcacttcgtatctttcaagcttcctcatttcttcgcgcctaaggtctcttctctcattctttatctcttttgtgtgtgctttgtcgccaattaagaagaaaagtttaaaactttggattttcttaacagagttttgtggtgtcttcacggagagaattaagagtgttcgcagtggcaactaccgtcgaggaggcgtccggtaacataccagcggaaccgatttctctacctcaagggtcatggaaacaggttttgaattgcatat

SEQ ID NO: 156540 - DNA, 373 bp, Arabidopsis thaliana landsberg
ctcgccggtcggaataaaggttttacaaattcctcttgtctcatccggtaagtgttgactgttagtcttagtccctgtgattcgttgtgggcaatgcttgatctgattcattagtgaaatttctgtagaatttggttgatatacgaatttgattctccgacaatgtgataattacaacttagaattgttctcagagttccgtttgatcctgagatttaacttgatctttgcagtgatgttgaagcgtactgacaaatggaaatcttcgcatggatctcgaatccatcaattcggaccgcccccgttgttgggatcttactggtggtgagaaaaattattttgtttcagtggcaagaatcagagcacgaaaatg

SEQ ID NO: 156541 - DNA, 401 bp, Arabidopsis thaliana landsberg
gactcccccaccaccaccaccaccatcatcccgaggtgggaactctgtttttaccgtcatcaagctttggggatttagcgttttcgtgatatttaagttaaggctaaaaaaataaattctgaagatacaaacaagaatagaccagtccgtttctgttaaagcacattctcaagaataagaaccatagcaagccacaatttgagttcaaaataactgtttcatattagctagaatcgtatggttttttaagcccctcttgtttgttagaaacgcaaaatagttgttcaacatagagaaggggatgaaacaatttaccatgagtaggagcttgtgtgattgttggtgattgccgtgtaacggtctgtgtttgtccttgactgcattttgaattctgcagaaaa

SEQ ID NO: 156542 - DNA, 398 bp, Arabidopsis thaliana landsberg
  unsure (1)..(398): unsure at all n locations
ttcaagacttcaacatactccattctctatatacaacctttttaagaaaactttgattaatcagatcaaatatttataaattaaaacacacacacacactttctcaacaatgagattctctctttctcccgtacgtccgcatagtgtagtagtagtaccttcactaccaaaacaggacgtcgtttcttatataagtggtacgacgtcgaatcgtcaatgtcgatgtgtacttacacttccttctccttcagtttccacttccnnnnnnnnnnnnnnnnnnnnnnnnnnnacctgggagagtttgctgctaaaccatgatcaaattccaggcgaattctcacccactggttcgagtatcccggttaagcttggccggagatggatggagtatcaggggc

SEQ ID NO: 156543 - DNA, 346 bp, Arabidopsis thaliana landsberg
gaaaattttgactcaaatgagttgatggatcaaatgagttattgggtcaataggtttgatgagtaaaatgagttgggttgtaatggttaatggtttcaatggtttacccaattaacccatcaagttttgtaaaattgaattaaaccaattaaaatctcttaaccaataccaatttaagtttaacatacacatttaaaccaatttaataaaatcaatatttttccaaatttcttaaatatacacgagataaaattgagaagacgtaaactcgtaatttttccaccaaaaaatataaacccgtgattttcccgccaaaaacgttaacccgtgattttcccgcctaaaa

SEQ ID NO: 156544 - DNA, 290 bp, Arabidopsis thaliana landsberg
atccagagtgattcctaataagagtcgcaatcaccttttttgattatcttgtgcgtgttacatatgtgaatgacgttaacaccatcttaaaaggtacaattcatatgcatgaacaagcaatttgtgaaaaataaaatcttttagttttctatatataactatataataaaactatcaaaatgttattaattaagagtaatttaagactattagaccatattttacatctcttttttacattactatcatctaaagtagttttctagtttttaaaaagatggttgagtcta

SEQ ID NO: 156545 - DNA, 201 bp, Arabidopsis thaliana landsberg
gcaacttgatgacaaacttcagaattttggttattgaatgaaaatcatagtctaatcgtaaaaaatgtacagaagaaaagctagagcagaacaaagattctatattctggttccaattatcatcgctttaacgtccctcagatttgatcagctgcgagaaaactttactcatggaaacacctgaactatcatcaacactcg

SEQ ID NO: 156546 - DNA, 111 bp, Arabidopsis thaliana landsberg; identical to SEQ ID NO: 156160

SEQ ID NO: 156547 - DNA, 943 bp, Arabidopsis thaliana landsberg
aattcacacatatggatatgtaccaataggacaaaagcaaaggcaagatggtgccaggtgatgaatccaaccaactcagaaacagttaaagaatattgttcttgcattttcgttatttcaaacctctcttacagataatctaatttgttaaatgtaggattgtggccaatatcatcaagcaaaagatggagatggatgggtcgaactcaaagggacattacccttcgagagagcacataaggtataaaaaagcttctttctcgccttgtcaaatgttataatgaatttggttttgcctcagtatcctcagctcaatcactttctttttcatgtccattaagattgaaataccgcgtgcttttgtttgcgcggagagcaaaatatttgacgtctcagaatgggccatttgtcaggtcagttctcttaccggttcctctgcggattacttaaatgcgaagatgacttgagatacattaacatgttttgattggattaaatagggaatggcttgtagaccaaacacgcatagaccaagctttcatgtgaacatggttgggttagaaaagacaacacagagatcaaactcaagtaggttcccatgggatctagatgtggagatgatggatgaggacgaagaagagtttgagctatggcttcaacaagctcttgcttcaggtctcttctgcgaaacctcaaaacgtagaaaaagctggagccctttcaagttgggccagatgaaaagcaagaaacagtggcgaagaacttccacttgattcaaatttgatcgaaaccataaacaaaattttcatatagctcaccacggtgaatccaaagccttgaagatcataatttttttaggggagtctttctctgtaaatagcatctgtcgattgttcttccaaaagaataaaaaaagaatctttggatttttcattgtggtaaa

SEQ ID NO: 156548 - DNA, 306 bp, Arabidopsis thaliana landsberg
aagtattttttttacgtatcatattatcttttccatgccatattgctctttatctccctcttacatagtagtcaattcagagcctctgttgcccatcaagataaagcagatgattaaaagaaacagatgattttctttagatctctattgtcgatgatccaaaggcatgatgtcttaacatggcagcttgaaacccatgtccttgcctgccacgtaatcagtccagacatcaagagctccacaacttgtcataaggtctgtgctcagagacatctcggttccaaccgagaaaactataatggaagc

SEQ ID NO: 156549 - DNA, 242 bp, Arabidopsis thaliana landsberg
ttttgatctgacgtttaaaagcaggtttctttctatttccagataaaaaactttactcatcgagactcgtttagtgattcgaaatttcccttctcggctcaaatcttcgatctgggctttcgtgtctttttgcgttttgattgggaataaaaagaagctttttaaaaactttttccatggctggaagtgaagaagttaatcttattgagagcaagggaagacctttttattgactttgctga

SEQ ID NO: 156550 - DNA, 342 bp, Arabidopsis thaliana landsberg
tgataggtggtttggaatacagctgaatcctcagtttatgagcattgatctcaagtaatccatttttctattttttcttctatttgtcagccaaggctacatcattgcttcagtttgctccgtactcaatcgagtggcagtttaataatgtaatcagcagttatgcatggttatgatgaatgggagttattccttgtgtaggtttttctttgtcagagccgggatgatgggatggctgcttatcaatctctctattctggcaaaaagtgtgcaggatggttccttgagtcagtcgatgattctttcccagatcttctgtgcggtaaatttggtttttactaa

SEQ ID NO: 156551 - DNA, 307 bp, Arabidopsis thaliana landsberg
  unsure (1)..(307): unsure at all n locations
atcatagctcttgccanctgtattggagacattgggttatccgagctgataatgaagtgatagataatgttaatggagaagctgtcataggaaaggtgtagttttgcttttagttcaagataacaacatatttgtttgttgaagcaccaacagtcgttttccgttttgtgatatgaactctgttttgttatatttgtagtacccgctcttacaagccggggaggaagagtttgtgtatgagagttgttccagttttccaacaactgctggatccattgatgctttagagcaccattggctcgagcat

SEQ ID NO: 156552 - DNA, 218 bp, Arabidopsis thaliana landsberg
taacagagcggagggtaatatcgtcaatagatcttggcaagtggcaactatcaaagtgttgcaaaattctcgaaaggtcaagctttgtttttttttatggtaaaagtcacatatatatgtcacaagaaatgatcagagccaaaaaggaacgatgaacaggataggagatagaagaaacagccccttctaatcctttggacctgttataacaggaaaat

SEQ ID NO: 156553 - DNA, 523 bp, Arabidopsis thaliana landsberg
agttttcattcatcaccaccatcacatacaaatatgttcatccaccatttacttttcaagagtatgaagacaactcagaagaagaagacctgaacgctagaagttttcaaagactggcaaacaggacaaacaccagtaaacacatcacaatctttacacaaactcaagtgcctacatggcacgagcaagaccgaaacattctttacgttacacaacttacatctcatcccagtacttggcatccccgggatgttcaagtaattgtaagaagctgcttcgtcatcaatctcactatccccaaacccttctttcatttgatgatgatcagcaactcctcctcctactgcattgttgtcgtttccatgtgacatcacttgttgcaaatttacctttaaggcattaaccacagattcattgtattttgctttgtaatgccagttctgagctttcactgccacttgttttatcttatccaccagttcccgggtcttcttgttcatgctttcaatctcttggtcttttt

SEQ ID NO: 156554 - DNA, 131 bp, Arabidopsis thaliana landsberg
gcaagtgtggttcatgtgggtcaaggaagcagtcaccaagtgaatgggaaaggcatacaggctgcagagccaaaaagtggaagtttagtgtaagagtgaaagacacaatgcttacctctataaaaatgggt

SEQ ID NO: 156555 - DNA, 368 bp, Arabidopsis thaliana landsberg
ttgctgatatagagaattctatattattcgttatgtgtcattcagtctctttcttttccacctctttcccatcacttgaatcagtaacctcagctctataaacataaaacttaaccacgaccaagaacaaaacgaagttaaccagattaagtaccgcaaagaacaggtaatagtaatccaacctagactcattaaggttgttcaaaatccatcctcttcctcgtttctttgttatctcagataccgtagataacaagaaactgctcatgaaattcccaatcgctaaactcgttgtcgaatatgatgtcccgaggcttttcatgctctcgggagcttgatcgtagaaaaactcaagctttgcaacttct

SEQ ID NO: 156556 - DNA, 82 bp, Arabidopsis thaliana landsberg
agagagagagcccacaaacaaaccaaatggatttgaaccaaatcttgatcctctcatttctctctcttttaccttaaccata

SEQ ID NO: 156557 - DNA, 689 bp, Arabidopsis thaliana landsberg
gtgacggagaatcccaattccgagacgcaaccttctcctgctcctccgccgaatcatcaaatggatgcagacgacgatgacgagaatgtgaaacagctcaaggagtgttcttctctctatttatctttacaggtttgtgtttctcatctctttgatttccccaaatcaaattccttaaatcattgatttcgattttgtttgtctccgattttgtaggattgtcttgttgatagtaatagggactggaaatcttgccaaaaacgtacgtcactctctctatctctatctcaatttgtaaattctgaaatctgagggttttagtttagagctcaggggtttagggtttgtacctaatcgaacgaaactgggattattgttaatatgtgtgaggaattgttggctgattgataaaagaactgatggattcggacaaaatgttgataagagtttgttgtttgttatgtgttacaaagatgttcaagctttgaaggaatgtcatgaaaggagaatgaagaaatgatagagattaagaaaagccaatacttgattagttactgcttatagaggaaccatataagtatgacatttttgtcgtcttgcaaaattgattaataaaacggtgtcttgtgattgtgttcttgttgtggggattgcaaaatttacaagctttcattcaatgtaatcttggt

SEQ ID NO: 156558 - DNA, 402 bp, Arabidopsis thaliana landsberg
agcgatagtcttgaaagcaacaataaggccacgatcaggattagatccacgattctgccatcgaccaagagaagaagagaggaaatcgccagaggatccattaggtttagaaatgacagtagtgagaccaccatctgctaaaagaggattcgtcggaccaccgacacgaacaggatcattatcaccggactcattagcgaaagtacgccactcagaagtttcatcgattgagtgagattcaagcacgagaccacactctgaacaaactgtatctccggcggaatggtcaaacacaacctccgtgtgcctcttacagtccgaacaaaacgcgtcactcatagcttctctttctcttctcacaagaaaacccctaaaaccccttttcagtaattggactttgat

SEQ ID NO: 156559 - DNA, 156 bp, Arabidopsis thaliana landsberg
accttgcaaattgggcgatgaggatccctgagattgacgagcaggttgtcacttttaagatcaaagtgtactatcttctttccatgcaaatactccatcccaaaagcaatgtccatcgcgatcagttgacgcttgcacctatcaaaattcctgtaa

SEQ ID NO: 156560 - DNA, 227 bp, Arabidopsis thaliana landsberg
cccaaaaccaatttcatggcttagatgctcgctatcttcatcatctttccggtactccaaatagcaacagtaccccgcagaggaagacccataaccgaagggccaggttaagcccgtccacgttctcagttccattcctttctcccagatgtttcattcccgtgaaaagcgccacaactccaactacaacagctgattgaccgacaatcgaatgagaatactcccag

SEQ ID NO: 156561 - DNA, 177 bp, Arabidopsis thaliana landsberg
ttttcttcagtaatcgaaggatataactctgagatttgtgtaagcattcttctttgagattttccgaggtcacaagtcagtacacaaagcaagttccttttttgggttttggggtctgctttgtgtcagtgattttaggattgcttcacatgccacacatttccaatgtcttaagta

SEQ ID NO: 156562 - DNA, 400 bp, Arabidopsis thaliana landsberg
ccagttgaagtacatacttgatgatattcaaacaaaaacgacacaaactaaaaaagtctctagtgccagaaatttcaaaaagacaataacaactagcactctaaaaaccaacaaagtgactacgaaaattcaaaaaagctaatattccaaaacaaacaaaaaaaaaccaccctcgaaaatcttatctcaccaagtcaaactgcagaattaaaagatatgtcaagggaagataatagccaaaagagtgcaaccattaaacaagtgaaaacagagattgagttatgctgagaccaaagtgtttctcccttcgcttagtcgggaagaatttgttcgttgtctgcatctccttctgtctcaatggtaggctttgaaggtccagatccaggagcttgcttcttct

SEQ ID NO: 156563 - DNA, 171 bp, Arabidopsis thaliana landsberg
gagatccttacgatgtatttccggtctgttttttgtcccaagaactctaactttacatatgatgggaacaggtcggagtttttgtctctatctgtcgtactgttgtacttgctgatttttactcattctcccttatgaataaatcttggcttcgtgattttatagtcgacc

SEQ ID NO: 156564 - DNA, 135 bp, Arabidopsis thaliana landsberg
gataagaccttgacacagacgatattgccaatgttttgttgttaattaaccttttggtccgctgtgatcgtgggacggaaactcttcgtcccgggaagaaaaagctctctacttggcctgctcatttggagattt

SEQ ID NO: 156565 - DNA, 414 bp, Arabidopsis thaliana landsberg
aacgttaagaacatcaaaatcactccatctagtataacatattttttaatctttgccgtgcaaatacaaattacacggtgattaatacttccaccaccaaacaaacacagcacactaatttttagaggaaaggaataaagcaaaaacaaaatctctgaccacaaagtgtgtggatcgaaccaagctacggccagtgaaagtgtaatatcagacacttgaaaggctagcccatttgcctacttcgtaaggatccgcatagtaatatagcttgatcctgtttgctaaagacagtcctgcagcaaaaggagacgcccggctgctcaaatcaacagcctctgctggctcatctgtaaaagctgctacatctcctagcagtttaaacgatactctctgtgcttgtatctgtttagggaa

SEQ ID NO: 156566 - DNA, 803 bp, Arabidopsis thaliana landsberg
tagaaaaagtccatgaatccactcatatcttcaacgctttgatgagtctaatgaggttttttttgttcagagttctatgcgtcggtccaatccctactaacatttcattcatcatggatggaaaccgcaggttcgctaagaaacacaatcttataggcctagatgcaggacatagagctggtttcatatccgtgaaatatattcttcaatactgcaaagagattggtgtaccgtacgtcacactccacgcgtttggtatggataatttcaagagaggacctgaagaagtcaagtgtgtgatggatctaatgcttgagaaagtcgagctcgcgatcgatcaagctgtatcagggaatatgaacggcgtgagaataatctttgccggtgatttggattcgttaaacgagcattttagagctgcgacaaagaaactgatggagcttacggaggagaatagagatctgattgtggtggtttgcgttgcttacagcacaagtctcgagattgttcacgctgttcgaaaatcttgtgttagaaaatgtacgaatggagatgatcttgtacttttggagttgagtgatgttgaagagtgtatgtatacatcgattgtgccggttccggatcttgtgataagaaccggaggaggagatcggctgagtaacttcatgacgtggcaaacttcgaggtctcttcttcacagaacggaggctctttggccggagttagggctctggcatttggtttgggcaattcttaaattccaaagaatgcaagattacttgacgaagaagaaaaagctcgat

SEQ ID NO: 156567 - DNA, 309 bp, Arabidopsis thaliana landsberg
ctaaagcatacattacataaagccggaacacagtttgggtctaactctacccaacaaacaatctagaaacatgtctgagatctcctgatattgttggcccatcaacccctcacgccaagagctgtgtagtgtaaccaatcaggcattgcctggacaaacaaacaaaaaaatctacagccttcatgtggcatgactctagccagtgaagagaatcaacagactttcttcttccaaactgttactttttgtttttttggaacaaactgtctcatcatatcagttccttggttgtgactgatcctcaaaggg

SEQ ID NO: 156568 - DNA, 295 bp, Arabidopsis thaliana landsberg
aggcctcgcctgcagctaactccaaagcagcagcgcaccgcgcacccccggcgcgggcgagcgcatgcatgagcgtccgcgcaatgtctctctgccgccccgcgttccgagcagagtttccccgctaacatccagcgagacggcctgttcctgagcagctggttcgtttgggtttcccactgccggggccatggatcagcagcggaggagcagcatcaggttgtacggctccaacgcctcgtcccggtcggggtccttcgacttcgaacacgaccaggacaaggaacgcgccgac

SEQ ID NO: 156569 - DNA, 104 bp, Arabidopsis thaliana landsberg
cattattttttgacagcaattctcagtttctcttctatcccctttctgggttttgtttgaaccctagctcgctttggatccagtggttttaagttaaaggttcg

SEQ ID NO: 156570 - DNA, 241 bp, Arabidopsis thaliana landsberg
ttttttttttcagttgggaagaatgatattgtgtgattggctgtaatcatcgtaaaggacaataaacaagataatgctttttttgtgtgtgtgaaattccaatcataattgaaacagagcttttgagttttattaacactagagaaaaataaacgacatataattcttgaagctgtttggccccatcacatgatacagcaatttggcgaggactccagcatctctggagatctgtagataa

SEQ ID NO: 156571 - DNA, 112 bp, Arabidopsis thaliana landsberg
  unsure (1)..(112): unsure at all n locations
aaaggggtttaaanaaaggcgttaagagttattctatcaatgtgacgagagagaaaagagttggtaattaccatgaaacgtacggctgagtagttgagaaccaaaacggtgt

SEQ ID NO: 156572 - DNA, 271 bp, Arabidopsis thaliana landsberg; identical to SEQ ID NO: 43137

SEQ ID NO: 156573 - DNA, 390 bp, Arabidopsis thaliana landsberg
tatgatgtatgaaccaccaaaacggatctcaacatccggaacttacaggtccggttccagatagattgaaacattgcctatatctaccacatacacattggctccacttttgactataccggaataataaatccatatttccggttcacattctccctggctggccacgaggttttctttttcccgtgggtttaataattaactaggatccctcgggttctttccttttcttgccagatcttctaactctgctgcttctttcttgagaatccgaaaccggctgtgacttttggtccggtaagctgatgatcggctttgtttcatcgataggatttgatggagttatgggtttatcataaatgatagcagcgtcgagggagaagatacgga

SEQ ID NO: 156574 - DNA, 545 bp, Arabidopsis thaliana landsberg
ggagagttttagagaagaattcaacaatgtagtacacactggattgcatagtgttgagattgcgtttgctaaggttcgagctcggtggcggattcttgataagaaatggaaaccagagacaatcgagtttatgccgtttgtcataactacgggttgcttgttgcataattttcttgtgaattctggtgatgatgatgattcagtggaggaatgtgtgaatggttgtgaagctggtgataatggtgagatgagaaaagatgatgataaggaggaggagactcggagtttcgaaggagaagcatatagagagtcgaagaggatcagagatgctatcgctgagaacctaagccgagtgagttcactaagatgaaatcgaaaagttgcaagaagcgtttttgtttgtttgttttagccttatcttgtaaattgtggtttctgctgttttcttttgtgtgtacaatgtacatctgtttcagtatgcagtttacggcttagaatgtgaaccagataatttaatatgaacgtataattttttgtagctgttc

SEQ ID NO: 156575 - DNA, 436 bp, Arabidopsis thaliana landsberg
aatctattcaaatgataaaaaatctgcacctacagattcaaacatcaagcctttcaagaacactatgaactatctaatcatcaagaattcaagatactataaaccaaaaaattgagagaaactacacaagccagaaacttgatcaaacctatacactgagaaccaaagctactaactttaaagaaacccaaaaaacatctactctataaagctaatctgagaactaaagcttttaacttcaaagaaacccaaaacgtcaaatccaattccaactcaaaacatttcaaaaagccataaactttcatgaaaacttacagttttaagctgaccaaaacgttcagaatcagaaagaaactctttaagcaaagcagttctaggattatgaacccacatagtaccatccataatctgaacaccattagcttcacaagcagca

SEQ ID NO: 156576 - DNA, 204 bp, Arabidopsis thaliana landsberg
ctgtgtgattaatgcaattaaccgagaaatgaaattgttaaaccgtatttacatattcagctcccaaagaaaacttcagtttacaaaacgacccagtaaaaataaatgcgttaagattccccctaaaatcatagcggttaacctgctgactaaaccggtttacttctctaattgttcgaatttcggttcaagcctggttcgatt

SEQ ID NO: 156577 - DNA, 427 bp, Arabidopsis thaliana landsberg
  unsure (1)..(427): unsure at all n locations
gctcttctctcttagccttcactaaaccatcatgtctctttttctcattttctacatcttcttgagnnnnnnnnnnnnnnnnnngaacagaacgtagccaagctacttcaatgttcacagactccaagtctttgagaaccgcaagcatctctttgaccttgactttgctcaactgccctaccggggttgacctannnnnnnnnnnnnnnnnnnnnnnnnnnnnnnnnnnnnnnnatcgcattgaatccgattccagcttacagttttgagcaatgtctccgtgcttttcgatgacagcacttagtatagtggatgaacccgatctgactcggtatttcccgacagagacaaaagtgtcagacattactgattcgagatcgagctctacaccaatctcattgttgttttcgtcatcatcatcagaaaa

SEQ ID NO: 156578 - DNA, 262 bp, Arabidopsis thaliana landsberg
tccactccaatctaagacgttaaacaaaccatctctcgattctctcgggaaaacactccaactacgaatctacaatcatcgagcacatacaaagaggaagatttcaaatccaatcatcaatcatctcttttgaatgatccgattccatctacttgctccttaaatttattggtgatccgtttgaatttggtgtttgttgaggcggagatctcgaagatgaagcagctcctatgttatcttccatggcttcttcttatctctc

SEQ ID NO: 156579 - DNA, 244 bp, Arabidopsis thaliana landsberg
cggggttcccccgtgaaaggtatcaccgtacccacaaatatcaatctcaacatataatggcaatattttttggcgtaatatgacacttaaattacatctcatgtcaatgaatattggaagtagttttttttttctttttcaacaatgtattgtttatttattttcttttacctaaagtaaattctatttaatatatacccgttaacgatattaattagaagttcaaagaatcctttatgaaaaa

SEQ ID NO: 156580 - DNA, 385 bp, Arabidopsis thaliana landsberg
cagaactaaatttcaaaatctcagtctctaacaaacaagaacgggacacgagtcacgaggttgaagaagaagaagaagaagcaaatatgttaaacggctggagaagagctttttgcacttccattcccaaagaaactaaccaaaacgacgtcgacgacgacggactcgttggtctccgccacaaatcaacctctcgattcggctttttctcaactccttctacgcctcgttctgattccggcaccggaacttacagcctccgttgcaggacttcaacagccaccgccgtctccactacttcatctcttcccggaactccaaagcttaagtgcaaaaccaccaccaccggagaaacaactcccagaaacagaagccttgtctctct

SEQ ID NO: 156581 - DNA, 418 bp, Arabidopsis thaliana landsberg
agaacggagagggagagagagataactttctcctcttttaaaatttcaaaagtgatccaaattccaggttcattctacattctcctttagttttatgtatacttttgttctccttgtttgcaagatattgaggtttcttgttcgacaagtaatagagacaataaattcatatcttcatctgcttttcaggttctggcgtcttgaggagttgcttaagagatggcgtcatggacttcatcccagttcctgtatgaagaaaccaagccatggggtattcagttcttggaaaagtttaagcgttcaggaagactctccttcaagcaataccaagcccttgtcttcattttgacctttgtcgcctacatcgccttccatgctgcccgaaagcccaatagcattgtcaagggaacactttctg

SEQ ID NO: 156582 - DNA, 165 bp, Arabidopsis thaliana landsberg
gaagtcaatttcccgaacttcgtaaaaccatctacatattcactttcaagtaaaaagtttttcactgcttagtttcatcaaataagcagaccaaaacttaacactaacaaacactcaatggtattctcttgtgaggttcgatcttgactcctccgcttttctcaa

SEQ ID NO: 156583 - DNA, 546 bp, Arabidopsis thaliana landsberg
aacatacaactcaagcaataaacgatatcttggagtccatgaaccttgacaaccatagagcaatgagatgaaacgacgccttggggaacagagagcacatatagtgatctgttgggaacagagagcacatgtagtggtctgttgttcatgattgatactgcaactagggcagaaaatacaatcctaaatccggctaacaatgcctttctcttttctgttttaatctttgagagagaggaagtcttctccgatgttccactttggctccggcaacggccagcttttttagtggtgttggtcagctttactctagcgtcgttggctttcttagcaacgtcggctaactttgtctctatcgattcgcttttgattcggatggcttttgtaccagctattttctgaatttgttttttgtttttctttcctttgtctctctttaacttcagttttcttaagtttcattactttaattagatccttacatatgggtgtgtagttctttgctcctcctttgcttaaagggtttattttgttcttcaaacttct

SEQ ID NO: 156584 - DNA, 62 bp, Arabidopsis thaliana landsberg
tttttctcagcaataaattagcatcttatgaaccaaaacagaggtcaaaggttcaagtaaaa

SEQ ID NO: 156585 - DNA, 136 bp, Arabidopsis thaliana landsberg
tacggacgagagttcggttatgttacaaaagtgtacgaactgttaaagagtagcaataagcgagagtttttcaaattcttgagagaacacagagtgaatgggaacaagatgtacaattttgaatagtttacacaaa

SEQ ID NO: 156586 - DNA, 367 bp, Arabidopsis thaliana landsberg
cgcgttttaaacgatttgattagttttaaattaaaaagaagatccgagcgatgtctggttcgacccggaaagaaatggatcggatcaaaggaccatggagtcctgaagaagacgatctgttacaatcgttggttcagaagcacggaccaaggaactggtctctgataagcaaatcaatccctggacgttccggtaaatcttgccgtctccgttggtgtaatcagctttctccggaggtagagcaccgtggattcacggcggaggaagatgatacgattatactagcgcacgctcggtttggtaacaagtgggcgacgattgcacggcttctcaatggtcgcactgataacgcgattaagaatcactg

SEQ ID NO: 156587 - DNA, 107 bp, Arabidopsis thaliana landsberg
gtttgtctagaaatatacgtacccaaatttttccaccacgtcgtacattttttgtcattgcgcgtcgccctgcttctatttgtctagatgtgatccaagcgggttca

SEQ ID NO: 156588 - DNA, 410 bp, Arabidopsis thaliana landsberg
cgactatgatacgactatgttccgactattttacgacgactttacgacgacattttgtttccgaataagaatttggtcatatcttgattctttgttggctggtcatcgaatctgataattcggtttgtttgttgtttgaaatgctataaagtgttttaaaaatacatttattattgaaaatcctatcaaatacataaaacacaacttacacctaatgttcaaagttctaaacacacacacattattgttcaaagttcaagggaaaagggacagaaatctaaacctattgatcattttgtggagtagctggtagaggctctatggttgtcgaagattgagaggccatgaagtcaaggaattgcagatctgtttgtcggagatggttctccactaaggacaagtgttcgagc

SEQ ID NO: 156589 - DNA, 663 bp, Arabidopsis thaliana landsberg
  unsure (1)..(663): unsure at all n locations
gttgccgttgcttgctatctttcgccgtcgtctctttagcttcttgccaagatggttagttctctcttgcactttattctcgtcttcatctctctccctatacgtctcttgatatgattttgttatagaaaaacgaatccttttagtgaaatttcgagtcactcaagagttttatgtaaattctcttttgatatcttcttctataaaaagcttgaatctttaggttttagtcacgtttacgaaatatatattagcttattagaagtgtggttttcatcattgggttgatctaatgctctaagctaattttgtttttgttgatgtggaacaggttcttnnnnnnnnnnnnnnnnnnnnnnnnnnnnnnnnnnnnnnngagaagaggaagcacaagctcaagcgtcttgtccagtctcccaattccttcttcatggtaatcaaaattttaaagctttctccttctcttgaaccctttagcaaataagtctctgtgattagaactgtatgttaatttggagtttaatgattttctcataatccctagctttgacagtgtgttatgtgatggcgatttttggatgtaagtttgagaatctatgtaactagtttcgagtttgtgaattgtatgtatgttttgagtttgtgaatttgatttgtatctga

SEQ ID NO: 156590 - DNA, 595 bp, Arabidopsis thaliana landsberg
  unsure (1)..(595): unsure at all n locations
caacaatacgtaacaatggcctccaaatccgtcgtcgttttcctcttcctcgctctcgtggcttcctctgtcgttgctcaagctcccggaccagctccgaccatatctcccttgccagccactcctacaccgtctcaatctcctagagccaccgcaccggcaccttcaccatcagccaatcctcctccctcagctcctaccactgctcctccggttagtcagccgcctactgaatctccaccagctcctccgacgtctacttccccagccggagctccgggcacaaatgttcnnnnnnnnnnnnnnnnnnnnnnnnnnnnnnnnnnnnnnggctctccaaacgcagctgcagttagcagagtctccctcgtcggaactttcgccggagtggccgtgatcgccgctttattgctgtagaggctattgacccatcgaatagattcactcgactcattgtcgggttcattgtttgtccttttgttactattcaattatgtagtctatagtgttttctatgatgctttattatcgtgttattgttggtgttatatttgttacaattttttttataatttccttgattattggcattctt

SEQ ID NO: 156591 - DNA, 1118 bp, Arabidopsis thaliana landsberg
atggttaacgtcagattctaccgaaactgtaagctctcttccctcaatcttctattttcgaaactagtttcttccctcatgcatgctgaatttagattaatactctgttttttttctcgaattttacttactaaagtctgattttgatcatctgtgtattattattatgttttcatgttataggatatggtttacatttagggtattgtaatttatctgttgtggaatttaactctactctgtttttatgtgtgaaaattagggtttttgtctggtactctgttttgttattaccttgttctgtttcgttatcgtatgatgtttttaaagatttgatttttatttgtttttaagatgggaaaacattcaagaagccacgtcgtccttatgagaaagagcgtcttgatgctgagctaaagcttgttggagaatacggtcttcgttgtaagagagagctttggagagttcaatatacacttagcagaatccgtaatgctgcaagagaactcttaactcttgatgagaagaatcctcgtcgtatctttgaaggtgaagctcttcttaggagaatgaatcgatatggtcttcttgatgaaacccagaacaagcttgattatgttcttgctttgactgttgagaatttccttgaacgtcgtctccaaactattgtctttaagtctggtatggctaagtccattcaccacgctcgtgtccttatccgacaaaggcatatcaggtaatgctttttgagttggtataatcttgagaacaacgtttacttccagtagcgtttttgaggctagcttatcggttttgtcttgcttaactcgggtagagtcttgatgcacttcacatctatagatgaactcaattgtgtaaagggtgttacaaaagttgattcttgacctaatggtttgtttttgattcggtatagggttgggaggcaacttgtgaacattccatcgtttatggtgagagtagagtcacagaagcacgtagacttttctctaaccagtccattcggtggtggtcgacctggaagagtgaagagaaggaacgagagagccggagctaagaaagcttctggtggtgatggagatgaggatgatgaagagtga

SEQ ID NO: 156592 - DNA, 669 bp, Arabidopsis thaliana landsberg
atgttttcagagcacttaccttcttcttcatctcaagttttccaagaacacttcatcgacagtttcgtctccagaaaattgcttcagcagatcccatttgcccacaacgctcaacaagctcatgtacctgataagaacaacttgagcggcaatgttctcatgctgctctctatccttttgtgcggtattatctgctccctcgggttgcattacataatacgttgtgcatttatacgttctcgaagtttcatgatctctgatcccatctctatcccatccacaccaagagattcatcagtaaacaaagggatcaagaagaaagctctcaagatgttaccagttgtgaattactcacctgaaattaacctgccaggggtcggtaaagagtgtgtcatctgcttgtctgattttgttgctggagaacagctaagtgttcttcccaagtgcaaccatggattccaccttcgctgcatcgacaaatggcttacgcaacatatgacttgtccgaaatgcagacactgtctggttgatacatgccaaaaagtcttaagtgactgcaatgcagctgatcgagtggcagcgacagcaacggagagcataaatatcagaatttctcctctagaacctgaagcaagagtagccactttagagaaagcagctagagtatgc

SEQ ID NO: 156593 - DNA, 895 bp, Arabidopsis thaliana landsberg
  unsure (1)..(895): unsure at all n locations
aatcccaagaagagcaataacaagagaagaagaagtagttcaagaattaaggaagagagcttctccgttaaagtatagtgagagaatatggaagtcaccaatgggcttaaccttaaggacacannnnnnnnnnnnnnnnnnnnnnnnnnnnnnnnngaacaacaactagaagtttcttgcgtcagaagcaacaacaagcgcaagaacaacgactcaacagaagaatctgctcctcctcctgcaaagtaagttgagatctaaaagtaatagttttaatatccaaacttcttgatatcaatcggtgtactaataatgaatcttgatttgtaaacttcagaacacaaatcgttggatggcctccagtgagatctaaccgtaagaacaacaacaacaaaaacgtgagttatgtgaaagtgagtatggacggagctccatatctccgtaagatagatctcaagatgtacaaaaactatccagagcttctcaaagcactagagaacatgttcaagttcacagtaggtgaatattccgagagagaaggctacaaaggatctggatttgtacctacttatgaagacaaagatggagattggatgttggtcggtgatgttccatgggacatgttctcttcatcttgtcaaaaactcagaatcatgaaaggatccgaagctcctactgccttatgatccattgtctcaaaacaccttttggtcgaggcaaaaacaaattctactttgtttagataaaaaaaagtttggtgtaaagaaagaaaaagcaatagggttacaaatacgttatatagatgtaaactagctttggttaattctgtaaaagatgagttttgattatacaaagtttatatgtatgctcaagatatttgatactaacataacca

SEQ ID NO: 156594 - DNA, 1589 bp, Arabidopsis thaliana landsberg
agaggaatctatataaaccgtatcgatgctaacaagtttcatcttcaaaacaaccccttgagatttccgaagatcatcaaattcaaatccctagaaaccgaacaaaaggtaggtcaaaattagctccgataaatctcgatttcgatttgaatcatcgttactcttagggtttattcgtttcccagttcttgatcttcgtcgtttgattctctcgcggttttgtttccttgcgtcgatccatgtgttttttctgttatcttggttctagaatattctcgtacctacttctgatgatttacctttaactaatgcgtaattgcctgatctgtttctgaattgttcgttgattttctctctgtttgatcaaattctgataggattgtctcttgggcctgagtgtttgatttccagatttttctggttgatttcttcaggaggtgtatcttaggctaattatcacagctgatttgcatagagtctttccttttaggatagctatgttcttgctccatatgttaactggtttttgctgtgtactgcttttgcatctgtacttgtagcagtatagtaatttttttgatttgattttgttcctagctagcagaagctaggactattcaatggcgtcgaaaagaattaacaaagagcttagggacttgcaaagagatcctcctgtgtcctgcagtgcaggtgagtgttttaatctatgatatctactgtgaaatttaaagaaccactttgatagattcagtagatgatgtagcattaacctcagaatcagttttaggagaatgtttttttttttgtccttaagatacattatgagctatttagattttaatgaattggtgatgttattaggtcctacgggagatgatatgttccaatggcaagcaactatcatgggtccagcagatagcccgtttgccggaggtgtgtttcttgttaccattcacttcccaccagattaccctttcaagccaccaaaggtaatgtgttgtgttatgagactctttatgattcatcggttcttatcattgatcttatgatgtgaatccatcgatcttgcaggtgtcttttaagactaaggtgtaccatccaaacatcaatagcaatggaagtatttgccttgatattttgaaagagcaatggagccctgctcttactatctctaaggttcgagtttgtgtatctctactcctaccattttaacacaaattatgttactatcttagccaattttgtgtgttaacgcgagcgatattgatgctgtggaaattaggttctgttgtcgatttgctcgctgttgactgacccaaacccagatgatcctcttgtgccggagatagctcacatgtacaagacagatagatccaagtacgagtcaactgcgagaagctggacacaaaagtacgcaatgggttgatgatacaagacaaagcaaaggatatgttattgcgcatcggaataaaataataacttaaaaaaaatgcacttgtttggtttatcaaacgttagcaagtatcgaacaacttagctgctcttactcctcttctgttctgatcactataaactagtattaatttcga

SEQ ID NO: 156595 - DNA, 2276 bp, Arabidopsis thaliana landsberg
atgattttgcaggaagaagaagaagatggcaaatcttgttcctttgaagaaaagttcctgcgaacaaataaacactcaatacaaccatcctctctactgcataaaccccctaccacacttaacacattcgggaaaaataaaaccaatcttttctatgtaacggtactatatataaaccttcaaatcatgtatgaaactggaactagttctaagtatccagaatcctaggtcaagcagaaactaaacctaagcaaagatgatttatcaaccagaagacgaattcgaattcgagacggacaaacaacaaaatttcaccggcgtataacttagaagacactttaccagatttcatgtccactcggtcgactctcccatacttgtcgaacaaccgttccagatccgactggcgagtttcatactcgaaattgccgacgaacactggcctcatctttatcttaattcgcaattcctaacgatccaataactcgaaattagtaacatgtaagggataaaataaggtatatggacatgagcaagtataattatcggagaaaagttacctctgaacaatcggagaagaaacgaaaaacaaaccctagacgacgacgacgactactacgctcgtcgaagaaaagcagagcctggttgacttaaaaaagcccgtcataccatcatgggtacattcggaaattcaaaaatcataatgggccttctttataaataggcccacaataagttagccccataccgaagaactcgttggagtcttttcttatagaattaaatttatacatgtttatatacagacccattttccgtcggtgaagaagaaaagaattaaagtttatgtaagtgtccagttttctgacacgtggagattcaacggagttctctgatctgtcatggttcgatcattattgcggtttaggatgtctctaatgtttcttcttcagtcgttttggcacaatctctgatccgagaaacgcgagtattgagacgacacttcatcgtctgaccaaactgcatccgctacctctcagtcagcaccctaaaactcctaaactctctcaaaccagtcaccatcgcatcgtgatcatgtgcgacccctgtaatagcgtctactgccaacgctgttaagctccttaagtcaacctctgtggctcgcgcagtcatcgcattggagatcgtcgtcgacccacaggtgatcatcgagtttcacatctgccccagtagtgacacattctacagatatagccgagatgatcaggaatcgagtcttcgttgcaatttcactaggatgcagcagcagctggaggagaactcggtatattagaagggagatcatttgcgttgatacacccaattgtgatgggaggtttatttgcatacactctttggactggttacttaggttggcaatggagacgtgtccgtacgatacagagtgagattagtgatctcaagaaacagcttaaaccaactcctgtttcccctgatggttccacagccgttgattcttcgtcgcctccttctacgactgagcttcagatccaacggctaactgaagagaggaaagagttggtcaaagggtcttacagagacaaacactttgacgctggctctgttttgttaggtttcggtgttttggaagctgtctttggtggtgttaacacttatcttcgtactggtaaactcttccccggtcctcatctttacgccggtgcaggtaccttaaacctatctctcgtcttatttttcatttccttgattttaggttctaatttatcaaagtgtgtaatcttgggttgcttagtcaggttttggcttggtctgatgtggtttaagttttgatcagaactttggattttagttatattggtataaatagtattgtgccatttcaaaagttaccattcatcacaactatgagaaaaaatgtggtttatatttgttattggatgtacaaaacgtgtcacattttgtgttcatggtggtggtggtggcaggaataacggtgttgtgggcggcggcggcagcattggtgccggcaatgcagaaagggaacgatacggcgaggagtctacatatagcgttgaatgcagtaaatgttcttcttttcatttggcaaatcccaacaggtcttgatatcgttcttaaggtctttgagttcactaaatggccatagatattaatatttggatgtgttatttatgagtttgtgactctatatatgcaaatattcttcaactttttttgaggtttgtagatgatgaatt

SEQ ID NO: 156596 - DNA, 455 bp, Arabidopsis thaliana landsberg
atggtgaaggtattgaggagtttccggtattaaatctggggccggcgattctccttttgacggtcccggtggcagaaagggtgacgtgctcgcatatgcagctggcttcatgtggggcgttaatgacgtcatcttcgccgccatcgtaggcgtgttgcacaaagctgagagagcagcatccatgcctttgtgggtacatgaggagccctaccctccgccaatacgttagctcccctaacgcaaggaaagtctccaacagttgcaagattccttccccaagctgttaaggaaatgttaatcatgattaattagtgacaagtttcgctgattatagtggttaatgctgcgtcttatcttcgtcagtactacttaaaataataaatgagtgatgatgattgatgattatcatcatcatgcttgaatgctatgtgttctatcttataaaatatgaaata

SEQ ID NO: 156597 - DNA, 1110 bp, Arabidopsis thaliana landsberg
  unsure (1)..(1110): unsure at all n locations
aacttcctgataaagattgattttttttttagggtttgttaagatttgagttgaatcaaaaagattgaatttttttattgtttgatttgaatcgatgctaaagtttggattttttgttttgtctctgtagtgatgatgactcgaagctggtggacaaaattgctaacgagatatcaaacaagaagacgatttatgcaacaatatgatgagtccagacgagaagaagaagaagaaaggagaaggcccataaggactcgcaggcccaatccaaagtatgtccaacactaagtcatttgacttagtctttgttttcgatttagttacaataagcattgagtcttccacgattccagtttccatctttcccaagtttgtaggagttgttactccacgtttgtttccagttgtaaggaggtgtactccaagtatttatatcaatgaaaaacaaaacaaaaggtagtcttaactaccaccaaacaatcgtttatcaattctaagaactagaattctctttggctttgaagagggaccattacaataaacaatgggaagaatctagttgggttgatacacacatgaaggaactaaaccgattaatgcatatgaattgcaacaaagttactgtaagaatggttggtatttgggcaagaggagatcagctttagctaaatttgtttatcagaacatctgtcaacacttcgaaagccattgtttcttggaaagtgtgaaaaggatttctcaggatcgccacctgtctcacttacatgaagagtttatgatacggattcaaggagaatgcttgagtaaattaaggctcaagaaccaaaaggttctgctcgtggctgatgatgtgaataagcttgaacagttagatgctcttgcagaggactttaactgctttggtcctgggagtatagttattatcactacacaagacnnnnnnnnnnnnnnnnnnnnnnnnnnaaaacttgtttatgaagtagagcttctcagattccagaaagttcgtggactcttcagacaattagccttcaaagagaaagacatttctgctgcgttcgaggtgtctttgtatagggcaacgaatgttgccatggaatggttaggttg

SEQ ID NO: 156598 - DNA, 1106 bp, Arabidopsis thaliana landsberg
gtcgaatccaaagtttttgatcttaaccaagtcgcataatccagagaggtaagttttctccgatttgatttcgtttatgcatataatttatgtttgatttctacaagaatatacagagataagtgtattacgacttgggtagtagaaaaattagggttttgtgttgggatttggtaaattatcgtttttcttttcttcttatttgggttggtgattctggaaatttgttatatatattcaggaatcaaaagaagatgagtaacgtcagcttcaggcaggatcatgatttcggtatataaatcttcttcttcttttttccagtaatttaagttagtatgattggttgatgattgatttatattgcagagaagaggaaagctgaggctttaaggatcagagagaagtattctgacagagtcccggtattcttactctcttcttatgtcactgccatcgattttgttctgtttcctagttttcctgatattgctcacataggaatataccctatttgagaagctcttgtgaggcctgattgattgaaatcttgcaaaaataacactttttgatagatagatgtggttcttgttgagagttcaatgcatagtttcagaataagatggttatattaatgtctctcttttgtaataggtgattgtggagaagtcagagaaaagtgatatcccaaacattgacaagaagaagtatgatcctctttttctttataatatcaaatctgattcttaacattggagtctctcttgcttattcttcatgttttggattttacattttacagataccttgtcccagctgatctaacggtaggccagtttgtgtatgtgattcgtaagagaatccaacttagtgcagagaaagctatcttcatctttggtgataatgatcttcctcccaccggtactgtctcctcctctcaatctctacttaaacaactctttagtccttacataaacctgttggtttttattattggaaactcaattgcaggagcgatgatgtcaaccatttacgatgagaataaggaagaagacggcttcttgtatgttacctacagtggggaaaacacttttggatcgtcaatgact

SEQ ID NO: 156599 - DNA, 604 bp, Arabidopsis thaliana landsberg
tccaaatcttctagattcatattcaaatcaagaaatgactctcgctaagaaccaaaaatcatcattgtcacgactatacaagaaagtttcctcgaagagatcagaatcgtcaagaaaccttgaagacgaagcaagaacgagcagtagtagtagcggaagcagctcgttaaacgttaacgagctaagaaccgtttttgactatatggatgcaaactcagacgggaaaatctccggtgaagagctacaaagctgcgttagtctcttaggcggcgcgttatcgtcacgtgaggtggaggaagtggtgaagacatcagacgttgacggagacgggtttatagattttgaggagtttttgaagcttatggaaggggaagatggtagtgatgaagaaaggaggaaggagttgaaagaagcgtttgggatgtatgttatggagggggaagattttattacggcggcgagtttacggaggacgttgagtcgactcggcgagtcgtgtacggttgatgcttgtaaggttatgattcgtgggtttgatcagaatgacgatggagttctcagctttgacgagtttgttttgatgatgcgttgagatgatatatat

SEQ ID NO: 156600 - DNA, 611 bp, Arabidopsis thaliana landsberg
gtacgtaaaacaatgtctctactcaaaaccaacattttatttctcttagcaattgctcttttctatggctctttagccgaagatttgcaacaacaattcttagaggcccacaacgaagcccgaaacgaggttgggctcgacccattggtttgggacgatgaggtcgctgcatatgcggcaagctatgcaaaccagaggatcaatgattgtgcattagtccattcgaatggaccatttggagagaacatagcgatgagtagtggagaaatgtcggctgaagatgctgcggaaatgtggatcaacgagaaacagtactacgattacgatagtaacacgtgtaatgatccaaacggtggcacctgtctacattacacgcaagttgtttggaaaaacacagttcgtttgggatgtgctaaagttgtgtgtaacagtggtggtacttttattacatgcaactatgatcctcctggtaattacattggtgaaaaaccattctaaaaataatttcatgtctaatgtcttgttaatgaggcaaattaaaagagataatgagttgtttgttagttgttactgtcatttcttagctgtactgagaaagatattacaatttt

SEQ ID NO: 156601 - DNA, 878 bp, Arabidopsis thaliana landsberg
atggtaagtttcgggaattacttcgagaggttgcctgtaaagcttcctaataaccgccgtgtgaagaagcagaagaagaaggagatgaaacaagaggaggtggagaatttggggcttagagagttgatcgatggtggtgacgctgctcatggtaggattcttcataggaacaacatcaacatcggttcctcaaggtttgtttcttacaactccttttaaactttctatcattctgtgttgctttcgggattgtttaaacatcgaaataatattttgtggtctactaagtctttccacataattaaattgaaagtaaagagaaaaaaagacaaagcacgaaccatatgagtatgacggattggagaaaccaaagaatggtaatctcaaaggtttgcttcgtcctctgtattacgttgttttttatttttctcattttcaccaaagaaatgaactaaaatcaagtttctctctctcatttttataattttaatatttgttttgtgtagcctttgtatcgtccaaatgtggtgatactgattcacactttgttacttctcttctttataacatgtttcatgtgtttttgctaatacatccttttataggtgcaatggtagatacaaagtggcttaaaaattattacactaagaatttcttagcaatcattacactgagaatttctgttcatgatgaaggtaataggtaggcaaatcatatatctgttgctcgatgctcatctgtgatgtatattttatttaattattaatgtcatggttctaattttttctcgagctatttgtgttttaactattcgagtcacaaccatagtcaaaatttcaaagtttagtaaatggtgtcaaaggcctttagcttcactt

SEQ ID NO: 156602 - DNA, 397 bp, Arabidopsis thaliana landsberg
aaaaatgggaaaatcgattcccgtcaaaacagggctaagaggagcttccgcagcagtagctggattcatcaaatcctcaataccgatccgacccatttcctccatggacagttccgacaaagattcatcttccaccaccaccaccagcgaaactgcccgacgtttcgttccgctttcatcggtggtttctgattgtgcgaagcggtggtttaaagacactcttgaggaagctaaagctgggaacatcactatgcaggttttgttaggtcagatgtattactctgggtatggagtccctaaggatgctaaaaaggtttcgtctttattccctccctttcaatcaaatctttaaaaagttttaggtttttttagtttggttgatttgaaaattctctaa

SEQ ID NO: 156603 - DNA, 398 bp, Arabidopsis thaliana landsberg
tctaacagactatagtgcgatcctctgtctcttagacatccttttcttcactctcatggctgccactcgcagtgcatattgtcttcctccatccaggcatacacagcaaacaaaagcctagcccaacacccactaccgggacttgtcctaaagatgccttaaaggtcggtgtttgtgttaacgcactcaacttgttaaacggtttgacccccggaactcctcctgtgactccatgttgcagcctgatcgagggtttggtagatcttgaagctgcgatttgtctttgcactgctctcaaggctagtgttcttggcatcaaccttacccttcccatcaacctcatcttgcttctcaatatttgcaacagagaggcatcacgtgacttccaattcccttaa

SEQ ID NO: 156604 - DNA, 1008 bp, Arabidopsis thaliana landsberg
gaagtggtcgaaagccctcctgtttccagtgaagaagaagaatctggctcatctggagaagaatctgaatcttctgttgaagttccgaagaaagtcgagtcttcgcaaaagcctgaatctgactctgaaggcgaatctgaatcggagtccagttctgggcccgagcccgagtccgagcctgctaagacgatcaagctgaagcctgttgggactaaaccaattccagagacgtctggatctgccgcgactgtacctgagagttcaacggctaagcgtcctttgaaggaagctgctcctgaagctattaagaagcagaagacatcggacactgagcatgtgaagaagccgataactaatgatgaggttaagaagatttcttcagaggatgctaagaagatgtttcagagattgttcagtgagacggatgaaatcgctttgcttcaaggtattattgatttcacatctaccaaaggagatccttatgaggatattgatgctttttgcatttatgtgaagaaactgatcgatttcgatgctaccaaaaaccaaattgttactaaacttcagaggttgaagaagaagtttaatatctttgtgaagaatgcgcgtaagaagggtcagacagaagatgaggtcgagtatgctaaagagagtgagaaaaaacgttttgacttgtccataatgatttgggggagcaacggtgttttggttgctggtaaatcatcaaagaagaaagttgcacccaaagagatgaaacctgaagaaacagacgcaaaggttgtgaacgaaggtctctccattggtagagagatggtgccgttcgggagttcttgtggtttggatgaatctaaattaactgcgggttgggaaaatgttgaggatggagctgagaagagagaagtggaggaaaaatggaagaagtttaaggataagcagtttgagctactttaccagaggtctgtgcttatgaacaaaactgaagcgatgatgttcaaagctgaatcttga

SEQ ID NO: 156605 - DNA, 3834 bp, Arabidopsis thaliana landsberg
gcttcgggagcgcacttgagaacgagcaaggcggtgatcttcatagctgcggtggatccaaggttgcgtgagaaggaagcgaggaggaggaagagaagaggctttggacctggattccttactcggagatgctaaaggcaaaacaagttttgaggtgtcgaaccaaacgcagacgccttctcattaacattgaataattgaataatgaatatataccctctttttcttattcgctatgttgaagtaaaaattaaaaacctttggttcaattcaattttatgtgggcagtctcggttcggtttagcatatattgatgcagaattggaccggaatcaaagatttttccatcacatagaattggatttttaagaattttaagtctaggcaaaaactgaaaccaaagaatattttaatttttgccaatcgagttttcttattaacggaatattggtttggtttagatcggacaacttggtttggtccgaatgccaaactctaatattgtcattttaactacatacatgtatgacaaatgaatatagtacaaagtccaaaactgaggggtgttacacccatttgtgcaaagaagatgtaagaaagcatcaaaaaaagaaaaagcggttaagaagggaatggtggagaagaagagataaaaatagaaaggagtaaatggccataaatggaggatatgagagcaagttacttttttttaccattaattaaccttgtttgacccatctcctctttctcttctttttcctttcctctaactaaacgaggaaaacaagcaggagaggggattcatgttcttttctcgctgtaagatctctctttcacaattttcttaaatgtgacaattctgtttttgttacatgtatcctgactttgcttttccattggggtacgtacgttacacacaaatgcaggatcaatcagatagagatgctgaggtttttcattcttttctcccttttcttagactcttgtgttgcggcacccaagactcctgctgctgccgcagctgttcctgccaagaaatggcttacccttaacggtaagcatccttttacagagtatgcccatattgcatactaccatgttgttgttgttttttgttgtttaatgttaagacttaagataccatgttgtttgtttgtttctaagaatccgtacctgtcttttgtcttccaggacaagagcctgccgttgtggccagagggggcttctcgggtcttttccctgagtcaagcatctctgcaaacgacttggctattggcaccagctcgcctggcttcacaatgttgtgcaaccttcagatgactaaggacggtgtgggcctttgcttgtcagatatcagacttgacaatgcaaccaccatctcctcggtcttccccaaagcccagaagacctacaaggtcaacggtcaggacctcaagggctggtttgtcattgattacgatgccgacaccatattcaacaaagtcactcgtatgtcttcttctctttcatttcctcccttcaatgctcaccaccaccaccacacattttcatgttttgtattattgagcagtggtccagaacatcttctctcggcctagcatcttcgacggccaaatgtcggtttccgcagtggaggacgtccttggaaccaagcctcccaagttttggttgagcgttcaggtatgttttcttctctttgagaacatgattaaccaacatatggagcttttttgttgattcatcaaaacaacaaacaatgcaaatgtgcagtacgatgccttctacatggaacacaagctgagcccagccgagtacctgagaagcttgcaattccgcggcattaatgtcatctcatctccagagattggtttcttgaagagcatcgggatggacgcgggcagggccaagacaaagctcatattcgagttcaaagacccagaggcagttgagcccaccaccaacaagaagtacagtgagattcagcagaacctcgcagccatcaaggcctttgcttcaggcgttcttgtgcccaaagactacatttggcccattgactcagctaagtaccttaagcccgccaccacttttgtggctgatgcccacaaagccggtctagaggtctatgcttcagggtttgccaatgacttgcgcaccagctttaactacagctatgatccctccgctgagtatctccagtttgtggacaatggccagttttctgttgatggcgtcattactgatttcccgccaacagcatcacaatccatcagtgagatgacttgctatatacgtttcctcagatagctgattattaagaagaagctaaagcgtctgttttcttgcagcttgcttttctcaccaaaatggcaatctccccaaagcagggcatgcgttggttataactcacaatggagcaagcggagactatccaggctgcactgatctggcttaccagaaagcagtcgatgatggagcagacgtgatcgactgctctgttcagatgtctaaagacggaatcgctttctgccatgatgctgcagaccttacagcaagtaccaccgccatgactattttcatgtcccgagccacaagcgttcctgagatccagcctaccaatggcattttttcttttgatcttacatgggctgagatccagtctgtgaagcgtaagaaactgatttgttttactatagacttctgaaactatctcattctcaactaagtcactgagcattgggatatctttgtattcagcacaaatagagaaccccttcactgccacgggcttccagagaaatccagcaaacaaaaacgctggaaagttcattactcttgcggatttccttgacttcagcaaagcaaaggctgtcaccggagttatgatcaacatcgaggcaagactttgtaactccaaaatgcttctaaatttactcaaggcagcttctaacgcattgtttgttgacagaatgctgcttacctagcctcaaagaagggcctaggagtcgtagacgcagttaagtcggctctggccaagtccacactcgacaagcaatcaactcagaaagttttgattcagtcagatgacagttcggtcctggccagttttgaggctgtccctccgtacacgagagtcttgagcattgacaaggaaatcggaggtgctcccaagccatcagtcgatgaaatcaagaagtacgcagaagctgtcaatctcttgagaacttccctagtcactgtctcccaaagttttaccacagggaagactaacgttgtggaggaaatgcacaaagggaatatctctgtttatgtttcagtgctaagaaacgagtacatctccgtagcgttcgactacttctctgaccctacaatagagcttgccacattcatttcagggagtggcgttgatggagtcatcacggagttccctgccaccgctaccagatacttaagtaagtttaaacctcgacaaggtcatgaaagaacaatagatatacaaaacaaagataaagctgatcatttatatttgatgcaaatgcagagagtccatgctcagatttgaacaaagaacagccctatgcaatcttaccagcagaagccggtggtctagtcgtcgtggcagacaaggaagcacaaccaccagctagtgccccaaacccgcctcttgaggccaaagacgtgattgatccgcctctgcctccagttgcaaacttggctgcctccaatgcaactggaggagctcagtcacatcctcctcctgcttcaggaaccgttgccaacgctgcaaatctcggtctttccttgctggcaatgttggccttaggagtctaaaataaa

SEQ ID NO: 156606 - DNA, 2756 bp, Arabidopsis thaliana landsberg
ataatggtcaacagatttaaaattatgattttctatattcttgtaaaattgttgtggcaagaaatcatgttcttaccaatttctagcataattatgtcaacagccagctgcaaagttatcttattaactaaaattttatataatacagaagtgtgaacttgtttcaaattagttaaaaagagtgtatattgagtacaattttctaatgatatttaataaaaaaacattgtgttaaaattttaagagattttgtcatgtgattattattattccttatatatatatattatcctttatatattaattgagaaacattcttaataaaaacttactcttatatgttattaatgaaaatgtcatgctgacatgttgtgttcgtagagatttgtaatctatttcattcattgtctaacatttactagaatattaacagattttttattagtattatttatacatatctcacacaaataataaaaataaaaaagagatcacatttaaattgataacatatgcaattaaggaatgcactttgttgtttttcaatcaatttacgggtaaagctaactctgatactaaaaatctctgcttcaataaaataataaaatataatacatgttttttgttacgaaacaagtttcggattctgaataatgatgatacaataaatttgtagttaactacgatgtatttatttaatcattattttaccccgcacattttgacctctcattttttttgtgttgcctattttcctaacttagctgaattcttgaactcaaagatcttgaatagctctatgctatttgtgctggccaatctgaatttattaataatgtttgatatatattacacgtgtttaattgcatgggacgtgaatatatctttagtgacgggtgggataaactccatgacaataccaaaatttgaactctcgcgcttacgttataaactaagctataacttctaaccccccatgcatgtttcaattcaacacatttacaaattcttagatctaaatatggaaacctatttcctacttttatctctcgccttcttccttttcatttctgttaaacttttgtttggtaaacggcttagcaagtttaacctaccaccaagtccggctaggcccctgccgttgattggacaccttcacctcctgaaactcccgcttcaccgcacattcctctctttctctcaatccttaggtggcgccccaattttctgcctccgcctcggaaaccgtctcacggttgtagtctcttcatactccatcgctgaagaatgttttacaaaaaacgacattgttttcgccaataggccagagttaagatctaggcgaacatattgagcaacgccaccactatgactagtgcgccttatggtgaccactggcgaaacttgcgccgcattgctaccctggagatcttttcgtcacacaagctcaacggctttttatctgtccgtaaagatgagatccgacacttgttattgcgcctctcaaaaaactcgcaacatgtatgtgagcttcttctacatatcaaaacattttacttagccagaaaatattataacctattgatttgtgatagtgccgtcactgtttcattatataggtttatacttggccatgtgcatgtgcaaaatgtagattgtagacgccaaaaatattctataccaaatgaagattgtgaagtatgattttgaaagtttgaggattaatcatttgtttatgtgattataattaaaatcagggttttgcaaaggttgagatgagacaattgttttatgatttgactatcaacaacattcttcgaatggtggctgggaaacgattttatggagaggggacagaacaagatgaagttgcgcggcgagtgacacaactgattgacgagattgtgtacagggctggcgctgggaatgcagccgattatataccgattttgcgttggatcacagattttgagaaaggggtcaaggagttggcgagtcgggtcgatgagtttttgcagagtctggtggatgagagacgtgtgcataaagaaaagggtaacactatgatggatcacttgctttctctccaagaaactcagcctgattactatacagatgtcactcttaaaggaatcataattgtaagtttgaggaattcatatactatatgtaacaacactaatcaaactttatgatagcttattattgattttaagtttacaggttatgatacttgccgggactgaaacattagcagggactttagaatgggcgatgcttaatttgttgaaccatccagaagtattagagaaagcgaggaccgaaatcgataccgaagtcggttttgaccggttaatagatgaagcggatactaaaaatctgccttatctccaatggattgtgttggagaccttacgtctttaccctgtagctccaacaaatattccacacatgacgtcagatgattgcatattggcaggatacgacgttccacgtgggtcgatgttattggtgaacgtatggtccatgcatagagacccgtctatatgggaagacccagaaatgttcaagccagagaggttcaaaaatgaaaagctaaatcaaaagttgttgtcgtttgggatgggactacgagcctgtaccgggtatggcctagctcatcgggtagtgagcttggctcttggaaaaatgattcagtgtctcgaatggcagagaattggagaagaatatgttacaatagtaagacaaaacctgag

SEQ ID NO: 156607 - DNA, 1498 bp, Arabidopsis thaliana landsberg
tatgttaataattcagtaattaattctgagtgcttttgaatatgtccaaggctttgtatgcaggtccatatggtcggtggttataatcatgtggacaaaaaagttcgtctgtagattttctatttctcacccgacttagttctaagctgtagagaggtctttagatagatgtcttggccgttatgtgcagaatgatgatggtgttggtgattatcccaacccacagggttattcatttccgttgtgtggcaaattagtagactctttgcagaagaaaagacaagactttcacattcaaaccctctttattcttgggcccaaccgcaagttggattcacaagcgtactcgtgccccattgttcaccgacgcctggatagtagcctaatatgtctgcttcttctctactatgctaattagaagatgtactaagtcattctatacaaatagagaaatggaaattgaccctcattcatctaaacttgataggtaacatgtactaagaccacttttgtaattggttttcattgtcaaaatactgtctttcttccttagggacaaactagacaatagaattgcttgaaatttgttcatatgaatcagtaatcagcgtaaccatgtttctttataacctttttatcaggtgaataccagcaccggtgcaatcttgccagccagtttcaacagaacatctagatgtccggatgagatcgttagaagaattcgagtttcatcatcgtttgaagattctagctggaagggaaagttacttgacacatatgacacaaaaactgatagattcatcatcgcaccatgccgctggtaaaaacaaaacgctacttctgtcacattacatataattgcatctaccattatatcttgtctttctcaccagatttaaagtaattactctatccactactcctcattacagtttcataaatcgtgtttatgtttgtaatataggacaatgcgcttgattgaatatgtttgggaacttaatcagcttactgatgaagaaatcctcactaactgttccacctcaccttctgctgaaggtccagacttcgtaaacagtttaagaaggttagtcattttggaagcttccactggatcattatctagaacacaaacaggacataggaaaatttgcattctctttctattcgtgtgttttaggaactggggatatttagtgaaatacccagaatggagcataacattcccaaggaggcaaccaggtgtgtttgaaagaactgtcatatggaccctggtaaaaatgaggctgttctcatgtaatcatcaggacagcatgcagaaatctggctaataacaacggttagtgtatcgaacattttgacatttatgtaaatggtcaagaacacatgtgattgattcttggacgcagaaaatgtttgattgatccttttgactttagggatcgaacgttgcaagtttggttcctatgaaaatatgggccggatcaggcccggtacacct

SEQ ID NO: 156608 - DNA, 3146 bp, Arabidopsis thaliana landsberg
taaaagtgccaattctttctattgtcgttggggaaggtggttttggtggtgccctagccattggctgtgataatgaaatgctgatgctcgaaaatgcagttttctatgttgccaggtaaaatttccccaatgtagattacgatgatatgatatttctataggttgaatttatcccatctgttgttttgcttttcacagtccagatgcctgtgcagcgctcttgtgaaagacttccaaggctgctcctgaggtatgtacactgctctactattaattaagtgatcatgtagactctaattttacacttgaatgaaactcgtgtactcaggctgctgaaaagcatagaattacctccaaggagctggtcaagcttaatgtagccgatggaatcattcctgtaactgatcctacctctaatctatttgtgtgtttgcctcttagacctcttttgtcagtttggatcattgagttactctcttacatgctgtgcaggaaccgtttggtggggcccatgctgatccttcatggacgtcgcagcagataaagattgctatcaatgaaaacatgaatgtaggcatagttattcttctaaacgtagaatgtgatctaaaaggtttctaactttttcttgggacttgtaggaatttgggaaaatgagtggggagcaggagctcctgaagcataggatggctaagtacacaaagattggagtgttcatagaaggtgaaacaatagagcctagtaggaaagtcaaaaaataataatatatgagattttttcgggtagattgacctatattagcattcgttgatgcactttaagctattaatgggctcaaaaatattagtttattaatgggctcaaaagttttaatattagagttttggtatttacgggttcactagcttaagtaatgtcattgaccaactctagtttttgtggacaagtttcattttattacatggaccaaatttaggtgttttaaaccattgcattttatgttacggaccaaaattttctaaattttttgttagcaaatttactttcacgtttattatatgaacaagtttcatttcctcttagagtttttgtcaactgaattaaaagtatgtttttagtcaactgtattaaatagtcatatgaaaaataacagtgactttatatgtatagaagagtacaagactttcaagtttttagttcaactttgtgtttgatacttttgttaagtttataagaggtcacatatcgctgttaactcgtggcgacacggttggccgcgtgactttttagtcaaagtgtattcctttcattgatgttatttctatatgtgctcttttcatattgttgtttgtatggtagttttctgtattttgttaaaaaaaaaaaaaaaaaaaggtataaattcatggttcctaaattaattagtttttgactaaagtataattttttggcaacatgttaaatgtttgttgactcaaaatttatatatatagagatcaaaatatcaatggagaaaaataagtaaaatcaaacaatgggtttaaatctagtgtttgttctatcttcttatttgctttttacgcaaatggttgaaggaaacgttgatgtgagcttctataacttttactttgtaatttttacattccttaagatttgatcatttaaatttctcaaataaatattgttttgtagtcaattttacaggaatttgattgtgttgaaatatacaaacaacccgctttccaacatccattgttgaaaaaccacaagattcaggtatagtgaattacagtttctgtaatatagcatagttaatcttgcggttctatatataatattccttaatcttgttattcttgtgctatggttttaggaaaaattcacttcaaatgaaaagcttagaagagaagatgaatatcacccacatgcaaaatattgtccaaaaggaactgtaccaattttaagacagagaaatggacctgagagctttcatcctggcacagtcgaatatcctggccaacatgtataaatgtcacatcacaaaaaatagcgtttttctccttatttctagtgttgtgtaatgaaacattacactccttatttttcacgtggtaaacagtgtgcagtactcgaaaatatgttagatggaagtatatatcggggagcagaagctgatataagtattcatgatttgaaactgcaaaataaccaatacagtaaaagtcaaatatggttagagaatggacctcaggtcaactcaatagtatacaagctggtttggcagtaagtcagttctatcaaacttgctaaagattttgcgttccataatctgttttttttttaacatacataatcttttttatatttatttctgtttaggtacatccaagattgtacggtgatagtgtcacacgatttacaatatattggactgtgagtaatttttagctactcttattcttttaagaacattattaatcagcttagagtaaaaaaataaaataagagatcaaaacgtctttcattattttacatgtgtaacaaatattattatatgtagggagatggttatcagaaaactgggtgctataatacacaatgccctggctttgtggttgtaagtcgaaattcaagaattggaagcggattttggggaacatctgtctatggtaaaacaagtcttacgtttaaattgcaagtttttcaggtaaatttctgtttatcctttttaagaaaaagatttatataattagtttagactttagatgaacttatcatattacaccatacttgttggagtatttagttttcattttttcttttgttttatatgtattaggatggcttcagcggaaattgggcacttaaaatgtttgatgaagtcattggttattggcccaaagaactatttacacacttaaacaaaggagcttctttggtgcgatttggaggaaatacttttacatctccggatggaattagtcctccaatgggaaatggacattttccggttattagctattttaaaagttcacattatgttcatgttaaagttaagaattcaaattatcaacatagatgatattgaaagcaggaaagcaaggatatatgcagattctaccaatggatagactacatactggggt

SEQ ID NO: 156609 - DNA, 1952 bp, Arabidopsis thaliana landsberg
  unsure (1)..(1952): unsure at all n locations
ccataaaccctaaaaaagataaacatcgttctaaaccaagttccgggagctacgatatactggagctagacgtagcggacctactagcgaaatacacgcattactgccagatttgtgggaaagggtttaagagagacgctaatctaaggatgcacatgagagcgcacggggatgagtacaagacacgtgaggccttgatcagcccaacgagccaagacaagaaaggagaatactcgttaaagaaacattactactcctgtcctcaacacgggtgtagatggaaccagaggcacgagaagttccaaccgttgaaatctgtgatttgcgccaagaatcattacaagaggagtcattgtcccaaaatgtatatgtgcaggagatgtagtgtgaagcatttctcggttctgtctgatcttaggacacacgagaagcattgtggggatataaagtgggtttgctcttgtgggactaaattttctaggaaagacaagctgatgagccacgtttctttgtttttgggccacgtaccggcacatgggtcgtccaagccgccgacaatcaccctaaagtaagaacataggaagtttgaggtctatagagatttcatagacgatatctcaagaaatgacacgtgcattcactccctctcttctttttgttctttttcttttcacgagtttctatattctctaaattaatgtcacaaagataagataatatacagatttgtatcatagtgacttgtgcattaacgttaatgttacaaatgattttggttctgatgggtatcatgcatagattttcactaatctcagaaatatgtggaatcagtgagaatcaaaatttatgtttaatacgtctctcacttctcagattaatcaacaactatctattgatatatcatgcagaattttaagaaaatataagaaacatcgttaactctgttaaaatacaactacatattaacttattaagatgagtccaacttattaagctgaactaaatgttggcattttagagaaattcaaaatttgtatctataaaaagttggttatttttgaagaattttgaaagagttgaaaacttataattatgcattagttcttcatttccataaaaatgttagataggaaaaagttgttaccaactttgtagatacggtaaaatcatagccgttcattggtagacggatcaaaagtaaccacgtcagctatccacgacaaaaactttttctctctttgccgcttcatgaacttatggcggataacaaaaagcgcaacagaaaattcgaatttttcaatatttcgaaaaagaaatttaaaataactcgcgcattaaagtaaaatagatctgaaccatccattcaccaaaacccttcatcgaacagcactcatatctccacgtcacgcatccgcgtttcagtatcttaactaatcagatctcttcctattctcttatataaacaaacacacaattctcgaagataacagtatcaaatcaaaaccatcacagcaaaaaaaactcactccctagaaaagtttnnnnnnnnnnnnnnnnnnnnnnnnnnnnnnggagaagaaaccggcagagaaaactccggcagccgaaccagcagcagcggcagagaagaaaccaaaagccggaaagaaactccccaaggaaccagccgtcgccggagacaagaagaagaagagatcaaagaagaacgttgagacatacaagatctacatcttcaaggtgttgaagcaagttcatccagacatcggaatctcaagcaaagccatgggaatcatgaacagtttcatcaacgatatctttgagaagcttgctggtgagtcttcgaagcttgcaaggtacaacaagaagccgacgattacttccagggagattcagactgcggttagacttgtgttgcccggtgagttggcgaaacatgctgtgtctgaagggac

SEQ ID NO: 156610 - DNA, 489 bp, Arabidopsis thaliana landsberg
gaataattccccacacatttattcctatgaattgtcagttactcttttatctgtaatttttgtcaaagcatgcgtcttttgtatgtaagtaactaattattgttcatttcagctaaaagacatggcagtaaaggcttcaggggcatacaaaaactgcaaaccgtgttctgggacaacaaaccggaatcagaatcgaaactatgctgattcggatgctgcttcagattctggaagattccattattcataccagagagctgggactgcaacctcaactcctaagatttgggggaatgaaatggagtcaaggttaaaagggatttctagtgaagaaggtacacctacgtctatgagtggtcgaacagaatccatagtgttcatggaggatgatgaggtcaaggaatgggttgctcaagtggagcctggtgttctcatcacatttgtgtcattgcctcagggagggaatgatcttaagagaattcggttcag

SEQ ID NO: 156611 - DNA, 1646 bp, Arabidopsis thaliana landsberg; identical to SEQ ID NO: 41311

SEQ ID NO: 156612 - DNA, 2598 bp, Arabidopsis thaliana landsberg
  unsure (1)..(2598): unsure at all n locations
gagaccctcctgtcttccctgctaagataacctagctcctcaagttcacgaggagggcagtgatacaccggctttaacgggtcagttcaagggaaagaagtctaaggtnnnnnnnnnnnnnnnnnnnnaggtttatcagtggcagattatgcgcagttttggtcttactgacagtgagattgcaagatttcgggatccagatgaatggttgtattactttccccctttggctgttgaagatctcaaggcatatggattgggctgtgactggagacggtcatttgtgactactgatgttaatccttttttcgatgcctttgtgaggtggcagatgaggaagttgaaagctctgggaaagattgtcaaagactgtaggtacacaatattctcacctctagatcgccagccttgtgctgatcacgaccgtgctactggtgaaggtgttcagcctcaggagtatactctcataaagatggaagtagtgaagccatttcctctgaaactgagtcctttggaaggaaaaagagtgtttttggctgcagctactttgaggcctgagaccatgtatggacaaacaaacgcttgggtactacctgatgggaaatatggagcttatgaaatcagtgaaactgatgtcttcatccttactgagagatctgcactcaaccgtgcctaccagaacttctcaaagaaccctaagaaaccatcttgcttggtcgagttgaccggttatgatctgattggactccctctgaagtctcctctgtcagtgaacgagatcatctatgctctgcccatgtcaacgattctaaccaacaaaggtactggtatcgtcaccaacgtacggcgaatcagaatggcggaaaatggctgaagaatgcttatcaaaaatgaatctctactctgaggaaacaaggcatggctttgagcacactttgagctggctcattcagtgggcttgctcacggtcttttggtctaggaactcgtattccttgggataatgaacggttccttgtggaatccttatctgattcatctctttatatggcctattatacagttgcccatatctttcacgacggagacatgtataaaggaagcaagtctttgatccgtcctcagcagatgaatgatgaagtttgggagtatctcttctgtgatggtccgtatccaaaatcaactgatattccatcagctgttttaagtaagatgaagcaggaatttgactactggtacccgctagatcttcgagtttccggaaaggatcttattcagaatcatttgacatttttcatctataaccacactgcactaatggagaagcgtaactggccacggggtatcagatgtaatggcacattatgctcaattctgagaaaatgtcaaagtcaactggaaatttcagaaccctgcgccaggctatcgaagaattctctgccactgctacaaggttttctttggctgatgctggtgatggcgttgacgatgcaaattttgtatttgaaactgcaaatgctgcaattttgcggctggtgaaacagctcgaatggatggaagaaaaacttggctgctgaatcctctttgagaacggggcctccatctacatatgctgataaagtgtttgagaatgacattaacattgctatcagattgactgaaaaagcgtacaaagaatgtttgtttagggaggcacttaagaatggggtttacgacttacaagctgctcgagatgagtatagaaactcttgtggcagtgacgaaaatatgaaccatgacttgatacttaacttcatggatgtgcaaacacgcctcattgaaccaatctgtccccagtttgcagaatatgtatggaggaaacttttgaagaaggaaggttctgtggtaacagcaggctggcctacatcaaatgagccagatttggttctcaagagtgctaacaaatatttgcaagattctattgtcttactgagaaagctcttaggttccaagaaggctgctaagaaaggtgctcaagtaacagcagcgccagcgggaaagttaataggcctagtatatgtgaatgagcaatttgattgatggagagctcactgcctcaagttcctgcaaagcaaatttgaccagcaaacctatcgttttgcccctgatgcagagataattgcagaactaaaggagatattacagaaggatggacaagcagaaaacatttacatgcctttcgttaaattcaagaagaaggaggcaatatctattggcattcaggctctaaatttgaggctgccttttggagagattgaagtccttaagagtaacatggacttgatcaagcggcaacttggtcttgaagaggttgaagtatattctgcaagtgaccctgatgatgtttcaaaagctggtccacatgcttcactactgaagaagaatcctccatctccgggcaatccaaccgccatctttgtgaccaggtaaaagctagttatttcattacaattgcttcctaatagaagcagcatggatacttttttttgtttattgtcaactaatttgaactctctactgctccagcacaagtgtgccccctccgatctaatagttctgt

SEQ ID NO: 156613 - DNA, 878 bp, Arabidopsis thaliana landsberg
agattcctttgatatctaaggtagctttgtttttgccattgttagaatgagatgtaataacttagaagctgattcagctgtgtttatttttcgtttaaggaccatgaacgtgcgttttttgactcagctgattgggctttaggcaaggttagtcttttgcattaccaacctttgtaactatccgttcttcctgctactgtctttgtttgtggtgtggaatatataaagggctcttaagtaactaaagacatgaatttgacattttcatcagcaaaaaggacagaagccgaaagggcctttggaagctctccgcccaaaactgcaggtaaagtgaaaactctacctttctttgtttgttcatttgtttcttgtttgtgtctttgacattaatatctgttcgtgttacagccaaccccgcaacagcaaccaagagcaagacgaatggcttattcttcaggcgaaactgaaggtaattagatatgaatctatagctttgtttttcttgattccattgacatattatattactcaagtcattcattcaacgtatctctttgaaatcagacactgagattgataacaacgaagctccggatgaccaagcctgcgcatcagctgtggatagtaccaatttaaaggacgatggaggcgcaaaagacaacatcaaatcatgaacaacatatagagatctcttgaggagcgcaaacaaacaacatcacaagtcaatttacagaagaataagcgaccaggtttgctttgcaacggttgtaatatcaagtctcttaccttatcatacttgggactgcaaatctgtatcacttacaaacctcctggcttgaaacgtctattggacgattgcaaatgatttgctttattga

SEQ ID NO: 156614 - DNA, 1534 bp, Arabidopsis thaliana landsberg
cctaaacaacagtttaatggaggctaccgatagcaaaatccaccaccagggttcactcaacaaccacaacaagcaccagcagctcaagatcctgaaattaagatacttattcaatagatcattcaaggataagctactggagctatggcttttgaaaagaatatagctgaattacacaacaagatcgattgttcttacaacgatctaaatgtcaagttcaaagctctgaattccaaagtcaagtatgtggagagtcaatttgcatcaacctctgctccgaagcatcctcagcaacttccagggaaagtagttcagaatcctaaggactatgctactgcaaatgctatcaacatccaccaagaagatgagtctccaccaagtcatcagactcccactactgaggacaatatgattcaagaagggggggattcaactcaaattgatgcacctgtcatccaacaattcatctggactatagagcacacacctttactgaatactcatcactctgaaaaacatttcaaaagagaaaaactcaagaaggatcagaatcaagagatgattagtagagtcatcactcaagaagcttacaagaagaaagtcatccaagaaaagcttggtgatcccggttcattcactctgacatgctctctaggatcattgacattcaataggtgtctttgtgatttaggagcatttgttagccttatgcccctctctaaagctaaaaggctaggggtaatggaatacaagttctgcaacctagctctgctcttaactgatggttctgttgcacatcctcatggactaaaagaaaatctgcctgccaagattagaaatgttgagatacctacagattttgttgtattagacatagatgaagagggaaaggatcccctaatcctaggcagaccattcttagcttcagttggagcagtcatagatgtcaagaatggaaacattgatctaaaccttgaaaaatgtatcaagatggaatttgacatcagcaatgcttcaggaaagccaagaatgaagaccctacagaagatgactggtatgagatgagaaaaaacttaattgtcttcaagagtgatgaagctgaaagatcaactttgggattttaaaagagaagctactcagtattcaattggtattgatccagatgagatgcactagctatcaaagaagaaaacgatttcacaacataatggtttgcaccagaatatcagaaaggagtttatttagaggaaagaagcttagagtgtaagttgttgagtgaggaagaaatctctattgcgacttaattctccaggagttcctaaacagcccatgaacctctcttctaaggaagaacacttgaattttgattctgttgctgaagaactcttggagcactggacaggataccaagctcaggaggataccattgggaagttgactcacaagatgaaagagttcaacagcaccatcttggaacttcaagaaatgattaaaagctaccccaattttgaaattgaggattggtcaaaggaac

SEQ ID NO: 156615 - DNA, 903 bp, Arabidopsis thaliana landsberg
aagctggaatgtgtggtttttttttaatgagattggttttttttatgtttggtttcccgtgagaagaaagagaggcgcaagcttatggcagagcaagtaactctccgaaaatctcgaaagattgaaataattgaggatgtagtagaagaagaagaacctgaggaaaactctgaagctcttgcaaacaagggattcctttccaaagacatcatagactttcttgcggagcgagaaaagtattaaatactttatatccttatttcttgatacataaacacttttaagcgagaaagtatgtctaagattggttgatatgttacatttcacagacaaaaagctgagtcagattctgaagaagaagagatcatagacgaactcccaagaaagaaaaagcaaaaaagctcagggtatgatcgtctattcttggcttacatattttaggatcactctcagatttgctttactgaagtctctctggtgggtgcaggatcgaaacggttatttacaaggagattccaccaccagaatgcttgaaaaccgggttagatttcttgaagatgaggagagcgcaagtccccagatcgtcttcagtcatcaagaactccggccaagctctccgacttgccaccggtgctgctttagccaagaaacagcgacagagaaagtgaaaacttaagatgtaaaattttcatgtgggctcaattccataacatttttgttttagttagcctttttggctacttctgctgctacctacatgtatcagatatttatttattactaatattgttcaaacgctctcaacacaaaactctttatgaaatacatcaacgtgaaggccaatatcattaagaaacaataggagaatgttcatgaagaatctgagtttatctcttgctacag

SEQ ID NO: 156616 - DNA, 870 bp, Arabidopsis thaliana landsberg
aagatttggtcgtcgctcacaggagaaacgtaatggaaaacaaagagaccaagcttgaaccttcagcagcagctgagcaaaagaccgttccgttgatcgaagatgagatcgagaggagcaaagtcgggatcatgagagctctctgcgaccgacaagatcctgaaactaaggtccctatcgatttctttaagtaaaaaaagaattcaaccagaaaagtattgatttgataaaagccctaatgatttggatttgcaggaggtggatgatctgatgataaggaggtttctgagagcgcgtgacctggacattgaaaaggcttcaacgatgtttctaaattacctgacttggaagagaagcatgctcccaaaggggcacataccagaagcagagattgcaaatgatctatcgcataacaagatgtgtatgcaaggtcatgacaagatgggtcgacctatcgctgttgccattgggaacagacataacccttccaaaggcaaccctgacgagttcaagcgttttgttgtctacacgctcgagaagatttgtgctaggtgaataataataatattactacatacattaagttagtgtgggtatataagaaaccatttatgctaatgctctttttttgtttgtttgaatgttgtcatgttagaatgccgagaggtcaagagaaattcgtagcaattggagatctgcaaggctggggatattctaattgtgacatccgtggctaccttgctgctctttccactttgcaggttacttcctttaattcgcctatcatatcttttgaaacatacatttaggtttttagcaattatcactaataaaggaaatattgctataatccacttaactccaaatata

SEQ ID NO: 156617 - DNA, 653 bp, Arabidopsis thaliana landsberg
gtaagagacaacatagtgtggttatgatttcacttgcgttggtgttgagtaacaggaaatgatgattaaaatgggtctaggtatcaagcgaggcttcaacgcaagctaatgtacctagctgcaatagcagattctcagcctcagccaccaagtgtgcatagccaggtgattgtttatacagtgaagtattccaaattttgttgtatgatcaattgagaaactgatttgttttgtttggttattagtatggatctgctggtggtgggatgattcagggagaaggagggtcacactatttgcagcagcaacaagcgactcaacagcaacagatgactcagcagtctctaatggcggctcgatcttcaatgttgtatgctcagcaacagcagcagcagcagcagccttacgcgacgcttcagcatcagcaattgcaccatagccagcttggaatgagctcgagcagcggaggaggaggaagcagtggtctccatatccttcagggagaggctggtgggtttcatgattttggccgtgggaagccggaaatgggaagtggtggtggcggtgaaggcagaggaggaagttcaggggatggtggagaaaccctttacttgaaatcatcagatgatgggaattgaaagagtgtggcacaa

SEQ ID NO: 156618 - DNA, 831 bp, Arabidopsis thaliana landsberg
atggagaaaacagaggaagaggttgagatgaaggaactggtagggcttgtgagaatcctagtgaagagagggatcgatcttgctcgtcgagacgctctaagcagcgacccttttgtcgtcataaccatgggtccacaggtactttttctctctttctgattctaatctgatttggttctcttctgtttgatgtttctatttctgttcttgagatgtatggtttctctgtttactttcttcgcagatggaagaccaaagaatcgacctttaagaaacatgattaataatcatttaaaaagattttacatttcatgctacaaaatgaaaacaatctatagctataggatgttgtgttgcattcgttctaactgaaattggttgtatctttgaattgcaccagaagctgaaatcttttactgtgaagaataactgcaacccagagtggaacgaagagttgactcttgcgatcgaagatcccaatgaacctgtgaagctggtgagtactagtacccgtcagtaactaccggaatcatgaattttcaactcaaaaccaactgatgataagtggttggttccatatgtttttgtttcgtatgagtgcagatggtgtatgataaagatacatttacagcggacgacaagatgggagatgcgcagatagatatgaaaccgttcctagacgttcacaaactcggtttgaaagaacttccacatggaaaagagctcaagagaattttgcccaccagagataactgcttgtctgaagatagcataatcgtctccgataatggcaagatcgttcaggacatgattcttctgttaagaatgtcg

SEQ ID NO: 156619 - DNA, 740 bp, Arabidopsis thaliana landsberg
agaaaagatgaatcctttttggtattaatctgttcatgttctgctttttgggctaagagctctactaagataagcctagaaaaccagtttcactggatttgtgttcttgagtttgctatagttgtgccaagatatctattctaagaccatttttcgaacgtatcattcgatttatcttcttaactaagtatcagtgtgttcgtaggctagttattcgatatttggttgatttgcattgcctcaaatggttatatgatgttcatttttctcttccagacattctccagtacggttgaagagaaagcaaaatggattttcaacaagcttaaaggtaacaaacaccattttttgtttatctcatggcttatatataagaagatgcgaaaattcttaacttgcgaatttgttttctgtgttctctttataacaggaaaaccactgaaaagcttaccagacctcctcaaagaatacaacttaccaccaggactcttcccacaaaacataatctgctacgaattcgatgagacgaagaataaactcaccgtcttcttctcttcaccatgtgaagtcacattcaaagatggatcagcgataagatatgcaacgcgtgtgaaagggattttgcttagagggaagctgatgggtgtggaaggaatgaagacaaaagtgttggtgtgggttaaagtcacaacaatctcagtcgagagctccaagtctgacaagctctggttcactgctgg

SEQ ID NO: 156620 - DNA, 2128 bp, Arabidopsis thaliana landsberg
ttcatttcctatgtcactcgaccatccctgcgccaccgtaatcgagtactcctcctcgttcaccgtcgaagtctccgggaccactcgattacgacaaagctactcgaccacaaactatcactcgacctcgagtattcacttgacctctgcaacagcaactcgacctcttgttcttgaaagcaacagagccctgaagcactgtcagagtgattactcgacctctaggcttcaccggctgaactcaacctccacgactcactcgacctctgggagcagactcactcgaattcaagaaaagttactcgacccatttcgtctaagggaaactcaaaaacagctcagtctactcgagtacaaaattgtactcgattaacagggtctgtttcattgcatattgataacagtttgggtttcattgctatgtttgagactaacctattgacatttgagctttgagttctaaatctctacaggggaatcaggagcaattacagtggcagttcttatgttgatcctgactacaacatggatgagacagagtcatcatcttcaaggccagagagagaacagagagaatatgaaagctgcagaagaaaagctgagatagcccgggggaaaagagcgatgacagagaggtatgagcttatagacgaggatctggaagacgagtacatgcctgagcatactcgcagagccaccaaacttctgcacaagcccgacgtattgcatgctgaggaatatattaggctcttcaagctgaatgagttctgtagcacgaggtatccttgctcgaccacacttgcacaactcggattgttggaggatgttcaccacctgtaccagagttgtcatctggacactctgatggcttatccgtatgtagcatatgaagatgagacaattcaattcctctccatgctgcaagtggagctctaccaaggtatgacctctgatgagttggattgtgaaggattgggattcttgagattctctgtgtatgatcatgagtataggttatcaatcaagcgcttggaaggattgtttggttttcccagtggaacgggaactaagcccaagtatgacagagaagagttgaaagacttgtggatcaccattggcagctctgtaccgctgaattcttccaggtcaaagagcaatcagatacgcagccctgtcatcaggtacttccagcgttctatagccaatgtgctttactcccgagagatcacagggactgttactaattctgatatggagatgatcgcaatggctctcaagggaactcttcgccaaactaagaatggcatgtctctccaaggtgaaatcaatgacacacctctctctgtacttcttctgatccatctgtgtggatacaagagcaggaccgtcagcaataaccacaagagagcatgaggcgctctgtgcataggaggtgttgtgacaccgattctgaccgcttgtggagtcccgatcacttctgatggaatcgacccgcgagcaatggatatcgagcttctaggtcactgcgaattcttggagtttgcaatggttgacgacttgcacaggttcaggtttgagcactctacagacaagagagctagcatccttctccccagctctgaggttccacggataatcgagggagataacattgatttttggcctgaggttgggcgcctctactatgagaacgctccaccattggatgaggatgatcttctagaagaagctgcttcggatgggaaggatgaagacagagcagtggagttcgacactagcatgtatgattttgatgaacatgtacctccagcgagggagagcaagagcttgagtgaggctcataggaacaacagtaagctgcagaggtggtgcaagaagcaggacaagctgctcgccaagtgtttcaagactatcaagtttctgacagataagctgagctgttcctcttctactacagctattccgcagggacagcctcctctagagatgccatcgaggagatttgatgagcctgagtacaggcctgagcttagtgagcaaagagtctcatatgtcccggctagccagtcctcattcgagtcctgggaacacaaaaaaagaaggaaggttacactcactcgatctacag

SEQ ID NO: 156621 - DNA, 4914 bp, Arabidopsis thaliana landsberg
aactaaaatgagttatggtttagttttagtcatatgagactcatctagtcgataaaacatcaattttgtttttgttctaaacgacttcaaagttcaattttgaaatattcaacaaatgcggtatttttccttaagaaatttttgataaagactagtaacgtagtatatacgtttatacgggtcaaaattagcataatatgatgactcaatttcacctttttgtaattaatttttgtgtttgaggaaaagtctaataaataggaataaatctgtgtgatgttcaaagtttttcagttgcttggtctacgtgcgggctgctttgtgtttttttccaacttctctttttctcaaatctctttccacacatgaatttccatgaaattcatcttcttccccgataatttccacatcttctcgaggaacatcgcagaggacagtaaagaagcaaaccaagaagaccaagtggaggaggacgatgactatggtgacgcgtgtgatcatgacggatgatgattctcagtcactttgctttctttgtttcttactcttctttttcatcactggtaatttcttctcttcttctgttgtttgaatttgagtttcgttgagagtttttgggaattgtaatgtcttctcttcttgagtatgagttttgggtttctgtttctttcacgtttacttcaaatgggttcagggttttaaaatttgacgtgattttttgggggtttcattgctttcatcaattcaaggttttacattgtacgtaaatgaatcgcaaagttttaatttttactctgtttgatgtcgttgatgagtattttagctgagttttttgatgtttttcttctatggcagctatagcagtggctggagattctctggacagtgatagagaagtcttgttaagcctaaaatcgtaccttgaatcacggaacccacagaaccgaggactatacacggaatggaaaatggagaaccaagatgttgtgtgtcaatggcctggaatcatatgtacacctcagagaagtagagttacagggatcaatctaactgattccaccatttcaggtcctctattcaagaacttctccgctttaacggagctcacatatctcgatttatcaaggaatacgatcgaaggggagattccagatgacttgagccgttgtcacaacttaaagcatctgaatctttctcataatatccttgaaggagagctaagtttacccgggttgtcaaatcttgaggttcttgatctttcgttgaataggattacgggtgatattcagtctagcttcccattgttctgcaacagtttggttgttgcaaatctgtcgaccaacaactttactggaagaatcgatgacatcttcaacgggtgtaggaatctcaagtatgttgacttcagttccaatagattcagtggagaagtgtggactggttttgggaggctggtcgagttttcagttgctgataatcatctctccgggaatatctctgcttcaatgttcagggggaactgtactttgcaaatgttggatttgtctgggaacgcttttggtggggaatttccaggccaagtttcgaattgccagaatctaaatgtactgaatctttggggaaacaagttcacagggaacattccagctgagattggttccatatcctctctcaaaggtttgtacttggggaataatacattttctcgagacataccggaaactctcctgaacttgaccaacttggtgtttctggatttgagcagaaacaaatttggaggagacattcaagaaatctttgggagattcacgcaagtaaagtatctagtcttgcatgcaaactcatacgtaggaggcatcaattcttccaacatcctcaagttacccaatctttcaaggctagatttgggctacaacaatttctcgggacagttacctactgaaatttctcagatacagagtttgaagttcttgattcttgcttataataacttcagtggcgatataccacaggagtatgggaacatgccggggcttcaagcacttgatctctcctttaacaagctgaccggttcgataccagcttcatttgggaaattgacctctcttttgtggctaatgcttgcaaacaactctctatcaggagaaatccctcgagagattggcaactgcacaagccttttgtggtttaacgtggcaaacaaccagctctctggtagattccatcctgaattgactagaatggggagtaatccttctccaacatttgaagtgaataggcaaaacaaagacaagataattgctggttctggtgaatgcttggcgatgaagagatggattccagcggagttccctccgttcaactttgtatacgcaattctaaccaaaaagagttgcagaagcctatgggaccatgttctcaaagggtacggtctctttcctgtctgttctgctggttccacggtacgcacgcttaaaatttcagcctatcttcagctcagtggaaataagttttcaggtgagattcctgcaagcatctctcagatggacaggctgagcacactacatttgggtttcaatgagtttgaggggaaactgcctccagagataggacaattgcctcttgcattcctcaaccttactcgaaacaatttctcgggcgagattcctcaagaaatcggaaatctgaagtgcctgcagaatcttgatctgtctttcaacaatttctctggaaactttccaacgagtttgaatgacttgaatgagctgagtaagttcaacatctcatataaccctttcatttctggcgcgataccaacaacaggacaagtagcaacctttgacaaagactcctttcttggaaatccgctgctgcggtttcctagtttcttcaaccaatcagggaacaacacgaggaagatttccaaccaagtcctaggaaacaggccaagaactcttcttttgatttggatttccttggctcttgcattggcgtttattgcatgtttagtggtatcaggtattgtacttatggttgttaaggcttcaagggaagcagaaatcgatctcttagatgggtcgaaaaccagacatgacatgacttccagttcaggtggatcatcgccatggctatcaggaaaaatcaaggtcattcgcttagacaaatcaactttcacatacgctgacattctgaaagcaaccagtaacttctctgaggagagagtggtaggtaggggaggctatggaactgtttacagaggcgtattgcctgatggaagagaagttgcagtcaagaagcttcagagggaaggcacagaagcagagaaagagttcagagctgaaatggaagttctaagtgccaacgcatttggagattgggcacatccgaacctcgtgaggctatatggatggtgcctagatgggtcagagaaaatcttggtgcacgaatacatgggaggcgggagcttagaggagctcatcacagacaaaacaaaacttcaatggaagaaacgtattgatatagccacagatgtagcaaggggattagtgtttttacaccacgaatgctacccttccatcgttcacagagacgtcaaagccagtaacgttcttttggataaacacgggaatgcgagagtgacggattttggactagcaagactcttaaatgtaggagatagccatgtgagcacagtgattgcaggcacaatcgggtatgtagctcccgagtatggacaaacttggcaagccaccacaagaggagatgtttacagctacggagtattgaccatggaactcgcgacgggtagaagagctgttgatggaggagaagagtgtttggtcgaatgggcaagacgtgtaatgacaggtaacatgacagcgaaaggttcaccaataaccctgtcagggaccaaaccagggaacggagctgagcaaatgactgagctactaaagattggtgtgaagtgtacagctgatcatcctcaggcaagaccaaacatgaaagaagttctagctatgttggttaagatatccggtaaagcagagctcttcaatggcttatcttcacaaggttacatagaaatgtaaaaatctttctttcttttcttctttcagatttattatacagaacaacagagttttcttcttcaccatttttcgtttcattgtttctgattcttcttgtacacagaacctcattgttatcagacagatagggatagagaaaggtagttttgttcgcaatgtacagagacacaatctgaaaataaagatcttctcttcttcttgtctatattgagtgtaaacaacgttggctctatctcgtgtttcttacaagtcaggaaacatacaggaagaaagaaacagtacaatgagtcaggttgcaatctctctgatcagccagtttaagctcgggaaggcaaaataaaggacgagaaacgacgggacagccaaagcaaacgtaacaaagaaataaaccccgagaactgcagcactcacagggattgcatataaagccatcaacaggaatatgactaccagaggaaacttagccaacaaatgagcaacaagagccattgacttacgtaccgagtcatggagcctcccagttctgaagaatcctctggtcacaccattccaccagctgcgattgtccagcaacccttcatcacccaaggcggtattactcactccatcacacctatttctcaagtctctctgccctgaagcaacccttttgttgtcgctgggtgcctccgatctggagccattcatgctttctaccatccacagaaggtaaaagttcttggaaggaaatctgatggttccattgcaaaccagccttaaagagagaatattgcaccaagggcaagcaacgaagaagggaagctggaatggtaaagcagaggatttg

SEQ ID NO: 156622 - DNA, 1033 bp, Arabidopsis thaliana landsberg
cacatacagtatagatccttggccatttggactttgattaccttaacagcatcccaaagaatacttgcatgaaacatcaggaaacgaataacactaactaactctttcccatattccaaaacaaggaaccttaattatttgaaaacacatatagtactacaaccgattattataattgtaccgatagactctccatgcaagttattctttcttcctcccttaaaaagccagtctcacttcaagatcagaaaataacattacatttgatcctaaaatattttctagtaaagatgccaattcgtttcggtttgtcaccaaggatcttgttactctttctcaccatattatcaggtaaaataattcaaacattatagtattttcgatcgtaattaaacgtctttccttgtctaggtattaattaattagggtttggataacgattagaactcctgtgaattactccacaggaacaaaatggtcagaatcagctcgagtattcacgatcataaactcatgtgaccaaacgatctggccggcgataactccaggagaaaacttcaacggaggaggattcgagctcaaaccgggccaatccatcgtattccacgcaccagtaggctggtcaggcagaatttggggacgaaccggttgtaaattcgactcaaccggaaccggaacatgcgaaaccggttcatgcggatcaactctaaaatgttcagcctccggaaaaccaccagcttcactagctgaattcacattagccgcattggatttctacgacgtgagcctcgtcgacggattcaatctcccgatgtcggtgactccgatgaacggaaaaggaaactgcagcgtcgccggttgcgtagctgatttgaggccacattgtccgcaggagctcgcagtgaaatcaaacgggaaagtcatatcgtgtaggagtgcttgtgatgtgtttgatagagatgagtattgttgtagaggagtttatgggaacccagttgtgtgtcaaccaacttattactcaaagatctttaaa

SEQ ID NO: 156623 - DNA, 1685 bp, Arabidopsis thaliana landsberg
tctgcaatggctcgttggttgcttcagatcctgatcatctcttctcttcatctgagctctgtatcaagtcaacaagagacaagctttgtctatgaaagcttcctcgaccgacaaaatctttatcttgacaaatctgcaatagtacttcccagtggattattgcagttgacaaatgcttcagagcaccagatgggtcatgctttccacaagaaaccaattgagttcagttcatctggaccactctccttctcaacacactttgtgtgtgctttggtgcctaagccaggttttgaaggtggccatggtattgtctttgtattgtctccttctatggactttactcacgcagaatcaactagatacttggggattttcaatgcttcaacaaatggatcttcctcttatcacgtacttgctgttgagcttgacactatttggaacccagatttcaaagatattgaccacaatcatgtggggattgatgtgaacagtcctatatctgtcgcaatagcttcagcatcttactattccgacatgaaagggagtaatgaaagcataaacctcttgagtggaaaccctatacaggtctgggtggattatgaaggcactttgctcaatgtttcggttgctcctcttgaagtccagaagccaactcgacctcttttatcacaccccatcaaccttacagaactttttccaaatagatcaagtctgtttgctgggttctctgcagcaacagggacagcgatcagtgatcaatatattctctggtggagttttagcatagacagaggatcgctgcagcgacttgatatctcaaaacttcctgaagttcctcatcctagagctccacataagaaagtatctacactgattattctcctacccgtttgtctggctattttggtgttggctgttctagcaggactttatttccgcaggagacgcaagtattcagaagtatctgaaacatgggaaaaggagtttgatgcgcatcggttctcttacaggtccttgttcaaagcaacaaaggggttcagcaaagatgaatttctgggaaaaggaggttttggagaagtttatagaggaaatctcccacaaggtagagaaatagcagtgaaaagagtgtcccataatggtgatgaaggtgtgaagcagtttgtggctgaagtcgtgagcatgagatgtctgaaacacaggaatcttgtaccactgtttgggtattgcagaagaaaacgagacttcttcttgtctcagagtacatgcccaatggtagtcttgacgagcatttgtttgatgaccagaaaccggttctttcttggtcacagagacttgtggtcgttaagggtatagcctctgctctctggtacctgcatacaggtgctgaccaagttgttctgcaccgagatgtcaaagcttccaacattatgttagacgcggagttccatggaaggttaggggattttggcatggccaggtttcatgagcacggaggcaatgcagctacaacagcagctgttgggactgtagggtacatggccccggagctaatcacaatgggagcttccactggaactgatgtttacgcatttggtgtcttcacccttgaagtaacctgtgggaggagaaaagtgaaaccgcaattgcaagttgagaaacgacatatgatcaaggtgggtttgtta

SEQ ID NO: 156624 - DNA, 395 bp, Arabidopsis thaliana landsberg
cgttgatgaacatcgtcaagttcatcaaagattgttagatcaacggcttttagcgatggtctcaccaagaggtacacagagaagacactcaagtgattattctgaagattttctaagatcttgctctctttgtaaacgtcttcttgttcatggccgtgacatctatatgtataggtatgagtttaggacctaaagattaatctcatggttttggtttgattagatatgtaattaacgatttggttttggttgttaaattatgagcagaggagatagagcgttttgtagtttagagtgcaggcaacaacaaattacagtggacgagaggaaggagaagaagaaaggttcggtgaggtcaccatcgtcgtcgcaccggaaccacacaggagagagag

SEQ ID NO: 156625 - DNA, 1538 bp, Arabidopsis thaliana landsberg
ctggaactggagaagcgaagcagtaccctaactggtacaaagagaaaggtaatgttttgtttatgtcttctccgagaaatctctgtgatttcacttgcaatatatttggtgatctgagatattcaaattttacagggattgatctaattgtgggcacagagatagtcaaagcagatcttgcttcaaagacacttgttagtgatgatggcaaaatttacaagtaccaaactttgctaattgcaaccggttctactgtgagtaaaatacttatgatctcttcctctctctttctgttctttgttcttagttcatctcgagaaactctaatattttttgcagaacataagattgtcagaaattggcgtccaagaagcagatgttaagaatatattctacctaagagaaatcgaggatagtgatgagcttgccttggctatggaactatatgtgcaaaggggaaagggccgtcatcattgacggcggtttcttagggcttgagataagtttctgctctaagggctaataatcatgaagtgaccatggtttttccagaaccttggcttggtaagttgatacttaacaaaaaacattttagctaaataattacactgtattcgtaacagattttcctctgttttatcgttgtatagtacaccggtttttcaccgctgagatagcttcattctatgagagttactatgccaacaagggaatcaaaatcatcaagggaactgtagcaactggatttagcaccaactcagatggagaggtcactgaggtgaaactagaggatggaagaaccctagaagctaacatagttgtcgctggtgtcggtgctagaccggccacctcactcttcaaaggccaacttgaagaggagaagggtggaataaaggtttatgatttaccctaccggagaaaaacagagctcttgtcaattaccataattagtgattaatgattattcgttttgattgtagactgatgggttcttcaaaacaagtgtggctgatgtatacgcacttggagatgtagccacattcccaatgaaaatgtatggcgggacgaggcgtgttgaacacgccgacaatgctcgcaaatctgctgcacaagcagtcaaagtacgagcatttactagcttgattctatagtcgaatataccaaactcttctatatatactaatgatggtgttttgcaggcaatcaaagcgggtgaagaagggaaaacgatcccagattacgattatcttccctatttctactctcgatttttcaaactatcgtgggaattctatggggaaaacgttggagaatctgtactgtttggagataatgacccgaaatctccaaagccaaagtttgggacgtattgggttaaagatgggaaagtagtaggagtgttcctagaaggaggtactcaagaggaacacaaggctattgctaaagtggcacgagcacaaccttccgttgagagtctcgactggttatccgaggaaggcctttctttcgccaccaagttctatagcacctctctttga

SEQ ID NO: 156626 - DNA, 1795 bp, Arabidopsis thaliana landsberg
agaaatctcatctcgcaccttccgaataaagactagaactggcatcacccgtggttcctagttaaaaagagccctgcctcgatcgggaacctcccggacttgctccccacgcagtggaccacttagcgcggtagttattagttcatgcatatgagcttcatttacttcttgccttatctgaccagtttctattttccacttcgcagcttttattgcacctacccttcctactgctgagttcgtcgaattcttcaaaattatcattgaaggggagaccctttggaactctttcactctcgagcggttcatagaagccaaccgcaagctcagaataagtccgcctggacagcttctataacttccaccacctcccgctctacctcacggaacctcagcccgggctatcgctacacgacgtaagacattatccaagccgatggcagaggcttgtgaagcaaacaagacatttcttacgccggttatcgacaaaagaggataaagtaggactctactggttgacgatggcattgctgagggtgctagatctgctggtgctttcagatcaacatctcgacatgaaaatcgtagcggtcgctcacctcaaagagatcgatcccccccccccccaacgtgactctccccgacactcttctcgggataggctgagcagcgaaccgattgtggatttgatccgaaaaagagagagagaccagctcgtggcaactcttcccctaagagggagaaatcgagagctcaaactgactgttcccctcgatcttctcccccacctcgctctatgggtcctcttgtaacgcccgcatcccgcgttcataaagaggcctgtttattttaggggaaactagaccatggtcgaggaacttagtcggaagaacgagaaagttcaagctgaaccagctaggtgaggtggacaagctggatgaactagctagctaagttaggttagctaaaccagctggaagactagctagctcagctatgtgagctgaccgacagctcgactgacctcggtgagctgatcgtgtactgacccagctgggtggtccgatcagctgacactcgagctggtggactgtggtagctcacgggtgaagaggtgtctcagccaaatggtgtaaggtcgagcgggtaccaacgaagggttgcattgcccaaaggatgcaaggaacggatgtgaccttttggaaggatgcaaggaacgaatgtgaccttttagaagggtgcaagtaacggatgtgatgcttcgggaagcatccattcgccccctatataagggaggacgcccaaggcctttgtgaatctcacatcatctcacaacatccaaaacaccataaaacattcttaaaggagtcccaacacatcctagagttgttggtcggaaaggggtgcggctgggcgagtataactcgaccgaattgatgcgcatactacctcccggtccaacggtttgatggagtgtagaggatggagagggtagaccgttcgtcttagagacgaatcggatctggtagaccgatcgtcggatcggatcagccagaccgatcgtcggacggatcggatcagccagacggatcggatcagacagatcgatcgtcggacgggtcggatgggacaggccgatcgtctaacggaacaggtcggacagaccgatcgtcggatgggatggatcgagaaaattgttcgaggaagcacaaggataagtgcatccgaacacacccaagggtcgcccatggatgcaatcttaccgataaagggagaaagcaccaagaatgggtaa

SEQ ID NO: 156627 - DNA, 1979 bp, Arabidopsis thaliana landsberg
actaacctattgacatttgagctttgagttctaaatttttacaggggaatcatgagcaattacagtggcagttcttctgttgatcctgactacaacatggatgagacagagtcgtcatcttcaaggcctgagagagaacaaagagaatatgaaaggttcagaagaaaagctgagatagcccgagggaagagagcgatgacagagaggtatgagcttctagacgaagatctggaagacgagtacatgcctgagcatactcgcacagctaccaaacttctgcacaaacccgacgtattgcctgctgaggaatatattcgcctcttcaagttgaatgagttctgtagcacgaggtatccttgctcgaccacacttgcacaactcggattgttggaggatgttcaacacctgtaccagagttgccatctggacactctgatggcttatccgtatatagcatatgaagatgagacaattcaattcctctccacgctgcaagtggagctctaccaaagtatgacctctgatgagttgaattgtgaaggattgggattcttgagattctctgtgtatcgtcatgagtataggttatcaatcaagcgcttggaaggattgtttggtttccccagtggaatgggaactaagcccaagtatgacagagaagagttgaaagacttgtggatcaccattggcagctctgtaccgctgaattatgccaggtcaaagagcaatcagatacgtagccctctcatcaggtacttccagcattctatagccaatgtactctactcccgagagatcacagggacagttactaattctgatatggagatgatcgctatggctctcaagggaactcttggccaaactaagaacgacatgtctctgcaaggtgaaatcaatgacacaccctctctttgtacttcttctgatccatctgtgtggatacaagagctgggctgtcagcaataaccacaagagagcgctaggcgctttgtgcataggtggtgttatgacaccgattttgatagcttgtggagtcccaatcatttctgatggactcgagccgcgagcaatggatatcgagcacctacgtcactgagaattcctggagtttgcaatggttgacgacttgcacaggttcaggtttgagcactctacagacaagagagctaacatccttctccctagccctaaggttacacggataatagagggagataacattgattttcagcctgaggttggacgcctctactatgagaacgctccgccattggatgaggaggatcttctagaagaagctgtttcggttgggatggatgacgattgcgcagtggagggcgacactagcatgtatcactttggtgaacatgtacctccagcgaggcagagcaagagcttgaccgaagctcataagaacaacagtaaattgcagaagtggtgcaagaagcaggacaagctgctcaccaagtgtttcaaggctatcaagcttctgacagataagctgagttgttcctcctccaccacagctattccacagggactgcctcctctggagatgccagcgaggagatttgatgagcctgagtactctcttccaagtttattcacacagtggactgtgtgatttaagtttgggggagggctcaggaagtgtgtgttgcattgtatatatttttgagtctgcattcatctaaggcatagaaaaaccaaaaaaaatttgaaaaatttcagaaaatgatttcacaaaaaaagagtgttcatgtagtttcattacatttaggatcaagtctagagtgtttcatttaagattgttgcatatgcataggggatgatgatgagatagtcttgtaagcattttgattcaccggataaactcagtgccctcgttgctagttggctgttgcgtagtcaatgaatttgaaataaaactggaccatgcctagattgctctacgcgaccacacgtgtcatgatctg

SEQ ID NO: 156628 - DNA, 829 bp, Arabidopsis thaliana landsberg; identical to SEQ ID NO: 13726
  unsure (1)..(829): unsure at all n locations

SEQ ID NO: 156629 - DNA, 1350 bp, Arabidopsis thaliana landsberg
  unsure (1)..(1350): unsure at all n locations
tctgcaatgaaatgattttgctaagatgtggctttgtttgtgaaggtgtgaagaaagggattgtcaagcctgaagaaagtgagactgatgaagatgatcttgatttaggcattagtcctaatgccacttctgagaagaagaaggagtcttggcgtttagatggtcgaggaaaggtaaaaagagttttgcttaaatacctcttctttgtcgttgagttgagaaagttactctttttcttgtgtgtttcgttagatgagttcgaggaagtatgtggagaaactataccctcggnnnnnnnnnnnnnnnnnnnnnnnnnnnnnnnnngtaccactctgggatacctaaggcacatttggtttaaaagagtcacactttgttcaaatgtacgagagacacatgccatcccttcagattaatgtgttctcagctcaagagagactcgattacttgttgagtgtcggtgttaaacacagagatatcaagagaatgctcttgagacaaccacagatacttcaatacactgttgagaacaatctcaaagctcacatttcctttctaatgggtcttggcattcctaattccaaaataggacagattgttgctgctaccccttctctcttctcttacagtgtagagaattcattgagacctacgataaggtatctgatcgaagaggttgggataaaggaaaccgatgttggaaaggttgtgcaacttagccctcagattctggttcagcggctcgacataacatggaacactcgctacatgttcctctccaaggagttaggagcacctagagacagcgtagtgaagatggtaaagaagcatccgcagcttcttcactacagtatcgatgacgggttcttgcctcgaatcaatttccttaggagcattgggatgtgcaattctgatatactgaaagtcttgactagccttacacaggttagtagattgcttgattctttttcatacttaaatcaaaactagaatgtttgttctcataaacacttgtcaaattggtctgaataggttttgtctctttcactagaagataatctaaaacctaagtacatgtatttggtcaatgagctcaataatgaagttcacattctgaccaaatacccaatgtacttgagcttgtccttggatcaaaggatacgtccgcgccaccgcttcttggttgagttaaagaaagtgcggaaagggccattccctcttagttcattagttccaaatgatgaaagcttttgtcagcaatgggctggaaccagtgtagatacgtatctcgcctttcgccagaggctgttactcaaggagtttgcaaacaagtatgacaagagaggatga

SEQ ID NO: 156630 - DNA, 940 bp, Arabidopsis thaliana landsberg
aacgcaggaagatctcttttgagaagagaaacctcattcagcttcatagcttcttaggagacaagtaaggtcgctttttttttctcctccgacaatatctactatgaaaatagttcaagattcttacgtgtaaggtttatcttgttataggtggtctgcgattgctgtgcgtttgccaggacgaacatataatgagatcaagaacttttggaacactcatatcataaagaagctacttacaatggggattgatccagtgactcacaggccacgactcgatctcctcgatatctcatccatcttagcttcatctctatacaattcatcttcacatcacatgaacatgtcaagactcatgatggatactaatcgtcgacatcaccagcaacatccattggataaccccgagatactcaagctcgctacctctctgttctctcaaaatcaaaaccaaaaccttgtggtggatcatgacttgagaactcaagagaagcaaacagtttatagccaaaccggagtaaaccaataccaaaccgaccaatatttctagaacacgattactcaagaactccaatcttccatgccaccattccccaatgaagctcatcagtttaacaacatggatcatcacttcaatggttttggagaacaaaatcttggtgcaacttctactacgtcagtccaagattgctataatccgtcattcaacgattattcaagttcaaattttgtcttggatccttcttattcggatcagagcttcaacttcgcaaattcggtcttaaacacgccatcctcgagcccgagcccgactacgttaaactcgagttacatcaatagtagcagttgcagcactgaggatgaaatagaaagctattgcagtaatctcatgaagtttgatattcccgatttcttggacgttaatggttttattatataa

SEQ ID NO: 156631 - DNA, 2452 bp, Arabidopsis thaliana landsberg
  unsure (1)..(2452): unsure at all n locations
agggtgcaaaaacattttcgaaaaagaggctataacggggatgatgaatccgaccatgatggtgttgcaaaaatttatgtatgatgtagttattgtccagggatcaaaacaccatcatggtcagatccgtcatcccacttatgttttcttaggtcaacaagtatggacaattgaaaagtgaagctctatttattacggtatgtttatgtatcccttggaagtatattctaaattaaactccctttatttgaattttatgttgatattagcagtttgagattaaccgcctcgataacaaacatcttgaatccgttgaggttgatcacgatgatgccacatccggtttcattcaaggacttctattcagaacaaacttcatgatttctgaactaattggatatgataaatggtaacaagtattcacttgcattcaagggacaaaaaatcattgggatatatgattatgacaaacacgattggaagctgaatggttgcgggaggcaagcagtgggataatgatctgcaagtggaaacttcttacttttatcatatcccatcagctcgaaagtcttgatattagttttgaattgaagtgcttgaattacaccagatttgttgtgctcgtgtatcccagtaaattcgactaatgaccaactttttttgaggtacgtttttttttggtggattaaagaggttcaagaaaagtctttgtcctttgttctccatttgcttgtcaaacgcacgttcttgagcctttcggcctgcaatatttacactattctcttttaaatgattttcactatcccattatgatattgtgcaaaatatttgtcgaaaactcgatacttgatacaatggtaagaggtgatcaactctcgtttaaagatcaccaggcacgacattactctgcacacaaacggtatgactttaaaatatattaggctatagagagcataacaattcgaaacataaataaaacataaaacataaatatattagtcacatgaaacttgtttcatgtgactaattgacaatatttgtttcttttatttttctaatgcagattgagattgaccatcttaacaatgagcatcttgaatctgttgagggttattacgacgatgcatctggtaacattcaagcacttcaatttaaaaccaatttcaaggtttccgaactgattggatatggcaagggtaccaaattttcactttcagtcaagggaaagattatcattgggtttcatggatatataaaaagccagaacaatccactagtaaaatctcttggagcatatttcacatggattcctgcttgtagattagaagcaaaaggcagcaagggaggcatacaatgggatgatggagcagaccatgaaggtataacaaagattcatgtaagaggtggttttgaaggcattcaatacatcaagttcgattatgtcaagagtggacagcctaaaattggctcagtccacggtctctcgggtagaggtttctcgcaggcggtatgtattggaatttcccgtgttctcattattggcatgatttctaacctctcttttttccaccattttctttttcttatttgttttcagtttgagattgaccatctcaacaatgaacatttggtatctgaagagggttactatgacgacgagtctagagccattcaagcacttcaattcaaaactaacataaagacttctgagctgctaggatatgaaaagggtaagaagttttcncnnncagacaagggaaggaaaatcattgggtttcatggatatgctgagaagaacctcatttctcttggagcataaatcacaacagtttctgttactaaatcggtatgtcacgctagtaagataatcaagtcttgggatgatggtgtttttgacaaaaaangacaggtgtatgttagatattcaatcaatcatgtagcgtgtatcacgtttggctgggttagtaatcattcagttgcgacgcgccagcacgggaataacacatcattagtagaagaggtcagattccttgatagctnatacttggagattatatacttattgttcttgacttgtatctaaaataagaagtttaattctactacagtttgagttagagtatcccaatgaatttatcacatctgtggatggtactttcaaaaactctggtatgaggaaagtgacgtccattacgtctttggttttcaaaacatcaaaagggagaatttctccgacatatggaagcgtgactgggactaaattcgttttggagaccaaaggttgtgctctagctgggttccatggatggacttttcttggttttcttacttctattggtgcatatttttctccgctgccttgtcctcctaatgcggagcaactaccagcacgaggttatgatcgaggagcaatttggaatgatggtgttagaaagatatatgtaggacaaat

SEQ ID NO: 156632 - DNA, 1657 bp, Arabidopsis thaliana landsberg
gggccccaaaaccactcaacatgacccggaggaaaccgtaaagtttgtggttcgctggctcaaacaaaaaacggggaagggggagaattaatgccctgaatctggagcagcacaacacagatccttggctgaggtccacactaccaaggataaatcattaacaaacagtatccctttagcttcaaacaatcaacctgggatcttctcaaacaatcaatcttccgatttttccagttttcagtctggtttcttttcaagccaatctggagcattctccagcagtccttctggtttaatatccaatagccagactggatcttttagcagtggccagtttggtacgacaaaaagcagccaaccaagcctattttccggcagtcaagccggagcaatctctaatagccaacctggaactttctccagcagtcattctggtataacatctagtagccagacgggatcttttagtagtggccaatttggtcagacaaaaagcagccaaccaagcctactttccggcagtcaagcaggagtaatctctagtagccaaccttcttttcaattttctaacagtcaatccccttttacatctgcaggtatctacttttctataagcagaatacatttattggacttgtcattgaccagctttgtatcttgagaacaattgtttaagagacctaacctctactttccttgtttgctggtatcagtacctccagtgtccataccggcaaagcaggatcactcagatgatgcggatggtggtgagttggtcatatctgttttcttcctattttggtttcgggtttctttgaaaggttatatttggatttggaaaaccacttcaatttttttcaaaccacgatcttgaatccttgaggaaataatatattacaaatcttgaggcataaaggcctagtaaacattaggttcgtttgacttggcaggagacgaacaatcttaaccgagcagcccatctgtcaaaaagacggaagaaaagggtattactgtggttcatgaagtcaaatgcaaactttatgtcaaggtattcatccttagagtcctcttaggtgtcatagtgcttgtgaagaagattctttttctctactttagttaccttgacattctgttattactgttgacgatgtaagctctgtatccatgatattgtgcagtcaagtgacccagcagataaagggtggaaagataaaggaactgggaatctctacataaaatgcaaagaaggagtcgacaaggggacaaaagaatcaaaacccacaattcttgtccgaaacgatgtatgactcagtagacacactttacattctacttgttctacagatttccaacattatgaaccccttttcttgccaggttggaaaactgcttctgaatgcactactgtacgctggaatgaagacaagcccacagaagaacgctcttgttgcaatatttcactcctcggtaaattaaacgcactaaagcttctttagcattttcatgttcgttttgtagtttcactgattttgcctacctgcaacaggatgattccaatgagaatgtaacaccgagaacctttctgataaggacaaagaacgcagaagctagagataatttagcaacggccatccaagaatacgccccttcttcatag

SEQ ID NO: 156633 - DNA, 870 bp, Arabidopsis thaliana landsberg
agaggaatgactcttccttggtttgatttctgtttttgtaatcaatggcgggaattgaaaaattttctagcactctccttaaccttgtatgttttttttgcagaatttgatgagatggggagaagctttactagagttatctcagtttcaaaacgttatagattcactgaaaatgattcaaggtgtattttttttttttttgttttggtggtaaatgtttgctttatgtgttaataacttaacataattgaatattgcacattttggattccctaaccattataggaatcaaatgtttttagtattggaatatcacttatgtcttctttaaaaacttgaacttgttttattaatgtttcaagctcttgtaggtatgatgatgcttcatgcttatgtaaattaattgtgattaaaaactgctttagttacaattttattttctttgcgtagatgccatctcaaaactcgaagatgcaatattgattgacccaatgaaacatgatgcggtttggtgcttggggaatgcatacacttcatacgcgcgtttgactcctgacgacactcaagctagattaaactttggcttagcttatctgttcttcggaatagctgtagctcaggttattttctttccattcagaatcattgttgatctggatcactctcttgtgttgtggtttctcgatgtgtgatgttgattttaaatatatttttcatctttgaagcaaccggataatcaagtctaccataaatcactcgaaatggcggtcaagggccctatacggtttaggcatgaatggcatgatatgtttctcaacccgatatgttttatggcattagggacatggcactcaccgatcagctaacaaa

SEQ ID NO: 156634 - DNA, 1045 bp, Arabidopsis thaliana landsberg
tacgtaaaggcggtagcttttgaaaagtctctaaaggaagcttaaagaaggcattgctcgaaaatattcccagcaattgatcggagcaatcgattattgccatatccgcggagtttaccaccgcgatctcaaaccggagaatcttcttctagacgaaaacggcgatttaaaaatatcggattttggccttagcgcattgagggagtcgaagcagcaagatggcttgcttcacacgacatgtggaacacctgcttacgtggcacctgaagtgataggcaagaaaggttatgatggagctaaagctgatgtttggtcttgcggggttgtgttgtacgtgctattggctggatttcttccgtttcacgagcaaaatcttgtggaaatgtatcggaaaatcacgaaaggcgaattcaaatgtccgaattggtttcctcccgaggtcaagaagttgttgtctcggattcttgaccctaaccctaattcaagaatcaagattgaaaaaatcatggagaattcctggtttcaaaagggtttcaagaagatcgaaacgcctaaatctcccgaaagtcatcagatcgactcactgatcagcgatgtccacgcagctttttccgtaaaaccgatgtcttacaacgcgtttgacttgatctcttcgctgtctcaaggattcgatctctcgggtttgtttgagaaagaagagagatcagaatcgaagtttacaacgaagaaagatgcaaaagagatagtgtcgaaattcgaggagatagcaacaagtagtgagagattcaatttgacgaagagcgatgtaggagtgaagatggaagataagagagaaggaagaaaaggacatcttgcgattgatgttgagatatttgaagtgacaaatagttttcatatggttgagtttaagaaaagtggaggtgatacaatggagtataagcaattttgtgatcgtgagcttaggccttctttgaaagatattgtttggaaatggcaaggaaacaacaacaatagcaacaatgagaagattgaagtgatacattaa

SEQ ID NO: 156635 - DNA, 417 bp, Arabidopsis thaliana landsberg
atgtttctcctgaactttttatacacagaaactagaggtgcacatacttactggttgagtaaggagacaattgatgctcgtcctgatcatattctaaatctcatacactatgaggtatatttgtgattttgttcactctcataactaattagttgatctgcagattgaactcattttctagaatggcagtgtactatacattagtctcttatcaggttctctaatgtgtttttgaacaggatgcagcatcgctggcagttgcaatcatgaagaagaaagccggtgctcggattttcttgggttgtgacaaccatcctttgtcaaggtaatgctgctttcgttctaactttgagattactttctaacttttgatgagacatcaaatgtttgacccctcactcttctcaggcaagaggt

SEQ ID NO: 156636 - DNA, 931 bp, Arabidopsis thaliana landsberg
acccgttgcgttttgctttattactagaatgaagtttcaggtgaaggtgagactggtacagtttacaaagctggattccatgacaggcatggaagaacggttcttatactgagacccggcttgcaggaatctaatgatcatttttcttagttaatgagttaacttcaaagcacaagctaaaacttccattttcattgacattttttgtagaacacaaaatcattgtatctcattgcgaatgctattctgaatctgccagaggatcaagaacagatgtcttggcttattgacttcacgggttggtcaatgagcattagtgtgcctattaaatctgccagagaaactattaacatactgcaaaatcactaccctgagagactagctgtagctttcctctataatcctccaagactctttgaggcattctggaaggttagacgaatcacttcatctatgactcatagttagacaatacattggtttggttaagacaactttgtgtgtgttttgttcgtctatatgtgcaggaacatgcaaagacattcgtcaaggtgaagtttgtttacccaaagaaccaggaaagcgtggagcttatgagcacatttttcgacgaggaaaatcccaaccgaatttggagggaaagctttgttgcaatataactatgaagagttctccaagcaaatgaaccaagacgatgttaaaactgcaaacttttggggattgtgtaacagtaacaataaccagctgcacgcgagcaacgggttttctggagctgagattgcccctgagccagtccaaacacacccttgactgtttttaaaggcaatgtattgttataaccaacacttttgaatcttagctcttgatgctaactagagaggttgtatgatttagacatagcatttgaataaaataaagaggggttgtgtgt

SEQ ID NO: 156637 - DNA, 2104 bp, Arabidopsis thaliana landsberg
tatgggagcagcttcagaaagagagtccagagtttttcaagaagtactacttccactgtgaattagcgcgtcagatagaaatgtttaacatttttcttggaaagcaagttagtctgatggtcgagaatggagatcttgatattggtactgcaccatgtacgtataacacaaggactaaaatcttcttatggattatttactgcccgattttatgaactgcttcagttatttttttgtgtctttatgtatctacagtcaagaattttctcggtcaagatcctgaaggagctcatctcttggtgaaactagcgaatacaccttgtaaatctctctactgatatctctaaagttcaataatgtttttgaaaattgggtttgttttgtttgataactctttgcattatgtagttgataggtcagagatgagtccttcaagcttggcaacgttggcattggatgatacacctggtctaacaggtaaagtcataaatacacatatggtactagattcatgctcgatttcttgcacttttgacatctaagaatttccttgtgtttctctcctttgtagtaaacaagttgcagattcctaatgatcagcaaaatcaatttcattcttatcaatggtctactacaactaatcatataccttgtaaagaacagactcaaacctttctctcttctgaatattgagtttgttttgtttgatatctattgcaatgtacagtaggtcatgattgcagctggcaaaacttggtttctttcacttttgacttctaaagcttcctttggtttctctatcttgtagtaaaccagttgccgattccaaatggtcaacaaaatcatcttcatcaaaaccaatggtctacacgaaatcatcaagcttgtaaagaagagattcaatctttctctatcatttgtttaacacttttacttgagcattttttaagaatggctcaactttcattctccataggtactcttggagctcctaccgttcaaccagcagctaatgatcaaacctttttctccataggtaccaatctgggagctcctaccgctccaccaggagctaatgatcactggtttccttatagtgatcctacgtgtaaagaagactcagtctttctctcttcatctatcatttgtttaacacttctacttgagcattttaatgaattacactactttctttctccataggtaccaattctggagcttctgccgttccaccagcagataatggtcaatggttgccatatacagatcctacgtgtaaagaaaacactcaacctttatccctcatagtttaaacccttttacattgaatcactctttctttcttttttctccatagataactatcttgttgtatattcaaccggtgcaccagcagccactgctcaatggccaacatctaatgatttccttcccatagatactggagctccaacttttgcaaaagcacctactgcggcatttgaccattttgcaaatggttttggaaaagatattaacaatagcagcccaaatttccagccgatggatccttcaacagcaaaactactaacactactcgaccacctgcaacaagacccatatggataataccaactgccactgcaggttctaaaaaaaccctcactagaagagctgcgaaaacttccatatgaagtagacaacgtgctgcgatatgatggaaacaacaacgggctactaatgaaacccaaaaagccgccacaagacctatatggacaatgccaaccgcaaccgcagatccaacagaaccttcaatatgaagcaaacaacaacgggttgcaatatgatggacacaacaacgggctgcaaggagtactaacgcaactcgagaagccactacaagacctatatggagaatgccaacagaatctctcagtagaagatctactaactcttgtatatgaagcaaacaacaacggactgctatgagtaataccgcagcaacatcgttatcatcaggaaaaagagacaatgcagacacaaggagatccactgaatcgaatacctatttaatcagaagcttcaaaccattcagatagtggtaagtagcaacactacaaatgtg

SEQ ID NO: 156638 - DNA, 1919 bp, Arabidopsis thaliana landsberg
ctccttgtcttactcttaaacttactctttctctttactactctcgcgtcaagttccaagacccgattcaagtattcgttagagaagcctcaccacccgcttgacccactaacaacacctgaaataaagagagtccaaaccattctctcgggtcatgatccgggttttgggtccgggtcaactatcattcacgccatggctctcgacgagccggataagcaacgtgtcgtccggtggaagaaaggtgatcttctcccgccaagaagagcggaggttcttgctatgtctaacggcgagagtcacgtgctcacggtggatcttaattcgggtcgggttgtttctgatttggtcaacccgacttttgggtacccgattcttaccatgaaggacatcatcgcagtctcacaggtcagtccggtttaaattcaaatcaaattctcagttaaccggtttaattatttaaattcaaaccaaatctgaggatacgggtatagttattcacactatcaattctcccaacctgtgtaggttccttaccagagcgtggaattcaatcgctcaatcgaggcgcgtgggattccgttctccggtttgatttgtattacgccgttcgccggttggtatggaccggacgaagaaggacgacgagtcataaagatccaatgtttctcaaagcaagacactgtcaatttctacatgagacctatcgaaggactttatctaacggtcgatatggataaattagagatcatcaagattatagacaatggaccggttccggttcccaagtctaccggtacggaatatagatatgcatttcttaatgaaacggtacatatggaccgtgtcaatccaatgtcgatggagcaaccggacggtccaagttttcaagttgaggatggatacttggttaagtgggcgaattggaaatttcatattaaaccggaccaacgtgccggtatgattatctcacaggctacagttcgtgattccaagacaggtaattaattatatcacaaacaagtcccttgaatttagttattgttacaaattgactccaaaagtctatcaagttacgatgaaacccaatttgttgaggttgaaacaggtgaagcaagaagtgtgttgtacaaaggttttgcgtcggagttgttcgtaccgtatatggatccaggggaaggttggtattcaaaagcttacatggatgctggagagtttggtttaggaccttcgtcaatgccacttgtgccactcaacgactgtcctcgaaacgcttactacattgatggtttcttcgcttctcctgaaggcattccaatacttcaacctaacatgatctgtttgttcgaacgctacgcgggtgacactagctggcgacactctgagattcttctccctggtgtagatgtaatgttctattacacaacactattattattttctttatatgatatgatacttatgaaaatgtaatttggatatcgacagataagagagtcaagggcaaaggttacactggtagctagaatggcatgttctgttgggaactatgattatatttttgattgggagtttcaaatggatggtgtgattcgtgttacggtatggttacattatgtgtatgcttaaaagtttctcttaatagttgttataatgaatgaaaaacgttataaatataggtcgcagcctcggggatgttgatggtgaaaggaacggcttacgaaaacgttgaagacttgggtgagaaagaggatgattctggaccgttgatctcagaaaacgttataggagtcgtccatgatcatttcatatcgtttcatctagacatggacattgatgggtcagccaacaactccttcgttaagggtcatctagagaagcagagacttccacctggaaaatcaaggagaaagagttac

SEQ ID NO: 156639 - DNA, 1204 bp, Arabidopsis thaliana landsberg
gccctttttgaattcgtttcatttgatgttgtgatttgtagtttatgatctgaaacttactaatttcctttgtattatttttcagctattgaaggattttttgttatgggttgaacaagatctagggccttggggaccttttgccctgtaagtctctcttcttcttgtttctttagctatggagctagttagattcttgcgtgagtcatagcaatgagctacactaacggtggtagcttaatcactgtttcattgctaatgttaatccatagatataggaacatgagattaccttggtactgaacttctctttcttttgtgatgtgtgcagagctgttgcgtacattcctcttacagttttggctgttcctgcctcggttctcacggtatatacatgtttcttttgtgtgtcatatgttacggctatcatctactctcaactttctttgttagagtgactggtttatctataaaattgagaaatcttatttggttgaagctgtgatatattcagctcggtggtggctacctttttgggctgccaattggttttgtggcggactcagtcggtgctacacttggctcaggagctgcatttctacttggccgtacggtaagcgactcaaactcttattgatttgcacacacaaccattagattaatgaagtgacatgcataaaccactgacgctatccttttttgatattttggtacttacatgaaaatgctcttatgcagattggaaaaccttttgtagttgcaaaattaaaggattatcctcagtttcagtcagtggcactcgccattgagaaatccggcttcaaggtttgcactgagaaccaacacaaattttgggctggcaccattcttttgaaaacttatgaatatgcaaaactgaatatagatatgcttgctgcaccggcttgctcctcttctcccattcagcatgttgaactacctcttatctgtcacgccaattcggctaggtccatacttgctttcttcgtggttagggatgatggtaatctattctaatccaccacttcataaccactgcaaaatgtttaaattgtaagatggaaataatacagcttgatacattgttaatttgcagccaataacacttgcgttagtgtatgttcccacaaccccaaaagacctttctgatgtaataacaaaaaaagcgagttcttccaggtcgctg

SEQ ID NO: 156640 - DNA, 2408 bp, Arabidopsis thaliana landsberg
ctttcctcttcaaagaacctatagatgggctctcttcatcttcattcgttgattcaaacccttacctagttgctgctttcgctactccttcctctgttctcattggttatggcattgctcgatctggttcttctgctttcaacgagcttcgtactagtgttttctccaaagtagctctccgcaccatacgaaccatctctagaaaagttctctcgcgtttacacgatctcgatcttcgttaccatctaaatagagacacaggtgctttgaacagaatcattgatcgtggaagccgcgctataaacacgattctctcagctatggttttcaacattatgcccacgatcttggagatatcaatggtctcatgtatattagcatacaaatttggagctgtttatgcattgattacttgtctttctgttggatcatatatagcattcacgttggctatgacgcagtggagaatcaagattagaaaagctatgaatgaagctgaaaacgatgctagcaccagagccattgactctctcataaactacgagactgttaagtatttcaacaacgaagattacgaagctcgaaagtacgatcagttacacgaaaattacgaagatgctgcattgcaaagtcggaaaagctttgccttattaaattttggacagagttttatatttagtacagctttgtcaacagcaatggtgttgtgttctcaggggattatgaatggtcagatgacagttggtgatttggtgatggtgaatggtctcctctttcaactgtctcttcctctttactttctcggggttgtttacagcgacaccgttcagggacttgtcgacatgaaatcgatgtttaagtttctagaggagagatctgatatcggagataaagatatagacaggaagctccctcctcttgttctgaaaggtggaagcattagttttgagaacgtacattttagttatctaccggagagaaagattttagatgggatttcatttgaggtaccggcagggaaaagtgtggcgattgtcggtagtagcggaagcggaaaatcgactattcttagaatgatattcaggttctttgatgtagattccggaaatgtaaaaattgatggtcaggatataaaggaagtgagactagagagtcttagaagctccattggagttgtccctcaagatactgtaagttgccattttcactataaattttgctagctcttacattttgttgttatgagtctaaaccggtttttagtatgttagcatatggttacagattggggtttgattattagtactgtatactcttttgtattacaatcacgtttactacataaatcatgaaggaaatgatattgacactgcaaaatgcttcttaattgtaactaaaatctttattttaatatcatggcctttttcatacgttttggtagtttaaaatgtaacatgtcacttttctacaaattgcatgacttcaaagtaacttccatatacaaatttaatatcattatcaggcatatataccaatcataaatattcgtatcattaaccttaattcacatggcaggtgctctttaacgacactatatttcacaacattcactatggaaacctttcagcaacagaggaagaggtgtacaatgcagctcgacgagcagcgattcacgatacgatcatgaaattccctgataaatattcgaccgcggtgggagaaagagggctgatgctgagtggtggagagaaacagagggtggcacttgctcgtgcatttctgaaatcaccagcaatcctattgtgtgacgaagcaacaagtgcactcgacagtaaaaccgaggcagagataatgaaaacgctgaggtcgctagcgagtaacaggacttgcattttcattgcacatagactgaccactgcaatgcaatgtgatgagatattagtaatggagaaaggaaaagtggtggaaaaagggacacacgaagtgttgttggggaaatctggcagatacgctaaattatggacacaacaaaacagtaaattggaggtgtgaattttgtaaaactatgaatcaaaaagccactttgggcctttatatagccttttaagagagtgaaagagcagaaaatatagacaccagaaaaaatttaataaataaaaacgaaaaagatcaagcccaatacacgatcccaattatccaataaacaacgtccacgtagatcccgacaagcgagtcatactcacgcgctgtttcaccgagcgtgaaaaaaacgacggctgatccctttgtttaagacagccaccacctccgaaattaacaagaaggcgaagaaaatcatcaccaccgtcaacttttctcttgcggacaagacgattctccgattatccccaagaggagaatcctcataa

SEQ ID NO: 156641 - DNA, 4290 bp, Arabidopsis thaliana landsberg
aagcagtagaaaaaattcagagacagaaattgacgtaggtatcgatggacacaacccctgatgtcgagccacaccaatacctgaaagcaattcaattgcgcaacttattcatgttttgaagatttccaaattcggcccagaactctcccatatatccaaagaaggcccagacgtttttaggacttatttatggtcattgtttagacctaactcttattaaatcttttatacttgggagcaaaaccctgtggagactccctttagagaagattcttctaaactcttttctcttcttaatttcattattgatttcttattcaatcatgttttgttcttctatgatcatgcttgagaagttctcttgttgggtttagggattcacataagggatttggatgaattagtagatcggaaaccctgttaggataatatatttagaattcttcatctttgattgttcttaatgctagtttaagagtaactaactagaacttgatattagataataggtatgcccaccataggtacttgttgtttgaactatcataaatgagcctaggcatttaatagagaacaggtaggctcatagaagggttctggtttagatactaggtgaactaatcaagcttgaaaacaatgcatgctttaggataggatttctcggcttctccggttatcttagctctaagtatagagagtcttgcggaacaccaccggttactctagaatcatagtttgagttcgagaacggtgcgataacaatccttatattagctagatctacaatttatctatctcccaagataattccttagacctgacgctttaatcacttaaatctacacttcttttacttgcttatttatcttttacattcaataacttcatttagcttatttaataacatcataagtctattgtgtgaacatcgagagctcagtggaattcgacccttaagtgctaacgatgatctcttatttgagggattaagcttaaggcaatttgagctacatcaaatttggcgctgttgccgaagttctcttttagttcaccattagactaggtgtccttttaagtctaaatactactttcctaccacctattcacgtgtttctttgtctattggtctcttctgtttcaggttccttcagattgagactcacgtttgaatggcagactttcacggctgcgtcgaccaacaccatcagggtgtcgatcgacaccctctgcagaaccagacggctacaataggcaattttaacagaactgatctcttctacaccaaccgatcagcattcaagctacctccatttgaaagagaagactttgcaatacaccctgcttattatgatcttgtatctagaggaaaatttagaggagctcctgatgaatcaccattcgatcatttggaagtcttcgaagacatagtttcctctatcaaagccgaaggtgtaccacttgattaccttctttgcaaactcttcctccactctctcgcgagcagaggaacataatggttacgttaactggaaccaattggactaatacaaagaatgcattcatgaatcacttcttcaatgcatccgtgacagaggcaattcgtttgcaaatctcttcgttcactcaggctccagctgagtcccttagagcatcttggctccgttttaggtcttatcagcgtgaatgtccccaaaatggcttccaagagagccaactcatcaacctattctacaaaggaataaacaagccataccggaatcaactcgatacagcaagctcctgtaacttcatgacaagaaccattagtgcagcattactcctcatcaccaatgctttaacttgtctttcgacgcaggaattagacatagaacgaagaatttaagctgagttagccaccgcgagcaaagcgactcctgttttagcaatttctgctcctatccaagcctcccttccaccctcatcagagacaagaatagagtctatgcttgcgcagcttctagcaggcctaacaaagcttgatagcaaatatgattctctctccacatatctcaatagcaagattgacaatctacgctctcatatatccaatctctcacctacatcagcttctatcaatgcagtcacactacgcagcggaaagcagctcaacccaatacttcaacgcgaacgatcagcttagccttcaacttttccaattgcagagaacgaatcaatgtcgatcgatacaccagggtgtcaatcaacactactcttgacgactctgtttttcctttgtcgagtggaatcgacaattttgtggaggaggaggaaactattcccgatcgtgttgatcgacacccagctcctgtcgatcgacacccagctcgttcagacaatgtgcaaatttcaacaaatcggcgaattcccttccccaagagtcctaaaaagtcaagacaagccttagatgatgtcaaatgcaaggctatgattgataagctgattgttgagatgcctctagttgaagctattcatctatcgcccacaatcaaaaggtatgttaagacaatggtcactgagaatttgatgaaagaatgcagtgttatgatgatttcagagcagggtagcaacatcattcaggaacgaatcccaaggaagctacttgatcatggaacttttgtacttagtttcaccatcaatcacgattccttcccaagagctttatgtgatatgggttccagtgtgaatctgatgcctcgttcagttgttatgcgtcttgggtattccaatcttgagcctacctttattactcttgtcttggcagatcgttctacccgtattccagatggaattcttattgatgttcccatgatgattggaaagagcacgattcctacacactttgtagtcttgccttatgagaaggaagctaaggatccattaatcctagggagatccttcttgcacacagctggagcaatcatagatgttcgataaggcaggatagggctgaatgttagcgatcttactatgcagttcgatatgaacactttggtcaagaaaccgatcatagaagggaaaaccttcttgatagattctttcacttcatcagctttagatagtatttcagagatggaatgagaagacccactagagcgagttttggtctcttccatagaagatagtgcagatttggacactgaaacttctacatatactaagctgctagatgagaacgaacatgtgatgcaacttacggttgaagaagttcttccatctgtgactccaacgccgactactaattcagattgggatccagcaaaggctcctaaaatcgaattgaaaccatatccaacagggctaatgtacgcttttcttggtgaaaattctacttatcctgttattgtgaatgcttctcttaatcccgcagagctcaccttattgctaagcaagctgcgcaatcatcgcaaagctcttggctattctcttgatgacattgcaggtatatctccagatgtatgcatgcataggatccaccttgaggatgagtctaagtcttcagttgaacatcaaagaaggctgaattcgaatctgaaaaaagtggtgaagaaggagattgtaaaactgttggaagcagggattatctattcgatttcagatagtagttgggttagtcgagttcatgtagttcccaagaagggaggtgttacagtagtcaaaaatgagaaagacgagctgattcctactcggacaatcacaggacatcggatgtgcatcgattacagaaagatgaatgctgctacccgaaaagaccatttccccttaccatttatcgatcagatgttggagaggttaacaaatcataagtactattgcttccttgatggatactcatgattctttcagatcccgattcatccagatgaccgggagaaaatgactttcacctgcccctgtggtacatttgcttatcggagaatgcccttcggtctttgtaatgctcctgcaatattttagagaggtatgatgtctatcttcacaaatatgatcgaggatatcatggaggttttcatggatgacttttcagtttatagatcatcatttgaggattgtttagagaatctctgcaaagtgttagcaagatgtgaggagaaacatctagttttgaattgggagaaatgttacttcatggtatatgatggaatagttctaggacacaggatttctgagcatggtatagaagttgatagagctaagattgaagtcatgacgagtcttcaagcgcctgataatggtaaagcagtaaggagtttc

SEQ ID NO: 156642 - DNA, 2138 bp, Arabidopsis thaliana landsberg
gcaacactagaagagtatgggactaattaacttaactaaactagcagaagaggtaataaatatatgtactcatcttgaagagagtgtcatgttaatgcttgaagttttatgctgaattttggttttttactttctatggtagggtaaactggatccggttgttggaagtcagccacagataaaacgagtggtccagatcttggctcgaagaacctgcaggaacaacgcgtgtcttattggaaagcctggagttgggaagagagcaatagcggaaggaattgcacagcgaattgctagtggtgatgttcctgaaacaatcaaggggaagatggtaaatattttcccattggatcattttgtaatgaatttgagaggcttagctagagtgcaaaaatgtgtatatatgttttaagtaatttacttttactttttatgacggtcaagacttcgtctcattctttctttccttgagaatgtggcagggaattggtgtgattatattgatgaatgcgcaattaaaaaaatattacttctacttttttatcaggttataacatttgatatgggtcttctagtggctggaacgaaatccggtggagaagccgagggaaaattgaagaagtttatgggcaaagtgatgacataattctgtttattgatgaaatgcacttgctcatcggtgcaggagccgttgaaggtgcgatagatgctgctaacatcttaaaaccagctctagaaagatgtgaattgcaggtaaattttataaattctttttatatctaatgatgtcaaatttttcaattcatagaactggaaactcaatttttaccaaatgttttttttttctttttttacggttgtagtgtattggtgcaacaacaattgatgagtacaggaagcacattgagaatgatcctgcattggagagacggttccagcctgtgaaagtacctgaaccaactgtagaagaagctatacagatcactgctgttttagctaaaggcaaagaagtggccacacccgatattgaagctgtggaaggaggacctactgtcacagaatctgacatacaacacatcgtcgccacctggacaggaatcccggtagagaaagtctcgtctgatgaatctagccgtcttctccaaatggagcagacccttcacacaagagtcattggccaagatgaagccgttaaagcaatcagtcgggctatccgccgtgcccgtgttgggctcaaaaacccaaaccgtcctatcgccagtttcatcttctctggtccaactggtgttgggaaatcagagcttgctaaggccttggctgcttactacttcggttcagaagaagcaatgatccgtcttgacatgagtgagttcatggaacgacacactgtttcgaaactcatcggttcacctcctggttacgtaggatacacagaaggaggtcagttaacagaggcggttcgacgcaggccctacactcttgttctctttgacgaaattgagaaagcacatcccgatgttttcaacatgatgcttcagatcctagaagacggtagactaactgatagcaaaggaagaactgtcgatttcaagaacacgcttctgatcatgacttcaaacgtagggagcagcgtgatcgaaaaaggtggtagaagaattgggtttgatcttgaccacgacgagaaagacagcagttacaacagaatcaagagcttagtgactgaggaactaaaacagtatttcagaccagagttcttgaacaggttagatgagatgattgttttcagacagttaacaaagctggaagtcaaggagattgctgatataatgcttaaagaagtggtggcgagacttgaggtcaaagagattgagcttcaggtgactgagaggtttaaagagagagtggtggatgaaggattcgacccgagttatggtgcgaggccacttagacgtgcaataatgaggcttttggaggatagtatggcggagaagatgctttcaagggacattaaagaaggagattctgtgattgttgatgttgatgccgaaggaagtgtggttgtgttgagtggtaccactggacgtgttggtggttttgctgctgaagaagccatggaagatcctattccaatattgtag

SEQ ID NO: 156643 - DNA, 1003 bp, Arabidopsis thaliana landsberg
atgctgagaattcacaataacacttttgtgttgtgtacatttttgttgttgtatatagattagcactctgattctagcagaacatgagagtggtacaatcaaacctcagacagtgagtacagtagttgcagctaattcattaggtgagagctcttcaatttctttgttattggctggttctggttcttctcttcaagaagctgcttctcaagctgcctcttgtcatccttctgtttccgaggtaagctacaacattctcccttctcttcatttgctttcttttggttttgtggtctcagtgttggtactttttctgtaggtacttgttgctgattctgataaatttgagtactctttagctgagccttgggctaaattggttgactttgttcggcaacaaggagattactcacacattcttgcttcctctagttcatttggcaagaatatattaccccgtgtcgctgctcttttagatgtttctcctattactgatgttgtcaaaatcttaggatctgaccagtttatcaggtacattccaactctctctcgttctcgttgaactgtgaactgaaaccaagatttttatctgtgtcaggcctatttatgcgggaaacgctttgtgtacagttcgttatactggtgcgggtccttgtatgttgactattagatctacatcttttcctgtcaccccgattacagcaaactcagagtcaaagaaagctactgtctctcagattgatctctcaaattttgaagacggtccgtttagtgtttctcttatgtattcgtgttttcgtcggtggttcttttttgtgaatggttttgctattcttcactgcagactctgtcagcaaatctagatatgtgggacgttcaactcaggatacagaacggcctgatcttggaagtgcacgtgttgtgatcactggtggaagggcgttgaagagtgttgagaattttaaaatgatcgaaaagcttgcagaaaaacttggtggagcag

SEQ ID NO: 156644 - DNA, 2969 bp, Arabidopsis thaliana landsberg
atggcgttggacgttgaaaacttttggtctgacggtggagcgacttgcaacaacaatgaaaaagagacagaagcacaaagccttaaacgcaaaggaaatgcatgccatcttattattttgcttaaggtatatatatagaaatacgagaaacttgttgtttatcaatacttgttctgagagataatgagaattgttggcatacttagtctgcttatatagagttagcttgtctctatgaacggtaaaaaaaaacttgattattgttactaagtaacaactaaaatagggttgtttttttggtaaggcttgcgaatgatatttaggtttttgagtgtatatggtttatttttttggttctctcctttaaaacagaatcttcaatttggtgaatgtgacaatcacatttaccaattaattgtttttttgttgttttaatttaagttgcataaaaccaaattgtttttctaatgcactattttttatttgttccaattttaacggatattaaattttactattttagttattttgtgaactaatatttgttcaagatctaaaaacagtttagaaagaaattataacatgaaagatcattagcgaatgtgggtgcttaaccaatatcacatctcgccttcaatagcgggtgaccccgtcattaaccagatttagggttgggcaaaacaaccggatccgatacccaaccctaagcccgaaccaaaaaaactgggctaggacaggttagggttttagaaaattacttggataaaattttagtaaacccgtggataccgagtcggttcagggattacctgttttccaaacaggctatccaaaaacccaacataaatttaatatccaaaatattaattatatttaatcgtaatataatctaattatctaagattataattataaatctaaatatgtcaattaattttggacctaaatatccaaaacaactaaactattcaaaaattatttgttatgtttgtcaaaatttagtaaaatatattcaaatataattaaatttattaaatttattaaaacttaacaaatttaaaagtttttttggtttgaagacccgctatctaaatacaaaatatcgtttctattttttttgggtatttttagggcctgaaactttttatccaaactgacccgaatccaactggacccgacccgaaccagaaccgaatatttagaattattctattgggtagtaaatcatatacccattaatctcaaacccgaatggttctacccgaactcgaatggattactcatatgcccagccctattctctgatttaattatctaaaaactcccaaaaaaacatatgttttgctgactactttttattcgaaaaattttacatcctcttctgccaaaatcatttcataagacatcccaaaacccttagaataatgattccatgaatgaagaatcctaatttgaatataccaagaagttttgaaaggttttaagtttttgataggtgtgtatgtgggaaggtatagacatcgtgatgataatctgcttatttataattttaacctgcagtatatcgcaggtaggcttatattttagttaaactaaaaacttttattgtaaagatgattataaatatatgatattattttatttgattttaaatgtatagtaaactgcgagttgtatatattttgttgatattatttacattgtttagtgtttaaaattatacacttgtattttaagtgttaattttagagtttcacctgtagtataccatcttgtattaatatcgatctaaacccgtccattctagaattttccagcttgtattaaaaattgaatcacatcatacacattaaaaaatctaatatgttattaattattgtagtatataagattataaattttcaaaacaatatgtatgacccagtactcagtagaaagttttcttaaatctatttttgacccattataatatttttcatgtattgaacagtttatattcgtttttaaaaattcaaattagggcatatgcgaaaaaactctaattattttttataacgatgatattattttttcgcaaaaatagaatcatatatagatgagaagtgaactataataattaataaaaaattaatatgataatttagatatcaaatctaatttgttgattttaattggttacttttttaaaaattaataatgtatttcgtttttctaattaaattaaattaattaaaatttatatatcaaatcttatatgttgattttgattggttattatttttggaaattaataatgtatttcgttctttaattaaattagtatttgactttctaatctttaaagagataaattaatttactctttaaaattttatttctaatagcatacctatgtaattacttacaaaaattaaggttacatttaaaatgtacttcccaaataatatagtaggatatgacattattatagattgtattctattgtaatgatatggttagaataactaattacttaattaaagtttttttttggttatacactcaaatttccctatctaatatgcctaaatccgaagatctttaccaatttgtgcctattttaataagatactcttcaaacaaaacaacaataaaaatgttggtcccttaattccttaattttgcactttgcacagccaccagtgagacagagatcttctacgacagagataatacaactttcgtactcaacaaaaatctcagtcgatgataaaatacacgtgttaaaatctaacggtcttgataaattaaaggaaaaaacaaaagctggaaacaacagagacgtaaaaacgatagtttaggaaaacaaaacaaaaaagtggtctttgatcaatcaataatcattcatcagggccctgtgttctctgagtcaagtaagattcttttcgacgattccatttactttttgattagggttttattattctcaa

SEQ ID NO: 156645 - DNA, 507 bp, Arabidopsis thaliana landsberg
tgcaacccgtacaggcaacctttacccgtgcgttgtgtacgtggtgcagggaggagccattccgtatagctgttgcaatggcatcaggatgctcagcaaacaggcaactagcgcatcagacaaacaaggtgtgtgtcgctgcatcaagtctgtggtgggaagagtgtcttactcgtcaatctatctcaagaaagctgctgctttgccaggcaagtgcggtgtcaaacttccttacaagatcgacccttccaccaactgcaacaggtaaacaacacacatgctttcacattttttaataaccaattcatccacattaatttatatattctctgttctaataagtcatctatctatacagcattaagtgagagaaataagttacgggaacgaccaagaataaaggacatgtatttcgtctaatgtaaccggagtttagtgcttttcagcttcttactaatatatgtgtaatgcaccaatcaaatataatctatagactatttatctaca

SEQ ID NO: 156646 - DNA, 1135 bp, Arabidopsis thaliana landsberg
  unsure (1)..(1135): unsure at all n locations
atttgacatgtttggtcaatgcttattttgatagtagcatcaagactttagatttctgcaatgctgttgataactgtgttanacgcgcgaggataggccaaatgctcttacagtttgcgcttaagcagtttgagatggagtcatcagggagcaacaaatccgtggaaccgggtactaataagtacgcgaaaactttggaagagcttaacaagtttaaggcttctggtgatccgtttgatggagatttcttcatgctgcttgagtctgtttacgagcagcaggttatgcttctggagatacttcataagcaaaagaggaagcttgataaaaagcttaagaacataaagtattggaagaaaatctcgaatgtggtttttgtgactgcgtttgtctctgttttgatcttctctgttgtagcagccgctgttgctgcaccgccagttgtgactgcgcttgcagctgcgttagcggttccaattggatcaatagggaaatggtgtaatcatctttggaagaagtatgaaacggctgtgaaaggacagaaagatattgttctgtcgatgaggattggtgcttatgttaccatgaaagacatggataacattcgagtacatgtagataagttgaagattgagatggaatcgatgatgcaaaaggttgattttgcactcaaggaaaaagaagaagaagtggctgtgaggctttcgatgcacgagatcagcaagaagtttgatgttttcacagagagaatcgaggaagtgggtgataacgcgactaagtgtagcaaaaatatcacattggcgagaccaatcgttctgaggcacattcttagcttcccctcaagttcagattcagggcaaggaaacttgtaagttttggtttcttcgtttttgttgggtttgtgtaaagtttgaatctttggctcacattatgcatgtcttttggtcaggattgaggctatcacattgtgagagatagatacatagcataaactggtggtttttgacaagaggttctgtggtatgtcacataacgcttatataatgttatgtgtaacagctcttgtatacatctgtatctgtttagcacagcataatgtattactcaattggaaataaaattcatagtctatatt

SEQ ID NO: 156647 - DNA, 987 bp, Arabidopsis thaliana landsberg
actctggtagactactctcattatatacattataaagatactgatgagtggttcttgtttaatggagttttaaatttaaaaatatttggtaaccgagtggatcatcatgttattgagaagcacatctgctccgatactgaactcgtggcttccacaacactgctcgagagaatcgtctccggaaccggagtcacagctctggcgccggtcaacatcattgtctcttttctcatcaaagtccatagatggacacactggggagcagctgcaccaagctctctctgacaacaaggagaatattattcttaaatcaaaaagcaacgagcacagctacaaaactccaacatcaagcaggcaacgcaggtcatctttagatgaaacacgctacacaaaaaagactttggatcggtcgtcacctttcttagtggagaggctcttctcgagctctggacagggagataaggccagtagtaatgatcgtctggagactcttgtgagtggtggtggtggcgggatgggaggcagcggcggcaatatttgtaacggcggcggtggtgtcggtggaagtggtgtggacggcggtaggagtgaggacgctaccgacacgtattaccgggagatgatcgactcgaatccaggaaactcgcttttgaccggaaactacgccaagttcttgaaagaggtacaaaaaggaaaatatctttttactgtcttttatgtaggatatttaataagttgaagatccatccacgtgtaaagattgtattgcgtgacaaatgaaaataaataataaaattaaaaatcagaagttttcatgtttagttttagggaaatgcgtagaagagaggaaagaaacgttctcatcgggaaaaaaactatatgtatatgaacaggtgaaaggagacatgaaaaaagcagaagagtattgtgaaagagcaattttggggaacaccaacgatggaaacgttctatctctctatgctgatc

SEQ ID NO: 156648 - DNA, 1127 bp, Arabidopsis thaliana landsberg
atgactctttttggtttttgtgatgaatcttcaggccctgaagtagcaagattggctgacgtggctaggaaaaaccatgtgtacttggtaatgggagccatagagaaggaagggtatacactctattgcacagttcttttctttagtccacaaggtcagttcttaggtaagcaccgtaaactcatgcccacaagtttggaacgttgcatttggggccaaggggacggatcaaccatccccgtttacgacactcccattggaaaactcggtgctgctatttgctgggagaataggatgcccctctacagaactgcattgtacgccaaaggtcagcttttaatgcaatgcaatgtagcttgacatatccggctttaataaaaaaatcttacaaagttttttatttatttttcgtttttggtgtttaggcattgagatttattgtgcacctactgctgattattcgttggaatggcaagcatcgatgattcacattgcggtagaaggtggatgtttcgtattgtcggcttgccagttctgcaagcgtagagagttccctgaacatcctgactacttgtttaccgattggtacgacgacaaagagcctgactctattgtttcccaaggtggaagtgttattatttcacctttgggacaggttcttgcgggaccaaactttgaatcagagggtctcatcacagcttgatcttggtaacaaatatatataatcttctttagtttttatcttaggctatagaaaaggataatttttttagctaatcatattttatttttgtcatcaagatcttggtgatgtagcaagagctaagttgtacttcgattcggttggacattactcgagaccagatgttttacacttgaccgtaaatgagcacccgaagaaaccggtcacattcatttcgaaggtggagaaagcggaagatgactcaaacaagtaatcggttgtgattcgtcagttcatgtcactcctatgaaggagtcaagttcaaaatgttatgttgagtttcaaacttttatgctaaactttttttctttattttcgttaataatggaagagaaccaattctcttgtatctaaagattatccatctatcatccaatttgagtgt

SEQ ID NO: 156649 - DNA, 886 bp, Arabidopsis thaliana landsberg
gaggaatctttttcccaactaaggttcttcttaatcaccttctccactcacattgttactcatctacttgattgcttttgattgggatgtgaatgtgattatgaaaactgggtttaaggcattactaaatctagaagatgacttgttttttgcaaatttcactggtttcttcttatgtatcttttcatcttttgttggtctattgttgttgttgtactcttctcttgttgaattttgtattgaacctgattcctatgaagcttttcatttgtgttttttggtttcattactgatctcagtgtgatggagcggatggatcattagttgtggattacttcacattttcctcaagtatcgcagattatattcagtctgcatctcttgttattagtcacgctggttagttattggaatagttgagcacttttacatttaatagaatcaaaaccagagacacatttttcgaaatgctaggatataatgttgtcaactctcaatggtgcaggttctggaagtatatttgagacactgaaactagggaaaccattgattgtggtagtgaacgaagatctgatggatatcatcagatgtgaattagctgaagcacttgaagagagaaagcacttgtactacactcgtcctgacacccttcatcaaaccttgacgaaaatggagttggagtctctggttcaatatactccaggggatggaactccagttgcctcgcattatcgacagggttcctcggattcccttgatgattaaacacaacacatacatgaaaacaaagtgtttagtttccaattacaacagaatatgcagtaactggtgctttttgccagtagacattgtgtcaaagatatccatcataatagcaaagcttttt

SEQ ID NO: 156650 - DNA, 933 bp, Arabidopsis thaliana landsberg
gctataacgaacgagaagcttaaatgtctttgaactataattataacaacactagtgttcgagaagaagtttctaaagtgaatctagtctcaactggtctgagactatcttatgacgacgatgaacacaattcttcagtgacttctgctagtggtagcattttagctgcttctccaatctttcagtcactcgatgatagtcttcggattgatctccatagacaaaaagatgagtttgaccagttcatcaagatccaggtactgattgtctctgcatgtaggctctgtttttacgtgaaaaggttcttcgattctaatgtttttgtttgcttttatgtggttcaggcagctcaaatggcgaaaggtgtgagggatatgaaacagagacacatcgcgtcttttctcacaacattagagaaaggagtgagcaagaagcttcaagagaaagatcacgagatcaatgatatgaacaagaagaataaagagcttgtggagcggataaagcaagtggcaatggaagctcagaattggcactacagagcaaagtacaatgagtctgtggttaatgtcttaaaggcaaatctccaacaagcaatgtcacacaacaacagtgtgatagctgctgcagatcaaggcaaagaaggttttggagacagcgaaatagatgatgcagcttcatcatacatcgatccaagcaacaataacaacaacaacatggggattcatcagaggatgagatgcaaaatgtgcaacgtcaaggaagtatcggtgttgatagtgccatgtcggcacttgagtttgtgtaaagaatgtgatgtattcactaagatttgtcctgtatgcaagtctttgaaaagttcctgcgtccaagtcttcttttcttgatttgtgacccaatggaacacaaggaaaaagagaatccattatataagtc

SEQ ID NO: 156651 - DNA, 381 bp, Arabidopsis thaliana landsberg
cagacaaagagagatttgtaatatcaaatcatggggaagagaagaggtgtctccgccgtgaacgtggttttcgggtggctgcgacaacaatcgaacaaggttaaaatagctttaggaattatcatctctttgatcctcgtcgttcttgtgaaattcaccgttaggaatcacaatcactttttaatcgcctccgagctcatccacgccgccggaatcttgatcctcatctacaaactcactcgccaaaagacttgctccggtaacaataataatcccaccaccttatcataattcataagattttgactttaaatcatagacctttgtttcttggtaatgtgattagaagtgaaaacatgtatatgtttatattgtgacaat

SEQ ID NO: 156652 - DNA, 4922 bp, Arabidopsis thaliana landsberg
tatgtaatggatgttgactttgatgagaatgcgaaccaattgggttttgtgagggttcaattggcttggaactttgatgatccgctttgtttttagcggaactttcagtttcaggcaaacgaaaacaccatcatcaaattcagattcgagagactcagaaacttctgtaccaaatgtggctttctcaagcatgatgtgaaagagtgtgctttgtccttcgaagacgacattcctgcggatggtgatgcagggaatggagatgacaaccccgattatgaacatgaagagcagtacatgtctagtgacgattactgcctagcattgacccagccattctgattccaggacttcaggcacatcctgccacaggggtgaaacatgaaccttcataatctaagccatcagatttggcgtgtgtctttgaagacacagagttaactgctgaaagactcaagtatctccatgctaagcacttgcgtgaatcattgatggaacaaagagaccaggtttgttggaagcagtttcggacaatgcgataaatgaatacgcttttgtgaaaagaaagagagtcagttttgaagctcttttcaatcagggagaagcagtagaggaatcagcggttctaggacacattcgcaagaaagacaggaaatttggatttgctacatctggtacatctccaatctcaatggacggaggcgctgggggcccggtacccccagagcccccatgaggatcggctcctcgaactgtcagggcctcggtgcaccgctgactcaatcgcgtcttactagtctatgtaaattatgtaagtttgacattatattcctcattgaaactctaaacaagtgtgatgttgtttgtaatttagcttatgtattaggatttcccaatgtaataactcaaccccctaaaggtcatagtggtggtttggccttgttgtggaaggataatgtgcgtttatccaatgtattctaggatgaacgccatatcgatgtacatatctctactaataatatcaatttctacttgtctggtgtgtatggccatccatgtcaaagtgaaagacaccatctctggaaacactgtgaaaatctgtcacttacacgcaatgattcttggattttgattggagatttcaatgagatattatcaaactctgaaaagagagaggaccaccccatgatgatcagactttcattgatttttggagtatggttgctacttgtgaccttgaagatatacaatcaaccggtgataggtttagttgggttggagaacgacatcgtcatactatgaaggagcgactaactttccatttcctgaactggagtttctcggttacacaggtttagaccataaacccttacttctgacattagaaaaaacagaaaccccaaaacaaagacctttcagattcgataagagattacttgacataccaaacttcaagaaccatgtcaaaaacggatggaacaaggagatcgtaggccagagggaacaaatcatggaccaagtgcggacttgcagacaagaaatggcatatctgaaacacaaatctaatatgaactctcgctctaggataaagcagttacaagcagctttgaacaaagccatatccagcatggtacgctcggagaggcaactcattcccagtattcagaggtccctgaccagagcatacaacgatgaggagaactattggtaacaaaagagttgaagcaagtgaatgaaagaaggtgaccgaaacacggctttttttttacgcttgtaccaaaacgagatttgcggtgaaaagattaacaaccataaaagatgatgcagggatgatttataagggtgataaagcaattgggcgacacgcacaacacttcttcacaacagtgtatgagagtaacaaacgccctgtttcaacgattgattttgttggtttcaagccaacggtgaccaaagagataaatcatgagcttactaaggaattcagtgacactgagatctacaatgcagtgagtttaataggtgatggcaatgctccagggccagatagactaactgctaaattctacaaataatgttgggacatagtcggacgtgatatagttaaagaggtcacgaacttttgataataggtttttaatcaattatcctaaaacaccaatcatgtcgttgtagtattttaggttgtcaatccaaatgggtgtgatgctaacaatcaagttgtgatcagaagtcgctaaatcaagccaagcaataccagattttggtgtgttctagcagtcataagtgagcatgcagaaaacagaaaatcaagtagaaacaagaaaacactcgaccaacacagctcgatgcagctcaacacagggtgtggtcgagtgacaggtcgagtaacagacataaaatgtaacagggatactcgactccacagtttgttgccagacaactgggtggtcgagtatcaggtcgagtaacagcaaagaattgcagggactaagcaacagatgacaagatgcagtaaacaacggtaaagtaaataataaaatcaatcagataaagaattcccgaggatggggtaattgagtagtttcgtttcctcagtttacaggtgattgacatgctcaataaactatccctacacaacaagttcattaaccaaatctaagtgccaccgcaatagagaccctcaagttaacctagtctcagactcaatcaccattgacgagagctaacctaacaggcattacgaatcaacaagttaaagccaaaacgctccctgcaaccaataccttggtacagggtcacgaatctctggaattagtggttcagacatttcatcgaacaccttttgggcgcggaaatgtctgggctcaaattccagttgatcagaaagcaataggcattaagaacaactaatccagaagggatctatcaaccaatactcaatcacctagcatactgagaattttacactactctaacccatcctcagaaatctattcactactcagacatcataacagaaagcataaacgttgaacaaattgaaaacatgataacaacaatgtaacagcaggatgataacagaatgaacaacagtaaacgaactcaagaacagaaactgaatactgaatactgaatagataaagagaaatccgtattacaaaaagtctagaacagaaggtctgcggaaataaaactagataaaaacttcttgtctgcgaaaatgagaagtacatgctacttatagccaaatataccgaaaccctaatactcaaaacgacgaagtattgggacgggttaagaactgtactcgacccacgtggtcgagtgagaggtcgagtgaatagctggagtcttcttttcttccttgtgctcgagtgtctggttgagtgcggaatgaagatggctctgaagcttgtcatcgagtatgcagtcgagtggtggtgatggtgatactcgacatccagatagagtgatcaggtcgagtagaggtatggcaatgggatgaagtcactcggcttgggggtcgagtgatgtgatcgagtggtgtcagaagacactcgacttccaggttgagtggtttgatcgagtgatggtcaggtgatggagatgaggacactcgaccacggggtcgagtggtgaggtgaagtggtgatttcttctactcgacctgggggtcgagtggtctcttgagatcttgaagctcctactcgacctcggggtcgagtggtttgatatgatcaggtccgcttcttccagatagctcgtcaacagctacaaatcacctgaaatcaacacaaatatgcaacatgcatgcaaacctatcctaaacatgtaaagtgatgataaatgatgagaaatggtataaaacagtgatgatatgatgctaaaatggtgacaaatggatgctcaaaccttgcaaaatacacacttatcagtatctcatctacgttgaccttattcccaccagcatcatttagcgtttatcggagttcttatctgccgcctcagatccgccgcaccatcaccatcctctgccacactgttgccttgttagggttcctcttaatgggccactgttcttcgagcccattaaccaaatttaggcccatccccaaaacaattgcccatctccactaatggattggcccacccctccaaacggtctccgcaaaatcataggtttgacccaaactcctttttgtcttctcttagcttgtatttgcgtcgattcatgataccaattgctaatggacatcacttgaatcataatcgaacattgctgctatgttggtacaaaaatctcttgagaaccttgtctttagaatcacataggtgtcttattcatgttgctaaatgtttgaagatgatcgacattatgatcccgtctctaaggagcgatgattaccgaagcttctttaagtgttcatctccgattcatttgcttattgacttcatccttgagataattagctacatcttgggcactactcttgaaagtaaaagcttgatgaagaatggcattatgatcccgtctccaaggaacggtggttaccaaatcttctctaatcatttttacccgttaatcctaaacctagagccccaaaccaaacccgaaaaaacctttacctcccatgagtctccaccattggtccttacgtccttattgcgcttcgtgccggcaagccatgtggcaaaggacaccttttcaaagtcaaaagatcaagttttcttgatcgtgactacaccaaagctccatgacttggtcgcgaaagtgtctatgatacatcatgaggtcgcatgtggcttgttgtttgattgcttctgtctctgttcctcaatggattataaaagctatcgaccttttcttgttgttaattctagttctctgaagttgttgtaacttttttatactcgaaaatttt

SEQ ID NO: 156653 - DNA, 1858 bp, Arabidopsis thaliana landsberg
  unsure (1)..(1858): unsure at all n locations
tactgttggggtttaggatttgaagtttttatggagtatgagaacgagaaatggaaaagaatatgttaatttaaacgaagatgatatttttatatcctttttttgttattctaatgtttcggtttatggaagattggtagggagagagtaagggaaagagacgaggatgtggagaacccaaagctgatggagtgtaaggttaaatgtccttcctttcctctgtattggcttagcaagattacattattttctttccgtgtagcccttatgtttatattcctcacagttcgttcaaacatctaacacttgtatgctagtcgggtcatgttattctctgccagacagtgaacaatgaagttttctggtgtggttgttcttttatacatggcaaattatttgatgatttataggtgcttggtttgtaaaggtggatgattagtagtcgccttttcatgtctgaagattgctgttatcttgaattgaatttatttatcacggcttacgatatagacatatcagtctctaattttcaatgggaagtgcactatttaacctcttcttttttgtgttgtatgtgtttgttctctcctgttattcctctttttcttttgaaagtctgtctactgatatcctacatatgccccctaattccgaggtttgcagtactactttaggactggagggtgcaaatatggagagtcttgtagattcagccacatgaaagaacataattctccggcctcagtaccagagcttaacttccttggccttcctatcagaccggtattccattaattggtttagacagttctagcattctgtttacaacagccttatggaaaagctataatagtataagctattgacagggagagaaagaatgcccgttctacatgcgcaatggctcctgcaagtttggagcagactgcaaatttaatcatcctgatcctacagctatcggaggagttgattctcccttgtaccgtggtaataacggtggatccttttccccaaaggccccatcccaagcaagttcaacttcttggtcttcaacgagacatatgaatggtactggtactgctccttttattccatccatgttcccctatagtcgtggagttacacctcaagcttcagactggaatgggtatcaggtactaattttgttccattttttcttttatgctgataaaactatagtactttacttttgaagtttctcatttttattggtgtaggcgtcttctgcctatccaccagaaaggagtccacttgctccttcctcataccaggtgaacaattcattggctgaaactagttcattctcacaataccaacaccagatgtctgttgaggaattcccagaacgcccggatcaaccagagtgcacttattatcttaaaactggggactgtaagttcaaatataaatgcaaataccatcatccgaaaaatagattgccgaagcaagctgcattctctttcaatgacaagggcttgcccctaagacctgtgangtttttttcccatgctgttcttttgtgctagcattaggaagccactgagaaatttcgtttgtagtgctacagaacttgatatttctggtgaatttgattcaggacaaaaattatgatcaatcacacacttctccgattcacacttaaaactcattttcctttattttgttatactttcaggatcagagcatgtgcacacactacagccgatatggcatctgcaaatttggtccagcttgtagatttgatcattccataccgcccacattctcgcccagcagctcccaaaccgtagaagctcgtcaagttggcgctaacggaaatgaagatgacagctggcat

SEQ ID NO: 156654 - DNA, 994 bp, Arabidopsis thaliana landsberg
aggttttttgagagctgtgagtgagctacgagttgcttggattttaactggagtatcacttttggtatttcgttggttgacttccaaggagtgaggaagaggtgtagagctttggtctctgaagtcaacacttttgtcggcggattaattgagaaacacaagatgaagaaggtaataatctcaatggagaggaaaatgacttcgttgatgtcttgcttggcttgcaaaaggatgaaaagttgtctgattctgacatgattgctgttctttgggtaagctacttttactattttcttgtgatgagaggattttgaatatgattttttttaatatttggtaactaaagttgtattcttttgatttttctttttctttttaggaaatgatatttagagggacagatacagttgcgattctagtggaatgggtgcttgcaagaatggttttgcatcaagacatccaagataaactctacagagagatagcttctgctacaagtaacaatattagatccttgtctgattccgacatcccaaaactgccgtaccttcaagctattgtcaaagaaaccctaaggctccacccccctggtccacttctctcttgggctcgtctcgctatccatgacgtccacgtaggtcctaaccttgtccctgctggaaccatagctatggtcaacatgtggtccatcacacacaacgctaaaatctggaccgaccctgaagcgtttatgcctgaaaggttcattagtgaggatgtgagcatcatgggctcggatcttagattggctccattcggatccggtcgtcgggtttgtcccggtaaagcaatgggtctagctactgttcatctctggattggtcaactaattcagaattttgaatgggtgaagggttcttgtgatgttgagctcgctgaggttctgaagctgtctatggagatgaagaatccgttgaagtgcaaggctgttccaaggaatgttggtttcgcttga

SEQ ID NO: 156655 - DNA, 3028 bp, Arabidopsis thaliana landsberg
  unsure (1)..(3028): unsure at all n locations
gtctacgcacgtggtagctccgtccgggatctgcggagatcctcctggatattcggcaggtcagtttcgagatatcaggtctgctccgcgaatatctcctcgtcaattcctaggtcattgttcgcttctctccctgcatcaggtgactgggcttatctagcccaaatacctattcgcgtatgtgggctcgtcagctgcgtaggtcctctacttagtgggcttttgtgggctgacttggtattttcgcaggtggattcctggaggggaatcgagctccaacatttgccccccagcccattgaatgagtaggcgaactcgatgagcggacatataggtcgggtaagattgcgaaaatattcttgatgagaagatcaatgtgacaagatcagtcggttttaaggataaactcaacaatttagatttaatttcagattccccccaaccgaaagatttcgaggagatacgcgagatgagtcgctacagatttggacggctgagatggagcgtctcttcagcgcacggcatctgacggtccaaatcggacgcggagaagagatctctataatctcgaaaattatggtgatgatggctttaaataacttcccacctctccacttgacgcagtgtcaactcacacaactctcaaggtaacttctctcctcctttattatttactgcgctttggtttgtagaagtagaaaaatcacgtttttgttttttttgctatctccttcgtttctctgttattccctctttctcgatctgccttcattgctcttttctttcatctctctcgtccttctccgtcgaaacccaaagatgagcgacttcgaagattctcagaacaagagcaaccacagttacggcgatgattcgagttcatccgagacaagagtacgcggtcaccgccgcgagtacagagacacgccataaccctaggcggaatgggtccaattcgtccgccgtcaaccagagctgacaagccaaagaagaaaaaggctgccaagcaaggggaggcacgccgatgacgaacgacgacctggtcgacctccggaggagatgccaggttccggcggaggtacatatgatcctcccaaggccaccgctgcatcctgagaacgtgccggtcgggtggtgctgcgcttatgccaatttcttcgagaaatgcggcctatttttcccaattccggcgtgaattctcgagatgctctactgtctcagcctcgccttttccgagatgtgtccgaacttcgtccgccatgtgttggcgttattcacccgggctcgggaagtacacagagaattcagctgtcatgnnnnnnnnnnnnnnnnnnnnnnnaagaccaatgctaggagtgaccaaggcacgtactacatcagtgcacgtcccggatctctggtcctcggcggtttgaaggcttgtcgagacaccaattggcgatccaagtacttcttcgtcagagtagatcgtcattcaatcggcagctttgatcctgcgaggataacgaggacctggtctaccaacctgggtcagatagagacctgagcctcttgagtttttttttttgttgtttgtgtcgaatccttgattgcttttgctgaaagttagtactgaaactaatgttttttttttatggtttgcagcaaggaccaaggaagttactctcttagagacggaactcgagctgttaacccttctccgatgtgatcagactaactgggccacttttagcagagatcgcatcataactgctcttgccgtagttccagcagttcccgtagctctagcagttcatgtaatcgtccttcctgcagcacagctagatccgatcgaagaggtcccgcggattgaaccgagccccgaggctaatcttactataagcacaagttccgtaatatattatttgggtgctagaaatgtacgagtaattgagacaactgagcaactcgaatggctaactaacaaatgtcatgctctatttgatcaggtcctcctgattccagcttcacttcagaactcccgctcatcagaagaatgaggcgcacatgcctaggagtgcaacgagccaacgccggggctgctgctcggactggtgatctgtctgccgcggagaccacggctcgaaacactctagctgtatccagcgcatgtgcctcagcatctcatccctcgcttcctgagggcaacatcgggaccttagctgcagcaggtcaaccgggtaacaatcaggtcgctcaggtatatgagtcatctgcagttgttcgttctgacggcgcaccgtcctctcagaagagagcttggacccagccggaggtgaatccagcggctgagttggtcgtgagcgaccagagggtcgcctctcctagagaagagaggatggaacctacggctgctactccggaggcagctgcgtctgcggataggcgatcctcgggcaggtcccatggcggaggacgaggctccagaggtgggggcaagtcttcaaaccggtctcaagaagtgaggcagacgtccaactccggcggaggatctgcgggaagcaggcctttccactggtcttacactcatgaccgtgatcacccgatcgttgaggacgaggctgggttggcgaacccgcttccccacatcaaggggaggaactgcctaattcccggattgaagaacatggccgaggcggcggcttatgctgacatgatggcgaaggagggccaggtaataatcgataactgcctccttccaattctattcttatgttaattctaacttttgttttgcctatggcaggcgatagctgccacaaacaagctggtcgctctctatgagcaacgtttgagcaaggttccttcggcgagcgagctctaagaagggaagaccctcatccaggagctgacagcgagtgtgacttgtttgtatatgttttagcgatgatatgatgattctgacctgcctatgctttcaggcggagatcgagaggttgaaaataaaagctgtccacatcgaaagatctcgagaaaggttatgctgaaa

SEQ ID NO: 156656 - DNA, 3820 bp, Arabidopsis thaliana landsberg
gtggttcctgtgtattatggcactagttcatcagatgtggtggtgcaggagcacaagtcagtggatcggataagagaatggagtagcgcactccaagaactgagagaattaccaggccactacaataggtaactgtggattgattaatatgtcgcttgcactttgagaagattaaaattctctacttcaaaatgttttccacttatcaaatctaacaccacaaagaaaaattatacaaatcaaaggttttatatggaacttataatgttattatgatagattgacaaaatgtgaggcagtttatccaaaacattttttgttcttcagtattcattaatgttttcagcaataattcactctgtgatttttaaatcaatgcaaacagggaggaatgcagtgagcgggaacttgtggaagagattgtcaaagatgtgcatgagaaactctttcccacggaacaaatcggaatcaactcgaggctgctggagatggaacatttgctttgcaagcaaccatggggtatccgtcgcataggaatttggggtatgcctggcataggcaaaacgacacttgctaaagcattttttgaccaaatctctggtggctatgaagcttcttgtttcatcaaacactttgacaaggcttttcgtgggaaggggcttcaccgtttgttggaggaacattttgggaaaattctgaaggaattgcctcgtgtatgcagtagcattacgagacctagcctccccagggacaaattaagcaagaagagaactcttgttgttcttgatgatgtgcacaatcctttggttgccgagtcttttctcgaagggtttcaatggttcggcccgggaagcctaattatcataacgtccagagataaacaagtgttccgcctttgtcagatcaatcatgtgtatgaggttcagagcttcaatgagaatgaggctctgcagctgttctctcagtgtgcttttggaatagatataagaaaccaacatctgctggaactatcactggaagtgattgactacgctagtggaaatccattagctctcagcttttacgtcggagagcttaagggaaaggaactgtcagaaatgtttacattcttcaaactcaaactacgtactccatataagatttttgatttgttcaagagcagctacgacacactagatgacatcgagaagaacatttttctgaacattgcttgtttcttcagtgaagaaaatgttgactatgtgatgcgactacttgaggggtgtggtttttttccacatgttgggattgatgttcttgtggagaactgtctggtgactatttcagaaaacagagtgaaaatgcatagaataatccaagactttggccgagaaataattgatggagaaacagtacagattgagaggcgtcgcagactgtcggatccttggagcatcaaattccttcttgaagatgacgaactcgaagcaaatgaagatcccaaagcaacatatactcgtactctggtctggcatattctatcatttttatacaaaacttaattacttttggagatgagccaacttcttgatctatctccttcccttatatttcagggcactgaagacatcgaaggcatacttctggacacatcgaacttaacatttgatgtgaaccctggtgcctttgagaatatgctaagccttagattcctgaagatttattgttccagttatgaaaaccattatagcctccgccttccaaaaggacttgagtttctgcctgatgagctaaggctcctccactgggagaactatcctttgcaatccttgccacaagactttgatccatgccaccttgttgaactcaatctctctcacagccagcttcagaaactttgggcaggaaccaaggtaagcaaactcctatccgctgtcttatagctttttcaaatttttgttatttcttctccaatatgattttctgttcagagcctcgagatgctgaagatggtcaagctttgtcattcccaacagctcactgcgattgacgatattttaaaagctcaaaatatcgagctaattgatctccaaggctgtacaaaattgcagagttttccagccacgggtcaattacaacatctccgagttgtaaatctctcaggttgtagagagatcaaaagtttcccagaagtttcaccaaatattgaggaactacatctccagggaactggcataagagaattaccaatatccattgtgtccctcttcgaacaagctaagttgaatcgagagcttttcaatctcctaccagaattctcaggtgtttcaaatgcttggaacaatgagcaatcaacaagcctggccaaattagtcacgtctactcaaaatcttggcaaacttgtttgcctgaatatgaaagattgtgttcatttgcgaaaactgccttcaatgtttgatttcgaatctcttaaagttcttaatctgtctggatgctcagagctcgacgatattgagggtttcccgccaaatgtgaaagagttatatcttgttagcactgccttaaaagaacttccacagcttccccaaagtctagaagtcttgaatgcacatggttgtgtgtctcttttatcaattccttccaatttcaagcggcttcctaggttttacaccttcagtaattgctttgctctttctgcaagcgtggtcaatgaatttgtaaataacgccctgactaatgtagcacacatcgcgagagagaaacaggtacccctctctctttctctctctctctctgacacaggttgttgtatctgatttattttcgcttgcggcaacaggaactcaacaaatctttggctttcagctttactgtgccttcacctgaaagtaaaaatatcacatttgatctgcaaccagggtcttctgtgatcatacaactgggttcttcatggagactcattcacggttttgctattttagtcgaagttgcatttttggaggaatgccaggctggtgcttttggcgttagttgtgtttgcagatggaaagacacggaatgtgtatctcataggctggaaaaaaacttccattgttggattccaggggaaggtgttcccaaggatcacatgtttgtcttctgtgatctcgatatgcatctgactgcctgtgaaggaaatgactccagtatattggctgatcttgtcgtatttgaattctttactgtgaacaagcaaaaaaagcttctagatgggagttgtgcagtgacgagatgtggagtccatgtttttactgctgcaaatgaagatacgagttctagcatgactaaaccattttcgtcctcggattacctgcaggagatttttgataatgaagttgaggaattgagggttatctatgatggcttagacgagaatgatagaaatttattactttacatggcatatctgaatggcgaggaagctgatttcctggcaccccttatagctagcaatggcttggggattagttctaggctcaatgtcttagccaataagtctctcataaatatatctccgtatggtatcatagtacggcaaggtttacttaagaaaataggtagggagatagtctatagacaatccactctgcctggtagctcaacagtgttagacagagactttgttgaggctgctgcggttaaagagcctaaagttacaacggttaaagtcccgagagttacaaaggtggaagaagcgtatgaagctaatgctaaagctggtgactttagcagccgtaaaaatcatcggatgaagctgaccctcaataggtataagatggtgaagaaaataaacgatgggtga

SEQ ID NO: 156657 - DNA, 7806 bp, Arabidopsis thaliana landsberg
agcttgtcaagcataaacgaaaaggatcagaaaatagataaacagggaaacgtgagatcaaaaatcgttgagggtgtcgatcgacaccaacgaaaaatcagtgcagatagtcgttggatgactcttgctgactacaacagactagatctcttctattccaatcagtctgcaatccgaccacctacatttgaaagaagcgatttcgagataaaacctgcattctttacgcttgtgagtatgcaccctttccatggtctagcacaagaacacccgatggatcatattgagcgacgtgaagactcggtttcgagtattaaggtagattgtgtttcttatgactacctttcttacaagctctccccatattatcttgctgggaaagcagcttcttggcttaagcagttgaagcctcgatcattgacaacttgaaaagaaataaaagttgcttttgtgaacaacttttataatgatgcaaggtccaaggagaccttctcttaagaagcagctgaagcatttaaagccgcttggattaggttcatagaatataagagagattgcccgcatcatggtttcagtgaggtgcaactgttaggtatcttcttcagaggagttgattggtgttatcagatggttctagactcatcgagcaatggtaacttcaacaccacgtatcatgcagatgctaccactttgacagagaatcttgcatgtaacaatagtacgtagaatgcagacttcaagatgaagaagatagcaggagttgttccaagaaaccagatggttgaggtaaatgctaagcttgatccagaacatagcctacttatagggaagaagcaagttcactttgttgtagaagcagagactatcgcatcactgtttcaacaaggtgcaactcctaggtacctgatatgatttcacaaacttcctatcttaaactcacatataataatatgagactatgtcaatcgacacccttatttcggctgaggaaatttccgctttctgccaagtctttgagaagtcgtgaagtttcccttatttgcaaaatagtccctggacatttctattgacttatacctaattatttggtcattggtgatacctaagttttgttaagttttgttttattattgagagacacttgtggagagaagaatccaatccctacagagaggattctgaactccttttactctatttctaattcatcaatgcaaactattgagattatgatttgtgtttttgttatcatgtctgagtaataaccttgttgggtttagggagtctcaatagggatttagatggattagtatatcgaaaaccccttagggtcatttttagggttcttcatcttgattattcttactgctagttttagattgatcacctagaacttgatattagataataggtatgcccaccatagctacttgttatttgaacaatcattgatgagcctaggcatttaagaaagaacaggtatgctcatagaagggctttggtttagatactaggtgaactaatcaaacttgataataatgcatgctttagtataggatttctcggcttctacgattatcttagctctaagtatagagagtttcgcggtacaccaccggtcactctaaaattatagtttgagtttgagaacggtgcgataacaatcctaatattagctagatctacaatttatctatctcccgagacaattccttagacccgacgctttaatcacttgaatctacacctcgtttacttgcttatttgtcttttacatccaattgttttctttagcttattaaataacatgataagtctattgtgtgaacatcgagagctcagtggaatttgacccttaagtgctaacgacgatctcttatttgagggagtaagcttaaggcaatttgagctatatcaaggagctcccgatgaatcaccattagatcatttggaagtcttcaaagacatagtgtcctctatcaaagcagaaggtgtaccagctgattaccttctttgcaaactcttcccccactctctcgcgagcagagaaacatcatggttgcgtcaactggaaccaggttccctaaccaatcggactgatacaaagaatgcattcatgaatcatttcttcgatgagtcctgttacagaggcaattcgtttgcaaatttcttcgttcacacaagctccagtagagtcccttagagcatcttggctccgattcaggtcttatcagcgtgaatgtccacaacatggcttacaagagatccaactcatcaacatattctacaaaggaatagacaagcaataccagaatcaacttgatgcagcaagctcctgtaacttcatgacaagaaccactagtgaagcattacttgtcatcaccaatgcattaacttgtctttcgacgcagggatttgacaaagaacaaagaatttcagctgagatagctaccgcgagcaaagagactcctatttcagcaatttctgctccaatccaagcccccccccctacaaaaatcacaatcaaatacattatcagtttgagaatcacgtttccatggcagactttcacctgcaaaaaccagacggctacaataggcgattttaaaagaactgatctcttctacacaaaccgatcagcattcaagctcctccttttgaaagagatgactttgctatacaccctgcctattatgatcttgtatctagaggaaagtttagaggagctcctgataaatcactattagatcatttggaagtcttcgaagacatcgtttcctctattaaagaagaaggtgtaccagctgattaccttctttgcaaactcttcccccactctctcgcgagaagaagaacatcatggttgcgcaactggaaccaggttgttaaccaattggactgatacgaagaatgcattcatgaatcacttcttcgatgaatccgtgacaggggcaattcgtttgcaaatttcttcgttctcccaagctccagtagagtcccttagagcatcttggctccgattcaggtcttatcagcgtgaatgtccccaacatggcttccaagagatccaactcatcaacatattctacaaaggaatagacaagcaataccagaatcaacttgatgcagcaagctcctgtaacttcatgacaagaaccactagtgaagctttacttgtcatcaccaatgcattaacttgtctttcgacgcagggatttgacaaagaacaaagaatttcagctgagatagctaccgcgagcaaagagactcctatttcagcaatttctgctccaatccaagcccccccccctacaaaaatcacaatcaaatacattatcagtttgagaatcacgtttccatggcagactttcacctgcaaaaaccagacggctacaataggcgattttaaaagaactgatctcttctacacaaaccgatcagcattcaagctcctccttttgaaagagatgactttgctatacaccctgcctattatgatcttgtatctagaggaaagtttagaggagctcctgataaatcactattagatcatttggaagtcttcgaagacatcgtacctctattaaagaagaaggtgtaccagctgattaccttctttgcaaactcttcccctactctctcgcgagaagaggaacatcatggttgcgtcaactggaaccaggttccttaaccaattggactgatacgaagaatgcattcatgaatcacttcttcgatgattccgtgacaggggcaattcgtttgcaaatttcttcgttctcccaagctccagtagagtccctgagagcatcttggctccgattcaggtcttatcagcgtgaatgtccccaacatggcttccaagagatccaactcatcaacatattctacaaaggaatagacaagcaataccagaatcaacttgatgcagcaagctcctgtaacttcatgacaagaaccattagtgaagctttacttctcatcaccaatgcattaacttgtctttcaacgcagggatttgacaaagaacaaagaatttcagctgagatagctaccgcgagcaaagagactcctatttcagcaatttctgctccaatccaagccccccccccctccacccaaatcagaaaccagaatggagtctatgtttacgcagcttcttgcaggcctcacaaaaaaccagaatggagtctatgcttgcgcagcttcttgcaggcctaaccaagcttgatagcaaatatgattctctctccacagatctccataccaaatatgattctctctccacagatctccataccaaatatgacaatctacgctctcatatctccgagctatcacctccattagcctctatcaatgcagtcacactacgcagcggaaagcaactcaatccaatacttcagcgcgaaagttcagctcggacttcatctattccagttgtaggaaatgtctcagtgttaatcgatacatcagggtgtcgatcgacaccaattaatcttgacgactctgttttgactttgtcgagtggaatcgataatttcgtagaggaggcactaattctcgatggtatcgaacgacacccacctcatgtcgatcacaccaacaccaaacagacaggccagtgttgacatttgacagagcatgattgattccagacagtggtgtcgttcgacactcacctagtgtcgatcgacaatggactcagacaccacctatatgccttgcatctccacctgtcactagacaagtctacacaccacaagttccttgtctactgccttgagtgtctaaggatgagattcctgagatgcattgcatgggtatcatggatgagactctacttcagttgcctccggttgatatagataagttatcaccccctctttagagtgatatgctacgagatgatgctccagagaattaagatgacaagacaaagataatggttgtctcagaacaggtactcaacaacaccaagcgtccacatgaagcaagctccagattcgttgttgagaatcgatctgtagagatggctgagccggagttctttgttagagctagttttcgggttgagtttagtgatgatactccaggcactacagccacgtctcccaccgcacctctaccctttgctccacctctgaaacggcaaagctactcacctccccctcctaagcctcctgatttcatcaataagactttaaaatctccaaacacagttttacggttaagcaagccacaagtttctcgtcgagcgcttgttctttcttttgatgattgtgcaggaaagcggagtataccagccatacctttgtcctgccctactgacattcctcacttccttggtagaccgcacacaccgactgcttatacgccaccttggatgatgtgaggatctactaggaagtatttacttcctccatctgatccacctcatccccaaactccaccaaattcaaggtattgactctaaacaagcgcttagtgggaggcaacccactggtatggttttctttttctttttcttttatttttcgtttttcttttatttttcttgcttactctggatttgaatgctactgggaacaatgtcgtttaagtctaggggaggcgcttacgaactacgttttttctttttctttttgagtcttattcttattcttatttttctttttgagtcgttttattgagtcaaaattttgttaggaattatgatctctattctttagattattgcctgggtgattaatgttgcatgttcgactcaatccgacgattggaaaatctagatggcaaaccaacagacttgaggatatcctagttttccaacacaaccactaaggccgaagctaatctcactgctcttccttttacctcttcaaacggttaacattcatagatattgactgctagttcataactgatattgagaccaatatgataataagaatatgttcctctccccttataaaatataatgagagattgaaaagaatttcagatagtgtataggggtaggaatgtttccaatgaccccattattatacattatttagaatgatcaattacaaaggttggaaaaaataccgatggtgtcaatccagtatccgagttcccctttgtttactctcgaaaaaaaataagtctgtaggagagaaagaacaccaaagaaaaagaaaaaaatatataaagaaaggtcgatttatcaaggtatattacaggaatgagtctagaaggatcttgaatgttagcttgtttgatgagacccaacgatgaaagcctcgtggatatagttgtggaacttaggtatggaatctagaaagttgtgtaagcttgtagagaagtagatgttggttaggatttgattagacttgttaggcatgtggatttagtttggatgatcatggcaaaaggctacagagtgtgggagttcctttgttttcaaaacctcttccacgggttcggcttttgtgttttgcttgagggcaagcaaaagctaagtctgggggagttgatataacccaatttttaccgattttatctatgttttaggtataggattttgagtctttatgttatttctcgagtctttttagtgtcttttcaggtattctatgcaatgggacaacaatggagataaggagacattttggagcaaaatctaaggagaaggaagctaaggacgattttggttcaggaatcagtcgacgagtgtcgatcgacacacttttggtgtcgatcgacaccagtttcggcccagcagaagtccatgatgctttcaagtttacagaaaaggaaatttgccctagaagacttccctatttgctttattagtccctggatgttttatagggttcttatatagttgtttagacctaagtttcttttatgaagttctttgcaaatccctattttcagagacataagctattcatcccttgttctcgagagattcattcagttttcaatacagtgaagacatcccttcttactctaatcttatttgatgtgtttatgcttttttactcaattatgttgcttgtttcattcaatatgtctgagtagtcctcttgttgggtttagggattctcattaggaattcatatggtttagtagatcgaaaaccctgttaggataatatatttagaattcttcatctttgattgttcttaatgctagatctagagtaattaactagatcttgaatctagacaatagatatgcccaccataggtatctgtagttggatctattatttgactagcctagtttataggtgtgtaataagaatcagcctatctactaaggtaaagaattgaactcggttagaatgcatgtttaagttaaagttcttagctataggcatagagagtttcacggaacgccaccggttattccataattagagtttgagtttaagaatggttctataacaacctagctataattagatctactaaccaatagtttcctgagaataccctactcttagctctttattttaatcgttttacatcaaatcaatctgctgttttcttattttgtttacttttaatttcactcattccctgcaagcttaatcttgacattcaattcattgtgtgaacaaaaaaaatttgaggaaatttgacccttaaatactgcaaccgatctcttacttgagagagtaggaaggcaatttgaaccatatcataattgttaaaatcaagttcgttatttttacaaagataaagacattgtgcttttatgtctttgtatttcaggtacccaacacaactttatagactcatctctggtaggtct

SEQ ID NO: 156658 - DNA, 2316 bp, Arabidopsis thaliana landsberg
ccgaaaaatattagaaacgatcaagtgtaattgaagaatgtagctcaaaaaccacattggtttcacggaccaagtcttttagatcaatgttcaaacgataaacggttgtttttttcctatgcggacaatttccctaacttataagatatcataatctcgttgttaatgccatatatcctattacattaactggacaggattggtctttgattcgattattcaaaaaagatggctcgattgactttatcattggaatcttattaatttcctcggtcaacttcgacacttttcaacccaactagacttgtgctcacaaacatggcaacatcaacttcaatgtttctgacttgttcaaccatgaacatacctttactaaaacctctcttaatctccaattacctttgactaataatcacaaaaaccatggatcacgatctcgacaaattccctttactctcttacgtccttcatcaacatgactccaatctccacgcgccgccgtctatggccgcgcaagaaactctccttccttcttttcctcttctctccaatccagaaatcatgtctatgttgactcaatccatccccacaacgatcacacagacgctattcgtcttcaactctctcggctctcgacctgatcccttagcggtttcctctgctcgattcaagatcgctcaaattatggattcgctctcgccggaggaagcagcgaaggagtcggagatttatgccggggttgtgcggttggatgaagtgcacgatagttacgagaagaagttgaaggatacagaggaggagctttctagggtttattctacggaggtggaatcgatgttgagaagcggtgaagaagtgaacgagaaggttcttgcggtgctcaaggaggcggaatccggcggaaccgttgagaggattgatctctccagccaagaacttaagcttatccctgaagctttttggaaagtagttggcttagtatacttgaatctctctggcaatgacttgacggtaatactaagatcccaaaattttgaactatctctaatgatagctcgataatattaatctcgaacatagcttacagaatctcatgaattatatcgaaaaagacacttgactgatatagttttgttagaaacttggactacaagtaactgtatctgtttttgatgcttcttgtgatgcaaggaattatcattgttttttaaatgcttcatgtaatgtgtgaaactgattttgtaatttaaacattttacagtttataccggatgcaatctcgaaactcaagaagctagaagagctcgatgtatcttcaaattctttggaatctcttcctgactctataggaatgttgcttaaccttagaatccttaatgtgaatgcgaacaatctatccgcactccctgagagcgtcgcgcattgcaggttcatgttcttgtctattcttgtaaatgttctgtatattgtttctacttttgtcctgaggtttcaatgattttcataaattaggtcattagttgagttagatgcaagctacaacaacttgacttcattacctacaaacattggatacggattacaaaacctcgagagattatcgatccagctgaacaaactccgttactttccaggttcgataagtgaaatgtataatctaaagtatcttgacgcacacatgaacgagatccacgggataccaaactcgatcgggagactaacgaaacttgaggttctaaacctaagcagcaatttcaacaacttgatgggtgtccctgacactatcactgatctaactaacctgagggagcttgatctaagcaacaaccaaatccaagctataccagactcattttataggctgaggaagctagagaaactgaacttggaccagaacccgcttgagatcccatctcaagaagtggctactcaaggagctgaagttgttagagagtttatgaggaagagatggggtgatatcatggcagagcagcaacagaggattggcgttgaggctgagcgacatggagatgaaaacgggtgggtctattggggaacctccatggttactaatcttgtttctggagtgacccataccattggatttggaggagcaactagcgatggtggagataagaaaccgggagactcgtacttttatcaccaaatctgacttctgctaaattatcttgtaatctacacttttgtatacaaaaatgtgaacttatcactccttgtttaccattgcgttgcgtagattttgtaacataaaaatatgtttttttttcctctagacgttttctcacgaattaggac

SEQ ID NO: 156659 - DNA, 4151 bp, Arabidopsis thaliana landsberg
agatgtccgcagagcctttctcagccaccttctcaaggagttccggcgtaagggaatcggtactttcatagataatgatatcaagagaagccaaatgatcagttctgagcttgtacgagctatcagagaatctaggattgcggttgtagtgttgtcgcggacctatgcatcttcaaagtagtgtttgaatgagttggtggagataaagaaagtaagccagatgatcatgccggttttccctgaggtggatccatctgatgtgaggaaacgaacgggagaatttggaaaggcgtttgaggaagcatgtgaaagacaaccagatgaggaagtgaagcagaaatggagagaagctttggtctatatagctaatatagccggcgagtcttctcaaaactggttagttgttctgattccgttattagttattgatgtgcctctgctataagtttctttgatgatttggtgggagtaatcttttcttattgatagggacaatgaagcagatctgattgacaagattgctatgagcatttcatatgaattgaattctacattatcacgagattcctacaatctggttggaatcgacaatcatatgagagagctggattctttgttatgtctggaatcaactgaagtgaaaatggtggggatttggggtcctgcaggtattggcaagacaacaattgccagagctttattcaaccggctatctgaaaacttccaacacactatttttatggagaatgttaagggaagttctaggacctcggagctcgatgcctatggcttccagttgcgtttgcaagaacagtttctgtctgaagttattgatcataagcatatgaagatacatgatttaggtttggtaaaagaaagattgcaggatctgaaagttcttgttgttcttgatgatgttgataaactagaacaacttgatgccttagtgaaacaatctcagtggtttggttctggaagtaggatcattgtgaccacggaaaacaaacagctattgagagcgcatgggatcacttgcatatatgagttgggttttccatctagaagtgattctcttcagattttctgccaatatgcatttggagagagttctgcaccagatggttgtatcgagcttgttactgaaataacaaagcttgctggctatcttcccctagctctaaaggttttggggtcctctctgcgagggatgagcaaagatgagcaaaaatcagcattgcctcgactcagaaccagtcttaatgaggatattagaaatgttttacgagtcggttatgatggtatacatgacaaggataaggtcatattccttcatattgcttgtttattcaatggtgagaacgttgattatgtgaagcaaatacttgcaagttctggcttggatgtcacatttgggcttcaagtccttaccagtaggtctctcatacacatatcgagatgcaatcgtactattaggatgcacaatttgctagaacaattgggtcgagaaattgtttgcgaacaatctattgccgagcctggcaaacgtcaattcttgatggatgcttcagagatttatgatgtacttgctgataacactgtaagtcaaatgttttgctacgttactttcatttgtaagttcactacacttgcacataaacaatacttgcaattggtatttttgtgcttcagggtactggagctgttttgggcatatctttggacatatctaagatcaatgagtggtttctgaatgaaagagcttttggtgggatgcataatctgttgtttctaagattctacaagtcctcttcgagtaaagatcaacctgagcttcatttacctcgaggcttggattatttaccccgtaaacttaggctgctgcattgggatgcattccccatgacatcaatgcctttgagttttcgtccagagtttcttgttgtgataaacataagggagagccagcttgagaagctgtgggaaggaacacaagtaagttaattttaatagctcacctttctcaaattgcataagattattatctgattgtttttctttctttgtttcatgtgggttcttttagcctcttagaagtctaaagcagatggatttaagtaagtctgaaaatctaaaagagattcctgatctttcagaagccgtaaatattgaggaactctgtctcagttattgtggacgtttggtgatgttaccttcctctatcaagaaccttaacaaattggtcgttcttgacatgaagtattgctcaaagctagagattatcccctgcaatatggacttagagtcccttagcatcctcaatcttgatagatgttcacgattggagagttttccagaaatatcttcgaagattggatttctctctctgtcagaaactgcaatagaagaagttcccacaacagtcgcgtcttggccatgtctggcagcattggacatgtcaggctgcaagaacctcaagacgtttccatgtcttccaaaaactatagaatggttggatttgagcaggacaaagatcgaaaaagtccctttgtggatcgataaactctcaaagcgcaataaactattgatgaacagctgcatgaagctaacaagcatctcttctgggatctctacgctggaacagaccgaatcactagactttttggggtgcaagaatgttgtgagctttcctgtagagatattggagagctctcggttctgtcataatctggtgatggagatgagaaacattcaaaaccctgatcttcctcgaccattttatttcaagaacaactacattgacactattccagattgtatcacacgtcactgcaagctgccttttctgaattcatcaggctcaatctccagcaagatagagaatgatttcatctggttcgataaataaagatcagtgaagaattgcatgatactgatgagccacaaccagatgcagtttcatcatcaaaccctgctcattacaattgtaagtgacatcatctgactttacccctttggaccaaacttttaacgaaattctgaatttgatcatagcattagcattaaagtcaaagaatttacgaattatactatcaatgaatctgaatttgcttgaccaatcaaagtgattactgattagtcagctaaacttaaaaattaaatgcccagaaagatggtatgacgtgtcatcctatatacacaggtggaatacataaaattaaaacaaaaatgaattaaatcaaagaagcagaggaagaagaataactgatttacataacagtattttcttggcttctctgattctctctaaatttctctcccaattctcgaagtttctagggtttttgctttgagttctctacgtttctcgagaaatctccggctgaaaatggcggattcgacgacggaaacaaacgctgaaactctgactctgaggcgggagttgaagaaggtactgagggagaacttaaacgacggaggagtcaaagaacgcgttgagacagtgaaatcaattgatgaggcgattagaatcctgaatcgcctgaagatagtagaatcgaagaagcggaagcgggaatctgatagttcttcggttgaagttccgaaagagttcaagtgtacactctcgaagacgatcatgatcgatcctgtgatcatattttctgggcaggttcgatttcttgtgattctttctcgattttagttctcactatcttttaatttccatgcttgtgttttgatttcgatacttatgaatatgaaatgcccagtatcatgattcatatagataaagacacataaatgcgtatacacagagatatggtggttgtgctgattttgctctttacttgttgttttcagacgtatgaaaagagatatatcacagagtggctgaaccatgaccttacatgtcccacagccaaacaagtcctctatcgagtttgtttgacacccaaccatttgatcaatgagttgatcacgcgatggtgtcttgctaacaaatatgatcggccagccccaaaaccatctgatatttactatgtaacggagttgttcactgatggcatcgaatcgttgcttcagcggatttcctctccttcctcatcggttgcagatcagacagaagctgcaaaagagcatgccggcccgtagag

SEQ ID NO: 156660 - DNA, 948 bp, Arabidopsis thaliana landsberg
  unsure (1)..(948): unsure at all n locations
actcctcaaaagacattgctntggcaacccacgtgagacatcccggtacgctcattgagagacttcgatctcgacgacgttcgaagttccgattcgcataccatcagaaatcaacagcttggtttacccgtgggaagcacgttttcgtttgcgccaacataaacgacaaactctgtctcagagcttatactcccaccagcgccatcgacgcggttggtcatatcgacctcgtcgtcaaagtttacttcaaagacgttcatccaaggtttcccaatggtggactcatgtctcaacacttagactcgttaccaatcgggtcaatgatagatatcaaaggtccactagggcacatcgagtacaaaggcaaaggcaacttcctggtcagcggcaaacctaagtttgccaagaaactagcaatgctcgccggaggaacaggcatcactcctatctaccagatcattcaatctatattgagtgatccagaggacgaaaccgagatgtatgtggtttacgcaaacagaaccgaggatgacattcttgtgagggaagagctagaaggatgggctagtaagcataaggagaggctaaagatttggtacgtcgttgaaatcgcaaaggaaggttggagttacagtacccggtttataactgaagctgtgcttagggaacatatccttgaaggtttggaagacgaatcgctagcactcgcatgcggaccacnnnnnnnnnnnnnnnnnnnnnnnnnnnnnaatctagacaagatgggttacaacgtgaaggaggatctcttaatcttctagatttgctcaagttctgtgctattggaaattcgaaagttgatcacaagtgtcgcttatgtgtgtatatacatggtcatatgggtacttttgttatagttgttgtttatcagagctccaaactgtatattgtataaaattgtgtttaatt

SEQ ID NO: 156661 - DNA, 543 bp, Arabidopsis thaliana landsberg
cctctttctcttattctctctctctcgctatctctccctcttaagtttttttttaaaacagactctccctctaagttattcggtcgcaattaaaaaagaaaacaaaatctttataaattttgattttctctttttcacccgattattttgatttgactgttttacgacagccaatatttcaattttattattgggtgctgacgtggcatgcatgcaagagagtatgaccgtgaacaccaatacgatgcgtgttcccccagcgtgcgttctaacggcggataagcgcaaagaacgagacgccttcatctcctccgtcaccgataatccgccggaaatcgccaagtttccctgtcagccgcctagacttgttccgccgccggttaatcccatttccaagaagtcttcaacagcagcaggcgagcacgattggctcgaaccatttaatgtcagagggttatgtcagccgcgacgtacctcggcatagcaaaccttgttgatgcggttatgggacatggatagcagcgttgacgcagtcgacgatta

SEQ ID NO: 156662 - DNA, 1202 bp, Arabidopsis thaliana landsberg
gtgcgctgacatatgtttttgtagtggaagcaattgatcgaccatatttgaggccttatttagattcgataagtcgacaaactgaccgaagaggctgcaattttgctgcggctgcgtcaacgattcagaaggcaaatgctgcatcctatagcccctttggttttggtgttcaagtctctcaattcatcacctttaagtccaaagtccttcaattgatacaacaaggtaactaaatagcaaatgataccaaaagttcatcaacattttagacttagttgaatcatttagtcactgaccaatgtacctttttttttctcttttgtttgtcagatgaagagctccaaagatacttaccgtccgaatatttttttagtaatggattgtatatgtttgatatcggacaaaatgatattgccggagcattttacaccaagacagtagatcaagttcttgctctggttcctataatcttagatatatttcaagatggaataaaggttagtatttacatgaatcttaaccctcgtttttttttcaatcttaaataaaactataaatgacactttgttaattgttacacggataatcattttttgggggaaatatttgaatttgatttgagtataagatatcatcatactattaattcattttgtaattctttatctagagattatatgcagagggggcaagaaactattggatacacaacacaggaccacttgggtgtttagcacaagttgtgtcaatttttgggaaagacaaatcaaagcttgatgagtttggttgtgtcagtgaccataaccaagctgctaagcttttcaatttgcagcttcatggtcttttcaaaaaactccctcaacaatatcccaattcccgtttcacatacgtagatatcttctctatcaaatccgacctcatcctgaatcattccaaatatggtaagtaactaagtattaataatgttcagttcactcaaattagaaagcatttttttacttttgtgttagtggtggcattttaaccggaatgccaaaacttacttatgtgcaagttaacagtgcttgaaacttttttttggtatggtaataggttttgatcattcgataatggtatgttgtggaaccggaggaccaccactgaactacgatgatcaggttggttgcggtaagacagcaagatcaaatggtacgatcataacc

SEQ ID NO: 156663 - DNA, 890 bp, Arabidopsis thaliana landsberg
cttccttctgacatatgcttcctccatggagataaagaatcgctttgcgctggaactcatttgattgtcactgggaaagaggagaagagcattgcgctatggcggtacgagttggagacgagcaaatggttcaaaggtcccgcgatgatcacaccgcgaatcttgtttgcttctgctacttgtgggactgttgtgtttgtagctggtgggttgaaaattgaaggaaacgggaccatggaagttgtggacagcgttgagaagtatgactctaagaccaaaacgtggacgcttctacgcggaatgcataagcggcggaaattctgctctgggtgttacttgcgtggcaagttttatgttctcggaggccgggatgagaatggtcaaaacctaacttgcggagaaagttacgacgagaagacgaacacatgggaaatcataccggacattctcaaagacatgtctttctcttctgtccaatctccaccgctcatcgcagtggttggggatgatctttactcattggaaacctcggcgaacgagctccgcgtttatgatgcaaatgcaaactcttggaagaagcttggagatgtgcccgtgagggctaagtctaatggaggatggggcgttgcgtttaagtcacttggagataagttgcttgtgattggagcatcagccggtccgtctagggccgagacaatgtcggtttacacgagccgtccatccgcaaatcctgcgaacaagctgtattgggaggagtctaaacgttgctgtggcgttaggttcaatcattttatcctaaattgttgtgtaatgattgcgtaagggcaaaaactttgcgaagctgtggttttgtgtgtgtgtgattgaatagaacggtgctattgtgggtt

SEQ ID NO: 156664 - DNA, 3595 bp, Arabidopsis thaliana landsberg
ctcccgcaatcagttcacaggtacccttccttctaacatgagctcactctcttacttggagtactttgaggcatggggcaacgcttttactggaactctcccttcttctctcttcactattgcttctttgacgtctattaatttgagaaataaccaactcaacggcactcttgagtttgggaacatatcttcaccatctacactaactgtgttagacattagcaataacaacttcatagggccaatcccgaaatccatttccaaatttataaaccttcaggaccttgatctttctcatctcaacacccaaggcccagttgactttagtatcttcacgaatctcaagtcgctccaacttcttaacctatctcatttgaacaccaccactacgattgacttgaatgcactcttttcctcgcatctcaactcaatctattcaatggatctctcaggcaaccatgtttcagccacaaccaaaatttcagttgcagatcatcatcctacgcaattgataagtcagttgtacttgtctggatgcggcatcactgagttcccggagctcttaagaagccaacacaaaatgacgaatctagacatttccaacaacaaaatcaaaggtcaggtgcctggctggctatggacactaccaaagttgatattcgttgatctttccaacaacatttttaccggttttgaaagatcaacggaacatggactatccttaatcaccaaaccatctatgcagtacttggttggctccaacaacaatttcacgggaaagattccctctttcatatgcgctttgcgctctctaatcactcttgatttatctgacaacaacctcaatggttccatccctccatgtatgggaaaccttaagagtactctttcatttctaaaccttcgtcagaatcgtcttggtggaggtcttccaaggagtatatttaaaagtctaaggtcacttgatgtcggtcataaccaactagtcggaaaacttcctagatctttcatccgtctctctgctcttgaagttctgaatgtggaaaacaacagaatcaacgacacattcccgttctggttgtcttctctcaaaaagctgcaagttcttgtcttacgctccaatgcattccacggaccgatacatcatgcctcgttccatacattgcgaatcatcgacttatctcataatcaattcagtggaactttgccagcaaactattttgtgaactggaatgctatgtcatcacttatggcaaccgaggatcggtctcaagagaaatacatgggagactcttttcgatattaccatgattcagtggttttgatgaataaaggcttagagatggagctggtacgcatcctaaaaatctacacagctctcgacttttctgaaaacaaattagaaggagagattccaagatccatcggtcttttgaaagagcttcatgttcttaacttgtcaagcaatgctttcaccggccacatcccatcatctatggggaatctgagagagctcgagtcactggacgtttctcaaaacaagcttacaggagagattccacaagaactaggaaacctatcgttccttgcgtatatgaacttctctcataaccagcttgtcggtcaagtaccaggaggcacccagtttcgaacgcaatccgcttcgtcttttgaagaaaaccttggactttgtggtcgtcctctcgaagaatgtagagttgtccatgagccgacgccttcaggggaatcagaaacattggaatcagaacaagtcttgagttggattgcagctgccatagggttcacacctggtatcgtgcttggattgaccattgggcacatcgtgctttcctccaaaccgcgttggttcttcaaggtgttgtacatcaacaacagtcgtagacgcagacgaactcgttctgaggtaccttttcccttaacgttttgttctctataacttgaaacctttcaatagaatcaatcgttgcactatcagaattgaattttgatcatccttcttaactttgatttgcaaataagaaatcctaaatcacggaattgaagacgttcgttcgagaagaagaagatggaggaataaagcaggaggatcgttatgtgaattcgaaattgggctgataaaatgggcttgcttacataatttaggcccattaatgaaagacgtcggcgaagaaagcaacgttgtacggagaaagtaataattacaagaagaagacgaagacattcatggacattaatcatggaaggtagcgactagcgagcgcatgcttagtggagagattcctgtaaatttctatcttttttttttatttttgtattagatgttgacatattggaattgatatgtcggttactgtaataccaaattctcaacatggtttaaccactacatatagaaattgttcaaaaccggttgtgtaatgaaaattcacgtaatttttgctatgcttctatttttttttccatttcgttaggaatagcctcttaaacacggcataccttagttggtcctgatgattccaaaacatatgtaagggaagtggaagaaaccccaacaccgagtttgaataaaactcagtccgatgatagtgttggagctatggtgtcttttatcagagtaaatatttctgaaccaggaaacatagatgaggtgcaagaggcagtgcacaaggttcccaggcgaagaagagtttggaagacctctgaagacgtctataatatgataaaggctccgaagggaaacaacaggccctggcagctagaaagtgcggaaaatgaaaccacagcgatgtcctttcatgaggaaggtgtaaggatccatcatgctagcgaggaaatagaaagcacatctggacaagctagtgattcaggattgcaagaaaattggaccgttcttaaacagatgtttaggcagatgtttcagacagcagatactaagggagaggatgaaacttactgcttagtggaatctgaaaggggacatcttgatatccatcaaaaagctcaagaaaaatatgaacaggttgaggtggagacagtaagaacgaattatgaagcctatgcacataccagagaaaatgaagatgagtcggcacaagaaacatattgtagaaaagaggatggtaaggtagaagtgcaaggtaaaacgtctttggtccgtgaactgataggagaagaactagaaatggctagcctagaagaagaagatgtgcaggaagcatctgaagaagctggctgggttcaaggactttctgaacttaatgagataaatgagcatgcagattctcatgctgaaatgcttgaatatgatcgaagtgaaacagattcaaataattctagggagagatttgatcaaacacaggaacaagcagaagaaactaagatcgatggtagtatagatactgacaccagcaggtcatcttttgaaatgagacaaggtgattcatatattgaggaggttggcattgagcaacatcgcagtgatcaattccctgaaaaagcttgtgctgtcagtaacacggaagaacacattgaagaaatagattctgattcgattaaagtggttggagtgttgtag

SEQ ID NO: 156665 - DNA, 846 bp, Arabidopsis thaliana landsberg
ttggcaaacacaattactcttggatcggccatggctactactgttcatctcagctcattctccctcttcatccaatccagaggaagaagagacaactccatatcttccgtcaagagtctcaaaaaacgcacaggtttgtctccctcttctgccctcacctcacaaggtggcagagacatgattccaccagagggaaaatgcaatgatcacaactctgcttttgatttcaagttgtatatgatccgcaaagccgaatctgtaaatgcggctctcgacgtttctgtaccgctccgagaacccctcactgtccaggaagccgtgcggtactcattgctagcgggcggaaaacgtgtgaggcctctgctctgcattgccgtctgcgagcttgtggtaggcgacgaggctactgccatgtcagctgcttgcgcggttgagatgatccacacaagctctcttattcatgacgatcttccgtgcatggacaatgccgacctccgcagaggcaagcccaccaaccacaaggtatgttgttaaatcatataaaggctcaaagaaatgctcactagatttgaatcgttcattgattttagtaaatattcactcgtgttggaccaatttttgctcaaacaaggtatatggagaagacatggcggttttggcaggtgatgcactccttgcattggcgtttgagcacatgacggttgtgtcgagtgggttggtcgctcccgagaggatgattcgcgcggtggttgagctggccagggccatagggactacagggctagttgctggacaaatgatagacctagccagcgaaagactgaatccagacaaggttggattgga

SEQ ID NO: 156666 - DNA, 986 bp, Arabidopsis thaliana landsberg; identical to SEQ ID NO: 24824

SEQ ID NO: 156667 - DNA, 503 bp, Arabidopsis thaliana landsberg; identical to SEQ ID NO: 30901

SEQ ID NO: 156668 - DNA, 4986 bp, Arabidopsis thaliana landsberg; identical to SEQ ID NO: 37552
  unsure (1)..(4986): unsure at all n locations

SEQ ID NO: 156669 - DNA, 3359 bp, Arabidopsis thaliana landsberg
ttagtttatacgattctagtttccataatcggttgtttgtagcgcatgttaccaaattatcataaatctaatttttgaatgttgccaatttatcaaaaaggaaattatggactagtatattgtttgaatagcattttgtactctcatttatcaaaaagatggatattggtccaaaagataaaatcagcaatctaccagaagctctgatttgccacatattgtcattccttcccatagaagattctgctttgacctcagttctctcaaagagatggcgctatctctttgctttcagaccaaaccttgttttcgatgactcggtatgtctacgtccaccagttagtaccagagaaaagcatgtgacatttagtagttttatggattttgtaggtagagtactggatttgctagggaaatctactataaactagttctctctaaagtgtggacatggtgttattccagactatgtcacatcttggatactcaatgtgttagagcgtggggtattggatcttgacttgcaagttaatgtgaatggggttcgtctgccttcggagatctttgtgagtaagacactggttaggctgaaattaggaccggcaaatgatcttactctcacccttgataggaaagatgtttttcttccaaagctcaagactctctatattgattgtgttgatgttcaagagcgtggttttgggtttgtaaagcttctttctggctgtcccgtgctcgaggagttagttctgatgaatatcgcgtgggaccattggaagttttgctctgtgtctgtcaaaaccctcaagaggctgacgtttttctgtgaggagacttatgagaatccaaagagcgtgtcatttgatactccaaaccttgtttacctagagtattctgacgctattgcgagcaagtatccgaaagtgaactttaattcgctcgttgaagctcatatcggtcttcgactgacagaagatcagagtggagatgcagacttttcagaagaagactatttctcagaaggtgatgaggaaaaacagatggtcggtaatgcaacggattttcttaagggaataagcactgttcagatcctttacctatctgcccaagctattgaggtttgtctatcaattcctttagttggtggtcataagaaagtgatgatatagttggtttggtttttgtttcaggtacttactttctgctgtgagccaataccggttttcaacaacctgatccagttaacgatcgagaataactcagaaataagatgggattcactgccgggtctactcaagaactgtccaaatctagaaacccttgttttaaaggtataaaacaaaaccactaaagcatctttgtttatcagtgacatgaaaacaaatacaacttaactatgaaacctttcctttatgctacttcttcagcgtcttctccacaagtataacaaggcatgtgggaacgtgtgctgttgtaagcgtccgaagcagccttcttgcctttcatcttctccggtgaaggttcttaagatatttctgtttgatgacaacgatgaagaagacgggtcggaaatgaggcagatcaagtatttcttggagaaaatgccccgtctagaagagttggtagtatactacaatacagcatatgaccctgctgtgttagaactatccaagaagcttcagaagattcctaagatagcttcaccaaagtgcaagatccaggtaatctctgagaatcttagtttgtcatctaccgtgccttctttcttgacaacgagatggtcttctcttcctcctgaagaagcatatccatgggttgactctcctcctccccaaataatagatcccatgttagagtatggttctcctccagaagatgatgattcctggttgtactaggctttgatctaaactcaaagcaattcaaatatttcctctgtttctgtcgttgtagtttacttttgtactctggcttttgtcctttttgtaactgagagaatgttgaactttatggtgtgtttatttccccttattctgtggtgtttaaactgttgttcccacgcatacacgtggtttgaataatctttctatagtgtgaacgcaaaatatctttactggtccttcaagaatcgtatgacttggccgatatatgagataaataattgaataacaatgtagaccaataatgaatgacggataaacttacttgcttcttcatgtttccaagacatttttaataccaaattgcttctatcacttttcgtccagaagttgctttgcataaaaaattataattctccttttcaagtcgtatgaaccctcaccgtttgtttgaagctgtagggtgattttaatgggctctgcttttacactcaacacaagtaagttttataatttctgctttagaccttgtgttcctataagatctgataattgttttgtggttcttgttttttctttcctcgagaaccgaagcttatgattccgattgtgtgaaggattagaccttgatgataccggtttggagtttagagaaccctgtattttgtatcttgacttcagcttctgaaatcttcttgttggatgtgttgtttagatttatagaggctgatctgtctcaaagaaaccatggatgattgttccaaagatataatcaattgtttaccagacaatcttctttgccaaatcttgtccaacttgtccacgaaagaagctgctttgacatcacttctctcaaaaagatggcggtatttgtttgctcttgtaccaaatcttgattttgatgtccttccctctctgcatcccgaggttgcgatgcaggaccaggatcaaacgagttttatagattttgtggatagagtattgaaattgcgagggaaagatcatattaacaagttctctctgaaatgtggagatggtattgaggatgaagatgtcttcccttggatattaaataccttgagacatggtgtatcagatctttctctacatgtctctccctctttggtttattggttgccttcaaaggtttttgcaagtaagacactggttaggctgaaaataggacctaaagatggtcctagagttaaactgagaaatgtctgtctaccaaagcttaagactctaaatcttgattcagttgtgtttgaagagggtaagattggttttgcaaagcttctttctggttgtcccgtgctcgaggaattatctttgcttaatcttgcgtgggatcgttgggattcttgctctgtgtcttccaaaacctcaagagataacgctatgtttgtgccacagtagcagaaatccaaagagtgtattatttgatacttcaaatgttgtctactttgaatattctgataa

SEQ ID NO: 156670 - DNA, 1278 bp, Arabidopsis thaliana landsberg; identical to SEQ ID NO: 16264

SEQ ID NO: 156671 - DNA, 874 bp, Arabidopsis thaliana landsberg
gaaaatttcagtttccttaaaaccctaaatcttcgttccatcatgtaagatcctttattaatcttctgggttattcaattatactgtttgataattgattatgattggagtaattaatcgttttttgattcatcaaaacagttatctgtgtcctgaaccatacccagaggagaatctcaagtttcttgaggctaacaacattaagctttaccaatttggaatcgaaggcaaaacggtgcgttttgcttctttcttgttgcttgttgtcaaagaaatgcaattgtccttgatgtcttatatcggatcttttacgatatgcaggatcctccaactcctatgccgaaagatacagttttggatgctctcaaagttttagttggtaaggaaccagaagagactctttgatgtgttgtcggcttttctcttttagctgtctcattaattcttctgtttttgctaacagatgttcgaaatcatccaattcttatccactgtaagcgcggaaaggtaaccaaaccaaacccttctcttccggtttaacaagctttaggttaagttaagagtgatttgagtccaatggtgcgtttcttctggctcattgcagcataggacaggttgtcttgtgggatgcttgaggaaagtgcagaactggtgcttgtcatcggttctcgaggaataccagaagtgtgcgggtttgaaatggagacaaagagatttaaggttcattgaggatttcgatgtgctcagattgaagcaatgtctatacagcatcatatatcagtacaatgggtatggtctcaagagaagaaagttgctgtatcaagaagagaatgttgttcaagaacagcaaaaacctcaagccaccaaaggataa

SEQ ID NO: 156672 - DNA, 2362 bp, Arabidopsis thaliana landsberg
gagaatgcggtgatgagggccgatgaacgaatttgagattacttagttgtgtggagcattgagtgcttcttggcatatcataagaaaggacatcataacaagacctggaaagtgattcaattaaagaagaatgaagggtgctccgatctagtgtttagagaaagcacgctctacgtgcttaatccaaatctaaacattactgtttttgatttctctagtggatctccaaatgaatgtgcaagtttcacatctcaggatattgcgctcacattatatccactatcttgtttcggccatcttgttataactttgtccggagaggttttgctgatcaaaacccgccgatatgggatatattcctttgatgtttacaagatggatccaaaatcatcaaaatggagagaaatttattctttagggaacgaagcacttcttttggatctaggaacaacgatcgcagccaaagatggttttggggaaaacagcttatatttaagtaatcataagctttgtagatacaatgggagtagtttatgcaatgaaaacagtaattacgtttacgattttcttaggaggttggttgtccaacggtttcaacaccttgcagatttatcgccagtgcctttcaaggattcttgttggtttttcccaactttttgtggcaaatcgttgctctaaagctatctagttttatgtttttggtaaggattatttctcttacattttgctacgttttatgtttagggtataacaactattctcaaatattcctctcggatattttctttgcaaattgtgtttctttctgtttttggattccaatttaaagattgaaatggtatcaaaacaagtgacacacttccgttcgtgatagatgttgaatgatcctaattagtgttttgcattattaggtttagcttcatgcatgcatgatgcaatgatgcatgtcctttgatatggttacagaattgtgttgcattgcatcattagatatgggatcagtttatcgatatatcatatttcagacttttttagttcgacataattttaaagaaaacaacattaatgatatgttcattcgatgtttacaacctacaagatggatccaaattcatcaaagtggagaaaaatcaattgtattgggaacgaagcattgtttttggatcacggaacaacggttgaagccaaagatggaattaggaataattgcatatattttagttacgttaagtatggtaaatacaagaacattagtttacgcaatacttgcgtctacgatattcaaagggggttcgttgtccaacggtttcaacaccttgcagattcatccccaatgcctttcaagtgtgttcgttgggttttcttttggtggcaaatggttgcgttataccgccaactaaagactttttgacccaaaaaataacattggcttgtgatattcttcaggagcaagttagggattaggttttgattgattatattataaatttgtttcttttggttcttgaaaaatccttccaattaaaacagagatttgtttctcttgggtcttttttggtcaaaatttgtctaactcttgatattatctctgagacaggacttcttggtgctcgaccaactacacatccgattgaacagaatcatcaactagcattggcaacgggtgattttcttacagatcctcttcgctatcgccgcttggttggtcgtattatccatccccggagttacacgtcctgatatttcatatgccattcatactctctctcaatttatgcatgctcctcggatagaacattggcaggcggcagttagagttgttcggtatttgaaagggaatccgggacaaggcatactattacgtgcggatgcggagcttactcttacagcttggtgtgatgctgatcatgcgacatgtccactaacaagacgttctcttacagcatggtttatacagcttggtggttctcccatttcgtggaagacacgaaagcaagatactgtctcacgttcatcagctgaggcggaatataggtccatggcggatacggttagtgagatcttatggttgcggcagcttcttatcacattaggagttgattgttcatctcctattcctcttttctgcgacaaccaatcggccatttatctcagcgctaacccggtgtttcatgaacgcactaaacatgttgggtcggattgtcattttattcgtgatgagattgttcgtggtgtgattgctcctcaacatgtttcaacccatcttcagctcgcagatatatttacaaaggctctcggtcgcaaggagtttgaagcttttatactcaagttgggtatttgtgacctccatactccaacttga

SEQ ID NO: 156673 - DNA, 356 bp, Arabidopsis thaliana landsberg
tatggcgttatgagagatgataatagatgagagtgatgacatagagagctacagtgatcaatctctttgtcttgataaagttaaggagcttcttgctctcatcaaactacccacgggattgttgccattgaaggatatgacggaagttgggtacaacaaaacaaaagggtttgtgtggatgaggatgagaagcaagattgagcatacattccgtgagataggtcgcagagttttatatgacaccgagataactgggtttgttgaggacccgcctatgaggagacttaccggagtcaaaatccaagagctcataatttggtttcctgggaatgatgtcttcattaaagagaaagaat

SEQ ID NO: 156674 - DNA, 1787 bp, Arabidopsis thaliana landsberg
aaaggaaattacacgtcaaatacgtgaaactgtggagggtcattgcaggaacgagaccctttcttcttcttcttcttccgtcttgtccaatggctatatgggtgatgattgttcgttaaacaggtcaaattacgaatatctagtgggaaatattaccaactctgagatcatgtcaccatcctctaggcattcatgggactgtgcaaacaagtttgagagtcctttttcttcgtcttcgttgagccgagtctcgttttctccagactcatctgtctacagagaggcaaagaaacggctttctgagagatgggcaatgatgtcactaaacggagacacacagcaaccaaaaaacttccccaaggtttcaacggccttaggcgaagtacttgcactttcagagacgaaagtacctaccggatccagtgaagagaccaacaaagtgaaacaagaaacgagacgatcaatctcatgcataggcagtggtctagatcaagtagaaagcacaagtgattctctgaatatccttgaaaggtcaagatcagtccctgagattaggctcaatggtggaacttcaaaagcgcaagctcccgaagagcttactgagtcaagaagcttaaagtcatcatggaaagtttcaagcttgttcttcttccggaataaaaaatcaaacaaggacaagacatttgcaccgtctcaattggctatacaccgtgatgcattccaagaacaacgtatttttacaagcgaggtaaatcacaatccaaaactagttgtgaatttcagaagatgctcggaaaccgttcttggtttaatctttggccattgatttgtttgcagggtgatgtggaaaatgaaaaccaggaccagccgagtccagtttcggttttacagccggctttcgaagaggaatgttcggggtcagtaaagccaaagaccactcaaggttagttttatctctctggtgttaaacatgctaagagttttaccaattgtaagactttggtactgtcacatcccacaggagaagaaatgtctctgaaatctaatctgattgacaaatcacctcctatcggaacaatcgctcggattctcgcatgggatgatgagtcatacacagacactagctaaacccgcaatgggagtccatgaggaggaagactggcatctcttcatagaaatgatcttgacagctgcaggtttcagcagtggttgcatagtctctcatgaccccatcatgtcacgatggcacatgccaaacagtcccttagacccttcactcagagacaaatacaccaacccggataacaacaacatcaaggagttcatccacgaaggcaaacgtagacaacaacgatcaactcgtaagctcattttcgaccgcatcaactccatcgtttcagaaacaacgactacacgcacgggtaatggttctctgcatttcgacctggtggagcatgtgtgggctcagttaaaggactgggtttcagatgagcctagcaagcgtgactcaggagaagacatggacgccaacagtttggctgcagagagtctagtgaaagatgagatagtcgggaggacatggactcatagcttgcaagttgaaatagatgactttgggattgaaattgaaaagagattgttgcaagagctagtagaggaagccgttatcgatcttacacgatgagatgagacaggagcaatatatatactacgttcaataaaaatgtaagatagtgctaagttcatttttttttggtctatgggaagatttgtgtctagattttttt

SEQ ID NO: 156675 - DNA, 702 bp, Arabidopsis thaliana landsberg
tttggttgcgttgcgattggcactctcttctctttgtttggatgacgaaagctccttctcttgcgtttctctgcatccaatccctcaaaattcagcttctagaaagtaattctaacaaagcttttgttgcgccaatttgattccaaaatatgctgaatttgagtttgggttttgtgtaattccaggcgataatccaattccagatttatacgagcttccatcggagttacttgatggcattgtcgctcacttgcctgctcttgctttgcagaagtttcagaccaacatgtcagtacactctttggtttcatttaagttttgaatacaaattgaaaggtttagttagggttacgaattatatggatgaagatgatacaactcttatttcatttacatttttctattggtataggccgtttcattgcttggatagttatgaatctggagatgattgctgcttgattactgggagaaaacgtgcaaggtttgatgaattcttcttttgatttctgttttgttattcgaattgagaagacagactgagaaagatttaacttaaattcatctgcagaaatgatgtacttggtagctcttggaagttgttgtttaagctgcggtggcctgattttgttgaccgtgtggaatcaccagctgattggcaacagctttactgggaaaagcatctccaaaagtatggcaatt

SEQ ID NO: 156676 - DNA, 1700 bp, Arabidopsis thaliana landsberg; identical to SEQ ID NO: 28469

SEQ ID NO: 156677 - DNA, 1168 bp, Arabidopsis thaliana landsberg
tgcgttgctgtttttgattctctgtgattccagatcggcttcagatgggggaagttgtctctacgattccgagtatgtatctaatctctcgattgttgtatagattatggatctagtttatgtatcgtgattttacgaattttggttttgatctgatctttgcagctattggatttaacgttgagactgtgcagtacaacaatatcaagtttcaggtctgggatttaggtatgttttctaagaatgcgttcgaacgcattaaactttgaatttgaagtagtagaaatgatttttggtattatatggaagggatattcgaaatctacaacactatataaccattagattaatccaaatcaaaccattttctgatggattcagttagagattctctgcgttcttctttctaagttgactagctccatggtagtagatcttcagtgtcacttttgtataattggaatgtttgtcttttgtatgaattacacgaattcatgatcagaattttccttgatttggagtccttagataagttgttgtcgtatgtgtcgttatattcgactttcttgttccaagttattaccttttccaactggtcttgatgaaatagatgaagttctttgtattcaaatttgggtgataaagagttctgtattatcacatcttcttcctatagtttttattattattattgttttgcacgtgttgtatgtacatctgtcttgttagttatatgcgaatgcttttgcattttacaaaattggttcagcgacacagtacattaacaagaactttcctatgacaggtggacaaacaagcatcaggtagcttaatgacctcgtttctcatttctagatatgatgaacatattgcatctactgtgaaggaatgaagaacagaaatgctccatcaagattatactgtttttgttttgcccaattttctaatggtatttttgacaggccatactggcgatgctatttcccgaatacacaagcagtgatctatgttgttgactcgagtgatacagatagaatcggggtggcgaaagaggagtttcatgcaattttagaggtaaagtactgctgaggcttcctcttcttatactgttgtattattttgtgatggacttcttgcatccaaaagtaattgaggtaactgagagcca

SEQ ID NO: 156678 - DNA, 2281 bp, Arabidopsis thaliana landsberg; identical to SEQ ID NO: 27169

SEQ ID NO: 156679 - DNA, 1102 bp, Arabidopsis thaliana landsberg; identical to SEQ ID NO: 16435

SEQ ID NO: 156680 - DNA, 849 bp, Arabidopsis thaliana landsberg
gttattctttccactttctcatctccctttcttggattgtatggcaggcgcagtggaagctactccaggtcacctgtaagatcccgttctcctcgtcgtagaagaagcccaagccggagtcttagccgtagccgaagctacaggttagtatttgcccatgtaaacttcaaaattttggtttatgtttaggtgtttacatgcattagatttatgtatgaacctgaaagcatgaatccgagtaactgctttctctgattgacttcttattttccttatggtcagccgatcacgatccccggtgagaagaagagagaggagtgtggaggagagatcacgcagtccaaagcggatggatgactctctatcgccaagagccagagatcgtagtccggttcttgatgatgaaggcagcccaaagatcatagacgggagcccaccaccatcaccaaagcttcaaaaggaagtcggatctgaccgtgacggtggtagcccccaagacaatggcagaaactctgttgtcagtcctgttgtaggagccggtggtgacagttcgaaagaggaccggagccctgttgatgatgattacgagccaaaccgcacttcccctagaggaagtgagtctccttaactttgatggctcatggccacggcttgcaggcattgtagcatgtatactattggatcgactgttcctttctcttttaagtgtgtttgctttagaaccttttaagtttcatgttaccaagagttttttcatttgagacataatgttgttgcgtttcttttggacaagttttcgaagattgttataaggatttataaaagtttcaatctgaggagaagacatga

SEQ ID NO: 156681 - DNA, 1180 bp, Arabidopsis thaliana landsberg
  unsure (1)..(1180): unsure at all n locations
tatgttttcatggacttcgattatagcgtcactggcgagatcaggtgacatggaggaaagttntgatatgttctgggaaatgcagaacaagggaatgcacccagatggggttgtcattagctgtttgattaatgaactaggtaagatgatgcttgtccctcaaggtaaagcctttcacgggttcgtcataagacattgtttctctttagacagtacagtttgcaattccttgttatcgatgtactgcaaattcgagcttctggctgtggctgagaagcttttctgtaggataagcgaagaaggaaacaaagaagcttggaatacaatgcttaaaggctatggtaaaatgaaatgtcacgtaaagtgtatcgagttatttagaaaaattcagaatcttggaattgaaatcgactctgccagcgcaacctctgtcatatcttcttgttcccacataggagcggtgctactagggaagtcgttgcattgctatgttgtcaaaactagcttggatcttaccatctcagtggtcaattccctcattgatttgtatggaaaaatgggagacttgactgtagcttggaggatgttttgtgaagcagatactaacgttatcacttggaacgcaatgattgcgtcttatgttcactgtgagcaatccgaaaaagccattgcattgttcgatagaatggtttctgagaatttcaaacccagctcaataactttggtgactctgcttatggcttgtgccaatactggctctctggagagaggacagagcattcatcggtacatcactgaaacagagcacgagatgaatctttctctttcagctgctctcattgacatgtacgcgaaatgtggccaccttgaaaagtcacgagaactgtttgatgctggaaatcagaaggatgccgtttgttggaatgtgatgatatcaggttatggaatgcacggagatgttgaatcggccatagcactttttgatcaaatggaagagtctgatgttaaaccaaccggacctacatttcttgcgcttctatcggcttgcacgcacgctggtttagtagaacaagggaaaaaactatttctcaagatgcatcagtacgatgtgaaacccaacttaaagcattactcttgtcttgtggatcttctttcccggtctggtaatctggaggtggct

SEQ ID NO: 156682 - DNA, 1274 bp, Arabidopsis thaliana landsberg
  unsure (1)..(1274): unsure at all n locations
aaacaaacacattcacattcttctttcttctcacaaaacttaaacaaaaagacacttgttcatttacatcaaaatgataactgcagctctacacgaacctcagattcacaaaccaaccgatacatccgtcgtctccggggatgtgcttcctcattctcctcctacgcctcgcattttccggtcaaagcttccggacattgacatccctaaccacctccctctccacacttactgcttcgaaaaactctcatctgtttccgacnnnnnnnnnnnnnnnnnnnnnnccaccgggaaaagctacacctgcggcgaagcacacctaatctgtcggagagtcgcttccgggttatgcaagttaggtataagaaaaggtggcgtcatcatgatccttctccaaaactcagccgagttcgttttctccttcatgggtgcttccatgatcggaggcgtctcagccagcgcaagccctttctacacttaaacaagagctttataaacagcttaaatcttccggtgccaaactcataatcactcactctcaatacgtcgataaactaaaaaacctcggaggaaacctcacagtgatcaccaccgatgaaccaacaccggagaattgtctaccattctcgacactcatcaccgacgacgaaacaaacccatttcaagaaaccgtcgacatcggcggtgacgatgcggcggcactcccattctcatcgggaacaacagggttaccaaaaggagttgttttgacacacaagagcttaatcacaagcgttgcacaacaagtagatggagataacccaaatctttacctcaaatcaaacgacgtcatactctgcgttttaccacttttccatatctactctctcaatagcgtcctcctcaattcactccgatccggtaactaaacgacgtcgtattcctcaattcataatctttaatgttttgttacctaactattaaaacactcctttaataggcgccacggttcttttaatgcataagtttgagatcggtgcgttattggatcttattcaaagacatagagtgacaatagcggcgcttgtaccgccgctagtgatcgctctagctaaaaacccgacggttaattcttatgatctctcctccgttagattcgttctttccggtgcagctcctttaggtaaagaacttcaagatagtcttcgtcgccgtctccctcaagccatccttggccaggtcttatctctatctctgcttattatttactctgtttttagacccttactatttga

SEQ ID NO: 156683 - DNA, 1623 bp, Arabidopsis thaliana landsberg
aagaggaaaaagaagaaaaaggcggtaatgccaaatcctcccggttcatcaatgtgtaccgagcaatctctctcggatcttaaggctcgatttggtttggtgctgtaactttgcgtgttccgagccctgaagagcgagccgacagtcctcctgcaggtttctatactctgtacgagggattcttctacggctgtttcttatggttgccgatcccgagattggtcttggaatatgtgacatcgtatcagatcgctctttcccagatcacgatgcggtctttgagacatctgctcgggattttgattcgaagttacgagtctgagacggagataacgctggctcatctgagaaattttctcgagatccggcgggtgccaaaatccgaagcggaccggtactacatttcccccgctaagggaaagaaaattattgatgggttcccgaacaaagacgagccatataccgatcacttcttctttgtagccattgaagatgctatttatgaagatctcctcgggactgttctgacaagatggggaattttgggtagtagttagaaatttattagtacccgaggtgatgttaatttcgttctctaattgcagttttccttttgcagaacgcactctcaagtttctcgagccgattccagacgattttctttcggcttttcacgcgttgtcggctacaaggtgagattggctgaaacatttttctcgggagcgagttgagcgtgcgcttcgttttcttctcggcgtttcttgtcccactagttcggaatcttccgatcatcgcactcaatttttcgtggacatgcaatcgacgaaacttactttgcgggaggtatatgccaagaagaaagaggacaaggagaggcgattggcggaagagaggcgccttgttaatacgggattgatctcgccgcgggccgatcctgaagcgatccaagatgggaattttattcccgatgctatcgcgccgcagactgcttgcgaggcgtctcgagatggggtcaatcccgatactgccgggccggttgacgtgacgcccgctgaggctcagggagccgagccatccgctgctgcgcccgaggcagttgtggcgttgcctgcgagtgacaaagcggcaggtaagcgcattcgggttgacgatgagtcgtcaaagaagaagaagaagaagaagaaggcatctggttccgaggcggagaaaatactccccatctttgaagatcgtactgcctcggctaatctgctcgggggatgtgttggtcccttgcttcctcctccagatactcttctggaatctcggaagtatgccgagactgcatctcattttctgcgggtacgagttctgttgcttataacctatcttggtgttatcattataaagctaacttttctcttttccagactgttgcttcgatgaaccggatggtacattcgtatgactcggctatgcgaagtaacatggaggtggctggtaaattagccgaggcagagtctcggattcaggccatcgagcgagagaagaacgaggcactctccgaagctgctgcagcgaagctggaaaaggaagagatcgagaggacggctcatgtgaataaggagaacgccattaagatgg

SEQ ID NO: 156684 - DNA, 702 bp, Arabidopsis thaliana landsberg
tcgtcccccaccgtaaaatatgatcgccgccggagctaaatcgctattagggctttcgatggcttctccaaaagggattttcgatagcaattcaatgagtaattcaagatctgctgatgttgttcgagcatgtgtctctatggatggatctcaaactctgagtcataacaaaaatggatctattcctgaggttaaatccattaacggtcacacgggtatgtatcgttcttcctgatttttcccagaacctttgattgttttgccaattttttatggttttaattgtctaattaggacaaaagcaaggacctttgtctacggtcggaaactcgacaaatataaagtggcatgaatgttctgttgagaaagttgatagacagagattgcttgatcagaaaggatgtgtgatttgggtcaccggtcttagtgggtcaggtttgtgttgaaacaagcttcaagtttggtttctgtgtctatgtgaaatctatctaatgattttatggatctataaattagtagggaggagtccttacggttgggctttgaatcacatggttgatcaaaaggggaagctctgttatatacgttgatggtgagaatgataggcatggttaaacccgtgatcttagcttcgaagctgaaggtcgtgcatcggatatccgttgatttggagagctttaccttctataattacctcttggt

SEQ ID NO: 156685 - DNA, 1265 bp, Arabidopsis thaliana landsberg; identical to SEQ ID NO: 5462
  unsure (1)..(1265): unsure at all n locations

SEQ ID NO: 156686 - DNA, 1146 bp, Arabidopsis thaliana landsberg
atgcattgcttgattcacgttccagaactaatgaatgttaaagggattggtagatttgaaaacttgtgtaggtcgagcatatgagtctgaatgattgattgatgaggcatggctaacgtttttaagtagaattcgatcttgcagcttagaaccactaattccagagattcgtgaccatgtaccaaggtattggtgcagggagcgttttggctttaacttgttgattcgtaatgcctattaggttagctctcgtcaatggtgattgagtctgggactaggttaacttgagagtctctgttgcggtggcactcagatttggttattgaacttgttgcctagggttaatttattgagcatgtcaatcacctgtaaactgaggaaacgaaactactcaattaccctatcctcggaaattctttatcggattgaattctttgtttactctactgttgtttactgcatcttgttatctgtcgcttagtttctgcaattctttcttgttactcgaccttatactcgaccacccagttgtctggcaacagactgtgcagtcgagtatctgtgttttattttctgtctgttactcgacctgtcactcgacctcacctagtgctctgcaaagagctgtgttggtcgagtgttttactctttctgtttgattttctgttttctgcatgttcacttaggactgctagaacacaccaaaacctgttattgctgggcttgacttagtgatttctgatcacatcttgattgttagcatcacacccatttggattgacaacctaaaatactacaacgacatgattggtgttttaagataattgactaaaaacctattatcaatttggcgccgttgccaattgggtgtttgtttattacatttgagatttcatgcttgcttagacaaagtttttttttcaatttgaatttcagttacttattgtgtgtttttcttgtcgtcttcttgttccaggtacatctcggttgtatgcaaactcgatcaacaggcaacctgaacctccttttcaacgataacatcgaccgcatcgctcgcgaactcagggaaggagaaacacagtcaacctttaacaccagcaacaactcgatatggctgacgaacagaatcaacagaatggccctgcc

SEQ ID NO: 156687 - DNA, 722 bp, Arabidopsis thaliana landsberg
atgttggctaacttcattgctactccaatagaactaaggtgaccaattactttccatttcaagtttcctttaaagttaccccttaaatgaatacaagagagacaacacaaaacagatttttattcatttttccaggtaccagtttcaaattgaacccttatgtgtattttttaaaatgtgtttcacgttgaagtcttgtggtgcctttcttacgacttggcgaaaaaataaccggtggacctcattttcctttaacatctgatgccctaaagaaggttttcacaggccaagcttcccgagatgtttttttaagcattggaaatgcggtaaggttcttctgtcttagcttagtggtgtagatgttggtgatttctatttgatgcgaagctgctcatcgcatttcctgccataatctttaggttcagtactctagtatgttgtcatttgtcagtgtttttcaaatctgaagataatattggtttcctctcgtgatttatgtcgatgacaagttggtttgggttgtcatataactggcttaaaacaagaacttatttatgcagctactaggatggctcatagcggcaccatttgtgatcgttgcactatacatcatgtttctcccatgtttcaaaatacttgtccgcaaattcagctctgttgattcaaccgcaaagacacctacaaaggaaaggatcgcgtaaaatgaaacagttatcggtttc

SEQ ID NO: 156688 - DNA, 1008 bp, Arabidopsis thaliana landsberg
atgagtaagaaatcgacagaatctgacgctggcaatactgagaagcaatggtccctggcagatttcgagatcgggagaccacttggaaaaggcaaatttggcagagtctatctcgcccgagaagccaaggtactcgtttcctttcgattatgttgtaattgttagattggggtagaaatttcgttcagtttgagcttttactgtcatcgaaaccctaattttatgaatcaattgctgttttggttgaatttgggatatagagcaagtacatagtggcgctgaaagtcatattcaaggaacagatagagaagtataaaattcatcatcagcttaggagagaaatggagatccaaacgagtttaaggcacccaaatatcttgcgtctttttggttggttccatgacaatgagaggattttcttgattctcgagtatgctcatggtggtgagctctatggtgtgctcaaacagaatggtcatcttactgaacaacaagccgccactgtgagtctctctctcgctccctctccccttttaatcctaattttgcctgaaatgttcactttgttgcaatgttggttgtgcaatgcttctcaattgattcttgtgatgaaactgatggcttttcctttatttcagtacattgcaagtctcagtcaggcactggcctattgtcatggcaaatgtgtgattcatagagacatcaaacctgaaaatttgttgctcgatcatgaggtatgtgtgtatggttatagtttttgcattgagaactcaggatatgcatcattggtattgtcatatactcgcagggcgatcctcaaccatcatcatctcttccctcaggaaatgcattctcttctctaaccaccccaaagtctccccgtttacactgtactcgtcgtacctctcatgatactccacttgcccccctcctccttttttcagtagcaccactatcgtcacctgtccacacttccacctattgttagcttttttttttctctatctc

SEQ ID NO: 156689 - DNA, 1230 bp, Arabidopsis thaliana landsberg
  unsure (1)..(1230): unsure at all n locations
attctctttctctacttagacccggttccttcttcttatgcttcttatatactcttttaatncgaggaacgactcatggaagattcatcacagctacatagtaacaagagacatgacttagaggaaggagtaagcacctctgttcctcactcaaaatctctataccaataatttgaatgtttgtgtttatgtaggtgatgcatcttaaagagagactagaggaagaagaagcagtgactagaactttacgagttgcttttgatggctctattgtttctctcccaagtctctcctcattgtttcttccacctcaggcaataccaataaacataacctcacataatgttaattatttcttaatgatcaaacaatgatgagattttattgttcaacagttttctgagctcatacaagaactagccatcgtggaggcagagattctctgtctagaccgaaaaatcgaggagctaaagcttaaactgtattccgaacagagacaaacgcaagagatacaattgcagatgaccgagcagaagaggacattggcaagacagagccatgtgagacagagtactctgccactaagacatgatcttcatcaacgatctttgtctcattgttaccaacgttctacactagacactgcctcaactactcattcaagactctctttctcttacgctcctgatttcttggatgccacttcttcaggtggcttcacaggtaaagtagttgcttattccgaatgttttctctaagcctcacattacactcaaagtcatggttttggtgagcagacgaatttgatggagtcacgaggatgcagatgggtagagtaagaaaagggcttcgacttgttgaagcaaagaccaaagacgacccaaacgaagtatcagaacaactcatcaactgtcttataggcatttacttggaactcaatcatgtttcatcaaagaccaaaggggatgtctcgctctcaagaaggccatcttcttgtagccggaaatcaaacacatatagttattatcaaaatgcaatgaatcttgatccttatcacgtattgccagactcgagcggaggagtcaccagagacattggcccttacaagaacttcatccacatttcaagaagttccatcgatgtgacacatttcacccataattgttcaccggctgttccacgcttgaggtattaagtctgtgaattcatcatacaaaatgatctcatcaa

SEQ ID NO: 156690 - DNA, 3086 bp, Arabidopsis thaliana landsberg
  unsure (1)..(3086): unsure at all n locations
atcgctctccgtgacccgcaacgtgctcgaatggtcagagatttcaggcccaatctcgtttcaatgcctgagcccacacccgatcaatccgacccgactcaacccaaagtggaatgcggatttaatagccnnnnnnnnnnnnnnnnnnnatacgcaccaagtctggccgagtcgttggtcggagaaatcagccggctcgttgatctctacgcaggagaggagctgagcataagcgtcaccggccacagcctcggtgccgcaatagcccttcttgccgccgatgacatcgccgagcgtgttccacacgcgcctccggttgcggtgttttccttcggcggacctcgagtcgggaaccgtgagtttgctgataggctagattcgaagggagtgaaagtcctacgcgtcgtgaacagccaagacgtggtgacgaaagtacccggaatattctccgataatgataagcaggggcaacatcgtaataacgggagaagtccagggggtataatggaaatggtggagaggaacaatccatgggcttactcgcatgtgggagcagagctgcgtgtagacatgaagatgtctccgtacttgaaaccaaacgctgacgtggcgtgttgtcatgaccttgaggcgtacttgcacttagtagacgggtttttggcatctaactgtccgtttcgggcaaacgcgaaacggagtttaaggaaactgttggatgagcaacggtcaaacgtcaaagttttgtacacaggaaagtctttaagacttaaccgtacttttcatgataacggagatgttttgcctagtccgtcgtcttcatgagctttgatttattaaagaaaaaagatttgttctcttttaatacttcttaagtatttgtttattttttctaattacaaaaaccgtatttgtttattttatttatttattttttctaagattaagatattcattaccggtgggaggaattatttatttatttgtttgttatgatttctttgtcgccattggtgataataaaagattagaaagttgtgcaatttagacttttcgcgtatgttttaacaaatgtgatttttgcacaaaaaagttgtaaataaaataagatgaaatagatggtgttgttagtactgtatttacatacgttattggctaaatcattcgataaaaattaaattttactatagagaaaacagaaaataacataatttatatttttaaaccttaaatatcaattaaaatgacactgatgaattatgttcatatatacataggaaccctttaatgtatgaactgcaaaaactattttttttttaagtacggggtacggctaaatgaccatattttattaaaacgacaaatggaagactagtatgttttaaccaacaattaacacaataaccaatattgaaataagttattgtttatttgatagtagaattgttacatccagtaggactaagtctgaatcatcataagagtctggatcatcatctgagtcttatcacacaattgcttgcattgagattctaacatttatccacttcataaaaatagctttcacgttttcaacatgtggatattgtacctttttggttctaacgtgtttgctgcttaaaaaacttttttttttgctataatgattgaaaccatgcatgaaatttttctaaatagaatcgaactaaaagaaaaattctacttaaaaaaccaaattgctatatcttttggttctgtttggtttaaacctatctatgatctagaaaaaaaaaattatgagcctaaagtgaattaatctaattctgcctatatatcagacggtaagtattatgttagaaaactcaatagtcttatgtataaaaatctcttcataatgcaaaaatatattataaattgtaatgatattttcatatacatagactgatagaagcactttatcgttaaaattgcaaaaaaaaagtagttataagtgggcataaatgaccaaaatttgctaaaatagattgctttttttttttggtaggggacactggacaggaagataatccaataatgaaaaataaacttttgtttagatatgccttaggatgcgcaaaaaaaaagatatgccttaggttaagtattctgatcatcaccaccgttttattgagtattccaaatttccacacattttattttcatttctaatatttatttacttatcatttctttctctcaccaaccaacaagttctcctttctaccccatttcgtctccttcattttgacgttttctttagatctgttaataatccacccatggcttggtctagtcactagtggtgttatctctctgtgtggaataaaaagctaggttttttaatcacttggattgttttaagatatggcaactttgaacccttttgatttgttggatgatgatgctgaggatccaagccagctcgctgtggctttgtctcagaaagtcgagaaagctgctgctgctgttcagcctcctaaggccgctaagttcccaaccaagccggctcctccttctcaagcaggtaaaagttctttcctttatgttgatacttaacagatttagattcagctgtgttttgtctagtgtttgattgattagttctagtgaagtttgtttatggttgtcatgaaagatccatagtcaaatgtgtgtgcttttttcatttgctgctttgttagtttcttccgtatcttattttgtttctctactgctttgttagattagggtaaagcttaatactttgttagattaggataagtatatatattgaaagctttttgttatgaatgtagtgagggagtcgaggaatgctcctcaaggaggtcgtggtgggactggtggacgtggtggattttcccgtggcaggggtaatggtggatacaaccgggacaacaggaacaatgatgctcctggaaatgagaatggattttctggaggatacaggagaccttctgaagatgctgatggagcaagccgtggtgggtctgttggtggataccgtgttggcggtggtcgtgaaggacctcgccgtggtggcgttgccaacggggaatgtggtgatgtgaacc

SEQ ID NO: 156691 - DNA, 1728 bp, Arabidopsis thaliana landsberg; identical to SEQ ID NO: 33839
  unsure (1)..(1728): unsure at all n locations

SEQ ID NO: 156692 - DNA, 814 bp, Arabidopsis thaliana landsberg
tcaacaaggacagcgagctgggacgaggcgggttcggtgtggtgtacaaaacgagtcttcaggatgggcgtcctgtggcagtcaagaaactgacagtgtcgggtctaataaagtcgcaggaggagttcgagagagagatgagaaaactcgggaagctgaggcacaagaatgtggtggagataaaagggtactactggacgcaatcgctgcagctcttgatccacgagtttgtttcaggcggaagcttgtacagacatctccacggagatgagagcgtttgcctaacttggcgtcaacgtttcagtatcattctagggatagcaagaggtctggcttttctgcatagcagtaacatcactcactacaacatgaaagcaacgaatgtgctcattgacgccgcaggggaggctaaagtctctgactttgggctggccagactgttggcttcggcgctggacaggtgcgtcttgagtggcaaggtacagagcgcgttggggtacacagccccggagtttgcatgccggacagtcaagataaccgacaggtgcgatgtttacgggtttgggatcctggtgctggaggtggtgacagggaagagacccgtggagtacgctgaggacgacgtcgtggtcttgtgtgagacggtgagagaagggttagaagaagggagggtggaggagtgcgttgaccctcggttgagagggaattttccagcggaggaggcaataccggtgattaaactagggttggtgtgtgggtcccaagtgccgtcgaataggccggagatggaggaagtggtgaagatattagagct

SEQ ID NO: 156693 - DNA, 1360 bp, Arabidopsis thaliana landsberg
atggcgacggcttcaggtaccatgattccttcaatttcttcttctaatacgttaacctaattctcgatttctctgttaattcccgttgatgattaagaatctcgcttctgatatcttcttctttctttaaatctatatattagtaaattagggtttttactagttttgctattggctagattcattttggctaaattctggcaaaattgattttattttcaatgtttgaatgttgttctgatatatgttttctatgggatctgcagttgcttttaagtctagggaagatcacaggaagaaattagaattagaggaagctcgtaaagctggtctcgctcctgctgaggtagacgaagatggcaaagaaatcaatcctcacatacctgagtatatgtcaaaagctccatggtatctcaagtctgaacagccggtatatgcgaaaattcttctttctcttgcttctctgcattgtcttggttgagaacattcacactcatactctgtgatttttttttgtacagagtttgaagcatcaaaaaaattggaaaattgaacccgaacccaaaaagatatggtatgatagaggtaaaaagatctatcaagctgaacaataccgcaagggagcgtgtataaactgtggtgcaatgactcacagttctaaagcatgtatggatagacctcgtaagattggagctaaatacacaaacatgaacattgctgctgatgagaaaatcgagagttttgaacttgactatgatgggaagagggacagatggaacggttatgatacttcaacctaccgtcatgtggtagatcgttatgatgctaaagaggaggcacgaaagaagtatctcaaggagcagcaacttaagaaactagaggagaagaacaataatgaaaacggtgatgatgcaaccagtgatggggaggaagaccttgacgacttgagggtcgatgaagctaaggttgatgagagtaggcaaatggattttgcaaaggttgagaaacgtgttcgaacaactggtggtggtagcacaggaactgttaggtatggactactcttcatcaaacatgataacataagtttaaattggtgtttctacttgatgcactaatggtgttaccttttcttaatttcaggaatctgcgtatcagagaagacactgctaaatacctgttgaatcttgatgtaaactcagctcattatgaccctaaaactcggtccatgcgtgaagatccactttcagatgcagatccaaatgaaaaattctatttggttagtttgtgatcatcgggaatcatgtagatgaatcttaatattttgaagatatgaagataactaacctttttttttcttctt

SEQ ID NO: 156694 - DNA, 2669 bp, Arabidopsis thaliana landsberg
atgattttggaagcttatggtaaacacggatctaatggaaatttggattatgttaacctggacttcgacgagacctgtgctctgagcaatgacgacttcaatagaaccatctggtcttggacgaaagtaaccactctcggcgtgcatcggagctcctgattccaatttccatgtcttttgcgtatacgctatcaccggctacacaaaacaacagtgacagagtaagcgtatcgcgattttggtatgcagattggattaaggttaaaaatgaatcggagatctgatatggttaccttgccggaatgtgagaaacggatctcttcgccgtagcggaaagacggtatagtaggatattcaccttctccttgtcctctccatgttcctaatagatacgacaacggcgctacaaaagggtgcaccggcggcgattcccctgggttttggagttgctgcagctgattcatcgccggtattagcaattttctctggacagatgatacatacatacatacacgtgataattggtaaatatgctaaagcaggctacaggcccaataatagtaggctatgttctgggccattgggcctacattatattaaaaaaaaaacataaatcgatgtatgttcaattaatggtcgatctctaacaaatttaaaagttgaacttaacataaagtggattcgttgaaaaacagtaaatatattgtggactcaaaataaaaacagatagaggttttctaagattagtattttatgggtaattatgtttatgttctactatctaaacgatactgtattatgttgtgaaaactatattttattcaaggattctatttatgaaaacattgatattataccaattgatatagtttttggaagatgtattgatagtcatattatttttgtcgggtgaagaaaaatatacatagaaagaaaagagataattaaggggacttcactattttctttgtcttgaatgaaattcagaccatttcctccctccacttctccactttctttggaactcataagatactttttctccatccatttcttttcctctcttttcttaattaatcactgtccttttgtctctattttccacctgctttcttcatttcaagacaaactcctatgttcaccaaagaaacaaaatattgaacaaaaaaaagaaacacacacattaatataaaaaaaactaatcaataagctatagaagattgttttctcttcttgctcaaaatcctttatggcatccgaaaacttcagacgtggaaggtaaaaatgctgcaatcttttgctccatatcttttaatttttctctgccaaaaaacagtaaatatacatgcgtacgtacctcgacgtgcagaccaatccttttgctagattctattcacaagacatgaggaagggctttaacattcgtgacaccaagtaatgtcctcatatggatgataaatgaactcaacccatattgacccttttttcacataaaaataaagctttaatctttctacattgaaacaggtttctctgatttgggagactcgctggcgatgttaacgaagcccggaaagaagcttgactcttcagaggtatacgaggatactcttgataatgaatatggagtttgcatatctacttgtagtttgatatctttttttttttcgttattattgtgcagtcaactcatcatactacgagttcaaactatccaccattagatattgttcatcaaactccacaaccacgcaaagagatgcaacaaaagccattgttcgatcccaagaagatggataatcttataaaaccggagccagctgggttcaccaatcaccaccgtccaaaccctagtccaaaaatcccatcctcaccaggttccaacatgaccgagtcacaatcaaacttaaacaccaaaccaaacaacaacaacagtaacaacaatagcaatatgagctcaagaagcaacagcattgagagcacgtcctctaatccctctaagccacacacaggtggtgacattaggtgggatgctgtgaacacgttgacctccaaaggagtccagctcggtatcagcgatttccggcttcttaaacggctcggttatggagacattgggagtgtttacctagtcgagctcagaggaaccatcacctatttcgccatgaaagtgatggacaaggcttccttagctagcaggaacaagcttttgcgagctcaaacagagagagagatcttgtctcagcttgatcacccgttcttgcccactctatactcacactttgaaacagataagttttattgcttggtcatggagttttgagacgccccccaatctctattccttgcgacagaagcaaacaaacaagtgtttcacagaagacgcagcaaggttagggaaatcaaatttactgcactaagtaacacaatagacaattatatttgtagaattcaactgacaatttttttttcatttgttcttacagattctttgcttctgaagtgctatgggcattgaagtacatgcacatgctaggaattgtataccgtgacttgaagccagaaaatgttctagtcagagatgacggacacattatgctctccaatttcgatttatccctccgatgctccgtcagtccaactctcgtcaaatcatcctctgttcatgc

SEQ ID NO: 156695 - DNA, 640 bp, Arabidopsis thaliana landsberg
gatatttacggattctactttttacgggtttacgtttttggcggcataattacgggtttacgtttttggcgggaaaatcatgtgtttacgtttttggcgggaaaattacaggtttacattttttgtcgggaaaaattacggatttacgtttttggcgataaaatcacgggtttactttttttggtgggaaaattacaggtttacgtttttggagggaaaattacgggtttacgttttttggtgagaaaatcactggtttacttttttttggtggaaaaattacaagtttacttcttttcaatctcatcgcttgtatatttaagaaatttagaaaaacattaattttattaaattggtttagatgtgttggttaaacttacattaaaattggtttagaaatgttagttggtttaatacaattttacaaaacttgatgggttaattgggtaaaccattgaaaccattaaccattacaatccaactcattttactcatcaaaccaattgacccaataacttatttgatccatcaactcgtttgagtcaaaattttcaactcattagggttcatgggttgagttgagttgagttgactcatgaattttgacccattttgacacccctagctacgttataggtaa

SEQ ID NO: 156696 - DNA, 695 bp, Arabidopsis thaliana landsberg
  unsure (1)..(695): unsure at all n locations
ctctctttctctcacaatggagacaagaccatcatcatcatcttctctttcaccggcgacgaatcttaacctcgacagactcaaagttctcaaactcctcggaaaaggcgccaccggaacagtcttcctcgtccacgactctgtttccgactcctctgtttcttctccctttgctttaaaactcgtcgacaaatcctccgcatcttctctccgccgtgcaaggtgggaaattcagatcctccgacgtctctccgatgacacaaacccaaacccatttctcccaaaactcttagcttcatcagaatcctctgaattcatcgcatgggctttaccttactgctccggtggagatntaaacgtcctccgacaacgtcaaaacgacggcgttttcagttcctctgttattagattctacgtggcggagatcgtctgtgcgcttgagcatcttcataccatggggatcgcttacagagacttaaaaccagagaacattctgattcagcaatccggtcacgttaccttaaccgattttgacctttctcggagccttaaaaaacccctccgaccccatttctatcaacccgacccggaattgataatcgatcgtaaaaaaagtcggagcttttctcggttgatctcgcgacgcggagaaaacaaaacagggttgaagaaacaagatcgctcgggttacccaa

SEQ ID NO: 156697 - DNA, 884 bp, Arabidopsis thaliana landsberg
cttttaataaaaatcaagttacggccagaaataagttatttgggagtcggagttagtcccgaaatcgtctccgaaagtactaccaaaataaagctgattgatcgaaaagtaagagtcacggagtcgattctgaggtgtttggtttgtgtccttgctctcgtcgctgcgattctcattgctcagaatgttcaagtgagagacattttcatgattcagaagaaagccaaattcaccgacatgaaggcgcttgtgtaagcttcatggcaaagattcctcagttttatggcttttgtgtaaagttcgcagctttagtaacaatcgttctctgagttcaggcttttggtggtcgtcaatggcatagccgcgggttattctttggttcagccggttcgttgcgtggtgggtttgatgaaaggaagagttttgtttagtaagcctctggcttgggccattttcttcggcgatcaggtgactctgttttttacccaattgatctttctctgtttttgcttgggacttaactattaagtactgaaaaagtttgctgtgaattttgtgggtcagtgaatttgaaaagtctaccgtgtgagattcatttgtttggtagggtataggaatttattgggtttaggttggaatctttcattaatgtcactaaatcaataattgatcaagaatgttgataatctgttatggtcctgctaactgaaagcaaagaaattgactcggtctctgtattcttctagttcacataggtggtagtataactcactagtgacattagccatgaccttgttatgtttgttatgatccagcagaggcatacttgtgtgtggcaggcgttgcagtcgacatgcaatatgcgttcattgtgcatatgcctg

SEQ ID NO: 156698 - DNA, 1689 bp, Arabidopsis thaliana landsberg
taagataggtgggtgtgtagtttctcatactcccgaagcaggaaaaacatttctaatcatagcttttctcgcgagctacttgaagatatttccgggtaaaagacctttggttcttgctccaaaaacaactttgtacacttggtacaaggagttcatcaaatgggagattccggtccctgttcacttgctccatggtcgtagaacctcctgtatgtccaaagagaagaccattcagttcgagggaattccaaaaccaagccaagatgttatgcatgttcttgactgtttagacaaaatccagaaatggcatgcccccccgagtgttcttgtaatgggttacacatcgtttctaactttgatgagggaagattcaaagattgctcatagaaagtacatggctccagtcctgaaaggatctcctggtttacagaaactagacgagggacataacccgaggagtaccaagtcgagattacgaaaggccttgatgaaagttgatactgacttgaggattctgctttctggtacattgtttcagaacaacttctgtgagtacttcaacactttgtgcttggctagacccaagtttgttcatgaggttctagtggagttggacaagaagttccagaccaaccaagccgagcaaaaggcgcctcacttgcttgaaaatagagctcggaagttcttccttgacattatagccaagaagattgacacaaaagtgggcgatgagcgcttgcagggtctcaacatgttgaggaatatgacgagtggtttcatcgataactatgaagggagtggaagcggaagtggtgatgttctcccaggtttgcagatttacacattgttgatgaattccactgatgtacagcacaagagtcttaccaaacttcagaacataatgtcaacttaccatggatatccactcgagctcgagttactcataacgttagctgctatccatccttggttggtcaaaaccacaacctgttgcgccaaattcttcaaccctcaggagcttttagagattgagaagctcaagcacgatgcaaagaaaggatcaaaagtcatgtttgtgcttaatcttgtgttccgggtggtcaagagggagaaaatcctcatattttgtcacaacattgcgccgatccgcctgtttcttgagctgttcgagaatgtattcaggtggaagagaggccgagagctcctgaccttgacaggggatctcgagctgtttgaaagaggcagagtaatagacaaatttgaagagccaggaggccagtcccgtgttctgctggcttcgattacagcctgtgcagaaggcatcagtctaaccgctgcttcacgggtgatcatgcttgattcagagtggaatccttctaagacaaagcaagcaatcgcacgtgcattcagaccgggacagcagaaagtggtgtacgtttaccagctcttgtcgagaggaacacttgaagaagacaaatacaggaggacgacctggaaagaatgggtctccagtatgattttcagtgaagaatttgtggaggacccatctcaatggcaagctgagaagattgaggacgatgttcttagagaaatcgtggaggaagacaaagtcaaatccttccatatgatcatgaagaacgagaaagcttcaacaggtggctgattgctgaatttttccagttcaagttt

SEQ ID NO: 156699 - DNA, 1280 bp, Arabidopsis thaliana landsberg; identical to SEQ ID NO: 29858

SEQ ID NO: 156700 - DNA, 287 bp, Arabidopsis thaliana landsberg
gcagttgaagccaggttgtaccggcaaacgacagagaccaaggagcccattaagcctcaaattgaggttgacggtgatcccgagaagattaagaatattgagtcttacggcctcgcatgcacatacagacacaagagaaacattattaagaccagataagatagaacaacattgggccgcgttgctggtggttatgtagatgagacaaagtacgttgacgcaaatccccaattcagactggttaagaggacacacaggttgggctgaggtgaagaccaagaagacga

SEQ ID NO: 156701 - DNA, 1607 bp, Arabidopsis thaliana landsberg
gcgcaggacaacttcagagacaactagtcaatcccagaaacctccgtatcggactgccgagacatcttctaatgtgaaagaagacccatttgtagtcttggaggagtctacatcaacccttagagaaccttccacaggagggttcactgatccattggaggaaattggtaaattcaacagcagaaaaactgatcattcatctgtccacggaggagtatttgttgatactgatcctctcgatagtcttggaaaatcagggccagatatgaatagtagaggcaagagtcatttaaggccaccaggaaacatcagtggctcccagtcaccagtagaaagttctgggctttaccattctaagaatgtttcatttgatgatgttgtagagccgcagaatacgagtactccaccacctaccaattcagatggaagttttgaatcatctgatgatgtgtggcttactgtatctgagatccccctctttacgcaacctacgagtgctccaccacctacgagacctccaccaccaagacctacacgtcctattaaaaagaaggttaatgagccttctataccgacgtctgcttaccactcacacgttcctagctcaggaagagcttctgtaaatagcccgacagcatctcaaatggatgaactcgacgatttttctattggcagaaatcagacagctgcgaatggatatcctgatcctccctctggtgaagattcagatgttttttctactgctgctgcatcagctgctgccatgaaggatgccatggataaagcagaagcaaagtttaggcatgctaaggaaaggagagagaaagaaaatttgaaggcaagtagaagtagagaaggagatcacacggaaaattatgattctcgtgaaagggaacttagagaaaagcaagtgagattggatcgtgagagggcagagagggaggcagagatggaaaaagcccaggagagggagagagaggagagagaaagagagcagaaaagaattgaaagagaaagggaaagactgttagctagacaggcggtagagagggctacaagggaagcacgcgaaagagcagccactgaagctcatgcgaaagttcaaagagctgctgttgggaaggctaccgatgcccgagagcgcgctgaaagagcagcagttcaaagagcgcatgctgaagcacgtgaaagggcagctgcaggggcaagagaaaaggcggcgaaagctgccgcagaagctagagaaaaggctgagaaagctgcagcagaagctagagaaagggtgaatgctgaagcgcgggagaaggaagcaagggttagggctgaacgagctgcggtggaaagggcagccgctgaggcacgtggaagggcagctgcccaagctaaagctaagcagcagcaagaaaataacaatgatcttgactccttctttagctcaatttctagaccaaacagtgctccacgacagagaaccaaccctctggtgagatggcattatctacttctgttctgctttaagtcatttacaggtgatttgacttcttctataactctgtatgtgtgtcaggatcctttccaggattcatgaacaaaggaggatctttgaa

SEQ ID NO: 156702 - DNA, 1037 bp, Arabidopsis thaliana landsberg
gaaaggaacgtagagtctctgaatactacaagaagcaagagaggctcctcgagggtttcaatgagatggagactatccacgaaaatggttttgcatctggtgttccaactgaggtctggcctctactgttctttctttagtttttttttcttatggtatagatattagatgaatcctcaagcttgtttggtttgaacaggaagaaatgaagaagcttgcaaagagtgagagacttgcggttcacatatcgaacgcaacaaatttggtgctttttgtagcaaaagtttatgcctctatggagagtagatccatggctgtgattgcttcaactttggactctcttttggatctcttgtctggttttatcctctggtttacagctaatgccatgagaaaaccaaaccagtttcactatcctatcggaaagcgccggatgcaacctgtggtatgcttcttctgttttgatctcttaacccctttgtttggaacttacttgtctcacaagaaaatagaactgataatgtaaatttacagggtatcattgtgtttgcttccgtgatggcaactcttggactgcaagttttgctagagtcaggaaggcaactagttgccaaggtactttacatattttcaggtaactgctttcatcggttaattaatgtatttaaccaattctgttttttgttacagagtggtattcatatgaatagcacagaggagaaatggatgattggtatcatggtctctgtcaccatcgtgaagtttcttctaatgctttattgcagaggatttcagaacgaaatcgttagggcctatgctcaagatcacctctttgacgtcgtcactaattcaatcggcttagcaacagctgtcttggccgtcaaattctactggtggattgatcctaccggtgctatactctgatgaatcccctaatgattttggtaaaaatcattaagttaaggtggatacacatcttgtcatatgatcaaatggtttcgcgaaaaatcaataatcagacaacagatgtgcgaact

SEQ ID NO: 156703 - DNA, 884 bp, Arabidopsis thaliana landsberg
  unsure (1)..(884): unsure at all n locations
caaatcgtctccttcatttgttgnnnnnnnnnnnnnnnnnnnnnnnnnctcttatcttggtcaaggagaaagcacctcctacagctatataatgtatagatcagggaagatacatcataccgtcattgggccattggaagcggatactgtttattattaccgttgtggtggagaaggacctgagttccatttgaaaacaccaccagctcagttcccgattacctttgcagtggcgggggatcttggacaaaccggttggactaagtcgactctagatcatattgatcaatgcaaatatgctgtgcatctacttccaggggatctttcgtatgcggactatatgcagcataagtgggacacgtttggggaactagttcagcctctggcaagtgtaaggccgtggatggtgacacagggaaaccatgagaaagagagtattccttttatagttgatgaatttgtgtctttcaactcgaggtggaagatgccgtatgaggaaagtgggtcaaattcaaatctttattattcctttgaggttgctggtgtccatgcgatcatgcttggctcatacacagattatgatcggtactcagatcaatacagctggttaaaggtaaggattattgcttgacatccatctgttatgtgtatctcccctttattgccacaataggtctaagtagttagtaaaatagtgcttggttgaattaatctttttccgtgagataatcttttaagatcagcagattctgttacacttattggatttaattttggtgttatctatgatatgtgtagcctgatctctcgaaggtggaccgagaaagaaaaccgtaaataatagtcctcttccatgtaccatggtataacagtaacaatgccca

SEQ ID NO: 156704 - DNA, 2153 bp, Arabidopsis thaliana landsberg
atggagaaaagctcatattttctgtttggtggaacaaacttcaataagaagaagtttgctcctgattttgctaaattcaaggtgagttctgcagctgatgtgttatttaaatcagcactactcactcccactctttgttcttatattaaaaatgtctcattgatgtgttagaattctacggaggatgatgattccaataagaaagtgaacttctttgtggaagaagaagaggacactgaacagccggaggcggagaaagttgttgtgtcctctaagaagaggaaacgaagatcttctaattctggtaagtctgaaaagttaaattattgtttccctcaggtttgtgctaactgtgtcttgatctaattttttgatatgttgaaatagtgccagttgaaggattcgatgtgttcaagagctcaaagaaggcacgtgctaaaggtaaagcagaagaacaaatcacaaagaatgagattgtagagaatcccaagaaggaacttaatcgtcaaatggaggtattggagttgtttttgatgttgtctctgtttcatcaaaggcaaagtgtgacagattcatgactttgtttgctcttttataatggcagcgagatgctttgtcgaggaaacagtacagcattcatgtttccggtaacaatattccaccgccgcttaaaagtttcgcagagttgtcatccaggtgcgtggaactggattgtttctttacagtagtttgatattatgctcatagtattagtggttttgtagtttaggtatgtatttgttgtttcatggacgttgagtctattgacatactctaattatgtgtttagatcttcctctcctctgggttttgatcttaatgcttaatccatctacaggtatggctgtgaaggatacatattacgcaatttggctgaactaggatttaaagagcctaccccaatccaaagacaggctattccaattctcctatcggtatggtcttattcactccttttccatttattacactggagtcacttaagagcaaagaaagaactcctttgtccagattattttgtgaattcttttatggggtatcagttctaatatttagttttatcatcttttttctttatcccagggtcgtgaatgctttgcctgtgctccgactgggtcaggaaaaacctttgcttttatttgtcccatgcttataaaactcaaggtattaaattgtgtttgcccttaagaccctccagatttcgccgatcctggttcttgactcatgtttatgagttttttctttgctgtattagcgcccttcaactgatggaataagagctgttatcctttctcctgctcgggaactggctgcccaaacagctagagaaggaaagaaacttattaaaggaagcaatttccacattagattgatgactaaaccccttgtcaaaacagctgacttctcaaagctgtggtgtgatgttctcatatcaacgccgatgcggttgaaaagagcaatcaaggctaaaaagattgacttaagcaagtaagtcaatatcatatgttagaatataaacattgtatttctatttgtgttgtgcccatattcatctttatctctgttgaatacagggtcgagtaccttgtccttgatgaatctgacaagctgtttgagcagagcttgttaaagcagatagattgtgtggttaaggcttgttcaaatccttcgatcatacgttcattgttcagtgctactttgcccgattctgttgaagaacttgcacgttccataatgcatgatgctgttcgtgttatcattggccgaaagtaagtatagaaaacatgatagtatgatactgaagcttattatagatacttcacaacatattttgaagcaaaatgatcttaccttttactattcaatatagaaacacagcatctgaatccgtcaagcaaaagctggtttttgctggaagtgaagaagggaaacttcttgctcttcgccaaagctttgcagaggtaagttcacttatcttaacagtatgatcaagttagtccaataccttttgtaattccttttctacttggcagtagagtctgaatccacaggtactgatctttgtacaaagcaaagaacgagcaaaagaactctatatgaactgaatgtaaaca

SEQ ID NO: 156705 - DNA, 1909 bp, Arabidopsis thaliana landsberg
gagcatatgtcttacagcatttttgagaaggatgagcattttagtgttgaagatcattatactgcaggaaactcttcaaatgaaagcaacacgagaccttctgacatctttctcaagaagaagctggtgggactaaaaccctccattctgcaactaaacagagaaaagaggaaagccactttgaagttttctggagataacaaggatattttacaatctactttgtctagctcaaagaacataaatcttagtggtggtttgtttgtctctagagaatatgagaacaagtatgtgaagtttggcgctagaatgcgttgtgatcttgtgaataggatgaaagatgttacgttggcttggcatgagtctgtgtcttctacaagtgataagaatgttgagctttctagtgttgagaatcataagatagctccaaaggctgatgggccagggaactcttcaaatgaaaactcctcaagtccttttgatatcttcctcaagaagaaggtgatgagactaaaaccctcctttctggaactgaacagagaaaaaaagaaagcagctaagggtttcagtggaattgttattagacctggaatggtacttctcaagaactacttgtcaatcaataatcaagtaagtactctctctcactatttctgtgtttatgtgtctatctgatcttatatgcatcatttgtgctttctctgtttcttaaaaatgcttgtaggtgatgattgtgaacaaatgtcgtcaacttggtttgggtgaaggaggcttctatcaacctggttttcaagatggcgggttattgcatttgaaaatgatgtgccttggcaaaaactgggactgtcaaacgcgtcgatatggagagattcgaccaattgatggttctgttccgcctcgaattcccgttgaattcagtcagcttgttgagaaagcaattaaagaatcaaagtccctagttgctacaaattcaaatgagacaaagggaggagatgaaataccacttttgttgcctgacatatgtgttgttaacttctacacatccaccgcgaaacttggtctccatcaggttagtgtttacgacaaaacaagttttgatttcttaaagtataaaggtggttacctcaatacagtatcgtaagaattgctcttcattgtattattgttcttttaagtttctgcatcatcaacttattgaatccttcatggctcaggacaaaggggagagcaaaaagtcccaccggaaaggattgcctattgtatcattttctattggagattcagccgaattcttgtatggtgatcagaaggatgttgacaaggcagacacgttaatcttggagtctggagatgttctaatattcggtgaaagatcaagaaatgtcttccatggcgtcagatcaattcgtaaggatactgcccccaaggctcttcttcaggaaacaaatcttcaaccaggtcgtctgaatttaacttttaggcagtactagagataggatcaaactcatgattgatgctgcagctctttcctttatatttatattttatgcactaaccacatcattgtgtcagacaagcattcaatatgtttatcatatgtacttttcaaaagatgagtgttgaattgaatccatgcttcagtccttgttcttctaacatggctgctggttgccacggttcttcagctgtctgattaagtctctgagactagatctgttggttttaggatcagagcatagatttaattctctcattctctgtcctaacatggtttctggttacgtcatcaatggttggacagccagaaagggccatagtaatctcaaactcatttttcagcatatcaatcacttttttcactccatcttcacccttagctgcaagcccatagactataggcctccctatc

SEQ ID NO: 156706 - DNA, 1432 bp, Arabidopsis thaliana landsberg
  unsure (1)..(1432): unsure at all n locations
cgtgctacatcactcgcagctcaaagagcatttgaatcagaagaaactttacctgagcttgaagaagcacttaccatttttctgaccatgtatccaaagtatcaatcttctgagaaagttgatgaattgagaaacgatgagtatttccacttatcattaccaaaggtatgtcttgactattgtggatttgggttgttctcgtatcttcaaactgttcattactgggacacttgcacttttagtttgtcggagattagtgccaatctaagcaatcatgctatatatggtggtgctgagaaaggatctattgaacatgatatcaagattaggataatggactacttgaacatccctgagaatgagtatggtcttgtgttcactgttagtagaggctctgcgttcaagttgcttgcagagtcttatccattccacactaacaagaagcttctgactatgtttgatcacgagagccaatcggttagttggatgggtcagtgtgcgaaggagaaaggtgcaaaggttggtagcgcctggtttaagtggcctacgcttaggctgtgttcaatggatcttaagaaggagattttgagtaagaagaagaggaagaaggattctgcaactggtttgtttgtgtttccagtacaatcaagggtcacggggtctaagtattcttaccagtggatggcattggctcagcaaaacaactggcatgtcttgcttgatgccggtgctttaggtccaaaagacatggactcgcttggattgtctttgtttcgaccggattttatcatcacttcgttttatcgtgtgtttgggtatgatccaactggatttggttgtctgttgattaagaaatctgtgattagctgcttgcagagtcaatctgggaaaacgagttcgggaattgtgaagataacacctgagtatcctctgtatctaagtgactccatggatggcttggaaggtttgactgggattcaagataatggcattgctattaatggagataataaagccttgggaactcaattacccgcattttccggtgcatatacttctgctcaggtgcaggatgtctttgagacagatatggnnnnnnnnnnnnnnnnnnnnnnnnataacacaagcgctgtgtttgaggaagctgagagtatctcagtgggtgaattgattaaaagtccggttttcagcgaagacgagtcatcagatagctccctctggattgatttgggtcagagtcctgctgattctgataatgcaggtcatctgaacaagcaaaagagctccgttactggttccaaaaaaccacaaacgaagaagctcgactaaaccagcttcaaaggctaataatggcagcaacggtgggaggcatgttctctctttcgatgctgctgatatgtcagtatcacatgaagtgggtgaagaagtcata

SEQ ID NO: 156707 - DNA, 1987 bp, Arabidopsis thaliana landsberg
  unsure (1)..(1987): unsure at all n locations
atgggccttgacgccgatccggtacacgcggctttgtagttttcctccgtgaaatctcaacccttagacctcatcgcaaaagtagttacgatgggccgcgacgcatcagaacacagtcatcgtctttgcagaatcgtaagcatattttacatgagaaattgcaattgcaatttgcatttgtctcatttttttactcaaacgaacattttcgtggctccagagctacactcaaaagccattcagcggaaggggttaggatttttggcggcgagatctctctggttctggtagcttagcaatggccttatcttctctcctcagatctgccgccacttccgccgcagctcctcgtgtcgagctttatccatcgtcatcgtacaatcattctcaggtattaaacgttttcgtttctcactcttgcgtttgtgttccatttaatatgttttagctcgcttggagttttggtagatactagatagtaggaggtgatgttttgtctttggttctggtttcaatttctcagtgtaaagtcaacttggtgtttctatagtatcgctatcttctctacttgagtcctcacatgtagttgaaatattgaattcctagtcgtttggcctgagttaactgatgagcatctgaatcgatgataggcagcattaaagtttcagtgagtttattatatgttttgtctcaaatgatcaggtcacgtcaagtcttggattcagtcatagcctgacctcgtctagattttctggtgctgcagtttcaaccgggtaatcttcaactttacagttatgtgacaaactctgtagtacatgtaaatcttttacgatgctttcttttggttctcaacaatgttttaatgttcaaatgtacagaaaatacaatgcgaagagggttcaacccatcaaggccacagctacggaagcacctcctgctgttcatagtaagaagacaaatttaattgatgttcttacttgtgtttgttgctgcattctgacagtaacttcgatttgattgacttgtatagggtcacggagcagtggaaagacaaaggttgggatcaacggtatgtgcttttattgattgatgccatttgtttgaagtcccagatcatcatttactttcttaagaattttcttttaggcccccaactttttccttttcttatggaagctcatttatttttgctgtgagtgctgcaggttttggtcggattggaaggttggtcctccgcattgcaacatcaagggatgatattgaggttgtagcagtgaatgacccattcattgatgccaagtacatggtaaggatgccttacaatctgagtcatgttcttgcttgcttgaacctggtatagtttgagaaaacattgaaaatgcatcatatgttagtcctctttttcactgaacaaatgtctggttttctatccccctattccacaggcttacatgttgaagtatgattctactcatggaaatttcaagggaagcatcaatgtcattgatgattctactttggagatcaatgggaagaaggtcaatgttgtcagcaagaggtatcacctaaaagtggcatgttatcttctatcgctctgagaacaggtgttttcactttagaacttaatcctcttaattcttcctcagagatccatctgagatcccatgggctgatcttggagctgattatgttgttgagtcttnnnnnnnnnnnnnnnnnnttggacaagcttcatcacatttgaaggtatgcactttcatttgaacacgcttgttgatctactagtttcattgatgctaacatttaataccaagccttatattattaataattccaaacattcaactcctaaaatggtctatgattttcttgaccttccattgtctgtgcaaggtggcgctcagaaggtcatcattattgcaccctcagcggacgcgcccatgtttgctgtggaagtaatgaaaagacatacctgcctaacatggat

SEQ ID NO: 156708 - DNA, 1740 bp, Arabidopsis thaliana landsberg
aagggacagtaaaattaatacagaaagagctttatattttgtgacaatcgcaagtttctcattgatggttttccacgaactgaggagaaccgtgttgcatttgagcgcatagtaagtagtgtagtatcttctcttacatgaatatactcttggaacaaagctttgaacatgaaataactccttgatactattgcagataagagcagaccctgatgtagtactgttcttcgattgccctgaagaagagatggtgaaacgcgtcttgaatcgtaatcaggtgcttatttcactgtactctttttcacagtactcttcctgtaatatttttcagttaacaatgccatgaaactgattccttgctgatgcagggccgaattgatgataatataactacaatgaaaaagcgtctgaaaatcttcaatgccttaaatcgtcctgttattgactactacaaaagtgaggttagctccacttactcgaatcatatgactccacatgtgaagtttttcaccactttggatagatcaaggaaatgtaaggttaaattcatatctggagataagagtgagaccacagtggcaatggtagaaggaattggagatgtgactttcattactaacgagggtaataagacgatcaagaatgtgcttcacgttccagggatcgagggaaacgcgttgagtgtttctcagttgaagaggaacggctttgaagtttctatggaaagaagaactggatgctttgtttgggatcggacgactgggaaaatgtttggtaaaaacatgtgggaaaagagaggcttttgcctgcgtttcagtgtgattgaaggtaattttcaatgcaagaagcgaaaatttacacatgattaatgttagaggcaggacagttagattattttactaaataagattggactgatggatggatttgcttcactttatttggttttcattttgtttctttgttcgaagtaagctaatgattgcataaatatggggtattgcagacttgcggtattggtttagtcccctagccgaagagggaaaatcgtttgaattactgcgtcttcctgatgtgatcatgtcattgcttatgttagccaaagtatgatcaatggcggattatcagatagttgaatgtattctacaattacccaactaggcaaacataaaatatacgaatccaactctgatttttaactatggatattcaaagtagattagtagattactgttaaacgtaacctaaaatcaatgtgaaagttgaatgattagtgcagccgtttttgggattttgttttgtgattaaccttttaatttattcaaggatgcatttaattagctatatattaaaggcaatttaactatattaaaaggcaatttgtaaaaaaaaaaaaaacgcatattatttgacgtaaaaacagaagctgagccgttttcaattatttccttttggtttgactatgcatatcgaattgccaaaccggattcgatctcccttaattaaacacacattctttaattgcatgaaaccggaccaaagatagatccaaaaccgagtctaaaatcaaatggtttacccctaaaccgatcacattgtgatttcaaattgtaaattactaatttagggtttaaggttaaggttaatgagactatataaatagaaaatgttcgggtcagcgaatcgaagaataaacctgttcaccttctccgagagaatatagagaaaaaggaagtttaa

SEQ ID NO: 156709 - DNA, 905 bp, Arabidopsis thaliana landsberg
aatgatcggcgactactattacggcgttaccagccaacgaaatatcaacgaatccgtgtcactcacaacttcatcctcagctataccctccaccgccacatggaaatcaaccacccagacctcgccgatgcttccgatttcgaaaaattccactcgctggagtatatcaacttcctcaaatccgtcacgccggaaaccgtaaccgatcctcatccttccgtctctgaaaacctcaagcgcttcaacgtagatgtggattgggacggtcctgtcttccataacctcttcgattattgtcgtgcttacgctggtggttctattagcgccgccgcgaaattgaaccgtcaagaagccgatattgccataaactgggccggtggtatgcaccatgtgaagaaagataaagcttctggctttggttatgtcaatgacgttgtgcttgcgattctcgagttactaaaatctttcaaggtacgtaactgtttatttgattttcaagattaagagttgattgttgaatctttgatgctttaataattttgattttggtagagagttctctacatagaaattggttttcctcatggtgatgaagtagaagaagcatttaaggatactgatagagtaatgactgtttctttccacaaagttggggacaccggagacataagtgactatggggaagggaaaggacaatactattcactcaatgcaccattaaaggatggtttgggtgattttagtcttcgtggtttgttcattcctgttatccacagagctatggaaatctatgagccagaagtaattgttcttcagtgtggtgctgattctttgctggtgatccgtttggtacattcaacttgtctataagggtcatggtgattgcttacagtacgtaagatctt

SEQ ID NO: 156710 - DNA, 992 bp, Arabidopsis thaliana landsberg; identical to SEQ ID NO: 49105

SEQ ID NO: 156711 - DNA, 2103 bp, Arabidopsis thaliana landsberg
ctctcgcgtcgtttcgtttccaaatgttagttttcttctattcattttttctttaaagttgttacacagatctcaaaactagatcgaattgtaagaaatcgaaatttattgtaatgtttaggtaggagaaaacccagttattgaatcgttgaattgaccccattcccgttttctgattacagcttgaagaaaggagataaaactgttgacggtatcgaagccaagtatatatctggtctcagtactataatgggtgctacaattcaagaaggcaaggatagaatttcttagagcgagaatataatttggaggcagtgaatatccaaaaattgaatccaaatccaaagggtttgaaaaaggttattgagaagctcgtcttgctggttgagaaacttggaaagatagagagaaaagtttggtagatcaaattgaagagcgtaagggagaagaataacagattaagtcagataaggagaagttagctgaagaacttggtaaaactgcttctatgcctcttagattgacgagtctacaaggctacatcgatcatttgaaaaagaagatgaagagtagatctaagatggttggtgatgcaagagatttgtattataggttagttgagttgttgcaggttaagggtttggatgagcttagcgaagatgggataaatatgattgtttcggaagtgaagagccttaagatgaagactgaatttcttcaggaggaactctcaaagaagacattggtgacggagaatctgctgaagaaactggagtacttgtctacagaagctgcagatggtgaaaggaagttgagcagcgttgaagaagaggatcaaagcttgaagcctaggttgcaggtttttgaggagaatgtcggtagacttgaagagatacttaggcaaaagaccgctgaggttgaggaaggaaacacagctcttgaggttttgcagggtaaactcaaattgaccgagagggaaatgttgaattgtaaacaaaagattgcagctcatgagaaagaaaagacagtggttatgggaaaagcaaagaatgatatgcagggcaggcacgtaagctacttggctgacttagaagctttacgttgccagagtgaagagaaatcatttgagttagctatggagataaagaaaaataaagaactctctcgtacttgcaaaaagtggaagtcccaacatacttttctctgcaaaaggtttaattttactcctgacagtgttcttcaccaaagcagccttgaggatgagaataaagaaattggtcagcatgagaaatcagcaatctcgagttgtaagtattagccgtctctgacctagactactttgaactacctctcgcgttaaattacttgctatagtcagtcatcctttagctgcaggtttcttattggtattagtaaactcacccagcttgattttttactctctctattacagatcttgaaaggaaacactcagaaactgctgaaggagcagacaaagtgagaattggtactggctcgagtggcaacaactatgagaaagagagtataatcaaaacagtgcagacacctatcacttccatctcaccaattgtgcggtcacctggtgctgcaaaacctccacagctaagcggattaaagcgtccagcttccatttggagagacacaagatctcgtcaatctcctggaggacatgatcctcatgatgattttctagatactcccattgagaatgtcaaaagggtcgctggggaagaaaaacatgttcatgatgttgctaagaaagatgattcagacgacgagacacaggacatgaatcctaaaccgagtccatcacgacagcgaattcaaattgcagaaacgagtaaaaagagtttcaagcatgtggagtcagtgaggaaaaaagccgagagggagaatttgaaaggtatagaatgtaaacaatgcaagaaattctatgatgctgttcatcctgagaatgaaggaaatggtaacaaaagcttgagatgtgaacatcatgaaggtgtgtcgaggcatcgttacagatacgctcctccaatgactcctgaagggttttggaacatcgggtttgaatccgaaatgtaa

SEQ ID NO: 156712 - DNA, 1019 bp, Arabidopsis thaliana landsberg
  unsure (1)..(1019): unsure at all n locations
gttctgaataaaggttttatcttttntgtaggtattttggtcatatagatatctcgataacttcagcggcgtttgttgttgcaatggcattgttgttacagagaggaaacccgcgtttttctcagctgagtagtacgatgtttggcctgttttactgtggatatcttccttgtttctgggttaagctacgttgtggtcttactgctccagttctaaacaccggcaagcactcccttattattatctttcctagctttgatccgtaaagtaatcaaagccaagtctcctgagcagtttaattacttataggaattgggagaagctggcctactatcctcggcggccaagcacattggacagttggacttgttgctatattgatttctttctgtggtataattgcctcagacacgtttgcttttcttggtggcaaggtatgtatcttttcagggcatgcatatagtctcgcaagaacttctcctggctgaagttaatcaactaatgttgcaggcatttggtagaactcctcttattagcattagtccaaagaagacatgggaaggagcttttgcaggacttgttggttgtatttccattaccattttactctccaaatcgttgtcctggcctcaatctcttgttaggtacttagagatttcatttcgttctatcgaaactcggtttttcgtgatctctctgtttctgaattagttcatttgttttctcagctcagtagcttttgggtttcttaacttctttgggtcagtctttggtgatcttaactgaatcaatgatcaagcgtgatgctggcgtcaaagactctggttcacttatcccaggacacggtaaagtcacccctaactaatccataaatcaacgccgttcttctcattcccgctacctctaacttccttctcatgcttgcaggtggaatattagatagagttgatagttacattttcaccggcgcattagcttattcattcatcaaaacatccctaaaactttacggagtttga

SEQ ID NO: 156713 - DNA, 712 bp, Arabidopsis thaliana landsberg
aaccacgtacaatggggtcccgtgggtttaggttttccctgaattgcatatccggatattaattcttatatcatggccaggtcctgaaaagaaagttcagtttgttattgtcggagagaaagcaaaggctataatgtttcgtgactcaaagaacgacattgtcctctctgtaacagagctgaataagaacccactcaattatgctcaggtagttcttagttgctaatagttaggagcaatagtttctctccccgatccatttgttctcgagctatttattgttgtctatagtgtttcttatgtttacttgctgcttcaggtgtcagttctagctgatgacatcctgaagaacgttgaatttgatgctttgcgcattgtctacaacaagttccattcagttgtcgcatttctgccaactgtgtccactgttttgtcacctgaggtaagtcataactgttgaacgtctcaatttgtgcttaatatttcacattctgctttaagtataaacttgattgtatatgtgtgtgttttgcattgaaagattattgagaaggagtctgaaattggaggaaaacttggcgagcttgactcatatgagattgaaggtggggaaacaaagggagaaatattgcagaatctggccgagttccaattctcttgtgtaagtaaccaagaaagtttaacttgatttatggtatttcagcatagagac

SEQ ID NO: 156714 - DNA, 733 bp, Arabidopsis thaliana landsberg
  unsure (1)..(733): unsure at all n locations
gagattgaacattgtagatcacataattgtgtggttgtngtattctctctttgtttgtattggattttttttttattcttgatttaggtttgttctcatatatagttcagatagtcagatatcgaattgatgtcaatgggattgcattggcacagatgaaattacccttatgtgcaatgctctttatatgatagttaccaaagattttgcttgttgtgcatatggtttaaaacttggtgtaaaaatgcagtgaaggaggattctttaacgggattatgacatttccgcaaaactatcggaatagtccgccaaccgtgaggtttacttcggatatgtggcatcctaacggttagttttctctctatcggttttgatcggggaaggattcaaaggaatatgaatagaagacagacgtttgaatggtttacttatatttgtcctgcagtttattctgatggtcgtgtttgcatatctattcttcatcctcccggtgatgatcctagcggttatgagcttgcaagcgagcgttggactcctgttcatacagtatgttcaaattgatttgagtttgttcatttttgttcgcttcatagtagtagattctatgattagagttactatagttcagacactatacagggatctctaggtgatttatttcatgtctcagatgttcatgccgtagtgaaacaaattatggtgctttcaggttcagagtattatggtaaggtca

SEQ ID NO: 156715 - DNA, 4001 bp, Arabidopsis thaliana landsberg; identical to SEQ ID NO: 26828
  unsure (1)..(4001): unsure at all n locations

SEQ ID NO: 156716 - DNA, 905 bp, Arabidopsis thaliana landsberg
tttttatataccagtacatttaatgagtgattatttggtaattaagaaagctggagagatagagacagagttcaagaagttgggaacagagaatgtgttaaaagagttcctcacatacaaaacccctggaccgctcaatctccccaaagacaaatatttcaaacgctcagaaaacgctgcgtctgcgttaccactgtggttaacacaagaagaccttgattattacgtcactaagtacgaaaacaaaggcttcaccggacccattaactactaccgcaacattgaccggtacgtttaatcaccacacggttcaatagtatcatcacataattttcatattttaaccaatcggttcgcagaaattgggagctgactgcaccatggaccggtgctaagatccgtgtaccggtgaagttcataatcggagatcaggatttgacgtacaattttccgggggctaaggaatacatcaacggtggcggtttcaagagagatgtaccattgttagacgaaaccgtcgtgctcaaaggattgggacatttcctacacgaagaaaaccctgacgtgatcaatcaacacattcacaacttctttcacaagttcctttaaaatcataaactaaggaatcgttaaataaaacaaaaataacattcgtgtgttttacaggttagtgaaaatcttatgtccaataaataccgggaaaatcggagtaaaccggatttaatcttgatcggaccgattaatatgaaattaagaattttcctccaaatttgggatttggatcatctcttcttcttctacgtcttcatcatcagtcatcactacgaatggatcatacgtttgatcatacttttgtgaaggttaatggaattagtatgtacgtcgccgagaaaagtacttccgtc

SEQ ID NO: 156717 - DNA, 2399 bp, Arabidopsis thaliana landsberg
  unsure (1)..(2399): unsure at all n locations
atgctgtcaaacggcaaaggtcgaaacaatgaatacccaagtggatggaagcctttcaccggtaggccgagaacactgagccgtcaacggcgaaacacacatagcacacgaaaatctcaaatataaccaactaatgtacattttaacatggaattatgaattatatgctaattaatgctttgttaaggatccatccatattccatagcttagcaaaaaaggatccacccacgattagcgttaaacttaaacttaaacatgtcttatagtaacactttaacagaaataagcaaacatcatataaaagagctagaacatagaaaattaatcaataatgaaggagaaggaaggtacgtggaattataatttaattaggaagcactactaatccacttcccgatgatatgtactgatcctggtcgtggtttaacagctaggtttggtcaaccaagccaatgtaataaggtttgatttgattatttttgttgatttttgatttgatttgatacctaactgaatccaaagtttagtagtttaccatccatgaggttacttggattaaacataatgttgactgtaaaccggtccggttcatgaaagaaagacttgatacgttaaaaccggagtcaccctgtatcggtcagaaggacccggaaatcaaatggttttgaatgtgacccgaaacaacccaaacccgacccggtccgaatttgtgaggaataggtgtgtaatttgtaaaaaggcgctcccaattttcttctccactacgaaaacggagactgagagcagcagcgacgagcttcatcggccgtcgtctccgacctcactcgcgatctccgattacaaaaattagatnnnnnnnnnnnnnnnnnnnnnnnnnnnntttcatcaacaaaaaaaaatcagttactggatttacgtttcgtttgcgtcacagatcagatctccatgatcccttatccgctttcgttgcggttccttaaacgttgatgcaacggtctaatgctcgnnnnnnnnnnnnnnnnnattcagatatggtagatcctcccgaggttcagacttcacctggcaaccaccgatcatcgccgtccaccgccgccaaacccaagtcgaaacgaacaaaatcgattatcttcgtaatcgtcgcttgtgtaactattgccttgggtttattattcattggctattcaattttacgctccggaaggaatcggagagtttcacttcactacagcgtcattatcgatggtgggagttcagggacccgagttcatgtgttcgggtaccggattgagtccggtaaaccggttttcgatttcggagagaaacattacgctaatctgaagttgactcctggtttgtcttcgtatgctgataatccggagggagcaagcgtgtcagtgacgaagcttgtggaattcgccaagcagaggattcccaagagaatgttcaggaggagtgacattaggttaatggcgactgctgggatgagattacttgaagtgcctgttcaagaacagattcttgaagttacaagaagagttcttagatcttcaggttttatgtttcgagacgaatgggctaatgttatctctggttagttgtttttttttcttgaatcaattcttcattttggataagttgggaaatgtaatcattgggaaatgattcaggatctgatgaaggtatatattcttggattactgccaattacgcacttggttcgcttggaactgatccgttggaaacaacggggattgttgaactaggcggtgcttctgcgcaggtttagtcttgtctctctcgttggatgctagagtactatgaccatgcatacatttacgctatatattgctggctttctctttttctctgtgtaaatgtaggtattttcccgtccaattttggcagaaaaaaatgatttgacttttttttttgatataattttcatcacaaattttgtaatttaagacgttttttgtcgcttgatgattcaagattgggtttaggttttttttaacaaatttgaaacgaacatttttgatgcaaaaattggtttgaaaaacgaacaattccggattaagaaactaacatcaaccgaactatactgcatctagatctgaatcttgatgttgactttagatgtacgtccggattaagaaactaacaacaacagaactatactacatttggatctgaatctagatgttgactttgtaacatatttttagacttcaactgtggtatatggtcgaattgttagtgatgactatttgtgcatatgtttaggtgacatttgtgtcaagtgagcatgtgcctcctgagtactcgcgtacgattgcctacggaaatatataaatacacaatctacagtcacagcttcctcgattatggaaggta

SEQ ID NO: 156718 - DNA, 202 bp, Arabidopsis thaliana landsberg
atgctaacaaggaatactttattgcggacaagactcgaagacaaacctttgggaggagctagcaaatcccaccgtaaattgtcgccgatagacttatctgaaccaaaaacaaacctttcatgaaaggatggaccaccacaaccgatacccagaccctctttttcccaacatgcatgaagagagacatcaaaacttaccttta

SEQ ID NO: 156719 - DNA, 527 bp, Arabidopsis thaliana landsberg
ttttaacttgctgctattcacaacaagaaaaatgaagtcttgtctagctacttttgctctcgcagtgttagtaacacaaggaagcatttttagtttgtgtttggcctcctctgcttctacaaactctgttcctaattggtttcatcattggccgccgtttaaatggggaccaaaatttccatattctccacctaaaccgccgccaatcgagaaatatcctccaccggtgcagtatccaccaccgatcaagaagtatccaccgccaccatacgagcatccaccggtgaagtatccaccaccgatcaagacttaccctcatccgccggtgaagtatccaccgcctccgtacaagacttaccctcatccgccgatcaaaacttatcctcctccgaaagaatgtcctcctccgcctgaacattacccttggcctccgaaaaagaaatatcctccaccggttgagtatccgtcgccgccatataagaaatatcctccggctgatccatagtaactcaaaaccaaacaaggac

SEQ ID NO: 156720 - DNA, 1432 bp, Arabidopsis thaliana landsberg
gggatgtgttacgatgcaagaatattagaacaatggaaggtcatcggctaagagttggagccttggcatggagctcatctgttctgtcttcaggtagtagagacaagagcatacttcagagagacattcgtactcaagaagatcatgtcagtaagcttaaaggtcacaaatccgaaatctgtggactcaaatggtcttcggacaatcgcgagctagcatcaggtggaaacgacaataaggtaaatatataatcatcattctgtgtctgaagttaacatgaattttcaagcatgtgtaatgattctaggatcttgcagctgtttgtatggaaccaacattcaacacaaccggttttgagattctgtgaacacgccgcagcagtgaaagccattgcgtggtctccacatcattttggacttcttgcttctggtggtggcactgctgatagatgtatccgtttctggaacacaacgacaaacactcatttaaattgcgtagataccaacagccaggtaaatccggttatgctaacttataaacatctgagatttcacattgtggttttatagctgcataatcttctttccacacgcaggtgtgtaatttggtatggtctaagaacgtgaatgagcttgtgagcacacacggatattcccagaaccaaatcatcgtctggaaatatccaaccatgtctaaagtaagaattctttgttcttatttcgtttttttttattggttgctgaattttgggattttgatgatcgaacctgttctgttatagttggcaactctcactggtcactcgtaccgcgttctgtaccttgcggtgtcaccgaatggacaggttactttttttctttttctcgttgctcattcttcagtcatcatcttatatttttgcctactttcttataacacttgcatcaacacacttttcttgtatttgttgcagacaattgtgacaggagcaggagatgaaaccttgagattctggaatgtcttcccttctccgaaatctcaggtaaagaacccgaagcatattcgcgatttctaatcttcaaatcctgtgaaaatgaacaatgtataacacacaacattctctttctctttttttctattctcagagcagggagagcgaaatcggggcattatcttttggtagaacaacaatccggtgacatcttgagtcttgacatgattttcgaaatcagggcgaggaagaagaagctaaactcagccagattagttggtcgtcctaaccaaacctccgagagattgtgtgaagtctaatgcaaagatgagaaagaataaattagtggcaacagatcaaacctaagttttatgagttttgtgtgatctgcgtttctttagattttcttcttagttagttgtacagattggattttaattgtaaatataatatcttctgaaa

SEQ ID NO: 156721 - DNA, 1520 bp, Arabidopsis thaliana landsberg
agtttctgtgtttttttcagggtaatgaagaattagccttggtccaaacacggtgggcttttgtgaacaaagacgaaaacttgcttacaagactccagaacataaatttgtctttccactttgaagttgaacagcaggtcaatggtgtttttattaacttctttggctttaatggaactgctggtgtttggagaatcaaagccctcgaggattgcgggggatggttggagcgaacaactgttgaggacatggatattgccgttcgtgcgcatctttgtggatggaagttcatttatctgaatgatgttaaggtacttatgttaactaaattgctcagaagtttcctgttatttaccagatgttagaaaacagaactttttgatctcatccatatgtattttccttcctcagtgtctctgtgaacttccggagtcctatgaggcatacaaaaaacagcaataccgctggcattcgggtccaatgcaattgttccgtttgtgcttctttgacattcttcggtcaaaggtgaaattgagaattatattgagattgttttcctcttgctcttccttgagaatattttatgtttatgaagttttcatattgatagctcggtctaatcttaatcttgcatttttttctctactacaggtgagtgctgccaagaaagcaaatatgatatttctcttcttcttgctacggaagcttatcttgccattctactcattcacgctcttctgcgtcattcttccattaacgatgttctcccagaagctaacttaccatcttgggttgtttgctataccctgggatcatgtccatcttaaacatcatcccagccccaagatccttcccttcatagttccgtatctccttttcgaaaacaccatgtcagttaccaaatttggagccatgatctctggtttgttcaagtttgatagttcttacgagtgggtagtcaccaaaaagctagggagatcctctgaggcggatctggttgcatacgcagagtccggctctttggttgagtccacaaccatccaacgatcatcctctgattcaggtctgaccgagcttagcaaactaggagcagcaaagaaagctggcaaaaccaaaagaaaccgtctgtacagaacggaaatcgcactcgcgtttatcctcttggcagcctcggtgagaagcttgttgtctgcgcaagggatccatttctatttcctcttgtttcaaggaatcacgttcgttattgtcggtctagatttgatcggggaacaggtcagttagtttatataaccctttttctcagtttaaaactacattgaaccataccacctgaagaacgaacaagacccaaagatcaagtcaggaaggaacgaaccaactcactcgcaggtcttttcgttacagatagatacataaaaacaattcatttaaagtttctgtcatgggaacatgattttatactcaacttaagatggtttagattcttcctttttttacgaatagtattagagaatggcaga

SEQ ID NO: 156722 - DNA, 959 bp, Arabidopsis thaliana landsberg
ctctctgctgtggagaagaaggttttcaatgagttgattccactgctttcacatgaatcagacggactaatatttcaaggttgggacaatccttatgttttcggacccaacaaagatctactgaagtggaagtttgtggaaacacttgattttctgtttgatatggacaagtatggacgtcaaatgctcttcttgcaagaacgtgggaggatgaagcttatggaaggctttgccgttgagtttagaggtgatggttgggacaatgacctggctagttactgtggaaagattgtggagtgttcatgggataaggagaagaaagtatgggttagtttgcggattagagttgataaatcgaaaccgaatggtatccggaccggtcgtagcgtgataaagtgcatagaagatgacttaacgaaagaggttttgctgaaggagatcaaagagattatccttctacagatgtacgttgagcgcatcgaaaatgatacaaaagaagctgcacgtcgcaagcatggaaaccgtaaaggctaaggagtgatacagttatttggttttggtatctaacagtaatcaaaattctctttggtttaaactttaaagaaagttatttgaatttagagttcgatatttccgactatctactactgctaagtcgtttgcgtcttgtgggccagaacatcgtttacttgcgatcaagtcttcaagattcttaacgcggaagagatgagctgaagtttgtccggggctttttgcttgtattctttctctactgcagctgcagccagggaatgaagctctggggctgccgtagcgtctttgtcctctttgttcctgccttttgagagctgtgcaatggccgatgcacactgaaggaggaaagcggattttggcggttatctatcagttgcaaatagagaagatctatgaaaattgccatagtagacgagaaagagact

SEQ ID NO: 156723 - DNA, 963 bp, Arabidopsis thaliana landsberg
  unsure (1)..(963): unsure at all n locations
gcaccagtaactgaggagctggttttccgatcatgtatgatacctttgcttctgtgtgctgggtttaggattaacactgccatctttctgtgcccagttctctttagcttgggtttgtttctttctctctctctctctctgtgaataacagtttacaactcgagtgaaaagaaaattactggatttgtctgacttttatatgttttgtgtagctcacttaaaccattttagagagatgtacatcaggcacaaccgcagctatctccgggcttcacttattgttggtatgtctttgccatccataatcataataatattgtttgttgatcagtcctgagcttcacttgtccgttgatcaggtcttcagcttggctacacagtcatttttggtgcatatgcatcgtttctcttcatcagaaccggtaacattccagtcatttatatatcttatacatgtaaaagcctttctaatggatgattgtctcctgcattgtgtaaattttacaggacatcttgctgctcctttgtttgctcatatattttgcaactacatgggattgcctgtgctatacgcaaatggaaaaggtaagacagaaagttcaaggttgttaacaaatgcaaatgctaaagaataagctaaacatggttatggttcttctctcaggtttggtgagtgcagcgttcttaggcggtgtggttgggttcgtcttacttctctttcctttaacaaagcctctcatgtacaacgatagtnnnnnnnnnnnnnnnnnttggcttggctattgtttgtggaattgacacttctccaagtttttttttatatatcatcatgtcttagaatctattttttgacacaatattggaattatggtcttttactgcaagctaatgtttcttgatagtttatgtagttttttccttgtaaatatataataataataataattggttcaagtctccaaa

SEQ ID NO: 156724 - DNA, 1212 bp, Arabidopsis thaliana landsberg
ggggattttggttggagttttagtaatcgtggtcttgatagctacatatttcttccggaacaagcaatctgcgtcatctgaaagagcattaatcgcgaatcgcttgctttgcgagctagccggaaactcaagtgttcctttctacacctacaaagagattgagaaagctaccgatagtttctccgacaagaacatgctcggaaccggagcatacggaacagtctacgcaggcgaattcccaaacagctcatgcgtcgctataaaacgtctcaaacacaaagacactacaagcattgaccaagttgtgaacgagatcaagcttctttcctctgtgagccacccaaatctagtacgtctcttaggttgttgctttgcagatggagaaccgtttctagtctatgagttcatgccaaacggaactctttatcagcatttacaacacgagagaggccaaccaccactttcttggcagctccgactcgccattgcgtgtcaaaccgcaaacgcaatcgcacatctccactcttcagtaaaccctcctatctaccaccgagacataaaatctagtaacatcctccttgaccacgaattcaactccaagatatctgatttcggactctctaggctcggcatgtctaccgatttcgaagcctctcatatctccacggctccacaaggcactccaggatacttagatcctcaatatcaccaagattttcagctctcggacaagagtgatgtctatagctttggagttgttctcgtagaaatcatctcaggctttaaagtcatagacttcactcgtccctactctgaagtgaacctagcctctcttgccgtcgacaggatcggaagagggcgtgtggtagatatcatcgatccctgcttaaacaaagaaatcaatccgaaaatgtttgcatctatccacaacttagcagaattggcgtttcgctgcttatcctttcacagaaacatgaggcctacaatggtagaaattacggaagatctccaccggattaagcttatgcactatggtacagagtcaggtaagttcaaaaaccgatccgaaatagatatgaagagacaacaatcatttccgagagaatgaaaagtaaacacttggcagaaattatgtatagtttagtattcaagtttttttattcgaattttaagctctatatacatagaggtaaaactctgtcttttggtttt

SEQ ID NO: 156725 - DNA, 4986 bp, Arabidopsis thaliana landsberg
  unsure (1)..(4986): unsure at all n locations
aaatagatatacttactttcttacgaaaatgtggtagcctataattttaaaaaataaaattgtggctttgggcatttgccctttcggccaaaggtttgtcacgggtataagctggacctatttgaccactggactttcgactcaccactcagcaatgcgtgaaaatgtggcatcccctctcatggcgtaaggactagcgatacgagcggtcatcactgccactttggaagcagaattgagagatttcctgattgaatctgattgttaataattagtgcaagtaatcaatgccggaattctcttatctaagatccatgacatcatttcggacctatgaattagctcgaaaacttttgagtttttgtctcttgttttattccaagggaagctactcaccataacttattgtgtgatcgaagttcaagaacttaagagctttaaattgggtatccactatgcaaaagtctttcattccatttcagttaatggtacgaattttaagattaaactacatacttgttccattttaatcatacttgttcaatgtattgaatttaatccttgcgtttattttcgttacgagcgagtctaacaactaacaacaaccaaacttaacaagattcaggaacagagggatcagaggtccagaacaaatagaagactgccacttcacatgttatcaaacaagacagtgccactacggttaatatcagtctgctccagaagaaactcaaaacctgaaacaaacaggtataacaaagagctcgaattaatcacttgagttcatcctccacgcatatgggcaccgagttcaccaaactgatcatccgcttctacggtgtcatctgagagacggactgcatcaagcttctgcttcagaagatcaatggcatttagtaccagttgnnnnnnnnnnnnnnnnnnnnnnnnntcaacagtgaatataaaactgtcatctttcggatggatctcaatgagtcccggtttccccattgtttcagctttcttgatcacttcttaatcgtaagtgtatgcttcaggatcaacctccacaacctaagaagcatagtatgataaatacagttgtgatgattcgaacaatagtatgcaaaagaaatgagctaaacgcactaaacacttaaagatatttcattcgccacatcacatacatatatttctaagcatggtagcctataaagtagtacaatcatattgaagtctcccaaatataaacttgtatagatgttattcttacagaacttcgaatttaacctgtccggtgactgggtcaaggccaaagactttggtaggactgctctcaatcaagtcgattttttcctcatctgtcaaagtgttcatcatctcttcattgataataatgtcaggctcatacatatacgtaacagtagctgcaggagaccatttcgcatgatctttcccaattcctttcctcgctaatgctttaagcttcaactcttgtcccctgcgtagtttcgcaatgataattcccctgaaaccaaaacaataacagtctaagaaactgcagaaaaaaaagccacagaactaccaaaaggaagactcatgcaaagggcatctaaagatgtcaaattttgtttagcattgtgtaatatctaagcttagcaattccaatcaattcataaagaacaaataatcactacaatgatgaaaagggacttacttgtgctcgcttgaatcagatacagacgagtcaatagtgaaatccacaggagtaacagtaggatcagcactgtacaaatccctactagtaacatctagggtttgatcagtaacacacttagaactaagccgaaactcaacagagcaaaactcgcattgtccatctccatcacaagcatcacaatctcgagagaaacgcatgctcatagcacgttcgctagtgagaggaatgagacctaatcgatgagcaatgaactcgtcgttgagtacagatgaattaacctcgatttcgactagatctattgcgacggtagggacttcggagatcattacgcgacggagagcgttggccatagaaacgtcggtttcacgaagctcgaacttggcgtaatcatctttaagctcacggatcttgatctttgggaatctttggtatgtggcaccgtccatttcaaaagctaatcggtggtttctgacgactctctggacctttattagggttttagggataatgaattttcaatttcttcgccggagaaggagataggagaagaaatcagaataaagcaaaagtgagaaagatataaatattagagtaatgtttaaagttgggcctatatgggcctttttaattcttttggcgaaaagtaatgtcaccaaatttcaaacaggcccatataagcccaactcaaatgtttttttttatacctctttcttttttttttcttttttttttgtcaaacgtacacctctttatttaagttcttttttcatagattcttttatcgtactcaacaactctacgagatctcatagtatttagtgatattatagtcatatatttgggaggaaaacaccatgtatcaaaaaatttgaaatgatctcatagtaccattaaccattacaatccaactcattttactcatcaaaccaattgactcatcaactcatttgacccatcaactcatttgagtcaaaatttttaactcaatgggttgagttgagtttagttgacccatgaattttgatccattttgacatccttacttgacatgttggctcttattaaattgactacgtttctattggttaaaaaatcacaaattattacacttttacaaagactcgaatctgaaaaattaaataatctgtctgtaagagtggctgaagcttacacatccttatgtgagaagcagcaaaaaactctggaaacagcttcctctcaagcaattgcagaagaaactcaagctcatactcattggaactctttggcagatttggaggaaggttatttgaagcaaaaatctaagttgcattggttagatgttggggacaagaacaacaagtatttccacaatagtgtaaaggccagagtagccatgaactcaatccgtgaaattcagtgtacagatggtagagtgtgcacgagtcatgatgatatcaaggaggaagcagtgcggttttttaaatccttcctacaggctaagccagaggatttcgagggttcaagtgtcgctgaaatccaaaatatattaacctatcgaagctccaccgtggatcatgaaaaactaatgagagaagtcactgaggatgaaatcaagaaggtgttattctctatgccgcagcataaatctccgggtccagatggctatatagttgaatttttcaagactgcgtggccggttttgggaagagacttggttatagctattcagtctttcttcttgaaggggttcttgccaaaaggaataaacaccacgattctagctttaatatccaagaagcatgaagtgagtggaatgaaagattatcgccctatttcttgctgcaacgttttatacaagatagtctcaaagcttatggctaaccggctcaaagaaattctccctgcatctattgcaccaaaccaatctgctttcattaaagaccgcttgatgatggagaatctgttgttagcttctgaactagtaaaagactaccataaggaatcaatctctagtaggagtgctcttaagattgatatatcgaaagcttttgactttgtgcagtggccttttctgatcaacgttctcaaggctattcacttaccggaaatgtttattcattggattgagctttgcattggtactgcttctttttcggtacaagtaaatggggaactttcaggatttttccgtagtgaaaggggtcttcgacagggctgttctttatcaccgtatctctacgtcatctgtatgaatgtcctctcttgtatgcttgataaggctgctgtggaaaaaaagattagctatcatccccgttgtcgtaacatgaatctcacacatttgtgtttcgctgatgatataatggtgttctcagatggtacttctaaatccatacagggaactcttgcaatttttgagaagtttgctgccatgtcagggttaaagattagtctagagaaatcaacaatcttcatggcagggatatctcctaatgccaaaacttcaattcttcaacaatttccctttgagttaggtaccttaccggttaaatatctcggtttgccattactcaccaagagaatgacgcagtcggattatctccctctcatggagaagataagagcacgaataacctcctggaccaaccggtttttgtcttttgcgggtagattacaattgatcaagtcagttctatctagtattacaaacttttggctctctgtttttcggttaccaaaagcttgtcttcaggagatagagaagatgttttcagcttttctgtggtctgggccagatctaaatactaagaaagcaaaaattgcttggtcggaggtgtgtaagctgaaggaggaaggaggcttgggactaaagccactaaaggaggcgaatgaagttagtttgctgaaactcatttggagaatattgtcggctagagactctctgtgggtaaaatgggttaacaaacatttgatacgcagagaaacgttttggtctgtcaaggagaacacggggttaggttcctggctgtggagaaaaattctaaaacagagagataaagctcgtttgtttcaccgaatggaggtccgttcaggaactttcacttcgttttggcatgatcattggtgtccgcttggtagactgcatcaacacatggggtctcggggaacaatagatttgggaattccaaataatgcgaaagttgctgaggtgatgaatactcatagaagaaagcgtcacaaaacagattttctaaatcaaattgagagccaaattgagctggctagacaagatagaagcacagatg

SEQ ID NO: 156726 - DNA, 578 bp, Arabidopsis thaliana landsberg
  unsure (1)..(578): unsure at all n locations
aaaacaaaaccaactcagacgaatgtgattttttcttcttgagtgaattgttgtaaaaaaatgatgatcggagaatctcatcgtggttttaatccaacggttcatattcctccatggccactttctgaagatctaacggtgtctgatatttacggaagtccagacggaggaagtagtatgatggnnnnnnnnnnnnnnnnnnnnnnntatcttccgtcaaacgaaccggatccggattcagatccggatctctcgggtccggattcaccaatcgatgcttatacatgcgatcattttcggatgtatgagtttaaagtgagacgttgtgctcgtggccggagccatgattggacggagtgtccttacgctcatcccggagaaaaagctcgccgtcgtgatccgaggaagtttcattactccggtacggcgtgtcctgagtttcgtaaaggttgttgcaagagaggagactcttgtgagttttctcatggtgtttttgagtgttggcttcatccagctcgttaccgtactcagccgtgtaaagacggtggtaactgtctccggaaaatttgtttctttgc

SEQ ID NO: 156727 - DNA, 317 bp, Arabidopsis thaliana landsberg
gttacgttcttacacttctccctgatgtctttgtgttcttacatatttttctgtttcatctagaaatttttattaccgttcgatggtgaagttgacaaagagaataggagggcttgtgctgcgattggcagcgtttggtgcggctcttgccgcattgatcgttatgatcactagccgcgagagagcttccttcttagccatcttccttgaagctaagtacaccgatatggcagcgtttaagtatgtacaaaatttcttcttattttcttggtgagtcattggctgtaaattatacatctatgagttatgtgaatatg

SEQ ID NO: 156728 - DNA, 694 bp, Arabidopsis thaliana landsberg; identical to SEQ ID NO: 39202
  unsure (1)..(694): unsure at all n locations

SEQ ID NO: 156729 - DNA, 937 bp, Arabidopsis thaliana landsberg; identical to SEQ ID NO: 32685

SEQ ID NO: 156730 - DNA, 310 bp, Arabidopsis thaliana landsberg
tcaggtcttcctttgcttcggaaactctgtggcctctacccgctttcttctgcaggatgaattcaacatccagacaacacaatgcgacaattgcataattgtactctcatactctctttttcttcaacttttattggttttacacatgtgtgaaactaacaaatctcatcttgtgtgtttgaagggatttatgttctgcctcagccaagttgcttgcatattctctatagttgcttgcattgttggtagtgatgaactttccgaggcttctcagatactctcttgctgtgctgatatgctctactgcccg

SEQ ID NO: 156731 - DNA, 1293 bp, Arabidopsis thaliana landsberg
agctgtaccccagggtgatgaaacccatgtatcaactcgagttatgggtacttatggctatgctgccccagaatatgtgatgactggtatgacctgcataatatagcgagatgtatcccattcaacttattttcttagatgcatacacaatcttgacgagctatcctgcaatgtcttttttcacgggagcgatgatcaattattgatttaggtcctaccgtttaaatcactttagttaactgaatgtgggtctctatttctcctgcaattcagtgccacatacagaaaataagatattgcaggagctaattctatctctctgctttagtagtttgctattagttaacatataggactgtggctgttgagaatgttgagccgtgcacatatatgcacttgttttcacaacatcatttcgagctacatagtctctctttttgcatgacaataagtgcttagaccattacacaaataaacactaacttgactctaatactaatgcactaggacacttgacggccagaagtgatgtatacagctttggagttgttcttctagagatgttgacaggaagaaaatcagtggataagacaagacctagcaaagagcagaacttggttgattgggctcggccaaagctgaatgataaaagaaaactgctgcagataattgacccaagactggagaaccaatactctgtcagggcagctcagaaggcatgcagcttggcgtattattgtcttagccaaaacaaaaaagctaggccattgatgagcgatgtggttgagactttggaacctttgcagtgtactggtgatgccctgatcccttgtgcaactactgcagctggagctgcatttgcaatgggaggggtgcctgattacagaatgcaccggaggtttgcaaagaacgttgggccaggtgcaatttgccggtcacccaatccaaattattcaccgggtggacctgcagcatgcagagttcggtgattagtgtcaagtgtatataatccgtttcgctgtgtctccttttccgtaatttctctcagagccaaacatctggttgctaaaaatcgtggatgcacgttgtttttgttgttgttgatgctgctgtttattgccactttactgtgttgatctgtctagagtcttgtatgattatgaatgagtgtggttcttgtttaatccgcactctgatgcagtatgcttgtagtagtcgacacttattcactccaaggtgaattttttttgtgtaagcagatatggttttctaacaagtggacattctccagcc

SEQ ID NO: 156732 - DNA, 2048 bp, Arabidopsis thaliana landsberg
atggtgttgatcgacactctcattttcaaggtaagtcgatttaacctaaacttcatcttcttcatttcagtttttattcaaaccgccgaaatcactcttttctctctagattgttcaccggttcttgtgattttaggctctaatctcattagaatttcatcctctttcgtccccaagtatctatttcatcgatctgcaacatgactgggcagaaaaagaaggcaaggaagagcgttcctccaccttcctcctccgccgctgctcaccaccgccggaccttctccaccgccgccggtctccgcccttcccaaccgcaactacctgctgcagcgcctcaacctcttatctattgatttccatggccaaagctactaacagaaagaattctttctcaaagagtttgggagaaggatgtcaacaaagaattcactaaaggtgactatatcaatcgccctttttctccagattgggattattatgatacttttttctataatgcctagatgagtgtagaaattttgcctactcggtttgcggattttggtttaatgcagcgtttgcagatagagaaatctgttttaggactgctagatgacataggtttgggaaccatctcttgtaggcagtacgatttgtatcctgacctagttagataattcatggcttctgttagggtctactatgtgaatgaaaagaaacgcaatgctcaggaaggagctctaatcttcttcatccgcggtgtcagatacagtctaccactcagagcattatgcgacatttatggctttgacattgatctcactggagtttcactgcctggacagtttaaggatgctcaggttttctagagcaggtttggtaatggaatttatgattccaaggacgcagtacactcagtgattcgtcaccctgttttgcgatatttggttacgctgatcaacagcacactcttatgcaagatggagcctggcaagatgagactttctgaggtgttgttactttatcatgctattccaaatagcctcggatttgaggaggttaaccgtgatgtcaactttggcgttgtctttgctcatcactggtttctctcaagaacaagccctttacgggtaaaaggaaaaactctaagatagttggcagtcttctcactcctatatttcagcattttagcatcagctttgaaggagagaaggtcaacaccatgagattcaatatggatgagacttatttgaagaactctcactggcttaaaggcaacttactgtggtgcttcaaagatgatacatggcagcacatgattcagttacctcgccctgcacatacaaagattacaggagagcatgaggagataggctttcatcccgatccttctcttctgcatgccgcaccacgcaccaggcgacagagaggttcagcttcaagatctgcgcctacacagaccgaggacgagttcattgaccctggtgggggtccgagagttggatcttcctcgtctgctcttccatatcaggtgccttctcctccaccaatcccgatggagccacacgtatttccgcagtacgtcgttgacagtttcaagagcgtctggaacgccatagctacactcactcatcatcgtcgtcgctctcccgcacccacctccagctcagaacatgaggactagccatcctccttatcttgctttgtttttgctttatttcagactattggttatttgttttgaaacttgttgcacttattttcctatgctttgttggaactatggatgtgtgttttagtgatttaacagtctaactggaggatccatgtgaaaacactaaccaaggctctacaacaatgagcagaattcacaaagctaaacgaaacgaccagagtgtcgatcgacaccaacatggtatcgatcgacaccacgctcaggtggcaactcatgtttctctaaattctaactttttttcgttcgattcctctagcttaataactccggggacagtgttatctaagtctgggggagtcagttactaacttcatcttttcttttcttatgagtc

SEQ ID NO: 156733 - DNA, 4051 bp, Arabidopsis thaliana landsberg
ttattctgttaacatccacataaaaattttgaataattttagcggaagatgcgttagcggtgtcttgatcaactcatatcaaattattgtttaggtatatttcaccttgtgaagcagcatggcaaatttttggttttgacttacatcacagcagcacttcggtacaaagattaagcattcatctacctggagagcaaaaaataatttatgacgatgatgaagacgtgttgaacaaagaagaaaaccaaacatcgcaattcttggagtttttgaaaacaaacaaaaaaattgccgaagatcctgaggcgagaaaatttacttacattgaattcccttcgcattttgtgtggaaaaagaaacaaatggagtggactctccgtcaaagaagtgtatcagttggaagggtatatcatgttaccccatcagctggtcaacggttctacttgaggatcctattaaacaaagtaaagggacctacatgttatgaagatataaaaacagttggagggattctgtacccaacatttaaagatgcatgttatgctttaagtctccttgaagatgaccaagaatacatcgatacaataatagaagcaagtcaatggggatctggccgttacatgagaaggttatttgcccagcttctaacgtctgaaagtttgtcaacaccttatcatgtttggttaaatacgtggaatcagctctcagatgatgtactatctatgcaaaggaaaatattgcaaaggccaggtacactataaaacaaaattttttttctttatatatatttatttataaaacaaattaatttagttttacaattgataaacaaaccaaatactgagaattctttttaaaatttgcaaaaaggaatacgatgtataagatgacagaagaaacacttggttaaattatacgaccaaatggttcttggtcgtaacgaaatatatattgttcctcttaacgtatatatataacattaaacacactaaagtctaaaataatcgttacgatctatttaaagctccaaaaaaccatgaattatatacgtaaatatttaacatgcatgaatgtgataatgatatagaaacaatatatttagaaaatacgttgaatgtgataatgacttaaggtcaattgctcgccaaatttctcaattccttctaaaaatgaaactgatagttttttaaaaatttgcaggccatgaaatgacaaatgagcaaattcaaaatcaagctttgttggaaattgaaaagttgttacgtaacagtggaagtactctgcgtaattacgaatccatgccatatccagaaaacaacaatttccctgcagcaatgaatacgttgatacaagatgagttgtgctacgatcgacatgcttgtgcccaagaccatctacgtttgttttccaagttaacagttgaacagaggaaaatatacgaccaaatcatcgaagcggtctattcaaactctggtggtgttttctttgttaacggatttggtggcactggtaaaacatatttgtggaaaacattgtctacgtacattcgttcaagaggagaaattgttttaaatgtagcatcaagcggaatgacagcactactgctggatggcggacgaacagcgcattcccggtttgcaataccactacaggtgaacgaaacttccacttgctcgatttcacctgatagtgaccttgcttctttgttactccgagcaaagttgattatatgggatgaagctccaatgttgcatagacattgttatgaagctcttgatcgtactctgaaagatatagtacaagccgacaaccacaaaccttttggtggaaaaactattacatttggtggagactttcgccaaatactaccagttataaccaaagggagtcgagaacaaataattcatgcgtctctcacttcttcgcgtttgtggaattcttgcaaagttctcacattgaccaagaacatgcggctaactgttgaggcagaccctacagaaaaagacaacatcaaagagttttctgattggattcttaagctaggagatggaaagctttcagaacctaataatggcgaagaagctatagatatacccgaagacatgcttcttcttgactcacttcaccccattgactctattgctaattgcgtctatccaaatctacttcaaaatcttaatgatcaaactttcttcagggagcgtgcaatactttgtccaacaaacgatgatgttagtgaggtgaataatcacatcatggatcttcttcccggagaggttaaggaacggatgtgacatttcggaagggtgcaaggaacggatgtgacctttcggaagggtgcaaggaacggatgtgacctttcgggaagcatccattcgccccctatataagggaggacgcccaaggaatctcacatcatctcacaacatccaaaacaccataaaacattcttaaaggagtcccaacacatcctagagttgttggtcggaaagggggtgcggctcggcgagtataactcgaccgaactgatgcgcatgctacctcccggtccaacggttcgatggagtgtagaggatggagagggtagaccgttcgtcttagagacgaatcggatctggtagaccgatccttggatcggatcggccagaccgatcgtcagacggatcggatcggccagacggatcggacagaccgatcgtcggacgggtcggatgggacaggccgatcgtctgacggaacgggtcggacagaccgatcgtcggatgggatggatcgagaaaagtgttcgaggaagcacaaggataagtgcatccgaacacacccaagggtcgcccatggatgcaatcttaccgataaagggagaaagcaccaagaatgggtaaggaacgtgattcaccatataggatcaacatcgtggccgccttcatgtatctatctcttcagccatggtgaaaccgattagagatcggtaagaccaaagggtgactcgacggataaccaacaggaaagtccacggtgggaaccgatggacaaaacggatgttggacccgcgagcaaacctaaggccgacggaagaaagatttcatgggctagcctacgatgatccagtggatgaatccacggacccttgggtgtgataaggatatcgttcggaccgcatggatggatcattaagccgaaagctttatcgaccaccatggaccggacgggtaaacggttagtaaaccgtgggcggtcgtagtgttaaacgaccggaacggaaacatggatggttcgataagccgagggctcaatcgtccaccatgtagccggaggggcgtacgtttggagaacgaatggaccaataagccaagagcttgattcggccatcgtgaaccaagggaatcgtacgatccccaatctctatcgttgtacttagaccagtggggttggttggttgtatggctaagtaacgatagggattggttcatcaattcacgaccgatgacgagtcgttgaacgaatggagtaaggcgacaaacgggctaaggaatcaaatccgcatattgaccaaggtatgtaacgatctagcttattagttaagatagacgtttggtaattgaccgtgaaagtaggataaaggaatatgcgattgtttggcttagaatggttagcgaacatatgcatgtcttgaccgagtaaaggatcgatctaagtctaaggaacaaagacgatgaaaccggtacaagaattggttagaattaaaccaaggttagaaagacttccgctgtgtaataagagagcgattatagaatttagcctcgtaaaggcaattctatgttgaatcgcgaaaaattaagaggttcggccgggaagagacgcaaacttgagtacaacgttgccggacgccgagacgtccgggaaggggtctcacaataaatcatcaagcagatgatttgtaattcgattcatgatcatatgatccccaaccataccgatcttcgacacaagggtttgcgaaaaagtataactcgtaaccgcgttcacacgccattcgagagctttcaaaatt

SEQ ID NO: 156734 - DNA, 661 bp, Arabidopsis thaliana landsberg
gagtacttcttatcatgttactatatcctgacttacatttcaggatgaatctattgttgttgttgtgtttctttacatcatacttactttattttttgttgttgttgattgagtaagggaatgatgtgggaacgtagtatcgataaggcatacacagacgagagaacgagcggatagccgctagttaaaaccgttgagaaacaacagaagatcttgaacaataagattgtaacagagatacttcccgctataaaattctaccgagcagaaaattaccaccagcaattctctggcaaaagggggtcgcatgggtttaagacaatcagctgagaaaggttgcaaggatccaatccgatgctatggctaagaaactaagtcagtcttccctcaagcacataaaaagaagtgagttgtctcatgaaaaatacaataatctgtagatcacatttgtttcttgtctttgttatgtaaccaatggttatgatgcatcctatgcttatatgatttaaggctttgtccaaatcaatttcaatttgatactacagtactggtaatacaatttgggaagttctcaacaatttcgggttttcttttgatttatgagttttgacaattcaacgttatgaatgattgagcaatggtcgaaacatcatttggatcc

SEQ ID NO: 156735 - DNA, 1164 bp, Arabidopsis thaliana landsberg
agatgctttctttgttctattttacatgctatacataaaactgtgtttgatgtatccttcaactttaacgcaatatcttatcggcttgctaattgcagctacctacattacgggttactggctgctcgggctgagattttgaaagtttctgaggactctaacaacccctgtatcgcgactggatatgctggtaagtaaaagctagaattgtggaacacgttggctatattctgaagttctagtacatattagaatgcacgttctgtttcctttaaatcgagtgattcgattcaggtacctacaaatatggaggaaaagcgtttaaagctgcagcttctccatccggtgcaagtctagatgagtgccggcgagtagctattaacgcactcaaagtcaataattcattgtgtacacacatgaaatgcacttttggtggagtatggaatggtggaggcggtggtggccagaagaaaatgtttgttgcatcatttttcttcgatcgagccgcagaggtaatatttgcatcacgttttatgtgacttcaccaaacacttacagaacatcattactcgcccactagtctttgagccatcactgacaataacatcaacgataatgacaggctggttttgttgacccaaaccaacctgtggctgaggttcgaccacttgactttgagaaagcggccaacaaagcttgtaacatgagaatggaagaagggaaatcgaagttcccacgtgtgaggaagataatcttccttacttgtgcttggatcttgtttaccaatatactcttctcgtcgatggattcggtatgttactctttcctatttttttccaactcactaatcaaaatctcagtttacatatatttctccgttggatgaccatgatgatggtaagtatacatgatggacatgcacataggaggaactggattgtgttagaattctgatagtgtagtgatgtatcattgtcattgaaagccatattgaaaatatgttagaaaccagatagagaactccttcctacttgaaaccttgcattgttcaagatgtattttgattttccaaattaaaaatctgtttaatctaaattttaattccataatatgcagatggatagccatcacagtcaataacgttagtgaagaaggtgaaatacg

SEQ ID NO: 156736 - DNA, 1158 bp, Arabidopsis thaliana landsberg
  unsure (1)..(1158): unsure at all n locations
ccttctatcttcttctccacttttaaaaaaaaaaatatccgtctcactctctcgccgccggtaacatttcccggcgacaaaacttctctactctcaccattcctccatcgtaatctctaaattcttctccattctcttcttcctcccgatcatctcgagctcttcgtgagagattatgtgattatgtaatcgttgttgctgtagaagacgatctctaacaactgattccttcatcatcaccttcgctagatttgtaattttcagagcttgagatgttggatcttaacctcgacgctgattctcccgagtcgactcagtacggtggtgactcatacttagatcggcagacatcagacaactccgccgggaatcgagtggaagagtccggtacatcgacgtcgtcagttatcaatgccgatggagacgaagactcttgctctnnnnnnnnnnnnnnnnnnnnnnnnnnnnntttaaaagtcggaagtagtagcggcggagacgaaagccccgtcgcttcagcttccgttactaaagagttttttccggtgagtggagactgtggacatctacgagatgttgaaggatcatcaagctctagaaactggatagatctttcttttgaccgtattggtgacggagaaacgaaattggtaactccggttccgactccggctccggttccggctcaggttaaaaagagtcggagaggaccaaggtctagaagttcacagtatagaggagttactttttatagaagaactggtcgatgggagtcacatatttggtaagttttttttttttgttgttgatgataatacaagtttctcgatttagtaatttttatcagtgagattgattcaatttttttttgttttgtagggattgtgggaaacaagtttatttaggtaaattacaatttttgttaaaattttgatgattaagattattgattcatggttgttgatttatataggtggtttcgacactgctcatgctgcagctaggtaatttttggattattatagataaaagttttgttttcggaattgttaaggtttgcatttacattagtgtttgtgtttttgtagagcttatgatcgagctgctattaaaatttcagagctgtgattgatgatatcaactctactcttggtgatt

SEQ ID NO: 156737 - DNA, 1085 bp, Arabidopsis thaliana landsberg
  unsure (1)..(1085): unsure at all n locations
gcaaaacccggtttcaaattctgcccttgtcagtgcctttatgaccgaactggagactgatacacctgtctcacaggtacaatactactatctggatagtgatccttgcttgctgtcagcattgcagattttgactcttgatacttctgtattttcgcctttctagggcgattatgatcgtctacactcatcaaccactcctttccttgagaacaatatggagtttttgattaaatgcatggatgatttatctatggaacagcaaaaggtgtggtttcttctgcactcttgttcaattctcatcatcagaagtccgaactatcttaacgcaaaatcttaatttatttctccagttccagtattactaccggaacctgtctcgtcagcaagcacaacagcaagcctggctccagaagagaaggtaggtttatattttctgcagaacctttttgttctagttcaggtttgattagtttcactacctcgttatcttggaaggtgatacaactttacttacgagagttgtgaatgccttgtaacatttgtcttcagcttttccttgtccttttgatcttccaactaatgaaagaggtgtttggtttatagaacggagaacatggctcgtaaatcagctggagaggagcctttaccagaagaggatccttcaaacccaatcttnnnnnnnnnnnnnnnnnnntctaggctagagagtttcctcatcacaaaccaagtctcaaacttctgtggccaaatcaatgggtatgttcctctttagtattgtttcaccatttttggagctttgaaagatacttaaaatgagtcgacctgttgttatgcagagtggctggccagaacttcagcaggctttacctgaccaaagcattgcacgacaactgattgcaaagactacccaagtttttgttttttgagtcagaaagtgaaagacttggtggtagaatggatcctatatttgtttttcgtggatgtttttgtttttatttttgttgttgtgaagtaatttaatttacaagcttttcaaaaaaaatctttattcttatgcataatgaaaaattattgaagttttg

SEQ ID NO: 156738 - DNA, 1290 bp, Arabidopsis thaliana landsberg
tctcgacacttgaagacggtgttgattctggagtgagatctgctactcaggaagctgcttctcacttagaagcattgggttgtgtattgacagaggtttttttcacttttccctttgtctcagtttttctgtttcgtttgtgtgtaaaatttctgagatttgttgccaaaatttacaggtctcccttccttcattctctcttgggctaccagcttactacgttattgcctcatcggagtcatcttcgaatttatcacgttatgatggtgtcaggtaatctcggtattatgacttgactcacaatatgattgcatcatggatatataaaatgatattttttcttgtgttggaaatgaagatatggaaatcaagttatggctgaagaactcaataagctgtatgaatgttcccgtggagaaggatttgggggagaggtatggtttcagaaattactccatctgatttaatcaacaaatgtttgattagaatcaatgacaattttgattttaaggtgaaaatgagaattttaatggggacatatgcactttctgcgggttactacgatgcttactacaagcgagctcaacaggtaagccgcatcttcaaatgcagtcaatagaaatagaacctgttttgattgataaatgtatgctttttttgtttggttgttaatacaggtgaggacactaattcgaaaagacttcaaagcagcgttagaacagaacgatatccttatttctccggcagctccatctgctgcatacaagattggtgaaaagaaagatgatccactggcaatgtatgctggagacattatgacggtaaaaatgtttcgtagtttctttctctatttaatcgtcgttacacgaaacatagtttgtatcatatgaggtttgttgcaggtcaatgtaaatcttgcaggacttcctgcaatggtattaccttgtggattagtcgaaggtggtccctcgggtcttcctgttggtcttcaaatgatcggagcagcgtttgatgaggtttgttataaactctgtctctttgctttactctaaaagattagattaagattcacatgatgatttgttgattggttttaggagaaattgctgaaagtgggtcacatatttgagcagactcttaaaggatcaagctttgttcctccattgttagccaatgtagcctaaccatgaaacccaccaaggctctttttgcgtttacatttcatgcttggtttaagcaacaaatttaccaattgtaattgtacttcaattctttaataaataaatgtag

SEQ ID NO: 156739 - DNA, 2858 bp, Arabidopsis thaliana landsberg
cttgcatcagtctctttctctctctcttctctcttctctttgtgtaagcaaagaaccaatctttagataatttaggaaactcttcattattcctcttgcaagctcgaatgatcgccgccttgttcccttgatacctcgaatccttttcttcttccagcctcagtatcacttcaatcttctcgggtacctccaccttcttacattcctttgttacaatctttttccaaattcgacattagctttgtactaagttagggttccttacttgtgggttttcactgttctgtcttatttctttgttgagattctttttcgatttgataggtttatcagattcagagtaactctgttgttttctccacactttattagactggataaattagtttaatcaaatataaggcaaaaaggaaactagaaagcagaaacatctgttgagagaatgtgctcaagtcaagtctctgtttaaatttacttccttttcttcagttttccacaagaattgactgaatctagtcatgtctgtcttctcagactaataagtcaaaaagtcaatgcttttctatgtctgttctatcagaaaactttgtgttcctttctttttttccatataatacacagaaaagtctgaatatttttactaatccaattgataacactatcaaggaaccaacactctttttaaaagtcatgaaagattataatgttgatatgtgtgtgttttgtgttttgtgttcttcagcttgatagttaaatggatcctgttcctgttcgatgtcttcttaacagtatatctcggtatcttcatctggttgcgtgccagactataagatttaatcctattcaaacatgtattggaaatatggttctcttgttgaagctcttgaaaccgttgctcgatgaagttgttgattgcaagataccttctgatgactgtttatataaaggatgtgaagaccttgattctgttgttaaccaggctcgggagttcttagaggactggtcaccaaagttgagcaagttgtttggtgtaagttgatgatataagctaccatttcagtttttctgcagctttcagcattattcactgcatcgttgttgtgcaggtgtttcaatgcgaggttttgttgggaaaggtccagacttgttcgttggagattagtcgcatacttcttcagttatcacagtcaagtccggttacttcaagcgtacaaagtgttgaggtaaactagaatttcttcatttctttagccctctgtgtcttatatgcagccacttgtactaatctcttggaacggtttcagcgctgcgtgcaggagactgagagttttaagcaagaggggacattaatggaactcatggagaatgctttacggaatcagaaagatgatattacctctttggataacaatcatctggaaagcataattcaaatgcttggattgatatcaaaccaagatctcttaaaggaaagcattactgtggagaaagagaggataagatcccaggccagtaagtcagaagaagatatggaacaaaccgaacagttgatagaactcgtcttgtgcatccgtgaacacatgcttaaaactgagtttcttgaagtggctaaaggtatctcgatacccccgtatttccggtgtcctttgtcaacagaactcatgctggatccggtaatagtagcttcaggacagacatttgacagaacatccattaagaaatggcttgataacgggttagctgtttgtccaaggacgcggcaggtgctgactcatcaagaactcattcccaattacacggttaaggctatgatagcgagttggttggaggcaaacaggatcaaccttgctactaactcttgtcatcagtatgatggtggtgatgcttcatccatggctaataatatgggttctcaagactttaaccgcaccgaaagttttcgtttttctttacggagtagcagttttacctcaagatcatctcttgaaactggaaatgggtttgagaaactgaagatcaacgtgcctgccagtttatgcggggaatctcaaagcaaggatcttgaaatattcgagcttttgtctccggggcagtcttacactcacagcaggagtgaatcagtttgcagtgttgtctcgtccgttgattatgtaccttcggtgacacatgagacagaaagtatactagggaatcaccaaagctccagtgagatgtctcccaagaaaatcttagaaagttcaaacaatgtaaatcatgagcatagcgcagcaaagacttatgagtgttctgtacatgatttagatgattcaggaacaatgacgacttcacataccataaaattggtagaagatcttaaaagcgggtctaacaaagtgaagactgctgctgcagctgaaatacgtcatctcaccattaacagcattgaaaatcgtgttcacatcgggcgttgtggtgctattactccactgctgtcacttttatactcagaagaaaagctaactcaagaacacgcagtcacggctcttttgaatctttccatcagtgaactaaacaaagccatgattgtggaagtcggggcgatagaaccgcttgttcatgttttgaacacaggaaatgacagagccaaagagaattcagcagcatcattgttcagtctgtctgttctgcaggtcaacagagaacgaataggccagtctaacgcagcgatacaagctctggtgaatcttcttggtaaaggaacatttagaggaaagaaagacgccgcctctgctttgttcaatctatcgattactcatgataacaaggcccgtatcgtgcaagctaaggcggttaagtaccttgtggagctgttagaccca

SEQ ID NO: 156740 - DNA, 2231 bp, Arabidopsis thaliana landsberg
  unsure (1)..(2231): unsure at all n locations
atggaggagatgcgaagaggagtgcctacgtggcaagacgagttagctagtctcatggacggaggtttacaatacgacggatctccgattgatttgacggcggatactgaatcgaggtcaaagagttcgggtttcgagtcgggttctggatccgaatcagtggagagtttgaaagatcaagtgacggggtttatgaagtcttggggagaaatgcttatggatctcgcaatcggatgcaaagacgttgtgcagcagatggtggtgaccgacgactctttcgttgtaaggaagctccggaaaccagctgctaaggtttcgaagaagcttagcttccttaacgagtacttgcctgaggatcgtgatcctgttcatgcttggcctgtgattttcttcgtcttcctcctagctctcacaggtatattatcaaacagttttctggttttggatcaccattatgtatctgcaatgccacactcttataatgaacagttattcaaaatgtctgctagaaaactgtgtattgggatgaaccttatagaattttttgaggttgttgtatgtagttaacttgattctgcttagatattggtttaagtggcagtcttgaatagattctcgttggtgcaagagaggcttgtatccttactctgacatatccaacttttaagtgcagcattgagttttagttcagaccatgatagatctgtccctgtgttgaagaaaatccgtctgcatcctactagtgcaagccgtgtacagcttccagatggtagatatttagcttaccaggagcttggtgtttcagctgacagagctagacactctctaattgttcctcattcttttctttcctctcggcttgcaggtatgatcaaataagctccttgtttcagcttcagcttacttttaatgatgcaattacatctgatttgcttctactgtttcaacattatcttatcaaggtatacctggagtaaaagaatcattgctcaaggactatggtgttcgtctagtgtcatatgatcttccagggtttggagagagtgatccccatcgtgctcggaaccttagctcatctgcctcggatatgattgacctagctgctgctctagggattgttgacaagttctggttactcggctattccagtggtagtgtgcatgcctgggctgcaatgagatattttccggaccaaatagctggtaccttcaattttttggataaaatttgaaaattcacaattcatggccaactcatgtttttcacagaatgacacaaaataatatgggaaggtattgatttttataaatctacaggagttgccatggtagcgcctatgataaatccatatgagccaagcatgacaaaggaagagatggcaaaaacgtgggagcagtggcaacgaaagaggaaattcatgtacttcttagcacgtcggtggccaagtcttcttcctttctcctaccgtaggtcctttctctctggtaatctcgannnnnnnnnnnnnnnnnnnnnnnnnncattaggagaaaaggtaagtctgtattcatcaagtgtttcttcccaaggttttgagtctttgtgagttatggctcacaagctaaacctgtatacaccacttttctatttcaggacaaacttgtaaccgcagatccagtttttgaagatctttaccaaaggaatgtggaggagtctgtacgccaaggaactgcaaaaccatttgtggaagaagccgcattacaggtatcaaattggggctttagtcttcccgagttccacatgcagaagaagtgtagaaccaatggcgtcctctcttggctaatgtcaatgtacagtgaatccgaatgtgaactaattggttttcggaaacctatacacatatggcaggtttgttgaaatcacacttaaaaccgccatctacaagatcacctttgtcaagttgtgagttactcattttgcttgtggtcacatagggtatggacgaccgagtcactccaccttcagtgacagattacattagtcgagtcataccagaagcaacggtacatagactcccaaacgaaggccacttctcttacttctatctctgtgatgagtgccacacgcagatcttttcggccatatttggagaaccaaagggcccggtagagttattggaacaaagaacggaaacccataaaccggatcaaccaaagacagactttatctgacagtagctcaccacccaagag

SEQ ID NO: 156741 - DNA, 1051 bp, Arabidopsis thaliana landsberg
gaagatgacgaggcacgacgacaactctcgctcacagattatttgatccgatatttatattccctctgcccttgctatccaatctatcctggaatttgagctctagaaagtatgatcctgggagtacttcatctccaacggtttccttttacttaccgaagcagtctacagaacgtgtggatttcattcttccgatgaatttgaagtcctattgtctcatatatgttctttttccaaatagagaagataatctgattcagactttttcatgcttctgttacgctgatttcaatttcttgttggtttgattgctgctacggttttagctgaaatcgtctctgttttctatgttttcctttctgaaattcattcatattgttaatgttttgttgcaggcaatttgaagatcttgtgggtcacgacacaaacttataagcaagagcttagcattttcatcatctgctgaagaacgtatgggagaaagtaatcatcttcctccctttttatctctttcgattcatattagtcctcaaaaggtatgtgctttgttagttcttgttactagaatagaggatcatctaaatctcacaactaagttgttgactagctggaagtgattgttcaccaacagtcaaagatcataaatttttgttttaggaacaagggggcatggtcttgagatgagataacattaagttaactctgtaccttctcatgatgtccaagtagagtcctctttggattaaatcttatctgttatttgcagctgttaaagagcgtggtgatggaagtgcagagctggttaaatccgtagctgataagcatgccggtctcgtgagaccagttgctaaatattactctgcagttaaaggtactactaccactattctccacaagccttctctttaaaagatttgttcatgtgtggaactcctgcactttgatttttgcaccttttccataagctaatacacattggctttgtatgatagatgctatggtgtgtgggaaggaagatatacgcttgtaaaagacgtagacgaggtggaaa

SEQ ID NO: 156742 - DNA, 1849 bp, Arabidopsis thaliana landsberg
atgacgacgagaaggaagaaaacggaccacgaaagcagagccgtaccgaaattagactggtcgaaccagagcacgagggacatgaacgtgaatcgtgacgcaggaaactccggttgttgtttgttgatgatcgcgcttggtcttgtcgtctccgggagaaaatgctccgatgatgcgttcgtctccatgagaggggtaattttgggaattaggggtattttgagagattcaaaagagggaaaaaggcaaaagtaatgtcgcgttgattggttttgtaagctaaacctgtaatcttgtttaaatactaaagttttgcaaaattttatatgtttaatataaaaacacacacgtattaacataggactttatattatttgttattttattagttttctgatattatgtgattgcatcttttttggctgatatataggtaggtgtaaagttttttttttttttttgcaatttctgtttaatatctaaaataatgattaaaaaggatgtagtagagtgtgaagctcaaaaactcaaaatggtttaagaaaatacaatgatttaatgagtaatgactgatttattaggtgtttactgttttaggaatttgtctctgtatgactttgagcttccaactaaatttgtaataaaaaaaaaatcagataaacagaaaagacagatgatacagtatggttccaaaattttattactatttttgagtttttttttttaaaataagtcaatttaaacaaataatcaaattgagttgaattagttaattaattgtcaatttttttttttcacattcttaatcatttttttttgaaactatacacgtcattgaattcacgggattatatatcaatcagtttccaagtcagaaatgttagcaattttcacgggctagaaaatcagttgatagttttaatttcgaattatttcatacaagatggcgtgacgtgtccccatattcagggccttttagcacataagctattattctaagcccaataagttaacccgggtcggatcatttgacttaatcggatcctaattttggtaggaaatttctccggccgtgatttgttggacgcgtcgacgtcgatggggatgagaagtagtggagaatccgctcacattgggattcgtcattcttcgtctaaaacccgcaaaatttctccatttctaccataaatatccaacttttacttttctttcctctgaaattatctgctcaaatctttggttcacgacggagatggcggcgatttcaggcatcttctctggtacgttgatgatttcacggcctttggttactcttcgacgctctagagcggccgtttcgtacagctcctctcaccgattgcttcatcatcttcctctctcttctcgtcgtctgctattaaggtgtgcctagctacagctaatatttaattgatttgttcacacgtgattatgaaaaggatttgaattttgctgtacttttgtttcgtccatttctagtttgctgaaaattggaacttttttgaaaacttcaggaacaatcatcgagtccaagcaacgattttgcaagacgatgaagagaaagttgtggtggaggaatcgtttaaagctgagacttttactggtaaagaaccacttgaggaaccaaatatgagttcttcttcaactagtgcttttgagacatggatcatcaagcttgagcaaggagtgaatgttttccttacagtaaggttttataactctattatttacctgaaacgttatgtcttactagaaatatagattggttggttgtgttattttaccggaagttatttcatgtcttctgattgaagccttgttttcgtttctc

SEQ ID NO: 156743 - DNA, 844 bp, Arabidopsis thaliana landsberg; identical to SEQ ID NO: 12140
  unsure (1)..(844): unsure at all n locations

SEQ ID NO: 156744 - DNA, 431 bp, Arabidopsis thaliana landsberg
  unsure (1)..(431): unsure at all n locations
gctatggaaggagagaagatggttcatgtgattgatctcgatgcttctgagccagctcaatggcttgctttgcttcaagcttttaactctaggcctgaaggtccacctcatttgagaatcactggtgttcatcaccagaaggaannnnnnnnnnnnnnnnnnnatagactcattgaggaagcagagaaactcgatatcccgtttcagtttaatcccgttgtgagtaggttagactgtttaaatgtagaacagttgcgggttaaaacaggagaggccttagccgttagctnnnnnnnnnnnnnnnnnnnnnnnnnnnnnnnnnnnnnnnnnnnnnnnagaaagaactgcgcttaacggtttcagaacaaccctagtggagttgacttgcagagagttctaatgatgagccatggctctgcagctgaggcacg

SEQ ID NO: 156745 - DNA, 1671 bp, Arabidopsis thaliana landsberg
cttccattaattcatgcttcgcaaagaatcaataacgaatcatttgatcgcatccgccatatacttcgtagcataggttatgcattcaagttttccattcgttggcacactcaaagacacactaaatggctaccttcacctgaagaaaatactctgatgatactggatcgtgacattgcatcaatgttatcgaaaaagttacttggttcttttccacttaatcacggaaacaatctttctgtagaggtaatgaatcacaactctttactcttcctgctctttgtttgtatttgtattcttcctaacactagttgattgtttgttgacaaaacaatggtgtattgacagaaatctttttggaagtaagtgaatggagccaccttcctactgatctttccaatagatatctggaatttattgagaatacactactaggcaaggttagttctcatactttacatcaatatatcaacgcaagctgattagttgtttacttgtaatgttttttccgtccctctatcttcattatatctgataaactgctaatttccttgcaaatctagaagaggaaaaaaattctcactgggatttgcgaacatttattttgcagatcaccaggagcattaggcttcgtaaagatattcacgaaaagactttacttgcactcttgccctttcttccaaaacttattctgagggtagaccgtgattggagagataatcttctggaggttcgtctaagattcttagagtaatttcagctaggcaggagaatatatactagctcagttcctttgatagctagcactagcagtatcatcatctatatttatatatgactgttggtattacgtttatatattttcaggcatttactattaccttcagcgattgcaaaccagagtctaaactcaaattagcctgcatttcaactgttagagacatgattatccctgtaagtaattttttcatgatatatactgtccagatattggctgactgtttcaacccgattctaactttttactcacattaaactctgattctacttctttatctgcagaatggagatatcctttatcccaatgcaagtgatccaacggtacattactaccaggttgcttgggtcaacaaacttccatcgctgcttaatcagttgggtaatgagcatcccgtatctactcaggtgctaacacatgacatacagttcattttcaatccagtaatccttgatcattcaaggcaaaaaaaatctttagtacatggacccttttttggtcaaataagatcacttctccgtttctcatttatacttattttgaaattaacttcaggttgtgttgcaactcttactcgaccttgggcgagttgggtgtctgaatgcttcccccacctgtgaagatgacatcagaaacttcttcagcctttgtcagggagaaggtgcaattcttgctgcaaaacaaaaaacgtgttattagattcttagtgtcactacactgaaatagggcttcttggtttcttcatcgtttaaattgtacaggtgatgtacctggtggaccttttgcaagtctccctcgggaagcccaagaactggctctctgtttcctttactacttcaccacagacaaattcagctcccctatgatgaaagcaatcgtttcatgctgtttat

SEQ ID NO: 156746 - DNA, 588 bp, Arabidopsis thaliana landsberg
tcgattttacgagtcattaatttgtattcaggtactgctaaaaaatggctttctcctattcccgtcggcgttactaaggaacaggttcggtttatttgctcgtcctttattgttaatacatcgtaaagctccgatctttgatctaattagacaatggaagctgaagtttttctagctgtctctgtgatgacatataggtttcaatgtttttgcaatgcttagggtttaaattgtatcgtgattcagatctttaagccatttattagatttggattggtgttgtcaagtttctcattttgctttttttttttggtgtcttggatttgaatcaggcgtttagtatggcacaaacggagatggagtatcgcgtggaactctttaacaagtactgaatcaaacacccatttggtttatctttcgttatgaaattcgattttcacttgtgattgcttatctggtttaattttgttttgatcacattgtttagggcttcacttattttcaaatagtgatatatataagctagaggagtataagtttgagactgctgatatgtcgaaaatccttaggctgcctgaattgctgaac

SEQ ID NO: 156747 - DNA, 1616 bp, Arabidopsis thaliana landsberg
ttccgaccgtaactaacaccaaaagtcaaatattaattacccaattcatcaaaggttttgtcctctatacattacaacagtttctgctaattcatttgtaaatacgtttaggtgttttcacttttgtatatttaagtaaagaaattttttattttaagccgctatcaatctatcatcattttaagcattgagtagactgggtattcaccctatcaaatatcaatatctcaaatcaaatttgaaatgagccaaactaggcaaaatcttcagagaccatcacaatatcagctaacgagtacaaaccaaaaaagctttggcttatcaagttttttctgacacttttctttttctagatgacatcaattgtttcttgttgtttatctacttcttctttgaatttttcttcttaacaaccaacatttgagcttccactgtttcttctgcatcgttcattaggttattatcatccgcgttctgttctttttggagttgattcgtaacgtctgtatgtctccgaaatattggtatcgctatgtattctttcttctcctagggcctagtctctccccctagtcattccaggggagtctaaagcttggtggatttgaagctccagacaccatccatagctatttttggtttgtctacatcaatgcttgtaggaataatttttttttccggagaagctgatcaccgttgtgatagagagacttgccaatcatatgtaagcatatggtctcatcaatatcataaattaataaatttataaatttatcagaatatattatgtatatgtaagaaaagttagtgaaatatgattctagtattgtttgtttttcttaaataatattaagttttgatcaaatattcatttttaatatgtttactgtataaaaaaaagttgtgtttttaaaaaaaaaagagaatatgttcttttacttgtatttgtatctaaaaagatgttggttatgacaaataaaacttcttttcatataggaaagttaaaaaaaattacaaattaaccaactctctctataaattaataattcaacaaattaatatctttataaattaataaattttctcggtctcgacattattaatttatagaggttttactgtatatatatacaatcaatccatatcatttgccttttacttgatttttttttgttaactaaagtacaacgtacctattaacgtatatataactatggttttatctgaaaatgaacacaacaattttaatgtaacataaacgcacacgaaaaattaaatcgagtgtatgtaattaatagagatttgacaaagcttgttgaatttgaaaactacaggtggaaaacaatgcttgcattacacgcaagtggtgtggagagattcagtgaagatagggtgtgctagggttcaatgcaccaatacttggtggttcgtgagttgtaactataactcacccggtaattgggtcggagagtacccttactgatcctgatcactaatactgtattacctaagacaataaatatgatttatgaataaaactaatttgaattactgcatatgaaattataaatcttttgttttaatctcaagatgtaataatttatgatcttcacata

SEQ ID NO: 156748 - DNA, 583 bp, Arabidopsis thaliana landsberg
  unsure (1)..(583): unsure at all n locations
ctgtcgtgtttcatcgaagtgtgcgggattttntgctgctgggtttagcctttcttcaaaaagttattacgtgttagttttattgttttggtcttgataagagatgttaggacagacatggtgcttcttgtctatagccactagacctattttagcataaggttaacgaaattctctctacataccttgtggatttgtttacattgcctgatctttcctgtgatcgctgtcatgtttctttggaatgattgatgtttataaatggaaaaatctttgtgcaggtgatggataaacacatgagcatattggcaaagcaacacattgagacacgtttcgtgaagatccaagctgagaaaagtccattcttggctgagaggcttaagattgttgttcttcccactcttgccctcattaagaacactaaagtcgatgattatgtggtatataataataatgcttaatctaatctcttagaatatgatttatatggatgatacaatgttgctgttgttgataggttgggttcaatgaaaaaggaaaaaaagatgattttagcacagaagatcttgaacagacaatggcc

SEQ ID NO: 156749 - DNA, 1801 bp, Arabidopsis thaliana landsberg
ttattatgcatacttaggcatctaggatcatctcgcatacgcattgcatgttttggtgtgttttcaggtgcagaaggggctaaaaaggactctactcgatccattcactcgatccaggcagctagagaagaggcatcagtttactcgacctctctactcgatcgaggcagctaaagaggaggatgcagtttacttgaccctcttactcgatcaaggcagccttagatgaagcagcagattgatatactcgcccctcctactcgatcctctactcgacccgtttactcgaccaagggtgaccaaactacaagacttgttgagctatcaaagcgtcttcggatcctcctcattcccctctcaaccagaaatctaagcatacggataggagaggaagaagcatctactcgaccaattgatcactcggagcatagacacaaaggcgcagactttgcagcgccgtctttactcaatctccatgatcaagcactcgcccaaaccgcctcaagtctcttgtattctagtgaatctagggttttcaacattttactatcaatagatcactttgggatttgtccaaaggatctagcttttatcctttagtttttctttttgttcttgaatcttcaaaacttaactactcttaatctatttcgtttttgtatttagttctttaagtaaagttgtttagcttgtttagatctacattttggtatgatttccgtagttacagggtttgtgttcttagttatgttgcttgagtagtgattagggttcttgaggatggattagattagggtaatctgtaggttagtcaggtggttaagattaggttagagcccttgtggattcgcttggcccctatgcggttttcggtggctaatgtggagattcgaccataggtatccagcgtccaaaagacgttcaaatggatgcctgatctacgaattccggagatttgtaggctatagaccaagagattggcttgactgcttattgactttggtagattgttgcttaaaccttgttcagctatgtttcatcaacgagagttgagattaagaagtggtagagttgtgggggtctctgtcacaagagtggattgacctggtttttgaatctatcgtctagggtatctgcctttcgcctgttagccacctgatgaaccctagagttgcccttatcaatgaatccatccctagaacttctattattcttagatttatttgtattcactccttgattgcacttttatttacctgttatttgcatcccctgttgactgcattttagttcttaaatttgtcacttgttggttctactcgacccaatgatcgagtagggcccttaagttctcatttttagttgtttccatcctgacctaggattgttactagaaaccaaccatcattataatctggcttgacttagtcgcttctatacacatcttgattgctagcaataacagtggactggattgacaccccctatagttgcatcgacatgtttgtgtttaaggggaattgaactgaatacacaacacttcagcacataagtaggcctaaaaaccctaaaaccttacttatcatctgtgtaggaatcaacttattcttgtcattcttaaccattgtaaaccacatgcacttgactaacccaatcactatatgaaattggaaagataatctcagcttccaacagtttcatgatttccttctaaagaacaacctttagattctggtttagtctcttttgatgctcaactgagggctttggctcatccttgaggtgaatcctatgcatacac

SEQ ID NO: 156750 - DNA, 2076 bp, Arabidopsis thaliana landsberg
ttcgccgacctcctctcctccctctgattcaaaccctaattctgccgctactccgccgcatcagaaacaaccaccctctcctcctcaacccacgaatccatcctctccaccaccgcacaccaccgtcgtagctttagccgcatcaacctccgccgtcgccagaaaaacccaacctgttctctggactcaagacgagaccctcctcttaatcgaatcatacaaagagaaatggttcgcaattggtcgtggtcctctaaaatcaactcactgggaagagatcgccgttgctgcctcatctcgttccggcgttgaacggacatctacacagtgtaggcataagatcgagaagatgcgtaaaagattccgatctgagagacagagtatgggacctatctcaatttggcctttctataatcaaatggaggaattggattcttcaaatcctgctccgatctcagctcgtcctctcactcgtcttcctcctagttcgaataatcgctacgtagacgacgaagaagaagatgaagaagaggataacaataactacgaagaagaggaagaagaagatgagagacagagcaaatcgaggagtattaattacatattgagaagacctggaactgttaacagatttgctggagttggtggaggattgttgtcatggggacaaaaagagagatcatcgaagaggaagaggaacgatggagacggtggtgagaggcggaggaaaggaatgcgagccgttgcagcggagattagggcgtttgctgagagagtaatggtaatggagaagaagaagattgagtttgctaaagagactgtgagacttcgtaaggaaatggagattcgaagaatcaatttgattcagagttctcaaactcagcttcttcaatttatcaacaatgcttttgattctttctaacgtagagatttagtcattgttgcttttagatttgtaacataggtaacggatttgaagaaatgcactatgtaagctaatgtttatgggagtgaagtgaacttttttttttaaccataaaagaacaatgatacattcatcaaattaacctaaacctacaagagaataagttagaggaaaaggttaaaaaagggccctaagtatatgccacaaggatggaggagtagagacttctatacaaaacattataaactgtttctactctctcccaaaccaaaagatgggaagaagaagagactacttctctatgatgcaagtgggtaatttacattatgatataccttcttctctttgtgttcatcaaaagaggcaaaaagacctgcatgaattttatcctatccaccaacttcttccctatttatctccctctggccttatcaaatctgcaaactccacaatctgtagagtttgttatgttatactctcagccaaatccaaagaccaccagcagcttcaagatgttaatgccaaaaagagacccgactctgaaggtggaggacacaaaccagtttgggttcctgtacagggttgttgtcggtaagggccagcgttaagctttgcaggatctacagctactcaaggttctaggttcatctgtcatgcctctcattccacttttgtatcaggaggcttggaagatgataattcttgtgcttcttctaaatgaggctgctcctcagaagcaaggtgtttctgattttgtacagtcggcttccctggcaatttcggtctcttttcttctgaaggtagagactgttgttgtctctgtgtaacgcccttgatcccgagcttttgagctagtccttggttcggtgttgatactggatcatttcctgctgaatctgtattggaattgtttactactttcgaagcagtgatttgcacagaagcaacacaagatggaggttccaaagcaggcaccgcagtagaaccaactgcttttatgtttttcaaatcattactcgcttgaggcatacccttggtcgtacccatactaacagtttgggtagtattggttacagactgtggaacacgtggcatgcgttcagcttgggacttctttgataactcagagttccctagatgattatgttgaa

SEQ ID NO: 156751 - DNA, 796 bp, Arabidopsis thaliana landsberg
tcagagaagccattattatataatacagagattgatagaagagatttatccaaaaaaatattgcaattctttttggagtgaataatgccagtccctcttgcaccatatccaacacctacggcaccggcactggctccgcagaacaacactcctccggcaaatggtaaaatctttcttaaatggacaagctatttttaatacaaaaagatcctctgttatcatattcttttacaaaagctctagatacttataagactgattttttggctttattaaacaagattgtacatggtcatgcatacttggaaaaatcaaatattatcagattcccaatgcgtattactcttgatgggaaaaaattgctcaattatttatccagaaccacatttatttatttcacatgtgttcataatccatttgaatgtacttttttgggccaaaaaaataaataaaaacaacttgagatttgtagtaagtacaagtgggcagagccagttagtgtgttcaggttgcagaaaccttctgatgtatcccgtcggagcaacctccgtctgttgcgccgtctgtaacgccgtcacggccgttcctccgcccggtaaaatcctttaaaccataacaaaagagtttggttaaagtcttaaagagatctttgagttttgtaataactgattgggcaatgcaggaacggagatggcacagttggtatgtggaggatgtcatacactcttaatgtacattcgtggagctacaagtgttcaatgttcttgttgtcacactgttaatctcgccctcgaag

SEQ ID NO: 156752 - DNA, 768 bp, Arabidopsis thaliana landsberg; identical to SEQ ID NO: 12264
  unsure (1)..(768): unsure at all n locations

SEQ ID NO: 156753 - DNA, 387 bp, Arabidopsis thaliana landsberg
attgtaggatcccatgtaggtagaaggaaggtatcagattcacatcctatgtattcaagaacttcaacttggtgctggtcactatcgtagccgtagctgaagacgtcattaaggtcagtgtgaaaggatccaacacacaatggttagatctgagccggaactggggccaaaactggcaatcctacgcacttcttgtcaggccaatctcgttcttcacaagtcaaaacctgtgatggccaaagctccacctccaacaacattgctcccagtaactggcaatttggtcagacctactccggcaagaacttccgcgtctgatttctagaatatgaaagagagtcgtgtgacggaagacactagagcattcttgcaaatcaaacatatata

SEQ ID NO: 156754 - DNA, 1111 bp, Arabidopsis thaliana landsberg
tgatgcaggtaaatgactttatattggttgttgttttcttctctttctgtatttggaaattactgaagcgtcgtggtggagtggggggctaaactcattgctgaacttattgctttgctcaataaacaagaaagatttgatgaatcagaaacgctactttctactgcggtttcgagactgaagtcaaatgaaagagactttactctcttcctctgcaatttggttgaatcaaattctaaacaagggtctatacaaggtttcagtgaagcatcttttcgtttgagagagataatccaaagatcatcatcagtttatgtcaaaactcaagcttacaagtctatggtttctggattatgtaacatggaccagcctcatgatgcggaaagagttatcgaggagatgagaatggaaaaaataaagccgggattgtttgaatataagtctgttctatacggctatggaagattaggattgtttgacgatatgaacagagtagtacacagaatgggaacagaaggtcacaaaatcgacacagtttgttcaaatatggttctctcttcctatggagctcatgatgcattgccccaaatgggttcttggttacagaagttgaagggttttaatgttcttttctccataaggacgtataactcggtcttgaattcttgtcctaccatcatatcaatgttgaaagacttggatagctgtccggtttctctttctgaactgcgtacttttctgaatgaggacgaagcacttctggtccatgaattgactcagtcatcagttttagatgaagcaattgagtggaacgcggtagagggtaagttggatttacatggtatgcacttgagctcatcgtatttgatattgctgcaatggatggatgagaccagacttagatttagcgaagaaaagtgtgtaattcctgcagagattgtagttgttttctggatctggaaagcatagcaatgtaagaggagagtcaccggtgaaagcgctggttaaaaagataatggggccgtctggaagccccatgagaattgaccggaagaaagttgggagttttattgccaaagggaaaaactggtaaaagaatgggctttgcaaa

SEQ ID NO: 156755 - DNA, 817 bp, Arabidopsis thaliana landsberg
gtccgagcgttggccaaatctctctcacttccacaggtttctctctccggccaaatctaacctccggggaacgtcgttggtcacttatcaccggttagaatttccttcccgctttatcccgtaaacttttttcccattgattccgatcgtttatgttccttcaccaaatcgataaagtttgatctttttccttttcactattattaacagaccaatctgtttacacaagaaatctacagtaacttatcacttgaaaagttttgataaatagttagtataataatttgttaattgggtgtgtaaatttgatttcttgattgtgtgtgaattgtgatgaagagggaaaacaaaaaatggcgactcctgttgatccacctaatggaattaggaatcaagggaagcattacttctcaatgtggcaaacacttttcgagatcgataccaaatacgtgcctatcaaaccgataggccgaggcgcgtacggtgtggtttgctcttcggttaacagagagagtaatgagagagtggcgatcaagaagatccacaatgtgtttgagaataggattgatgcgttgaggactcttagggagctcaagcttctacgtcatcttcgacatgagaatgtggttgctcttaaagatgtaatgatggctaatcataagagaagctttaaggatgtttatcttgtttatgagcttatggatactgatcttcatcagattattaagtcttctcaagttctaagtaatgaccattgccaatacttcttgttccaggtatgtgatttgtttgcatttgcttttaccattagtgtgtg

SEQ ID NO: 156756 - DNA, 952 bp, Arabidopsis thaliana landsberg
cttctccaattttcatcttcgagattcgtctcttgatttaagcttcgtcatggactgcaaatcgtctgatagcagtggttagttcccgaaaactgtgtagaatttctctcgtcttctctatcagtcactgaaaattagggttttcacaacttttgggatttctccgtgcgattactgttatacattgtgttattttggtggattggtgtttttagttgaaattttggatcttgctgtttcttgatttaagctgaaaccttttgaatgtaatgtgtggtaatgattgattcacaaaggtttgattattgagaatgcaacattgattgattttaccggtggtgtattcaggaactgatgatgatctgccaccgtcgcatagagttccacgaggaggaggaggaggaagaggaggacgcgtggctggtaatggaagacctttgaatcttccgccatcttacccaaagatgtatgatgatcttgctgctgatatggaagctcagattcaccagattgagaaggaagcatatatctctgttttaagagcctttaaagcccaaggagatgctatttcatgggtattttttgatctactttgatttctcttgttgtgttagtgtctggttaggtggaataacatgtattttatgttcaggaaaaagaaagtgtcataactgaattacgcaaagagttgagtttatcgaatgaggagcatagagagcttctaggccgtgttaactcagatgatacaatacgaaggataaggcaagatcttaaatctgagcatttatccgattgagcaagtgaaaagcttcttctcttttcctatcaataacaaatgctttttcggttattagggaatggagacaatctggaggaatgcagccaagtatgagaaatgctgctcaagtggttcacgatacattgccaagccggttgcaggccctaacaagcg

SEQ ID NO: 156757 - DNA, 499 bp, Arabidopsis thaliana landsberg
atggcggcgaaagcaacaaaggcggagaagaagatcgtttacgattcaaaactttgtcagcttttgaatgagtactctcagattcttgtcgttgcagctgacaatgttggatcaactcagcttcagaacataaggaaaggtttacgaggtgattcagttgttttgatggggaagaacacaatgatgaagagatctgtgaggattcatgctgataaaactggcaatcaagctttcctcagtctccttcctcttcttcaggtttcatttctcttgtcttgaatagtttgttttcatttggatataaagtattgattttttggttttgtggagaatttgatttggtttggtgttagaatttatttaacaggggaatgttgggtctgatcttcactaagggtgacttgaaggaagtcagtgaagaggttgctaagtacaaggtttgtttctttggctcaattgatgttattggtgggtgtaagctttagtagagttcaaatat

SEQ ID NO: 156758 - DNA, 1313 bp, Arabidopsis thaliana landsberg; identical to SEQ ID NO: 58245

SEQ ID NO: 156759 - DNA, 968 bp, Arabidopsis thaliana landsberg
ataacaaattctgatatcaattccctatcgtgtgttaagaaaaagaattaatagtcttacaatatttatagataagataacaacaatatgaagcaatctcacgttttgcttcttctatttgttcaagtcattatcattttgcctctcctttgtctatccgacgattttgttaactctagagctacttattatggcagccccgattgcaaagcaaatcctcgtacgtattaaaactgttattgctatatatcgtgtaccttaattctttttcattttatttgtagttgtatatacttgtacacattattggtaaaagatacattggtttaatatctcactataagccttaactaattttattttttttaaactagttttttattttatttttaatctatgtatagggtttttttgtttttgttttttttttgaaggtttattcaaattctaaatatatgattgaaaacggttccattatagtgtccatatcttcagttcgagtattactgcgtaattagtaatgagaactttctattatgagaatatatagaaaatttgtcgtcaagaatagttaattaatttttgatgatgcagggggacattgtgggtatggagaatttggaagagatatcaataacggtgaagtgagtggtgtttcatggcgactatggaacaatggaactggctgtggtgcttgttaccaggtttttatatatagttatctacttatctcaatcaatatttcatcaaatattattatagtatatgctatgtcattaattactaaacttatattatgggaaaaaaacaaacttaaatattatgaattataaaaggtgaggtgcaagatcccaccacactgcagtgaggaaggagtatacgtagtggctacggactctggagaaggagatggcacggacttcatcttaagccctaaggcgtacggacgtatggcgcgacccggcaca

SEQ ID NO: 156760 - DNA, 630 bp, Arabidopsis thaliana landsberg
aactctttctttcctttttgtgttgaaaatcaaatctaagaaatgggtaacgcgattaggttactccggaaatgcttgaattctcacggcgtctccgcctcttccggcggcgtctcagctctttctcgtgatctcttaaacttcgagaccacttctcaggtctctctctattgttattctcctaaattttcttttttctacagctaatattttagtcttggatttgttctttagctctggtttgaaactcactgtgaattgtgtaaatcaatagattcatttaaaattttgcttaagagattgatcaggatctaaagattcattttattctaggctcctgagaagcttgggagttacgttgtctcttcccaaaaggctcaagcaaactggtacagatcatgctaatgttgtctataaagatttgaaaatgttcatattttaatgtctttttctttcaaaacatgttctaatttgaaggtatagaaaaatacttgaggcatggaagcaagctaagccctcggcctaaaactcctgaggaagcctccaggcttgttatcgcagctttaaagaaccatcaaaaagcagatgttgaggtattaacttctcatgatgggtctttcaagttgcaaa

SEQ ID NO: 156761 - DNA, 605 bp, Arabidopsis thaliana landsberg
gcactccaggtgtggccaacacttggctgctccacacgcgattactaaagctctctgctggaagtgcagacttggtggatctcaagaagaagaaagagatgatggacaaggtgaagaaagcgaagacattcaatgttttcgaatatgatccggatttcgagagcccctacggtcgtactataacgattaacaggaaggatctgaaagttttaaaaggctcaatggttggagtttccatggtgaatctcactcaaggatcgatgatgggaccgcactggaatccatgggcttgcgagatttcgattgtattgaaaggagcaggaatggttagggttcttaggtcttcgatatcatcaaacacatcatcagagtgtaagaacgtgaggtttaaagtagaggaaggagatattttcgcagttccacggttacatccaatggctcaaatgtctttcaacaatgactcgttagtgttcgttgggtttactacttcagctaagaataacgagccgcagttcttcacccgcccaggactcggctttgcggatgcttaaccgaaaagtattggctgcatcgcttaatgtgagtagtgtgacgattgagggatt

SEQ ID NO: 156762 - DNA, 1027 bp, Arabidopsis thaliana landsberg
agtctcttgagtgagcgtaagtatactctgaattgttcctcctcttcttctttccccttctaggtggtgctggctgctaatgagctgccatctatcaatgacataacatataccgagcttacagaaatcttgtcacaggtgaataagtgatgaatgagtaattcgtgatatacacagcttttaaaagcgaatctaattttttagtctgaatttacagttgaaggatgaaaatggccaattgctaggtgttgatacttcgaagcttctgattgcaaattcggggaatgacttaccagtaagccattagaagctccctgaaagatatatagatggttttatacttttattcattggattcttactttttttctccctcccaaaaatctgttttaggttatcgatctctcaagagtatcacaggagcttgcttacctttcatctgatgccgacttagtcatcgtagaaggcatggtaagtcccatttatagtttgaaagtgaaacgcgagttaactatgtaactagtcttggttttgttagctgacttcttggctgttctaatcagggtcgtggaattgagtcaaacctttatgctcagttcaagtgtgattctctcaagattggaatggtagtagtttcaatgtcacgttactctctttttttcctccctagattaatgaaaagaaatgttgtgtgcatattgcttatttctgatttctgatttctcatattctccatccttttgttatgcaggtgaagcatcttgaagtagcagagtttctcggaggacggctctatgactgtgtcttcaaatacaatgaagttcagatttaattatatttcacacacatttttactaaaccagccattcagtttattatattaaaaactgttaggctttgtaagttagagatccaatctctatctctgcattcagatgtaagaattgaaaactctttcgacattctttatcaaacacacacaaaaagcaccaatctttctgattggaccttatctggtatttgaaag

SEQ ID NO: 156763 - DNA, 961 bp, Arabidopsis thaliana landsberg
  unsure (1)..(961): unsure at all n locations
atgactcaggacgtagagatgaaagataaccaaaccccaacgcaatccgtcgtctctgctcctacctccacgctacagagtaaatctctatcttatgcttcagtttctcttaatctcacattgctaggtttgtttcaaaattgaattcgttgtactgcttttttttttctccagatttgaaggagattgcagctctgattgatactggatcttatacaaaggaagtccgtcgcattgctcgctttgtgcttctcaccgctggactacnaaggaagggcacggggggcgtgatctcttctttccttgatttcgctttggttcctggatctgaagctcacactcgtctctcttcttttgtgccgaaggtatgtgtagcttcacttgtccactttgattacgagcttatctaggatctgtaattagattcatgtattagtgtttgcccttaatttgatggactttataatattggtacagagtgatgaacatgacatggaagttgatacagcatcatcgaattcccaagctcctcctaagcatctannnnnnnnnnnnnnnnnnnnnnnctacttcattgttcttctttttctcattgatcagaaaaagtacaacgaggtttacttcttctctatctctctaactgacatactttatttataaatcttgctgtggtctttattgttttactttctttgctttcaggccaaagtttgttctaccgctagcattgctcgcctcaaaagcgtaaacaggagaaccgttgatgtcattgcttccaaattgtatttttactactccttaagttacgagctaactaatgatcttgcagagatacgtaggtgagtacaagttcacagtcatctttgcaactttatcatattagttcaacactcaattatcttattaacttgtctctctttctgttgcagtactcttcttgctcttcaccattcggcacact

SEQ ID NO: 156764 - DNA, 1052 bp, Arabidopsis thaliana landsberg
atggatttgtgtgctgagctcatcgatagtgttatacgtcgcgaagaagaagaagggagcgttccgacatacgagcttgttagctggaggagcaactggtgttgcagggagattagctgctgagaatggtgttctgaagcctgattgtccacataggggacacttatctcacccacagaagaggatgtcaggtccttcctctctgtcagccgcgagaatgatgtcgatatcacagatgtaaaggtaagaggaagagatttgattgaatgactcattcgttgttaggttttggctatgtttaggattatgttgtaagaagtggtaattggatgatttcagatgagtccgacagatgaggatgcattatctgttcacgtaacagaggagcactaatataacaagccattctttatacaaggatttgaggaatgagaagaccatttcctttcaagataaggatgatccaagtggagaagaccatactataatgagaaatgagtccatctcaagaaagcaaagcgatctcgagacaccggaaaagatggaatcatttagcacatttggcgatgaaatccaatccgtgggatcgaagtctacaaaagtatctgaagactacgattcaggtggcgatgaagaggaagaagaagagatgtttgagttagaacaagaatcaatgccttcagagcaaagctctcctagaggagaagaaaaagaagaaggagaatccaaggagagtgaagtagtgaagataacagaagaatcaatcctaaaaaggatcaattcaaagaaggaaactaaatctttccaacttgggaaacaactatcatgcaaatggacaacaggtgcaggaccaagaatcggttgtgtaagagattatccatcagagcttcagtttcaagcactggaacaagtgaacttgtctccgagaagtgcttctgtttcaagactctgtttctcttcttcatcgcaaacgcaaacgcctcaaatgtcaccgttatggcgaggaatgtcactacctacagatatcacactcacgaattcataacagatta

SEQ ID NO: 156765 - DNA, 773 bp, Arabidopsis thaliana landsberg
ctgaattgccgatgagccctcatttggagcagattcacggagaaatccgtgaccatttccgagccctcgcgtatgctttctcttaactatctcttcaatttttcattcgagtgtacgttatcgacaagactatagattttttgggaactagatttgttaggagattgaatttgagtttcacagacgagaaaataagagttgggatagtgaatctgaggcacaagtcttatgatttttttctttaaaagtgagattcaacattgatatgcaggaatggcttccagaggttggataagatcaaggattctagtagacaaagcaagcaactcgaagaacttgctgagaagatgagagactgtaaaaggtattcactttctccaagatatcagtttttttactactcgaactttccggtgttagatgagggattgaatttttcatgagaactaaaatgttgtaagtcttggaagttctattggtgattatgtttttgcattgtgggaaaatgtattatttgagatggatgagatgtgtaatcatgagtaggaaagagttttttttggtgatcaacgatttttaaatctctgcgcttcacgttaggttggttaaggagtttgatcgtgaactcaaagatggggaagctcgaaattctcctcaagtaaataagcaattgaatgatgagaaacaatctatggtgagtttacttcttattacttataataatctgtgtgttgatgaaatctatggaggacatgatacttataagcttcgtg

SEQ ID NO: 156766 - DNA, 875 bp, Arabidopsis thaliana landsberg
actttcctagttgttacatatctctttttccaatgcaagattgttgtatatggaaagaacacttgtcccctttacaatttgttaaaagaacaaaaaggaggattgtttggggatgctattaagtggaatttcgcaaagtttctggtagacagacaaggaaatgtcgttgaccgatatgctccaactacatcacctcttgaaattgaggttagtagaagtttcccctcatacatttctctaatcattaaaggagcttactctgtagttttctcgttcttcttttcgcagaaggatatcgtcaagctattggcatctgcttgaacatatatgtcaaaggtgagttttcgtacgagctcctaatgatctcaccttccctctctggatttggacaagaaactaattaataggttgaaagttatagagattaaataaagtgatatctggcatgtgaacatatgcatctgtagttagaacatggactgcaacagttgccaaactcttaggggcagttaggttgtaataactcctccaagctcatgggtgaaacatagaaagcaacagaatcttgtgaaattgctattacacttttatggccacgaatcagaactattttctctggaaatgcttatggagaccacaaggaataatataatgtggactgctttggtgcaggacaggaaagcaaaaagcatcgcatcaaacatgtctgagactgagaatgaaaaccactttctatacttattctttacctttcatgtttatccaaaaccatccatggaaaagaagatgcttgtctgaatctgtgaacctcattttctgtaacaaaaccccacaaaatgcttatgaaacatcaataaagaacaaagttttattta

SEQ ID NO: 156767 - DNA, 507 bp, Arabidopsis thaliana landsberg
aaactctgtcctttctctgcattcttcaatttggtttatgaattaaaatgtgtttcaaagctttgttataacacgtttgggtctgcacagggagaatgcccagcatgtaagaggcagtttatagggtacaagaaccaaatcatcagatgtgagggatgtgggaacatactgtggcaaccacaaggcgatttcttctcaaaagatggcaacaacaacaacaacaacaacaataataatagcaagggaaactctaaaaagccacctaagtcccaaatcattgatgtcgattttgaggagaaatgattattagagacgagaatgaagcagaaggctctattggtgcactaatattcaagtgaagataaaaatatgtgtttatagctgaatcgtttactgtttttgtctgttttgagctgtagcaatcgtgctgcttgttgtgtacatgataaggtttctttgtagacgaacaaatgtagtttccacaagcctagagacttgattgaaact

SEQ ID NO: 156768 - DNA, 402 bp, Arabidopsis thaliana landsberg
atgggcccaataagtagacacgaattagtaaattgacccgacacagagcattaggtgaaattctaaaattcgattgatttccgtctctctactctcgttgctttgcttcgtgccgtcgtgcgtctgacctaatcagcaatgacgaagaagaggaacaagaagaatagagacgaggaagcttccatggacgtttctgaatctcagagcgtctctgaagctactcctcaaggtagtaaagtaaattcgcgtcttggtttggtacatactcgtttcttcatctgcttaagattcttgtttgatttttgttagtgatggacactacggagaccggtaacgggaaactagcttctcgtgctcgtagcttgtaagcttcttcgaaagtctctagttgtgtttatatct

SEQ ID NO: 156769 - DNA, 739 bp, Arabidopsis thaliana landsberg
aagtatccatcagctctaccctcctttgagaaaatcatgaggtttgcaaaaggcaaaagaatagcattgtttcttgatttatgtcgggacactttcgcctattgttgaggaacctgattgtgcatacatgtcaagtgctgtaagtttttaactttcctctattagattcaattgctagagcagatcaagtctgtgattcatcctcataatgagttatatggttcacgcctttttacatgcttagatgcgtagtgcagtgcaaaatgttgccaagtatttcccgaccgcgatcattagtggaagaagccgggataaggtaatctttctatatgattcattttcttcaccaagaacatcttcatgtgtgatctaatgtaataataggacattttgcttcatctacgtgtatgagctttgttaatttgagtgaactttattacgccggaagccatgggatggacattatgagtcccgcaggagaatctttaaaccatgaacatagccgtactgtatcacattacgaacaggttcattctcttgctttttgattgttttctgcaatatctgtttgctacatcagatccttaaaatgtgattttttgcaaatttccagggaaagatgtaaatctattccagccctgctagccagtttatcccatgatcgataaggaattttgaaacaccatcttctgctatatataaaacatcatgtttcaacgttgaaactctcgaaatgaat

SEQ ID NO: 156770 - DNA, 2598 bp, Arabidopsis thaliana landsberg
atggcatctagagcagaggaaatgtcgccgacgaagatcgaaatcgaaacggcggtaaaaattgaagaggaagaagacgatgagcatgattctaaggagagagttctacagaggtattttttacaagaatggaagctcgttaagtctcttctcgatgatattgtttcaaatggccgtgttgttgatcctacttctgttcataagatccgatccattgtacgcttcttagtcttttgacttcatctacttgatccaacccatgtttcagtatcatgttgatttactttctccgactttgttttgttgtattgtagatggataaataccaggagcaaggtcaattagtggaaccttacttagagagtatagtttctccattaatgtttatcatccgctccaaaacagttgatttagaggccaaacctgatgaaattcttgagattattaagccaataagcatcattatctatgctttagttactgtatgtgggtacaaagctgttatcaagttctttccgcatcaagtatccgatctggaactcgccgttttgctcctcgagaagtgccatagtacaaattctgtttctgccttgaggcaagaaagcactggagaaatggaggccaaatgtgttactcttttgtggctttcaatccttgtgttggttccgtttgatatttcttctgttgatacaagcattgctgatgacaagacctttggtgtggatgaccttgctcctttggtattgaagatattaggtttctgtaaggactatctgtgcagtgctggaccaatgcgcaggatatcggggttgctactctctaagcttttaactcgtccggatatgggaaaagctttttcgaggtctgttcctaccaccatcagtgcttcagtgttgtttcactttgaacacttaagattgtttctaaactgctatttacaattgtaacatgtacaatttactcaacgtgaatggattaactaattttctttattctattgtggcatttccgtttcagcttttttgagtggacatatgaagttttgtcttgtaaggaagatagtgtcacgaaccactttcgcttgcttggtgtaatggaagctctatctgccatttttaaggtttattctgtttgtaacctggaattctctttgttttaactttggtccatacttaacacgtcaaacatatatagatgtctgtaaagtacataatcaatttatctgttttgtatcttgtagaaatattactggtttctattacttaacctgttccaatttgcatctggatctaatatgtctactcatgttggcagactgctagccggaaagtgttgctagatgtgcttcctattgttttgaatgatgtgactgtgctaagcaaatcaaacgccgcggctaaaagttctctgcttcgcaagtatttgatcaagttaactcagaggatagggcttgtttgtcttcctcatcgctcaccttcctggcgctatgtggtacataccttttagcttgtagaatagtagtgcaaagaggaactcttcctcgtcatgtgtttttatatttttactctatgaataatgtcaatattgacataatgtttggtagtcattttctgttagtcatccgagacttatttattgaattacctgcaggctcaaaccgcctctctttctgagaatatgtctacgagttcatctcaaagattggcgcctgatcatactgtgactgccatcttacaaccagaaagtttggatgatcaagaggatgaagatatggatgttccagaaatcttagaagagattattgaaatgctactatctggtttgagggacacggtatgtttaaagggtgagatactactgttaggctgataactttaggtggttatctctaaacttatacgaatagatgcccacacaataatttgagtataagtaggctgctttatattaagttgtagactcgagtaaccagatagtacttaaacagatcttgaatgttatacatatctgagatggcacgtaaagctgtgatggcctgaattaatatcttatgtgaactttccgcctcttgaaactttcagctgccaaccagacaatcgcacatgttactagtatctgcaagcattgtccttttgaaatttattattttctgaactgtgtaggacaccgtggttcgttggtctgctgcaaagggtataggtcgtgttacttcacgtctaacatctgttctgtctgatgaggtgttgtcatctgtattggagcttttttcaccaggagaggtactcgttgtggatatggcagcatggcttgcgtgtacttaaaatccaattaaaagcatgcattatctagctgaaagttattgtggttttcatggcattcagggagatggttcatggcatgggggttgtttggccttagctgaactggctcgtagagggttacttttgcctagaagttttccactagtcgtcccagttattgtgaaggtcgtactctatttcatgcacatgaatacttatatctatagtcatcgcatacgaagcaatggcatcacccacccacaatagtgcagaagttctgtggatttacatctaaatt

SEQ ID NO: 156771 - DNA, 845 bp, Arabidopsis thaliana landsberg; identical to SEQ ID NO: 4794

SEQ ID NO: 156772 - DNA, 532 bp, Arabidopsis thaliana landsberg
  unsure (1)..(532): unsure at all n locations
aagaagaaagattagactgatgcaaagaagttacgattaaagacagcatctcaggttacattagagaatttgccaacgagtgctttttgttntgtcaatgagtcctaaccaaattcttgcacaaatcttaaatgtaggagaaggagaaaaaaggaatcagaagatcgcaaagacagggaaagagatctcaaaaacaggaaaaggtaaatgtagcttgctcaatactgaagcattgtgaccatggttggtttgttggaaacctaattnnnnnnnnnnnnnnnnnnnnnngtctaggattcattgaccaaaaatggagaaaacgaagaagttgaagatccagagacgccatctcaggtgagatttaagacaatgccatcaaatgcttgtgttagtccaatgagtcctaaccaaagtcttgcaaatatcctaaatgtaggagaagcagataaaaggaaacagaagagctcggagagatcttaagagatcacaaaaacaggaaaaggtaaaatttgcctgctctataaccctgtga

SEQ ID NO: 156773 - DNA, 637 bp, Arabidopsis thaliana landsberg; identical to SEQ ID NO: 12773

SEQ ID NO: 156774 - DNA, 2427 bp, Arabidopsis thaliana landsberg
  unsure (1)..(2427): unsure at all n locations
atgccggaggacatgcgactacataaggttttccatgtgtggcaactttggaagcatgttccggatcctaatgctatcatacccgaaccaatacaagagttgagaacgaatctcacctatcttttaggacctcttggtattggtgaacgacaaatgcgggaactaaagaatagaaggatttcgaaaattcaagtattttgggtaaaatagaatcataaggttactacatgggaagatgaagagaagttaagggcaaaatatcaacagttttttagggagaaaacaaagaagatgaacccggaccatcaaatctttttgtaattcgggacgaattctaataagggagggggagaatgtagtgacccacacacgtccattagaacgagcataaaattgaacgacagaaagttgnnnnnnnnnnnnnnnnnnnnnnntatatgtgccataaaggcgataaaccttcaatgagcaaagaaataatgatttcagcaagaatgggcaagaacatgcaagaataggcgcaggacaacgtgataacactatattttactcattttaggtgtatgtttatcatcatttagctttgcatttgctcattgtatcatatcattttgcaccattttagcttgttttgcatacttaggcatctaggatcatcttgcattcgcattgcatgttttggtgtgttttcaggtgcaaaaggagcttaaaaggactctactcgatccattcactcgatccaggcagctacagaagaggcatcattctactcgacctctttactcgatccaggatgccacagaggaggctgcagtttactcgaccctcctactcgatcaaggcaacctcagacgaagcagtagattcaactactcgcccctcctactcgatccactactcgatccatttactcgaccaagggtggccatctctacaagacttgttgagctatcaaagcgtcttcgaatcctcctcattccccactcaaccagacatctgagcatacagataggagagcatgaagcatctacttgaccaattgatcactcggagcatagacacaaaggcgcagactttgcagcaccctctttactcgatccccattatcgagcactcgcccaaaccgcctgaagtcggttgtcttctagtaatctagggttttcaacattttactataatagatcactttgggatttgtccaaaggatcttgcttttatcctttactttttctttgtgttcttgaatcttcaaaacttaattactcttaatctatttctttttgcatttagttctttgagtaaagcagctcagtttgcttagatttacattttggtatgatttcagtaatttctgggtttgtgttcttagttatgttgcttgagtagtgattagggttcttgaggatggattacattagggtaatctctaggttagtcaggtggttaagattaggttagatcccttctggattggttggcccctatgcggtttttgctagctaatatgggaattcgaccatagacatgcagcgtccaaaagacgttcaaatggatgcatgatctactaattccagagatttataaactatagaccaagagattggctagtctgtttattggctttggtagattgttgcttaaactctgctctactatgtttcatcaacgagagttgagattaggaagtggtagagttatgagggactctatcacgagagtggatggacccggttttgaatctattgtctacgctatttgcctttcgcctgttagccacctgatgaaccctagagttgcccttatcaatgaatccatccttaggacttctattcttcttagatttatttgtattcaccccgtgattacacttttattcacctgttgcatgtttgtcaccttttatttgcattttagttctgaaatttgttgcatgtttgttctactcggcccaatgatcgagtagggctcttaagttctcatttctgttattcgaatcttgacttaggattgttactagaaacccaccatcattataatctagcttgacttagttgcttctatacacatcttgattggtagcaataacagtggacaggattaacacaccctatagctggactgaacctcacttcagcacataagtaggcttaaaaaacctacttatcaaatccaaagatatgggcaaggtaaaaatgaaacttgccaattctagttcgaaatggggtcatcctggcgaagccgaaacgggagaaagttgtcctgaatagatgatcattgactatatgttcctaaaaggtaataaaccatcaaagggcaaaagaaataactatttgggcaagaatgggcaaagatgagcaagaataggcaagattggccaacacaggcgtgccgcgggcgaagtttaaaaagccaagcgttgaccgccct

SEQ ID NO: 156775 - DNA, 248 bp, Arabidopsis thaliana landsberg
ctcaattttctccttctcttctcagcaaacaaaaatggttacaacccgaaacacgaaggccagagtcacctcagtctctcaccgccaatcacagcaagatcctgagtcgccggtgaagaagttcttcaagttggtcttaccttcaacgatgaaagataagatgatggtaattaccttatactttggaaaaacttgaaataaagtgtttgcatgtgtttgttattcctgtttcaatatctgcagattca

SEQ ID NO: 156776 - DNA, 1047 bp, Arabidopsis thaliana landsberg
aatgtcatgggtttcaataactgtttttttttacccttgttagttagaacagtctaaggctgcaatgagtattcctcagtcgaaatcttcatcaaatggatttccactcaaaagaggtgaaacagaggaagttttacataagacaaatacatcaaatacaggttagctgttgatattctgtgatttatgtgcaacgtcatattctgagtcctcatgcatgttgatatgtattcagtattcaacggggaagctggaagcttgaagaggctttcacttgatcggttagtgtacttcacaacatgtaagatcgggcatcatgtggaagtgcatctaaggaatggatcagtgtataccggtatatttcatgctgccaatgtagagaaggattttggtaaggctctgaatcagaatttttttccttatagagctgcacatacaaattcacactactttttcttgcaatgtataaaattgctttaaacttccaggaatcattctaaagatggcatgcttgattaaagacggtactttacgaggacataaatcccgttccgaatttgtcaggaagccgccttccaagacattcattattccggccgatgaacttgtgcaagttatagctaaggtgtgcctgcttttataaactgaagggaaatatttattgttttaagtttatgtcaatgtgttatattgcagagagactactttgagttttgacattgtcattactttatatcattgattttggtgttaggatctctctgtatcctcgaacaacatgtcaaatgcggttcagggtgagaaaccatcggagctgttgacagactcttctatatcacagacttatcatgttgatcgggaaaggcagctgcaacgctgggtacctgatgagactattccacacggtgcagatttggagaatgtgtttgataacccttggaataggtaatatacgcacacacacacacacacgcacatatatatttaaattttttgtcaaaattatacttattgaatgtttggaatgttgatttgccaactagattt

SEQ ID NO: 156777 - DNA, 999 bp, Arabidopsis thaliana landsberg; identical to SEQ ID NO: 10043

SEQ ID NO: 156778 - DNA, 1150 bp, Arabidopsis thaliana landsberg
aatgcactggagatgatgatagcacttgggtttttggcagcagtaaggtgcattgatacatatatagattatatacaacacacttcactttattgatactatttctatattatctttttttcttggtatgatcttttatttatatatcatcttatttgtaattatctatataaatagtgtaagagtgtccaacgagctcggtagtggaaaccccaaaggagccaagtttgcaacattgatagcggttttcacgtcactctctataggaatagttctattcttcgtttttttgtttttgaggggaagaatttcctacattttcactacaagtgaagctgtcgcggccgaagttgctgatctttctccacttttagcattttccatcctcttgaacagtgttcaacctgttctctctggtatatattttagctagttgacgcgtaatggttattatagtatcggattcgaaccaatatttggagtagtatttatctataattggtttaaaaccttaacaggagtggcaatcggagcgggatggcaaggatatgtggcttacgttaaccttgcttgctattaccttgtcggaattcctattggtattatccttggttatgtcgttggtttgcaagtgaaagtaagttttattttctttataattttctccttctttataacggtcttgaaaacaaaaatgtgtgaaagtaaaaaaattaacataaaaaaagttattctctaaattttcttagggcgtatggatcggaatgctctttggaatattcgttcagacttgtgtgcttaccgtcatgactctgagaacagattgggatcaacaggttataaatcgattactatgttttctaatttgttcctagcaagctatgtttttggtgcttattcttataccgtttgttgccaaatatattaggtgtcaacgtcgttgagacgtttaaatcggtgggttgtaccagaatctagagacgtaaaccaagtatcatcagaggaataaattggattctagattgtctttagcaccgtcacattttattcttaaaagctaaaatgtaacttttaggctatgttccaagattgtgaagacaagaatatgacaaatttgggtcgatttgatgtcctcgcaactaacttgtaa

SEQ ID NO: 156779 - DNA, 798 bp, Arabidopsis thaliana landsberg
tatcttatcaaaaactcgctctccatccaacaaaacccgaagaaagagagattcagactcaaatctctcagtaggaatggttagttacgttaagatcaaatactctctggtttatatctctgtcagaccatatctgaaaatgttttaaatttgttcttcttatgtaacgaattggggtatttggtatgcaggcaagtgaaacagagaacatcaagtatgaagaggtatctgttctttttttttatatatagaaaaaatgaatgtatacatgtagatagagaaatctggtttttgattggtggctatttatttatgtatgcagagtttcatcaagaacactcgaggaatgaaactgttcacgtgcaaatgggtaccagcaaagcaagagccaaaggctttagtctttatttgccatggatatgcaatggaatgtagcatcaccatgaacagttgagatacttcagccaacttcatgatttcttatgtattcatcaaagataatagatttgttaacaattttatcgatgtatatatgattggatcaggtactgcgaggaggctggtgaaagcaggatttgcggtatatggaattgattacgaaggacatggaaaatctgatgggcttagtgcttatgtcccaaactttgacctctcgttgatgatgtctctactcactacacaagcatttgcggtaatgttgactttatttgtgggggttaaaagtgaaatattgactttttagacctagactatatcttttgaagacactgtcaaaaccgcttttttttttactcattc

SEQ ID NO: 156780 - DNA, 310 bp, Arabidopsis thaliana landsberg
ctcacgatcttaaaagatgatatgcgcaagaatccgaccgctaatgtcgtcaccactagctttcactatctcagcaaccaaacactccagaatcgatctccgattactccctcgccgctccttctccgtcatgtcttattcaaccccacagagtcagatcatagaacacatcgtattattcaaaaccaaagatgacgctgaatccatcaaactcacctccatgataaacaaccccaatgcccttgcatatgtcgatcaagtgtttaacatctaaaactctactctccaccgtatctcctcagctaccgcc

SEQ ID NO: 156781 - DNA, 2301 bp, Arabidopsis thaliana landsberg
  unsure (1)..(2301): unsure at all n locations
aggagatcaaagatacccattagtaaagagtgaaggaggaagtgctggtgtaacgcaactcatcctcttcttcttcttcttcttcttcttctttgtttgctgccctgtctctctgtgtaatctcaagattctgattagggaaagactttaaaacggtgcgtatacggttagttagggagcggtaaattggtcagaccggaccattggttattagattgatttggtttaatgctactctaattcttaggttctttctaaacgcatcgttttgatatcacccttttctctctgaggccgtacgtggaagtttcaaactctcaccatctcctctctctctctcggtctgcagaagaaaaaaagctcggcaattttatatttttccatcgaagagattcccaattcttgnnnnnnnnnnnnnnnnnnnnnnnnnnnnncggtactccaatgtcttctttctgaccctagatttaacctggttcagttcgatagtagggtttgtttcccccttccgatcctcatttttgatgtcagaattgtgatctagtattcaatttcagattcttttttggaaattagggttcataacttaatagaagtttttaaatttcgtacagtggccatggcgttggctgattttgataaaattgtgtacattgaggtgtgatatagagcctgatttggttttataggtattgtttggtcatgaccaccaacaaagtcatagctatatgtcagtcaggaggggagtttgttactatcaaagatggatctttgtcgtattctggcggcgatgcttttgcaattgacattgatcagaatacttcaatgactgatttcaagtctgagctggctgaaaattttgggtttggtttggaggcaatgacccttaagtactttctccctggaaacaagaagacccttattaccatctctaaggacaaagatttcatacgaatggtcaacttttcttcagatgcagggactgtcgagatcttcgttattcccgaggaagctgctgccaaaaatctctccgtcatgccagctagtaggtagatgtttcttttgctttgttctagttctttcacacatttttatttccttggtctatagagtccaatgttagaacttgtgttggtttattgagctggtcatggtaagaattgtacgtggttattttcaagttgtttgcggctatgaggtctgccatttaatcgccaaaactattgcaataatgtaatgaagtgcagtgtcagtttcttcttactcataataattcatgtcatctgtgaatcaggttaaagaaagtaactaatctgtgaattgctactacaggtcaagtaggacaacggcatcagaaggggtggtacctgctatttgtgctgtaggagatggtgtcgaggaggatatggcaaatgattttcaaattgaaatggcgatgccagatgatagtccgttgccgtgcaattttgttttggttgatcagaggcatcacacagcaatacagcagtgggaaaacgtcatcacgggtgttgatcaacggtttaatacctttcttgaattccgagatgcattacacaagtattcagtcgcccatgggtttgcttacaaatacaagaaaaatgacagccatcgagtgtctgtcaaatgcaaagctcaaggttgtccatggcgtatcactgcatcgaggctatcaacgactcagttaatatgtatcaagaaaatgaacccgaggcacacttgtgagagagctgtcatcaaacctggttaccgtgcaactagaggatgggtaagaaccatcttgaaagagaagttgaaagccttcccagactacaagcccaaggatatcgctgaggacataaagaaagagtatgggattcaactgaattactcacaggcatggagggcaaaagagattgcccgagagcagcttcaaggttcttataaaaaggcatatagtcaacttccttctttctgcgagaagatcagggagacaaatcctggaagtattgccattttcatgacaaaagaagattcgagtttccatcggcttttcatatcgttctatgcatcaatatctgggtttagacaaggttgtcgtcctctccttttccttgacaccgccgacttaaactctaagtaccaaggggttatgcttgttgctacagctcctgatgccgaagatggaatatttccagtagcttttgcagttgtggatgctgagacagaagataactgggtttggtttttggagcacctcaaattggcactggccgatccccggacaatcacatttgttgcaga

SEQ ID NO: 156782 - DNA, 2473 bp, Arabidopsis thaliana landsberg
catcataccagagtcttggaatactaactacttaatcttaaccaagtggtcgtggtctagtggtttccagttattttaatagattttcagagaattaaaatagatttttagtactacaagcagctcaggttcgtatgtcgtattgtgtcacttttggtttttgtgatttttctgttctgaagctaacaatgtgtaaacttaaaaatatgtatttgcagatagattgctttgatgctgcaacactggaaatggattacaggattgtaactaactccattgtgtgtggctccttgggtgttggatttggacctcttgctgttggtccacgatggattgcgtatagtggaagtcgtattgctacctcaagttctgcaatttttacttcagaaattgtctcactgtcaacatcatcacccagtgttgcacaatttgcaagagactcgagtaagcagcttgcttctgggatagcaaatcttggagacaaagggtacagatcattgactaaatactgctcagaggttttgcccaatccgtatattcctggtttgaaaggcattggagttggtaatgaaaaagtagcagatgcagagagcataggaatggtatacacaaaatccttctcaatgtttttgctttcaagttgattttctccattggtatgcgccttaaccatattcatggtttgggcaggttattgtcaaagatatcacaaacaaaagcgtcataacgcagtttaaggcacacaagagtccgatttcagctttgtgctttgaccaaagcggcctgcttttggtgactgcttcgattcaggggcataatattaacgtctttagaataatgccaacaatctctacaagcagagctgtgaagacaacgacttttgcccatctgttcaggcttcagcgcggttttactaatgcggtaagcagagcccttcacttacacatgttgaaaaatgtgatacttatttagttaccttaatgtggattttcaggtgatacaagacatatgtttcagcaaggatagcaatttgattgtggttggttcttcaagagggacaagtcatctttttgagattaatcctgagaaagagggggatgctccggttcctatgtctgcaatcagtaggataagaagcggaaacagcagcggatggattgggactgtgagcggtgcagcatctgcagcagctggaatggttgcaggctcggttccgggtacagtcacatccactttctgttactgcgatgaaaagagtaacaatagctactatggttctgttgctgatatgtgctccaagacaaatcttctggtgtttgctccttctggatgtatgacacagtatgcgttacgggaacatcaggttggtgttggtcatgagactgttgcaatgacggggtttgattctgagtcaggtctagagacagaaggaaaattagcggtagatccaataagaaggtggtccatgatccaaaaccaatctagaagagagacgcatgacccccacagtgacatatatggaggtggaacatcagtggattctaaaagtaaagtgtttccagaggttgttagaaaacaaagtgttgaggaagcttggaaagtatctaagaaaggaactacccgtgtggtggataagcgtcatttgtacatatatgaagcagaacaacagcaaacgcatctgccgactcagctacccttatgggcaaggcgaaaggtaaagtttccttttttggggaatatggttatgtgttgtttggatgatctctcatacttcgtatattttgcacaaaacagtttaggtttcaagaattggtattgaatcggggtgaagagattagtggtggaggtggaagggagatggagattgaaggaatccaaactcgaactattgaagcaagaacaagagatttggttccagtctggggttatctccaatctccaaggtctcagcaagtgataaacgagtgagttttctgatactaattatcctcgacacttgaaagtttttgtctctgtctctgtcacagtttcttgacaatgatactatgacacagatcaatacagagtccaagtaccactacacaagatgacaaagtggctactctggagggtcatggaacagagactgatctcggtgctgtacatagcgaagaacagacacaaagcgagcctgtagataaagaaggtattgcagaggagaagaatcacagtgaagatgaggatgaagagcaagtggattagaagattggtttattttttctcacacatactcgacttcaacaacagaatagcaaaaaaataactctggaaaattgtatagaaaagaaaaaggaaaattgacatatcttttagatgtaaatagctttagtactttttcttctttttttttacacaatattattagcccattgattcatgaacatagataaaaaaaaaaatacattattttactaccaccttttgtattcgagtt

SEQ ID NO: 156783 - DNA, 535 bp, Arabidopsis thaliana landsberg
cctaaacaacagtttaatggaggctaccgatagcaaaatccaccaccagggttcactcaacaaccacaacaagcaccagcagctcaagatcctgaaattaagatacttattcaatagatcattcaaggataagctactggagctatggcttttgaaaagaatatagctgaattacacaacaagatcgattgttcttacaacgatctaaatgtcaagttcaaagctctgaattccaaagtcaagtatgtggagagtcaatttgcatcaacctctgctccgaagcatcctcagcaacttccagggaaagtagttcagaatcctaaggactatgctactgcaaatgctatcaacatccaccaagaagatgagtctccaccaagtcatcagactcccactactgaggacaatatgattcaagaagggggggattcaactcaaattgatgcacctgtcatccaacaattcatctgagactatagagcacacacctttactgaatactcatcactctgaaaagcatttcaaaagagaaaaa

SEQ ID NO: 156784 - DNA, 2071 bp, Arabidopsis thaliana landsberg
atgatcttccagtctaaaggtaagaccactctttgatggaccacaacctcaactttccgaatcagccggcttgtgtttcaggagccaagacacaacaaccaaatcaaaaatgacaactcggctccaaaaaaatatggagtttggcaaggcttacctttgctataaataagttgagcattggacttgaaataactttgtctaatgaattcttacttgtattttataagacgaaaacgtaaatcttgcattaagcatttatacaaattttcataattgataaaattcttacattatcatactagaaaatcgaaaatgcattccaccattatacgtgttagtactaatcggagttttaacttgtacaaactaataacaaatatgacggagagagtcgaaagcttatcacaatggcatttaccgttttgcccttgtcgttgtaatttcaacatttccaatttcttaacgcctttactgacatcgaccccaaaaagaagaaaaaaaagaggagaagagtcaaacctgagaatctcatctctctcagaagtagaagaagaagaagaagacgatgaagaagcgaacgatgtccgcgtggggatcggcgattttaatcttcataatacttatgatcgtcactcccacaatccctcaatctcaggcttaccacaatttcgccgatcaacgctccttcctcggtataaaattcacactcttctctcatcatcatcattttcttcttaaatacccttttgaatttttagggttttgatcttacaaatccattttctcagggattccaaattttttaaacgtcatctccaacttccctttcctcatcatcggccttattggtcttatcctctgcttttacccagaagattactttagctttaggtgcgtaattacatacttcttctttgtgaaatccagattcaaattagttaaagtctctgtgtattgaaacagtttgcgaggtgagaaaataggatggacttgcttttacatcggtgtagctgctgttgctattggatcttcttactatcatcttcacccaaacgatgctactctactctgggatcgacttcccgtacgctcttattctttctcttctcttctctgagattttgtttgctttgtcttgtttttgatcactggtttcgattgctttttggtttagatgactattgctttcacatcaatcatggctatatttgtaatcgagaggattgatgagcataagggtacttactccattgctcctttacttcttgctggtcttgttagcattttgtattggaggttagtcaaatccttaaactatctctagtggttttagcgatacaatgttgagatagagtaagctgacatgagggctgtgattgtaggtttttcgatgaccttaggccatatgctttggttcagtttgttccttgcattgtgattccgttgatggctattttattgcctccaatgtatactcactccacttattggctatgggctgcaggttagtgcttattgttctgttgatactcattccacatattaccactctctaattttgtgacgtcaggataatacttaaaaacgttgtagcaaagcgggagatggcgaagaagagagagagtcccaagctcatcaaaatcaaagacgccattaaactcatcaaccaacaagtcagtctcattggtatcgtccttgaacaaagagaaccaaaacaatgtcgcaacaatggtacttatccaaaaaaaaacaaaatttgagtcaaatacatagaattttgcttgaatctgaatcttagttggtttgttttgtgaaagccctaacatttgacccaacaaaatctgaaagttggatttttttcttagattggatttgcacgctacggataattgatgatacgtatccaagtcctgagctcactgtttatgtatatagtaggacttttggcagccttcctcaaatcaagaacctcgacgacatgcctctgcccactcgcattaaggcccagagagtcaaaattaaacacttgtgtgttttgtggaggaggtaataaagtttggattttgattgt

SEQ ID NO: 156785 - DNA, 1362 bp, Arabidopsis thaliana landsberg; identical to SEQ ID NO: 63379

SEQ ID NO: 156786 - DNA, 1262 bp, Arabidopsis thaliana landsberg
  unsure (1)..(1262): unsure at all n locations
gtatgcaagacggaggagggtcaagggaagcatggccagggcaggttagggcagcggcggtgttcaagtgtgttagagtaacggcagtggaggacggggatgatgagtacgcgtaccaagcggtggtgaaaatcggcggccatgtctttaaaggattcttgtacgatcaagggcttgnnnnnnnnnnnnnnnnnnnnnnnnnnncggatttgcatttaggtggttcagccaataaccataacggagtttctgcctcggcgcctattctcgacccacctaatgttgtttatggtggtggtggaggttcaggcggtgggttttacagttaaaccaaattcaagaaagtttactgtttgaaagaaaagattttctctaatgtttttatccagtggggttagatacaaacgaatatttcactgttgtatgaattgtccatttggacaaactacttctaatgctgcaacagacgacgtatcgacagattttattttacttaactggtagtgtataaacacctaacgttttgcttgaaatggcgtttttttttaagtatagatctcatgtattcctaggactgaaacacccgcacgaaaatatgcggcaactcatacataaaaccatatttgtttgttaagacttgttcgataattttgttgtattaattagtttgttatcttagcaatctaaattaattctaacattataactaaaatttcttcaaatgagttgtgtaagatattaacttttattcacaaaccattgatcctagaataatgtccaagttaatttagcaaaaaaataaagtccattttctcatgcacttatcatattagtaaatacaaaatgttatagttgtagtcgtgtagatgttgttacatataattagtaaatacgaaatgttgtaggcttatagctaaatcaacgaaaattataggtatatatattttatttatttgaagtgtcactaacatgatatacgtatactagactactagttattatattaaggtattttctttaactatgtcggccgattttgtgttcatttgtcagcccatattattgtatcagttacagcttttgaatcaaaatttggatttttgatcatatatattccctaagctataccttcatatgcatcaattcatgagttatccccattctatttttaggtttcaaaagctgtttttgctataaactgactcactgatgagcctatttgtgcactttttagtgttactattctcactgacttagattaa

SEQ ID NO: 156787 - DNA, 492 bp, Arabidopsis thaliana landsberg
ggttctaggggttcattggagaatgaaggaagcttagcacaagcagtgagtaaaggtggatgtggtgatctctgcaattccatcaaagcatgttcttgatcagaaaactcctcgtcagagttatcaaacaagctggttccatcaaggtctcttcttatatcttaatcatggatttttttctgttacaccaattcgatcatgtcttaagtatagatcacattgtagtattgtttaatattgttcttgaatttacttttggctgatgatgagattgagaggatagatatctaactagagcagaacatggattaattactgttgcagaggtttattcctgctgaatatggagcaaatcctgataaaactcaagtctcggatcttgatcatggcttctattcgaagaaaccagagattacccatatgatagaatcagagggagattccatataaatacatttgctgcggacggttcatgagagttgttcttccctc

SEQ ID NO: 156788 - DNA, 1375 bp, Arabidopsis thaliana landsberg
tatgttaatcataatacatgaaatatattgtaacatgtgatggctcttaaatttgtttggacatgggtggtcaggttaaacttcttttgagagtgcaccacgtcaatttggttagtttggttggatattgtgatgaagaaagcaacttggccctgctttatgagtatgctccgaacggagacttaaaacaacatctatcaggtataaatttgaatttcccacattttaaaatagtgattacttagccatattttaatgttcatgcttttataacattactaaaagtttcttaattataggagaacggggtggctctccattgaagtggtcaagtagactaaaaattgtcgtcgaaactgcgcaaggttcgttcttagctcaaatgcattaatcactttatatggatcatctaacatgaacaatttaattatataaatataggattagaatacttgcatacgggttgcaaacctccaatggtacatcgtgatcccaaaacaacaaatatacttttagacgaacacttccaagcaaaactcgctgatttggcctttcaagatcctttccagttggaggtgaaactcatgtttcaacagctgttgctggaactcctggatatttggatcccgagtaagttttacatcaccaaactagtttgattcaaattgtttttcctcattcatttgaaaaaaaaaaatatttcatgttttgtttgtagatatcatcgaacaaataggttgaacgaaaagagtgatgtatatagctttgggattgtattattggagatcatcacaagtcgacctgtgattcagcatacccgagagaagccgcacatagcagcatgggtgggatacatgcttactaagggagatattgagaacgttgtggatccaagactcaatagagattatgagcctacttctgtttggaaggctcttgagatagcaatgtcttgcgtgaatccttcttcggagaaaagaccaaccatgtctcaagttactaatgaactaaagcaatgtctaacattagaaaactcaaagcgaggagtgagagaagacatgggatcaagaagttctgttgaaatgagcacaagctttacaaccgaaattaacccaaaagcacgataacttgtgccaaaaaaaatcccatggttattaaggattttggatttccctgacttactttacaaaaatataatttttggtggtcatttatttgtacgacttcattgtatttacttgtgattgtggtcgtatgtgatattagtgtggatgttttgtttggtttggtttggttttatgttggttgtggccttgtgtgtgttttggcggtgatccatcataaatgattcttttgcaaatctctgatgattttt

SEQ ID NO: 156789 - DNA, 360 bp, Arabidopsis thaliana landsberg; identical to SEQ ID NO: 74037

SEQ ID NO: 156790 - DNA, 642 bp, Arabidopsis thaliana landsberg
  unsure (1)..(642): unsure at all n locations
cttttcttctacagaaccctaatttcatgttctaggtgtctctcgtatggttctcatctcattgatttctcaatctctagggtttagtggttcatccaaattcgtaccctaatgggtgccgtagcgatcaatcgtaaacgcagcgacgaatccttcaatttcattaatcaacaatcaacgaaccctnnnnnnnnnnnnnnnnnnnnnnnngcttccaagaaacgaagattctcattcgctatatctgaagattctggtaagccagcgtcttcaaacccaacaatttcgaggatttcaaggtaccctgatgctaaagctcctcttagacgagagattcatgctcctagtagaggaattcttagatatggtaaagctaaatctagtgattacagcgaaaaggacgcaaatttctttgttcgtaagtatgatgatgcaaagagatcagctttggaagctttgagatttggtaataaaggtaaagactttgttgatttgcgtggtgaggttgaaaaggaggaagttgtttctgatgattcaagtgttcaagcaattgaagttattgattgtgatgattgatgaggagaagaagaatcttcagccttcgttttcttctggggtactgatgttaagaaggggagaact

SEQ ID NO: 156791 - DNA, 527 bp, Arabidopsis thaliana landsberg; identical to SEQ ID NO: 9887

SEQ ID NO: 156792 - DNA, 695 bp, Arabidopsis thaliana landsberg
ccattagaatttcatatttgcttgagactaaaccttttactttcattactaatcctttatacttgatatttgctcttgtcttataggtgtatatgaacctacgaagtcacgaccgagcaaatttaatagaagagattagcgtaatccgccagttcgaaagagaaaatgttagagcaagaagagaacgagaacgacttgaacaccttgctcggttaggcgtcatgaatgaacccagaggtgggggccataatggaaatggccaagctaatggggatggtcatatgccacaacatcaacatagagctcatcaaccaattggagcctttgatgaaccaaacatccggggaaatagaaactgtattcaagctcatgcggttgagaacaacaactttgagaggaaatcaagcctcatcaacatggttcaaagctctaagttccatggttgaaagagaaaacgctcgagcaagaagagaacgagaacgacttgaacaccttgctcagttaggtgtcatgaatgaacccagagttgggggccataatggaaatggccaagctaatgggcatggccatatgccacaacaccaacgaggagctcatcaatccattgaagcctttgttgaaccaaacattcacggaaatagaaacggtattcaagctcctctagttgagaacaacaactttgagattaaatcaag

SEQ ID NO: 156793 - DNA, 1539 bp, Arabidopsis thaliana landsberg
  unsure (1)..(1539): unsure at all n locations
tggttgatgggagttccagcgggttttaagttaaatacagaattggctggagttttgggcatggtatctcttaatgtaatacagatatggtctactctctgggtcttcatggcttctttcatcttttgtttgataagagtaattgccatccttggaattacttttggtgctacagtatctgccgcatttgtcatagatgtcattacttttgcaacacttcatataatggctcttcactgggcaatcacacttgtgtattctcaccaaatccaagccttagcagctttgtggaggcttttcaggtaaatcttgagtattaaattagatgagttcattcattaagctgataactaacatctggtgaatcggtttcttggttttcttaaatctaaaaggaggagacatgcaatacgttttccgtttcctttttaaacttcttgaattcaatgaaaatactaaagtattgttatatcttcttactggtgaaccatttttgttcacctcagttccttacttaaagtaaccttaccttgaattcttctttgttcttccagagggcgaaaattgaatcctnnnnnnnnnnnnnnnnnnnnnnnnnnnnnnnnnnngaagcaacatgtagtgggatctcttctgttcactcctcttctgcttctcttgccaacaacatcagttttctacatctttttcaccattacgagcactacaataaactccatatgtatgttgattgaatttgccatctccgtcatccatgcaacaccatatgcagaggttatgatttggcttgttaggcgtaaaagattcccctgtggtgtttggtttgaaatggaacactgtggagagcatatccttaaatccaatgatgccttcgaagactccaaaagtctactagaagaacacggtactcctgagaagaattctctaatggtttccaatcttcgcagcaattttctaaccttaggtaaacttgtagattgttccaagtctaatgacaagttaatctagatgatctgttatgcttttgtatggtattcaatttttgctggcgtttatattgatcaaattgcaggacagattcttttgcctcgctataaatcaattttttcaggaatatcagcttcttctctgacaacatcagctcgcggagtcctcagtgggaagaggtgattttatatgatcttgatcacaaaatttaagtcattctctctctctctctctattcaaaatcacttaccttctctcgtcttttccagaatgccatcaaaactggggcttgatcttcctcctccgaggccatggctccacatgccattgagacagtactggatgctatgccataattccatcagctcatgtggcaaatgatgacttctccagctgatctcttagcgttttaatttaactccacaagacaatgagataactaggggagtaaggggtgagaatcgttaacattggaaaacatggattcctttttcaatatttgtggccctttttacttgatttgttcatcagccttgtctctggtttaactat

SEQ ID NO: 156794 - DNA, 572 bp, Arabidopsis thaliana landsberg
ctgttctctttgccacggttgcatttgctgccattttcacggttccaggaggtgacgacgaccacggtgtggccgttatggtccatgcaacatctttcaagatattctttatattcaacgcgatcgcgctcttcacttcgttagcagtagttgtcgtgcaaatcacgcttgtaagaggagagactaaaacggagagacgtgtggtggaagtaataaataagctcatgtggctcgcttctgtctgcaccaccgtggcattcatttcctcatcgtacattgtggttggtcggagaaatagatacgcggcggttgtggtaacggtcataggaactgttacgatgaccggaattttgagtataatgacatattatgtggtgaaatcgaagaggacgaggatagtaaggaagaaggagaagaagaaatctgctagaaatgggacgagttcgtggcatcatgcgaatccgtcagagactgaatcggaggttaatccgatatacgcaatctgatcgatgatgatgattatccatcgaaattcgttttgttttctttctttttgttggtgttcttgatct

SEQ ID NO: 156795 - DNA, 439 bp, Arabidopsis thaliana landsberg
  unsure (1)..(439): unsure at all n locations
ggatcgctttcgttcaatgtaaccggcgaaacagagcaatctgaaattatcttagggctatagttatggatattttcatggatttcttcaataaaccttctgttacagagacattcgtcgacgttttgctatgtgcagttccgatttgggtcgctgttatgatcgggcttctgatcggttggtcttggcgtcctagatggactagcttggtttatttaggtttccgttctaagcttcggtttctatgtactgttcctcctggatttggtgctcgtcgtatttggcttgctttcaccgctctctctgttttttccgtttgttcaagaatcggttcaacctccaataaatcctcggttaataacggttcctctaaaccggtcgaagaagaagcattttcacggntagtcaataaagaaatgaattatgtttgactctgttc

SEQ ID NO: 156796 - DNA, 657 bp, Arabidopsis thaliana landsberg
gatctcacagatgaatgcaaataatgatcaatacgagagagcaaccataagatacggagattctcagcctcacagagcaccaaggtcagtccgtacacattcttattgttaaatattatttgaataaacaatatttaacttaaattttatgttgtttatatatatgcacttaaatgtttgtgatatagttaaaaataaagctaataattttcttacaacagttggaacccgagctacggcatcttggagagccagcattttgtggaaccaaacacaaccagacacttcttacatgaggttattactttatatatacataaatatagtatacatacagataattaatccatgtcttaagagatatagtggttagaatgtactaagatttgacatgataatttgtgttaattctttcaaaatcgtttctttacatgcggatctctctgaatgattttgttttccaatcttataggatcagagaaatatatcgttgggatcgggtattcagaacttcgaaaccagtgaagcaaacgagctagatttggaattgagattgtaactttgacttgtgtatgaactcatattattggatataaggccatggagttgtttatacattcaaagcaatttagagaaataatatataggtcatttgat

SEQ ID NO: 156797 - DNA, 1155 bp, Arabidopsis thaliana landsberg; identical to SEQ ID NO: 55746

SEQ ID NO: 156798 - DNA, 1054 bp, Arabidopsis thaliana landsberg; identical to SEQ ID NO: 47815

SEQ ID NO: 156799 - DNA, 492 bp, Arabidopsis thaliana landsberg
tgattttgtgaaacaaagttaaacgttatttctatggtatgcatgtatatgtatgattttaggaggattgcaaagagtggagacgtatgagaagagtgtttggagcggttcatgatttgcagaatccacctagaggcactctcacattgaggttcttagtctacggaagcgcaggagtcaattggatccaatcgccgaacgctattcccgctgattggaccgccggagccacctacgactccaacattctacttacttaattgattcacttttcatcagtgtgtttttatcatatagtatttattatggtttctgtatgcaatggctaatatatttaaataatgccctctaggacaatataattaatgatgataatataaataatcgtagtagattcatatataatttatgtattgtgtctcactaagaagattgtaatggtttgtatgagtttgattttgatggaataaatcagtactaatcaatttatca

SEQ ID NO: 156800 - DNA, 1428 bp, Arabidopsis thaliana landsberg
  unsure (1)..(1428): unsure at all n locations
ttcttgcaaagattcatttacatcacacactacaagggaatttcgtagcttaaccgtaccagtagcggaacctatctccgagacaaagagtactagaaagagaagagatttgggtagtatatgtgtcttgttcagccagcatcttgatgaagatgtgaccaagcatcagaagaaggtatagttgggtttctaactgtaactttagttaccttcgatcatgtgaccttattccttgctttttcttttacaattggtagtgaattttcagttttgcattaaccaagtcttctagacaaaagtaaacctcttaacaatctggcatatgatatgtttaacagattttggcaaggtttgatatctcggaagcttcctccatgaaggaagcaacacacttcatagctgataactttacgcgcacaaggaacatgctagaggcaatcgcttcaggcaagccagtgggcacaacacaatggcttgaaagcatcgatcaagtaaacatatacgttgatgaggatatgtatatacttcaagattcaaagaaggagaaggagttctgtttcaacatgggggtttctttggctcgtgcactccagtttccgctactacaggtatctaatactcttttggtttcaattctttttttacctcgtttattctcccttttcggctcattatatttacatatttcagggaagaagagtttttatcactccaaatacaaagcctgctttaaacacaannnnnnnnnnnnnnnnnnnnnnnnntggactggtaatcatttcttcacctttttacactttcatgtgcatgttttcaaaactttttctccccgaaactgatccataatgaaaacaaatgccagcctgtagaaagactcggaagatcttccctaagcgaagataaggtcccagagaatcttctggtcttatcatgtgaagaggatcgcgctatctgtataccctttctggaaagaggtgagttttatagtttggtctatataacttctgcttttgtatgtggtagatttcacggggaaatcacagtttttcttttccttcttctcaggggccgaggtatatagctcggagttactactaaatgggatagttacccaaaggcttgagtatgagaggtgggtattgttattagacaataaattcttatatttgtcgaacaaagctttgtctcatctcattcatggcttcttacttgggaatcttgaactgtgttaggtaccgtctctacgcagaccatgtgagaagaacgcggtcaacgatatggatcaaagacgggaaaggtaagttccaacgtcgtagcgggtaaaagagtaaatgtgatcaaactcctatatgatagttcagttttagattagtttagaaagtggctgtatatgtaacatgtttggcttaactcgtgtaactataatct

SEQ ID NO: 156801 - DNA, 974 bp, Arabidopsis thaliana landsberg; identical to SEQ ID NO: 54397

SEQ ID NO: 156802 - DNA, 557 bp, Arabidopsis thaliana landsberg; identical to SEQ ID NO: 68025

SEQ ID NO: 156803 - DNA, 1254 bp, Arabidopsis thaliana landsberg; identical to SEQ ID NO: 33097

SEQ ID NO: 156804 - DNA, 203 bp, Arabidopsis thaliana landsberg
aatcgttgaagaaaggtcatacaaccacaacaccaactcgtgtgacggaagtggaatgtgtggtcactacactcagatggtgtggcggccccccaaaaggctagaatgcgcccgtgtggtgtgtgagaacggtgccgaaaatttcatcacttgtaactacgacccaccgggtaactacgccgccgagaagccatctaaaaaaa

SEQ ID NO: 156805 - DNA, 955 bp, Arabidopsis thaliana landsberg
gatcccctgcaatgattctagggtttgctacacatggaagagctgaggaagccatgaatttcttcgaccgtatggtggataaaagagagaatgttagaccgaactcagtcacgtttgttggcttgctcatcgcctgcaaccaccgaggctttgtaaacaaagggcgccagtattttggacatgatggtcagagattagtgcatcgaacctgcgttggagcattacgggtgcatcgtcgaccttattgcgcgtgcaggctacattactgaagctattgacatggtaatgagcatgccaatgaaaccagatgcagtgatatggagaagtctccttgatgcttgttgcaaaaagggtgatagtgtggagctaagtgaagaaattgctagaaatattattggaacaaagggaagataacgaaagctccaatggtaactgcagtggtgcatatgtactgttgtctagagtttatgcatcagctagccgctggaacgatgttggaatcgttagaaaactaatgagtgaacatggaattagaaaagagcctggatgcagttctattgagataaatggcatctcccacgagtttttcgcaggagacacgtcgcatcctcagaccaaacagatataccaacagttgaaggtgatcgacgacaggctaagatcaattggttatttaccggatcgctctcaagcacctttagtggatgccaccaatgatggtagcaaagagtattcccttaggctgcacagtgaaagacttgccattgcttttggtctgataaacttaccacctcagactccaatccgtatattcaagaatctacgtgtctgcaacgattgccacgaggttactaaactgatctcaaaagtcttcaacactgagatcatcgtgagagatcgtgttcgtttccatcacttcaaagatggatcctgctcttgtttagactactggtag

SEQ ID NO: 156806 - DNA, 796 bp, Arabidopsis thaliana landsberg
  unsure (1)..(796): unsure at all n locations
atggcccatgaagcccaacataatgaacactgttctgtctttaaacttaagcggtatgacccgaaatgattcaacccgacccgatcgcccatatcttgccccgttcgcattcggtttgcccagagctcaagaaacatccctccataatttgcttcttttttctccaattctcacacattcttctgcttcgttaattntctactcgatttcgctcttcaggtatgtctcaggcccctaattgtcgttactttgactttacaatgaagtattagggtttatggtttatacacacacgtacaaaagtaatctcgtgctagatccgatttgaattgtgaaaggaagctctttttgttaataccctgatttgggtacctctcaagcttcatgattttgcataattttattgaataattgtgggtattcgatgattctgtagaaatttgacaatgaagcttgacactagtggattggagacaactatgcctgtgattggctttggatcgaacagtgagatgcttgatgggttttcgtctgcaccttcgtttgatgttcctcgtaccaccgatgtgagttttagttacgaaattagagttctttcggattccaatatactttgattttgcttttatttgattgtgatatgttgcttttgtttgttgttggttttttagtttgatgggtttcagaaaaaagctgtggagatggtgaagcttgcaaaccctccccctacacttgcgtttatctttaaggaagaagttgaggtagctgctgattctcgagctagcatgggaggata

SEQ ID NO: 156807 - DNA, 922 bp, Arabidopsis thaliana landsberg
  unsure (1)..(922): unsure at all n locations
gtgccttcttttgattctattagtgtaagacaagctcattttttttgtggtccaagtaatgaatcaatctcacaagtgactaaggattcatgtcagtcccttgttgttgttgtctttgatcgccggtttcctcctgactcacacggtgcagtagtttatcgtaatgccttgtggaaagctgaaatcggacaatggttttctagttgtgatgcagttgctaaagaagttgacattattgaagtaagttttgttttggtatcttgaaacaatgttgtttctttgattttgttataatggttgtgtgttttttttggtagccaattggtgagagaaagtgtatgagtgattgtagtggtcaaggtgtttgtaaccatgaatttggattatgtcgttgcttccatggatttacaggttagtgtttatgctattttaatcttcctaagccaaagttgattgctttgtaaatgatggtgtgtaaatgaagctactgtgtccggttctgtgttggagaagattgtttacaaaatcttcgtttagattgcaattatgagaaaacaccagagatgccatacggaaaatgggttgttttgatttgttccagacattgtgacacaacaagaacaatgtgcttttgtggagaaggcacaaaannnnnnnnnnnnnnnnnnnnnnagtcatgtggatttcaaatcaagtaagttttacctgattcttttctttgaaatctcaatgcttctcaaatcaagtaaaaactctttttaagacatgtattttcagttcgcaggcgaatcctgatgaacctaaaatgacagattggtcgaaaccagacttagatattttatgtttttctttaattccaatattatattttgtaatcctaagttttgaaatatgagtttttgattttgcaaatttttttttt

SEQ ID NO: 156808 - DNA, 526 bp, Arabidopsis thaliana landsberg
gcagctcgctctttgcgcttacttaaacgtaatcgatctccacgataacgaattatccggtcagattccgcagcaattaggtctattagcgaggctctcggcgtttgatgtgtcgaataacaaactttccggtcagattccgacgtatttgtcgaataggactgggaatttcccgaggtttaacgcgagttcgtttatagggaataaaggattgtatggttatccgttgcaggagatgatgatgaagagtaaaggtttgtctgtgatggccattgttgggattggacttgggagtggaatcgcgagcttgatgattagttttactggtgtttgtttatggttgaggattactgagaagaagattgttgaagaagaaggtaagattagtcaatctatgcctgattactaaacgtaagattaattttttcttaattaaggattttgattgttaattacggctttgaagaagattcttgatactgtatgtggttctattcttttatatttatgtttcagttctgtttta

SEQ ID NO: 156809 - DNA, 313 bp, Arabidopsis thaliana landsberg
tttcaggctggtgatgctttgattcagttctatcacaatttcatcactgactttgagacgaagatcaatcttctgaagcttgcgcattttgctgtggtggtctctcgacagtactctgagaaagaagctgcagttagctatcttgaaagcgtgattgagaaacttagagctactaaagggcctaggatttctgcaccaatcgtttatattgtaacacaaatagctgccttcgagcttgatcaatgggatcacaaagagttcgccaaaattttggacgatggaaagagcctctctttgaagtttgactgacatt

SEQ ID NO: 156810 - DNA, 1154 bp, Arabidopsis thaliana landsberg
cgttcgagtggaggcggtgtctttagctcaaaccatggctagtaacaaccctcacgacaacctttctgaccaaactccttctgatgatttcttcgagcaaatcctcggccttcctaacttctcagcctcttctgccgccggtttatctggagttgacggaggattaggtggtggagcaccgcctatgatgctgcagttgggttccggagaagaaggaagtcacatgggtggcttaggaggaagtggaccaactgggtttcacaatcagatgtttcctttggggttaagtcttgatcaagggaaaggacctgggtttcttagacctgaaggaggacatggaagtgggaaaagattctcagatgatgttgttgataatcgatgttcttctatgaaacctgtaagttctgttcttgctttggtgtttgattattagaaatgggaagaaatcgattttgagggttttgaatagaacatttttggtaacttttgttttagtttttgatttgtggtaagtaactttaacaaagttgatgatttgcgttatgtgctttattttggctcagacttgttgaatctaatcgattttggtttgtttagtaaactaaggttagctcttgttactctatgagcaacttctcactagttcatgtagctgtgtggcttatcttgccttctaagttggtcaaatgagtaatcttaagggtctaacttaaattattctcttacaactaatggagtcaaatccttgtgcaaatggtttattttcgtttggtcttatttcttctgtgtgttgtctggaaggttttccacgggcagcctatgcaacagccacctccatcggccccacatcagcctacttcaatccgtcccagggttcgagctaggcgtggtcaggctactgatccacatagcatcgctgagcgggtatatttcagattctcttttgtatttccctgtgatatactatgttggtggcgagttggttgtagttaaaaatatgtttcggatataaaaaaatgttaacattgtgtaatgatctcttgattctatggagggattacctaaaagtttgttttactttaccacagctacgtagagaaagaatagcagaacggatcagggcgctgcaggaacttgtacctactgtgaacaag

SEQ ID NO: 156811 - DNA, 299 bp, Arabidopsis thaliana landsberg
cccgttactgtcgatgagcagctcgagaaattcgctgcggaaaacgagactcttaaagctgattcgtcttccacacaagacattctccaaaagtaagtctttttgcttcaagttttgagtgagactgtgagagaatcttgctatgctttagtacatagccttagccttagatactgtattggtcgaggtctacttgaagatgttgttgtgtggttgatttgcaggaggatatctgaagttagagataaggaaagacgtaaaactttagcagagatcatttactgtttagtggtacacag

SEQ ID NO: 156812 - DNA, 847 bp, Arabidopsis thaliana landsberg
gccaagcaaagcttaaagcttaaagctgagaaagcatttcttattatctatcagtccactgcaatattctggagatttctttgtggctctgcttttgttcttttcttctactgtttattttgtgtgttttagcttgtgaaattcaaagtgaagatcaagaaattcgtctattccaaaaaaatcgtataatcgaattcaatagcatggttggtattttctccaggttttctgttgttagaggcagccatagacgaacacagagtgccatcgtaagctctcttttctatttgcttgtctgattccagtagaggttatatggaacaggagattttgttctgttagatttgtccttgagctttatgttcatagtgattcctttttagtatgacacttctccagtacatttgtttaattgttggacagattctttgctcatatcatagatgctaactaggctcaaagagttgatgattagaatgggagatgtttagtgcttcttctgttcttttgagttcctttcattggttcaagattctctctgttcttttgtaatctgattacctttaatagatttcaagctatagttgaatctgagacccttttatttatctggaaaagccctaaattggtttcaggctacacttgacatgaaatcttctcctatgatcaggatggcagggaagtattgtctccaagatctgatcttgctccggcaactaacaccacaaccactgaaactcatgggatcgaagtagcaacagagtttaaaccggtggatcacccgatggagcccttagacaacgatcaaccgatccaatgtccactcccagagccatccattctcaat

SEQ ID NO: 156813 - DNA, 451 bp, Arabidopsis thaliana landsberg
ggtcttgagcttgatgattttgtctcgggacctcgagagctcttgttgaaatttgtggaagagaattatcccttacccgagcagcctgaacctctgtcaggtaacttactctctgtaagaggttttgcttttaaatccctggtggtttttatttcatgttcatagtatgcctcttttgaacttttacagaggatgatagtgttaaagaacttcagaggaagaggcattcagcttcacctggtgtttcaattagagggagagtaagaaagatggcaaagtggaaaccagatagtgataatgaaagtgatttggagtctgaaggtgggtttcctagtgaaaacatgtattctggtacatactgacagacacaatattgatgcttcggctgtagtgaaaaataatatgggaagttttaataaagttctttaagcgctgaaaacgtatctattaa

SEQ ID NO: 156814 - DNA, 670 bp, Arabidopsis thaliana landsberg
catcatgtagaagagaagttatcattcttgtatcttgaaagcttttgagaagtttagccgagaaattatatgtgcatttactgtaggctgtgtttgagtgttcatgtagtgtttcttagccctctcgatcagcaacgaaacactaaacaataacatagagactttatctgaactagctgaactaatcagttcttatctatattggaagtctcaggctccaatttcattgctttctattctgctattgcatgtaactaggcttgaactctgtactaattcatttctactctggtggcaggtaacaccaaaagccaatttccaaaatgatctcgggttggacagtttggacagtgtagaagttgtgatggcattggaggaggagtttgggtttgagatccctgataatgaagcagacaagatccagtccattgatctagccgttgacttcattgcttctcatcctcaggctaagtgaaaagagaaacaaattcttcagcgttcatgcgtgcctcggctgtgtctaccgatattgttaacctaataagaagtaaagaagcaaacaacattttctttttgtcatgagaatggagaagcttttgtttttggccgactactttggttcataagtttagatgtgttctgcatgaattctaggctctaagaaatttgt

SEQ ID NO: 156815 - DNA, 1201 bp, Arabidopsis thaliana landsberg
gttcaactttctgagaaagcttccttgcttgagaaggctgaagccaagggagaagaactgacagctaaggttaatgaacaacaaagactgatacaaaagttggaggatgatattttgaaggtacgtaagagtgtgtagttaccattttaagttaaaaggtatctgtgctactgctactaaggaggagaaactcgatcaaagtctttgattatactgaaaccttatttacttgttacacagggttacggttcaaaagagcgaaaaggtgctctatttgatgaatgggagttctcagaagcaggtgtggctgagcagtctgaggtacttctctctggccctgtgcatatatgagtcaatgagtcgtgtaatttatcatgcaatactcttaaagcaggaaaattttcccaaaagtaaaagaaaggatggaatcgttcagaactaagagttagataaacagtaacctatcgctttaagttctctactagataatcttaacggtctaacatgtatgctcactctgccttctatttatggcgtgaattaaaatattgctagggaatcgtggtacgtatatattttaccatgatctatttttttttcaaaagcaaaatacctctgaacttcttgtcaaaccattaaaaagttttcatacaactaagggtatttccatgatatggtatattatatacctcacaattagacttatcactaactactgctctttatcattttgtgtttccttttattagcctatggatcagaaacatgttccatcagagcaagatcaaagctcaatgctaaaagttatctgcagccaaagagatcggttccgagcacgattacgggaaacagaagaggtacagttagttgtacatataaatgatcctcttccctctgtattctctatctccagttaaatttatttgaagtgaattttatgtgttctgttaacgttgcaggaaataaggcgattaaaacagaagctaggttttctgacagacgaattggagaacaccaaagctgacgacgttaaactctatgggaaaatccgtttgtgcaagactatcaccatgagtgagttggttcccgaggatcgaactaggcatgtgttatctgcgatacatttgcctagaacctgatctgactagtgatcgggttctttgcctggaagatatgcatttccaatcttattatgtggaat

SEQ ID NO: 156816 - DNA, 1689 bp, Arabidopsis thaliana landsberg
tatttgactacaaagccttttgcttgtgatccctcaagcttgccaatatacccacctagcaaggagatagatacaaagcatcgggacgaagcagcaaggtcagtaatttctttcattacctgatagagaagtttctagttatgcttatatcatctctttaatcagaataaaaaaaagcttgatacacagaatctactgttccacagctctgggaaattacatagtgtaccattttggttggccttatatgtcaggtcttgaaagcatttgtaacatccgtatatttcatgtctgactttcaggaaaaaaattagcgggaatgggagacgtggtatagatccgaggaagccatcaaggaaggcccattcattcaatagattggcaccagttgaggtactttctacttgctcacttttctacatgttagctgtatcttgagagtatagttcatcgttcaagaaactgaaatgggccctctttttctgtttgcaggatgtgcggcaccaaactgaaacttttcagaaacgaattggtcatttagttcataattcgattgaaagtgatgccaggttatgtggtaaactgcaaaacccgttagatcacaagaaagacgaagcttcccatgtgaagcatgcatcacaaggagatgtgcctttctcagggccgttacaagtctctaaatcaaacagttttgcttgggcgaaacgagaaaaagatgacgtatgtgttagggtgcataatcgatctctctcaagaggttacattcctagcttgtcaggacattcccccgcattcaatgggaaaagtgatgttgaatccaagataaataagaatgaaaaggaggacaagacagattctcgaggcgaggagtcatatgagatggtgaagcgttctatgctaaagcagtggagacaacttgaacgtccagattcttttggtgcatctgacgagtatcactcgcaggaactgtcattgggactctatcagagagatgaaatggcaaaaaagatgggtaataatttggtacgtccatagattatagaagctctaaaagcagccttatagtttatttaatatccaaattccatatagcagattgttatttgcattgttagtgctactgatagacatagtagagaccaagtatgctttgtgccagacgttcttacatttgaaacttaggatttggcttcattctttcttatgctgtaatgcgagtgtcaaatttgattctgtgaaataaaatgaaagtaattctaaagatatgattgtagtagtgttgtaatagttatatatgcaacatacatataagatacggtgtaaatgtgatatacagctcaaaaagtagaaagattggaccagattaccgttggtagtcagatcatgtttcctcagctgtttaatttttgttttaatcttctctctctctctctctctctctccacgctttcacctaaagttcagaggagagaggaaaaaagtaggcatgatttagtttgtctactttttgtgtttagtgacaagcatgctcaatgatactgatgacttaagccttgacatgacagggtgatggggacaagatcgaattctcgggccctttgttgtctcaatcttatggagttgatgaactattggaacgccatgaacgcaacatccgcaagctaattcgaaaaccgtggttccagaaag

SEQ ID NO: 156817 - DNA, 651 bp, Arabidopsis thaliana landsberg; identical to SEQ ID NO: 77699
  unsure (1)..(651): unsure at all n locations

SEQ ID NO: 156818 - DNA, 586 bp, Arabidopsis thaliana landsberg
  unsure (1)..(586): unsure at all n locations
tcttttcctgagctttangacctctgaccctgactccttcactcgcactttaatcaaaaggtaaagaccttttgtcactcgtaatctctatctcccagttttcttgtagtggagggatctatgttatgcattggctttgttttcatcacttttatttcgttcaagctccacttctagtccctaggtcgcaaaattcttgtagtgatccatgttataccttgattttgattttgggacttaattttgttgtcaatgatgtgaaggtatggacctaaaggtatatataaagcacacatgttcgggaacccaagtataatagtaacaacatcagacacttgccggcgtgtgctgacagacgatgatgcgttcaagccaggttggccaacatctacaatggaactcattggaaggaaatcattcgttggtatctctttcgaggaacacaagcggctcaggcgtttgactgctgctccagtcaatggccatgaagccctctctacttatataccgtacattgaagaaaacgttattactgttctggacaagtggaccaaaatgggagagttcgagttcttgactcatctgc

SEQ ID NO: 156819 - DNA, 706 bp, Arabidopsis thaliana landsberg
cgcagagccgattctcttcaaaacttgtctagtcctttgtccttgttgcaaacgatggcagaaacgaagaaggtgatcatcctcaagagctccgacggtgaatccttcgaggtcgaggaagccgtcgcggtcgagtcccagacgattaagcacatgatcgaggacgactgcgtcgataacggaattccacttcccaatgtcaccggagccatcctcgcgaaggttatcgagtactgcaagaaacacgttgaagccgctgctgaggctggtggagacaaggatttctatggttccaccgagaaccacgagctcaagacttgggacaacgatttcgtcaaagttgatcatcctactctcttcgatctccttcgggttagtaatgtctttttctttgttttttggttttatgtttttagaattagggttttttatattttttccatgactatgttagggttttatttatattattgaatgttgtgttttgatttggagactaatcgtcttggtttgtacaggctgcgaactatttgaacatcggtggacttcttgaccttacgtgcaaggccgtggctgatcagatgagaggcaaaactccagagcagatgcgtgcgcacttcaacatcaagaacgattacacacctgaggaagaggccgaggttcgcaatgagaacaagtgggcgttcgagtgattggaaaagaattt

SEQ ID NO: 156820 - DNA, 901 bp, Arabidopsis thaliana landsberg
cgactactttgactcaactttttcaggtgtatctcggtaaagaaggagcattcgacattgacggtaacgaattacccggtctagtgtatgtatcaagagagaagcgtcctggttacgcacaccacaagaaagctggagccatgaatgcaatggtaagcaaagcaaagcaaacagtcaaaagctcactaagaaaccaaatctaacttgttttcgggtgatgtcgcaggttcgagtctctgcagtactcacaaatgctccattcatgcttaatctcgactgtgtccattacatcatcaacagtaaagccataagagaatcaatgtgctttctaatggatccacagcttggtaaaaagctctgttatgtccaattccctcaacgattcgacggaatcgatcataacgatcgatacgcaaacagacccatcgtcttcttcgatgtaagtcttcataatcaaaatccccaaattcaaaactgaaaaccctaaaatataatttttttgttaacatagataaacatgagaggcttagatggaatccaaggaccagtctatgtaggaacaggatgtgtattcaatagaccagcattatacggatacgaacctccggtatcggaaaaacgaaagaaaatgacctgtgattgttggccgtcgtggatctgctgttgttgcggcggaggtaaccgtaatcatcacaaatcgaaatcatcagattcttcgtcaaagaagaaatcaggaatcaagagcttgttatcgaaacttaagaagaagaataagaagaagagtgatgataaaacgatgagcagctatagtagaaaacgatcagcgacagaggcgatttttgatttggaagatattgaggaagggcttgaaggatatgatgagcttgagaaatcttcgtaa

SEQ ID NO: 156821 - DNA, 319 bp, Arabidopsis thaliana landsberg
ggaagatcagacagagctcaagagaagtaaagaaactgcgacaagagaaagaagattgactttggagaagagaggagtaacgatggaagatattcataatctcgatatagagaaaagtgatagatcgatttggttgatgaagtgtcctgtagttgtagacaaggcatggcacaagatagcagcttcgtcttcttcttcttttgcttcctcggattctcctcccgacatggcaaagattgttcgcgaagttgatcctctacgggacgattcttcccccgaggtaatttggttcttaaatttgagttttagctcaaaccct

SEQ ID NO: 156822 - DNA, 346 bp, Arabidopsis thaliana landsberg
  unsure (1)..(346): unsure at all n locations
atgaataaagagtcttatgggaggtttgctgctgataataagagtggggacaatacaggattgggatggaacgattacatgaagatgtctgactttgtgaacccggacgcggggtatttactcgatgacaaggctgtctttagcacctcatttgatgttatcaaagagttcagtagctttactaagaatgggactggaaatggatacatgggaaagttcagttggagaattgaaaatttcacaagcttagttgatcttcttgagaagaggaagataaccggtctttacatcaaaagtaagaggtttcaaatnnnnnnnnnnnnnnnnnnnnttattgtttatcccc

SEQ ID NO: 156823 - DNA, 254 bp, Arabidopsis thaliana landsberg
atggagatcaaagtcaaagcaaaagatgtagagtcgacaatgatgtcaactaaagaggaggatgagatcaagaagatgaaagagtgtgtggtgattcagaaggcagatgaggaggttactaaaggacaagaaactatgaagattttggatggttcaagacaaaaccaagatgaaacaagacaagctgattctaagaatattgactcaccatcatcatcatcacttgagatgaagaagaagttggaaattggtaa

SEQ ID NO: 156824 - DNA, 670 bp, Arabidopsis thaliana landsberg
  unsure (1)..(670): unsure at all n locations
atgcatatatatatagagcacaagaagagaagaactcggggaaagccaggcagcaaaaagtcagcaagaaccgtgtggtttggacgcactggcgagtgcagcagtcttaggagacacaataggcgagccagaggtagcgaccacgaccagacatccaaggcacagggctggatgcnnnnnnnnnnnnnnnnnnnnnnnnnnnagtgggaaaggtaggcacaagcctacatgtggctgcactgtgtgtagcaccgtgaagagaaggttcaagacgcttatgatgaggaggaagaagaagcagttggagcgcgatgtaacagcagcagaagataagaagaagaaggacatggaactggctgagtctgataagagtaaggaggagaaggaagtgaacacagcgagaatagacctgaacagtgatccatacaataaagaagatattgaagctgttgcggtggagaaagaagagagtcgaaaaagagcaataggacagtgttcgggcgtggtggctcaagacgccagtgatgttttaggagttagagagttagaaggagagggtaagaatgttcgtgaagagccgattgtttcacggtttgtttggaattttacattaaaagggcaaaagcctaagtctgatcctgttttattaatatgctcagaccgagagtaa

SEQ ID NO: 156825 - DNA, 961 bp, Arabidopsis thaliana landsberg
aaacaagggaatggataagaataaccagaagaagtttgtgcttgtacatggaatctgccatggagcttggtgttggtacaaggtgaaagcccagctggaggctgctggacattctgtgaccgcagttgatctagctgcatctggtgtaaacatgactagcctggatgagattcagactttgaaggattactgcaaacctttgcttgagttactgaactcacttggctcggatgacgataaggtgattcttgttgcgcatagtatgggaggaatacctgctgctctcgcttctgacatattccctagtaagattgctactattgttttcttgacagcttttatgcccgacacaagaaacctacctgcttatgtttaccaaaaggtacatcatcatacattctaatatggttttgaggtatgacttcttccaagtggttctaatattttactaaaatccgcagctaatcagaagcgttccacaagaaggatggttggacaccgtgtttggaacgtatgggaaacatgaatgtcctctagagtttgctctttttggaccaaagttcatggccaagaatttgtatcaactctctccggtccaagtaagactccacgcctaataaaaacaaaaatgggattgcttgtaatcaatcctttattgattgttgttgtgacgggttaggatcttgaattggcgaaaatgttggtgagagtaaaccccatcattacaaataatctggcagggacaagaagctttagtgaggaagggtacggtaccgttacacgtatatatattgtatgtggagaggacatggcggtacccgaggattaccagtggtggatgatcaagaactttccgccaaaagaagtaatggagatcaaatgtgcagatcatatggcaatgttctccaagcctcacgaactatgtgctcttctcgtagagattgcatgtaaatatgcctaa

SEQ ID NO: 156826 - DNA, 653 bp, Arabidopsis thaliana landsberg
atgtctgacgtcacagaagttgtcgatgagtttgacgatgattcatgggagtttcaaggtccaacacagcctgtgaaagattccatgtcgaggataggagataatggttcgtgggaatataaacatagttctgtcgaaaatgaagttgggaatcaatcctctgttccaaatggttttggagaattgcatgataaaacagtaattcggatagagcctaatgattaccaagatctctttcataagctgaagattgaattataccacattgctctatatcatctcgagaaattaaaggtcagcagactttttgtgtctgcataacattttcagaaaactaatttaaaagaccttttccttcataacattttcttgtacatcctatcttttaattttcgtttcatgatttgaaattttgttattgaaggaagctcgtgacaaggctgcggattctgatgaagttcaaaaatgcgacagtgaaatcgaggtaggtatattcaacgttttcctaaatcttgcttagcgaatcatgggaatgctgcaaagtcactatagttattgaatatcacaactaggagacccttgacagataacttatgaatttagaaggcaattgtcatctgaaacttaattatgagttattatgcagtggctcc

SEQ ID NO: 156827 - DNA, 363 bp, Arabidopsis thaliana landsberg
cgaaaaaagttgtcggagcaatcgtcatggaagtttaaagattcagaaggaaagtattatctctataggcttggcgcggaatcggataatgttaacatagccgttggggcacgaagcggcatgatcgatgatgtattcattgaagacttccttggaaaagattgttaagtctctttttcttctttttgaaaaatcctatattttggaatttggataagtacaatgactctgattgtggagttgacagaacttgtgtatatctgtgaatttgcagctgatattgtgtttgattaccgtcagaaggcgacgaggtcctttgaacatcttcaaggagattattacattgctccatcgtttctggta

SEQ ID NO: 156828 - DNA, 459 bp, Arabidopsis thaliana landsberg; identical to SEQ ID NO: 5065

SEQ ID NO: 156829 - DNA, 627 bp, Arabidopsis thaliana landsberg
aggagcgaattgcactcagctaggtgatgctctatcgtacgcttgctcacaggggaataatacctgtgacccgattcaacgcggaggcccatgtcagaaacctgatttgaccgttttgcacgccagctacgcctttagctcttattgggcccaatttcgtaagatcgggggaacttgctccttcaacggcttagctacacaaaccatcaaagatccaagtaagttaaattccaaaatccaaatcataattaaaccgattcgtaaattagttccggttcagtgatatcaggatgttaaaaccggtggtggattttgggtttgctaaatttttgtactctgttgtcgcttgaaaccaggttacggacgatgtgagtttccgagcgtgacattatgaagacttacgagttacgaaaatgcatggtcgagaagagacgcacgagggaaaaccgcacgatgttacggctttcattaatggaaacagcacgtgactagctctctgtacgatgttacgtagcttgattatttagaaacggcacgtgattagtgtttaacttgctgtttatttattttatttttcttttcccgcgaataatgaaaactcatgaaataattaattcgttttcgggt

SEQ ID NO: 156830 - DNA, 1384 bp, Arabidopsis thaliana landsberg
atgtcattcagagagagtcatgaccaactttaccttgcagtaaacgcatttcttcaggtatgcgccttcactttttccttcttccattatgtataaattaaacctaatgcctgtgtggctctgctttaggtacatacaaatatatctcaagaagaaaaaggatcaatctgcagttacctaaactgccaaaagctatcacaagaagcgtccctcgaactcgttaaaaacgagaaaatgccattacgtttggttgtccaagctctctttatccaacagctgaacacacaccaagcttttaaagactgttcggactcattcagattcacaaactctgcagacttctctggtagtgttgtcccaagctcaagacccttaacttcccaacaaagcccttgcactgatgatgaaacggggccaagaaacagaccgttatgcttcttgatgcagaaagatgcaacattggatgagtttgagtcaacgagcttcagaatccataacctcgaagagcaactagtttctttaaagaagagccttcactcccacgacaacctaaagaagccaaattgccttggaaaaagatcagcgagtagaaacaaaaacacctttggccaagtcacaacggcttgtattggctctgtaagctttacttcacagagaaaatatgcaaataggctactccagattctacgtagagttaacttgtttggaagtagaaaaactaatagatcgaaagcaggtgagagtgaaagatgaacatttatcaaatgtaagtataaatttacaataataatcgctgaatacaaaatttatcaaaaatttacttaaaaatagagttttgattgggtatggattaaaaaacatcgaccaggatttgtaatatgtagttgtgtttttttttttttaataaccatgtagcggtcgaatagcctactcaccaggtttctaatataatggacctaaaggatgccaccatttcgccaatgatttcgttacaaatatctttgttcaactatattgaatgcagtttggaattagtcacaagttattaaattagttagatgttttttttttttcaagaatggttcatttcttacaatataccaaaagctcaaaaaaataggtcatttcacaaacatatcaattgaagcatacagcatacactaagggtgtacatttagattgtgtattgagtttataatatatacacattctactttggtggctttgtcaccgggctgctacacgcttttggaatctgagttcccacaagctttggtgatacgttagagcattggaaagtcgctggaccatctgctccggtatactggatgttcacgtcaccaacctcaacgttctgacatggatatcccttgctacacaaaag

SEQ ID NO: 156831 - DNA, 401 bp, Arabidopsis thaliana landsberg
actctgacttgtgttgaatttcaggttcacaagcagttgttcgtttagtcttagaaaaagagctcagttttgtttctttttcattggtggctgaagaggtgaaactgcttaataaattcttgttagatgtctcacactttacttatctttgagtttgtgtttatggactcacattgtctaaaatgatctatgtaggactcaggcgatctactcatggatggttctcaggatactctggagcgcatcacataactcgtgaacgacactttggctaccgtggaatcgaataatggctctactatgcttactgatgatctacttatagccattgactgtggaacatctgaaggcggtccaaatggtcgacactgggtcttggatccaattgatggcactaaagg

SEQ ID NO: 156832 - DNA, 579 bp, Arabidopsis thaliana landsberg
acgtgtcacatttttccctctcttctctctctttcgctctgtcttcttccccgcagtttccggagacgacgccggaggaaaatcgtacggcaactttgcttctacttcacaaggccggtccactaagcacctacggcaaaccgcttagaagtttctgtttctctctcttctttggactttgctaccacaaatagaacgagaggatagacataggaggagagttttgggatattggtggagagcgattatcgggagagccagagaaaaaaataagcagcttcttcctgcctcatgggtgggaccgtgacttttgttttcttcaggtttgaaccgggtttttttcctctcttcatttctcagtttttcccctctttttacctttcctggaaaaaagttagataaaatcggaattgtttggattagggcttcgattttttgatgttgttgtatacttttttcaatagagatttgattgtgaaacttttgtcgtcgtagctttaagcaaacaaaaaaaaaagatgaccggcgttggcgagaatcagcttatctccattcaacctgatgaactcaaatttctct

SEQ ID NO: 156833 - DNA, 378 bp, Arabidopsis thaliana landsberg
gttttctttaccaaacaatccggtgatgaactgtgacgaaaccaaccacatagaacaatcacgaccacaacttgacgtcaactccggtgtcacaacgatgatgatgatggctgagattgagatgagagataaggaagtgatagtgatgaagaagacgtgagaagaagctgcgtggagagggagataaatactttgagttctaatatctctacttggacagaactcaacatgaacaaatactgtcaaaacatgccattttatttcaccataaggtttccaaagcataaagtggaaaagttgcggcgtcaacacagggacgacgaagaaactcgtcggcgacaatcccagagacggcaaaagattcaccggcgaaaataa

SEQ ID NO: 156834 - DNA, 506 bp, Arabidopsis thaliana landsberg
agttagggcttttgacaggcactgcaacatggttcttgaaaatgtcagagaaatgtggactgaggttaacatcttttgtatctgttttctgcctgtggtttactagtagacaagtgctgtttctgacatgggttctctgtgtttttttttaggttccgaaagccggaaaaggaaagaagaaagctcttcctgttaacagagatcgattcatcagcaagatgttcctgcgtggagactcagtcattatcgtcctcaggaaccccaagtgaaagaagctcttcttatgataattctcgcttcttcttgtcaaatcctaattgttgcatcaacagtgagaacatgttttgattatgagccttaaatctactagtgttgccttgtatttttcacttgtcttctatctttgacttgaaacgcagccagtcacctttgtaatatcaaaagagaagttcttttatacttttaaaactgtagtgaggtccatgaatagtagtaagtaaaggtac

SEQ ID NO: 156835 - DNA, 1117 bp, Arabidopsis thaliana landsberg
atgttaattcgcctcgaaccaagaataaaccgaacctttaaaatgttttatcaggcacataccaattctgtttctccaatgttctctcagctgatggagtttgcacaaggaaagatagtgctggcgttagagggagggtacaatcttgactcaattgcaaagtcttcacttgcatgtgtccaagttttgcttgaagacaaacaaattcaaggacctccggaagcatacccattcgagtcgacatggcgtgtcatacaagcggtatggctctatatcatcctatcttttaactttcttatttcacaatctgaaacaaccttccataaatgggctgtagtcctcatgttactagttgaccaaaactcatctgtttcttgtgggtttaggtgcgcaagaggctatgcacatattggccttcacttgcagatgaattatcgtggaagctaattaatcagaaaactcctactccagttgagcacccttctttttgtctaccatttcagttgttcattgttcatcagagagcgtttccttgccagatcggatttagaaaaacctcactatttttagcaaccacttcttaacttctttgtctctatactaattttcctttgcttgatcttctttttaggcgacagactcggtatttcttatcacataatttctttcttatttgttcactatagatcatccttatctcaagctccgactctgaaactgaagacgacgcccaaggactcctggatcaaatgtcgaaactcagcattgaaaaccctcaaggtacactacttgaaaaccaccaagtagaacctgcatctacatcttggagagctgatctcgcaaaggttgacgtttggtatgcctcttttggatccaacatgtggaaaccaaggtttctttgctatattcaagggggacaggtaagtaacctgttttgttttgttttcggggtcgagtctggactttggtctaacttgacacatctatggctgtttgtgtttatttttaggtcgatggattgaaaaaggcatgcgctggctcaatggataaaagtccaccaaaggaaacagtgtgggaaacatttccacatagattgttctttggccgtgaatcttga

SEQ ID NO: 156836 - DNA, 848 bp, Arabidopsis thaliana landsberg
ataattcagaagttgtcgacaagacctccaccgaaagaagttagaatgaaggctttgaaggagattgctgcagagaataacattgttctgaaactagaccaagcttctacgtccactgaggtatagaaatctgcaattaaccaccaagataacaaaaagttgaaaaaatcatgttctaatcaaatttgtaacatttgcagggaacaacaaatatgcagggaacatcagatgttagtaagactaagctaacaagtaaagatggcagaggagaaggttatggtttatctgattcggtcaagagaggaaagaagaagtacaaagatgtggctgatgctgcacaagcagcgtttgagtcagcagctcatgcagcagaggctgcacaagcggctgtggagctttctcagttttctcctcgtggacatgacagtccgggtaacattggtggggaaaattcatttcatggttctgaaaacaaagagtcagaacaagaacaagaaggtaatgatgattcttcagaaggggaaggggatgtgatgtcagaatctaaaaggtcgatgtcagattcagaagatattattgatgtcccagtgatgtcattcagagaagaccctgtgaagctattggagaaggatactattatctacgatagtgaagaagaaacccaatctagtgttgagactattactattagtaagtctaaagatgagcaaaatcgtatggttggttcgaatagagcggatacaagacatgtggaccacatggttcgttctattgaagatcctattatgcgtaaagcaggtttgaagggtccagtttcagtcaggacaagacaggttcgtggatactaa

SEQ ID NO: 156837 - DNA, 206 bp, Arabidopsis thaliana landsberg
aacaaagccatcaagagaagaaagccttttcttggattcacatatatataagaatattttttcaaatcaaacatgtcttctagcagaaggtcgagccaagcaagctcatcatcaagaattagcgatgaccagatcactgatctcatctcaaagctccgacagtccattccggagattcgccagaaccgtcgttccaacacggtaaa

SEQ ID NO: 156838 - DNA, 6218 bp, Arabidopsis thaliana landsberg
atggattcttctcattacaatcctacctacgatccatggaattctccttactctcctcatcttcatcctccctctgctcctcttccgccgccaccgccgttaccgcctcctcctcctcctcgtcaatctcatcccgaaagccctaatttatatggtcgatcaactcagagcaatggtcaacgtcaagattacctccatcaatactctcatcatcgccaagatcttccgcccaatacggtggttaatcagccgacttcaaactactaccagcatccgccaccgctccagcaacagcatcagccactatcgcttcagcagcagcagcagcatcctcaatacattcctcagcaggttagttatgagcctcaaagaatatcacagccgttgacatcgagtattcaatgtacggaatctcagtctgattgggttgggttcaatgaaaagcggcttgattcatggacagtggattcaggtccgggtcgaagccgagtggatgatggtccaagccgtaactatcagtatgactacagccgtaactcgtcgggtgttaatcgtggtttagatggtagttctaggtctagagatgagtttcgtagtcttggatatgctagaaaagaatctggagtcactagaacagaggggaattatcaagcccgtggtcagttaaaatcagaatccgatagatatgttaggggtttaggtgatggaaatagggttttatcctctagtgttggttatggcagtgacagatatggtcttacagtaagtcgagatgtgactaggtcatcagcaagccgtgaaggggctagagaaacacgtaatgaagggaggactctctatcccgagaaaaaggatgattactatcattctgagattgaacaatattttgatcgtggaaggagagaggcgagcaatgagttgaatcgaacacctaggaaacaagttcagaagaagagtgctctgctaaggcttgaaactccaagatcctataaaaacagtagagagaatgaatggtctcggcaacataatcatcataatggtaatgggaaaaggtttaactctaactcatataggggtaaggaacacttgggtcattctgatcgtggactggtggagaagcaaagggggagaagtccagtggatcttgatatatcatttaaatcgaatgttctggtagctaagcccgtagcatcacctacaagtgcaggcatccgttcgggtgcgtctgtgacacctaggtctattaaagctagaagagctttgctttctgataaaaatgagaaagtttcagtaactgaaagaaatggaaagctgggaacccatttgtcagatgagatttcggtttctgagggcttcagacggtctacaaggcaaactactgcatctaaaaatgaaaaagaacctgacagtcactcaaccccgtcttccagtgattctggtggtaagctaaacaaggtacgatttgttaatggtgtcgttcaggacagcaaagtcaaacttaccgattcaggtcctgaagcttcaactcatgatacagaaaagatctctagtttttgtgagactttgatagaggccaaggatgacattaatgtcaaacatggtatcaatacggaggcttgctccactgaggaaggtgttattgatggaaatcaaagtacactgaagtctcatgaagatgtgttggacagaacgagcactgattgtaatgcaggcgaagcgcttttgccgaaggtcatggagatggatgaaatcctgaagacaaagacaacaatcaatacgtctcctggtaagttacctgtatcatggccaaccgtcgctgatctttctgggtgttctgaggacatggattgtgatgaggatatggattgtgatgaggacatggattgtataccatcaaggaatataccaatgatggaagtaaatactgggtttgaagaaagaaaatccattaattcatctgatggatctttgggttatggaggaaaggattttcagaagccatatctagatgcttccatctattttaatagagaagaccctggtgataaggtgttggcgaagtcagatatcggtggtattgaagatgacaacaagaggattgataagaatgtagattccttgtctcctgaaaatgactcctctaggggtcgccccatgggtctggattcccctgcctctctggacattgctaatgtttcattggatcttgctaattcaaataatagtgcgtcaggggatcttgctaatgctaacagttttaccgttgggacatatatgaatcctatggtcacgtcacctgataagagtgtagttttccagatggaaagtaaaaatcttcctcactgcaaaaacacagtcaatgcaccggttgagaatgttagcggaaaaggatacatggaaactacgcctcttaatgttgctgcagaaacggctgacaatatggacagtgaagaaggtaaacagacttgtgtaaacgacacttcttcatctctgacaaaggttggagtaaagggatcatcaaatgtgctgtctgtggagaggactggtggctgttcgcatagtgatgaatctgatttagctatggcagtgccatctgaggggtgtatggaaaatgtaagcaccgagagacttgtccctgatgaggagctgattttgaaatcttatcatcctgcagaaattccttgtgtagatagtggttctgatagtagaggtttgaaaacttgtttattggagccaaatgtttctcttagcaaagatcttactgattgtgcgagagagagtcttgttgagcaagatgttagccaaagatctgccatattttgtgataaattacctagcttgtctgcgttcgtaactgaaacaactcttgcaattggaattaatggcatgtctggtaatgaaacagttactgatactgaatctggtctccacgaaattcaaccatgtacaacagtatgtaagttgtctcctgaagatcgttttggatatggatcatctggtgccattggttctgtccggagtctctctatagataaaaatcttgaaaaggattcttcaaaggtcagttcttgcttagtatctgataattctgttagtccttgtcatatttcgccattggtggcagtgaatgaggagatacaaaacaaaatatctgttaaagctaactacagtaattctcaagatggcatcaagcataaggaagataattgtactgaaagcgttgaggtagaaactcatgaagagaaagcaaagcttcctggaggaacttctaagtacagaactccggtaactaatattactgctggtagtgggggggactctctgtttttatgtgattctttatccagctcacgaaggcggatacggagtgaagttcatgtttcggctgtggttgatgaaactagcaaaggtgaagagaaatccaagccttctggtggtattgttgctgttaggagggattcagtgtttccatgtgattctctatccagctcgcctaggctgtccagaccgttacggagtgaaattcatgttgcttctatggttgatgaaactagcaaatctatagagaaaatagagtcttctggtggaacttctgagcacagaactccggaaactgatattgttgctggtagtagggattcagtgtttccatgtaattctttatcaaactcacaaaggctgagcttcaggcagttacggagtgaaattcatgttgctaatatggttgatgaaaccaacagagttaaagagagtcaaaatggagatagtcttttagatactttacaagagcaaattatgacctcccatgagttaacccagccaggttcttcggcgcattgtgatttagttatgaagccaatgggtgatccaatagcgaaactgactgatataacttctgatgtgggctctcaagaaaaagacttacggaacattgctaagactgatacatttgatggcgaagcagtgtcatctgatggacaagtttctggaactgaaattcctggtggttcaggtgttcgtgtgtccagatcatactcacatgcagatgttaaatttgctttgacccatgttaaagagcatgtagtctctgtaccacaccgggatccccaaagtaagacatctatgaattctaagtatgaaatagaaaagaggaaaaagaaacccaattactctactcagaaaagttatcccagttccctgccttatgtgtctgacactaagaaagatgctaaccctccaattcatatcacaaagcgtcacacttggcatcgaaagtccgatgcttctccctcttcttttgtagctgccaagcctttgtcgtctacgttgtctacacaacagaagtttcccaaagtgactgcccaatcttaataatagtttacgtacgtaaagggaatagtcttcttcgaaaaccctcacatggttctcctggtgctgcccttggaatacctccatctgctatccagttgaaccatttcactgtggaagacaaaagcacgggatcttccaatatggttgatgtagataatgcttcttcacttgttaaaacaggggaaatagctactcttgagaggcagtcaaagcctccctcagacagcagcacttccaaactatcaaatgccatcgctacttcatcaggaaaatgtgctttatcttacagcacggatcatctcaccactggtttacctgagtctatcatggattctgctacatctggagaagctaattttccacattctggtggggacacattgaagacatctgatacactgattcagacgggttatgcttcagattgccagcagaagagaaatccgtctgacttggattcttcaaatttgaagagaatggtatatgtcaagagaaaggcaaatcagttggttgcagcttcagatattcatgatgtaagtcagaaccagattccttcctctgatgggtactttaagcgaagtaaaaatcagctagtaaggaattcagagagccgttgcaatcagtcaatttccttgcctgatgatgcattagatacacgatcagctgcaaacatggtttcggaaagaccatctagctcagcattctctgactctggtatgtaaagcaaagtaaatatctgttagcgcttgttgagcatcttatcaggactgttcatttggataaacagtggatggtttattcgctgaaaaggaaaaggaataatttgtttgctttggcttagtcctttttttttttttgagaataaactatctagtgttttcctacagtaacatgcatatcagaatccctttctatgtatacttgttttttttcttgcattttttttaccataacaaaagcaagatatgaagttactcgccttctttttgattggcagctgtcatgcgaccatttaagcaatcaaagttttctctggtttggacgcaaaatgatccgcagccaagaatgcccatagctcacatgcgaaatcagaatattgtgccgcaacttgttccctggaaaagagtgacgtactggagaagattaatgaactcagtgtctgctttccgaaatggttcttctcccaacattaggtatgttagcatctaaaggtgctcattttccttgggctgcaacctttttttttgtgtttgcaaacatgataacagggccattctatcttcagccgaaagttgtcaatgatgaggaagagacacacaatttacacaagatcaactaatgggtattccctcagaaaatctaaggtattaagtgttggtgggtcgcataaaaaatggtccaagtccattgagagagactcgagaaaagctaatgaggttagtttcctcagtgtctttggcctaagtctataaataattgctcctttaggactattgaatgtggtgtcgacaataaatgtatctttttcatatttgtacaggaggccacattggctgtggctgcatactcaaagaaagaaagtgaaaagcaatctggacaaaataatactagtacggcgagcagaaaccatctggcacgtaagttggttcacgatatccatgacctatttggttcccttcttttgaatttattttcttgccatttttgagatggccggatgactctgtttccagcaaacctcaagttttttataattgatttctggttttcaggggagcgcgttttcaggtttggttcccttcgttataaaatggactcttcaagacgaactcttcagagaatatctg

SEQ ID NO: 156839 - DNA, 245 bp, Arabidopsis thaliana landsberg
agctggaactcctactactactgtgagtttgatgagtttttgttttggtgtggagttgttgttcaagagaataagagtgtttgttttttcttttgcaggggtttgtgatgaatatgcagccttcagaagcagaagctgggtatgatttaaggttgcctccaatggcagatcctgatgttatgaagaaaagaattgctgaagaatgggctccttctattaggaacatgacctactcggtaagtaga

SEQ ID NO: 156840 - DNA, 1040 bp, Arabidopsis thaliana landsberg
gttaccgcgggaaattttgattccagcaataaatcaaaggaacagatcgtggcaaggtcggtgaatcgaaaagaagcttcagtaagacgagaaagggcattggcgtatgcttacagtcatcaggtaaatataaattaaagacaacatcattgtgaacttagtcatagttgtttatatattgatgttggaaaataaaacagcaaacatggagaaactctttaaaacttccacatcagactttgatggacacaaacacaacagattggggttggagttggcttgagaggtggatggcttctcgtccgtgggatgctgaatccattgacgatcaagtttccgttaaaagttctcttaaacgcgaaaactcgatcaagagttctcctgccagatctaaaacactaaagtcagctagccaaagttctattcaatggcctgtaaacaatgatacaaagagtaaaaagatcgaggttactaatcgcaggcacagtatcggtggtggatcatctgaaaacgctaaagatgatgaaagcgttggtagctcatcctcgcgcagaaattcgttggataatacacaaactgtgaaatccaaggttagtgtggaaacaacaagcaacgtgagtaatgcacaaactgtgaaacccaaggctaatgtggggacaaaaagaaacttggataacacgaaaactttgaaatctaagtctagtgtgggaacaacaggaaacttggctaacgcggaagctgtgaaatctaaggttaatgtcggaacaacaagtttgccaaagaaagaggttgttgctgataagaagaaacctccacagatggtattgccaaagaagaggctttcatcttctacttctcttgggaaaacaaagaaattgtcggattcggataaagcaacaactggtgttgcaaatggagagaagaagagaagaaatggtggtagcagttaacctaaagtaatagccttatctagaccaagatattgctttggtggcggtttgatagatttagcatctcaaatctgagatatgttttctatc

SEQ ID NO: 156841 - DNA, 541 bp, Arabidopsis thaliana landsberg
gaatggaagcgacccaaggtggaagaacatgaagatagtatactgcttgagctgcattatgcaaatgaagaatgtcaagagtggaatcaagaactacaaagacttatgggagttgtatcaattgtagctacaacagaagacgttgatgtcaagaggaagttgtttagtattaccacaatacaagagaacaagttgacgtcaagaagaagttttctaatactaccagagtaagaagaagagaaaggtctaagtttatttgataagaaaggtaattaccaagttctcgagaccaaaggaaccaggagaagaattgggaaggagtagggctacatcaagagatgaagacatgatgtagagactgaaccaaaaatgatattcagagaagatcagaaagcatcaaagaagaacggaaggattgaagcgggtgtacttatgatcttgtcaccaggacatgacctatacacaacaaggagcttttcaaagaagagaaacgtggaggagctattgacaaatggaggaagtcataggacagagatgcgag

SEQ ID NO: 156842 - DNA, 354 bp, Arabidopsis thaliana landsberg
  unsure (1)..(354): unsure at all n locations
aaaacgatggagactcatagaaagaactcggtcgtcggcaacatcctccacacgtgtcatccttgccggcgcaccattccatatagaatctacgccatatttcacacgtgtggcatcatagctctcatgtatcaccatgtacactcacttgtcacagcaaacaacactcttataacatgtcttcttctcctctccgatattggtctcgccttcatgtgggcaaccacaacttccctccgcttaaacccggttcatcggaccgagtgcccggagaaatatgcagctaaaccggaggactttccaagctngacgtgtttatatgcacggctgatccgtacaaggagcctncatgat

SEQ ID NO: 156843 - DNA, 560 bp, Arabidopsis thaliana landsberg
  unsure (1)..(560): unsure at all n locations
aagtaagtaaatcgcgaaatgattgctcatgttgctacttatatattggtcaaaacataattctgacgtgggtataatgcattgcaggatgganagacattgtttaacgagttggaagttgtagaggggatgaaattggacagaggttatacttcaccatactttatcactaatcaaaaaacccaaaaatgtgtaagttttttactccctgctcaattaagtttcttgatgtgtcatatcaattatagaagttactgaattggaattaatctatgtaggaactagacgatcctctcattcttatccacgagaagaagatctcaagcatcaactctatagtgaaagtgttggagttggctctgaaggtatgtctactttatctttatagtaaatctgtaatcattttctcatgtaaatgctgtgtgaaaggcatctgatgtggtttctgttgtccaaataaaatcttacagaggcaaagaccactattgattgtttctgaagatgtggaaagtgatgctcttgcaactcctatccttaacaagctccgtgccggaattaag

SEQ ID NO: 156844 - DNA, 708 bp, Arabidopsis thaliana landsberg
tttgatgataacaatcaagatgtgatcagaagtcactaattcaagccaagcaataacaggttttggtgtgttctagcagtcctaagtgaacatgcagaaaacagaaaatcaagtagaaacagtaaaacactcgaccaacacagctctttgtagagcactgggtgaggtcgagtcaaaggtcgagtaacagacagaaaataaaacacagatactcgactgcacagtctgttgccagacaactgggtggtcgagtatgaggtcgagtaaccagaaaaaattgtagaaactaagcaacagatgacaggatgcagtacacagcagtagagtaaacaaataatttaatcagataaagaattcccgaggatggggtaattgagtagttaagtaaatcagtttacaggtgattgacatgctcaataaattaaccctagacaacaagttcattaaccaaatctaagtgccaccgcaacagagactctcaagctaacctagtcccagactcaatcaccattgacgagagctaacctaacaggcattacgaatcaacaagttaaagccaaaacgctccctgcaaccaataccttggtacagggtcacgaatctctggaattagtggttcagacatttcatcgaacacctttttggcgaggaaatgtctgggctcaaattccagttgatcagaaagcaataggcattaagaacaactaa

SEQ ID NO: 156845 - DNA, 732 bp, Arabidopsis thaliana landsberg
  unsure (1)..(732): unsure at all n locations
actaaagtgtaagactaataagactatcgtcatcgatccttaatccaaattttcgcgctcgattcgtcttttctgtatctcccggagctccgggacttgggcggaagaggagatgaggagcttgttgttgtggattgcggtggtcgtgtgcttgctatgttcagtcgcggcggtggttcaaagcggatctagcgacggatttgggaaacccagagatactgagactgtgatatcttttctggagtataaattgatggcgccttcggttccaatgatacctctcaccttgattcacggagctgactctaaaggagntggtacacactctctctctctctctctctctctctccttctctttcgttcttcttctttgggatttgaggatatgcttgaaaggagatgttttcactatcacattgacctttgttatccactattcagtttagattttggctctcttagttggaatccgaaattttatggcgtttgattttgttctgttgctcgatttcgtagacttctttgaatctttggtggattactttttgaatgttgtgatgacgattagtgtttattcaactctaaattggtgcagtgtgcttagatgggacgctacctggttatcatctagatcgtggttttggatcaggtgctaacagttggcttatccagcttgaggtatgtgcattttacagcttatgtagtagtcttggacttttgctagtttaag

SEQ ID NO: 156846 - DNA, 1026 bp, Arabidopsis thaliana landsberg
atgttcacacaatcggccgtactctcgatcccggagctaacggaacgacggtggtggcgacggcgacgaaaagctctcgtgttgttgttggaagacacgggatccggatccgtccttggccgcatccgaatcccgttgaggtaatgaaagctcatcagatcattgggagagttcaaaaagagcaaaagatgatctttgggatgaaaagtagtaagatggttatagctgtgacaccgacttatgtgaggacttttcaagctttgcatttgactggtgtgatgcattctttgatgcttgttccttatgatctggtttggatcgttgttgaagctggtggtgctactaatgagaccggtttgattattgcaaaatcaggacttaggaccattcatgttgggattgatcagagaatgcctaatacttgggaagatcgtagtaaattagaagtctttatgagacttcaagctttgaggcaagtcaatttctttgcttttatatgctttgatctgttttgttttgaataatatgcatctagagctgaaagtgatgttcttgttttgttgtgtgtttagagttgtgagggaagagaagcttgatgggattgtgatgtttgcggatgatagtaatatgcatagtatggagttgtttgatgagattcagaatgtgaagtggtttggtactgtttctgttgggatattggctcattcaggaaatgcggaagagatggttttgtcgatggaaaagaggaaagagatggagaaagaggaagaagaggagagctcttcgttacctgtacagggtcctgcttgtaactcaactgatcagttgattggttggcatattttcaatacattgccatatgcggggaagagtgcagtttatatagatgatgttgctgcggttttgcctcaaaaactagagtggtctgggtttgtgttgaactcgagattgctttgggaggaagctgagaataagccagagtgggttaaggactttgggtcgttgaatgagaatgaaggtgtggag

SEQ ID NO: 156847 - DNA, 1295 bp, Arabidopsis thaliana landsberg
atgataataaaaaagagagagaagtatgctcgaagaaaagatgccattttccatgcccttgaattggaaaaggaaatgctgaaaagagaagggaaactagtccctgaaaaggctagagatgactctcttgatgcaaccaaggagagaatggctatagttagggttcaggatacctctaatgggacacgggaatccacagattatctaaggaccaaccatgttggtgatgttatgcatttgctgagagataaagaggaagatcaaccaagttgtgaggatgaggctgtgcctcgaatgagaggcttgcaggactttggacttagaaccgcctcttcaaagcgaaagatttcatgttccaatggtcctgatacttcctttaagtatcttgccagaagcaattcttcagcttcttccagtggggatcatagcatggagaggcccatttataccctcggtaagatgtacttttaaacttccaagtttttgttcctagatggttggatacttaaggcttctggctctttttgacatgaaattcatatgcatttttggctctgtttcaggaaaggagaaaactaagagtagggcggaggctaaaaggactaaatatatgtttacaccaagtgaatctaatgatgtttcagacctacatgagaatttgctaagccacagggacgcaatgcattcctcctttgccggtggtgatactcgttattcagattatgaccctcctaattttttggaagatatggaatcagattattctgaatctgaaactgattcttctgatgtggaggaggatactgatgatgacattcccttgctgtcaggtaaagtatttctggacagctaaaagctagtttttcttatcatctaaatgttttctacttttgcgaaaattggttttcagttgtgtcaacactatattcatatctgattcttctttgactggaatttgtatcatgcctctgcactaaaaccaattaatgtttttgattacgtagaccacaattttctatgtgtcgcataggtattagttattccctaactagagtttgaaatttctcctttcaggagctgggcgtcattccgagcgacgcaatacttttagtagacatacgtcaggagaagatgaaagtacaagcagtgaggaagatcattatgagtcatctatttctggcgactcttcctacctttattcccaaaatcctaataatgaggctagtacggtttccaactggcagcacaagggaaaaagaaacttccggactcttccaagaagatctgcacggtag

SEQ ID NO: 156848 - DNA, 416 bp, Arabidopsis thaliana landsberg
tataatgtttctgttggcatccaggtaaaagagccttttccagcttttatatttcatacagattgttgttactaaacctctgtgtatattcctatgcatgttattttttggaatcttttgttaccttgttctctgtttgtgtgctttcttaaatgtccattttttgtaagtaaccttttgttaatttttttagcaagaactacaagagcttatgaagtgttgtatatgtctcctgcaagctattgatgcgaaaaaggagaaagatgtgacttcttcagttagaaatgaaatcagaatgcgtatacatgatgtcttaatgactgttacgggagccatggatctgtctatatatttcagggttgttactagcttgcttcagcagcagacagattataatgggacgaaaaaggtatatg

SEQ ID NO: 156849 - DNA, 545 bp, Arabidopsis thaliana landsberg
cttgaaaacgttaaatgatcttctcctccgatcattagtctctttaatctttctcagcctcttcttgttcgtgatctctcttcctccggtaaaatttttaacgtcgatggtaattttaatatcagtacgagtgtaatcaacttcgtaactctgtcttttttttgtgttgtggttacaggaaaaagatgtcggccggtaacggaaatgctactaacggtgacggagggtttagtttccctaaaggaccggtgatgccgaagataacgaccggagcagcaaagagaggtagcggagtctgccacgacgatagtggtccgacggtgaatgccacaaccatcgatgagcttcattcgttacagaagaaacgttctgctcctaccacaccgatcaaccaaaacgccgtcgctgcttttgccgtcgtctccgaggaggagcgtcagaagattcagcttcaatctatcatgtccttataataacttcacatatacagattattcatacgttacttttgtttataacatagtttatatcgaattaaggaagat

SEQ ID NO: 156850 - DNA, 560 bp, Arabidopsis thaliana landsberg
  unsure (1)..(560): unsure at all n locations
ctcaaacattcctctcttcttcttccaatattttgatccccacacacactcacatcaacacatataaatctcctcgtaaaccctaaaccctannnnnnnnnnnnnnnnnnnnnnnnnnnaccccaagaaaaaagttcaatttcgttagcaatggccaaagttgggaagctgacaaagcttaagtcggctatgaagaaatggccttctttcgccaagaaccaccaccactcaacctcctcagccgctgtttccgacgaactctcagaagacaacaatctccatgtggtttacgttggtcaaactcgaagaccttacatgcttagaccagacatcatctctcacccactctttcaagaactcgtggatcggtcttcttctagatccatcgaacaagatcgtgagattgttgtagcttgtgaagtcgttttgttcgagcacttgctgtggannnnnnnnnnnnnnnnnnnaggaggatccgttgaagaattggctgagttctatacttattgacatcgaccgattgattttatacatttatttcgtataatatataccttttt

SEQ ID NO: 156851 - DNA, 214 bp, Arabidopsis thaliana landsberg
gaaatcagaaagcaaaaacagaattgtgtattattctcttctattcaggaaattgatccaacaaatgaaagattactcgaagatcggcgataaacttgtgatgcagagacctagacgacgtttggaaggcaccgccatgggcgccaccgtgttcgatctccgtcccggcgtcggcatcggacctttctctatcggtaattgcgattctctcaaa

SEQ ID NO: 156852 - DNA, 538 bp, Arabidopsis thaliana landsberg
ccaactacaatatgagatttgattctacaggagtttggaatatgggaaagggaatttacaaaagtgattgttgaaacattaccgattgttaaatggtaatagacagctgaagctgcacaatgacatatggtaaggagctgggagcaaaagactaaggaccgaaacgatgcagatcatctcgcaaaagaagcttttcctcatattgatcactgttgtgtgttgtgaaatatcctttctgtttatggcctcgtcaaaggtaatgctgattctagtttattcgttattgaaatgaacttgatttagcttagctgtttacagaagttaaaaagaaaagaggacaaagggttatagtgttgaagacaaacttattttagcttctttctatatagctttttatcccaaatcccttaattctcggattaacatgaaaaaaaccactgccatacctcctatgtccacagaaactcatggtgaatgggtgtttttctcactgacaacagaccaaatacgatcacctcaaagacaaagggacgtctaa

SEQ ID NO: 156853 - DNA, 2639 bp, Arabidopsis thaliana landsberg
atggattctacactcaaaaaccgaaggaatcggaatccaactaaaaccgaagcgaatacccgaacgcccaggtcctaagtcaaattataaaccctaactttataattgtggttaaagacttgcatagatttttgaatttttttctttgaatctagatttttgaaattttacttgaataaaaaacggcgtcttattcaaacaaagctttctaatacactgcaaggttggagtttagaattggttatctctctgggcaaagcttcatgcgcttctctagcatcttccgcaataccccaatccaattctccaatcgccggagctccgtcaagctacttcactctcttcctcgtctaaaacccaccaactccaagcgattctcccaaaaacccaaacttgtgaaaacacagaccctaccagatcccagtgtttacacaagagacattgtatccaacatctataacatcctcaagtactccacttgggactctgctcaagaacagcttccacatctcggcgtcagatgggattctcacattatcaaccgtgtcttgaaagcacatcctccgatgcagaaagcttggctctttttcaactgggctgctcaaatcaagggtttcaaacacgaccacttcacttataccaccatgctcgatatcttcggagaagccggtcggattcaatccatgtactctgtttttcaccttatgaaggagaagggtgtgttgatcgatacggtgacttatacatcgctgattcactgggtttcaagctccggtgatgtggatggagcaatgaggttgtgggaggagatgagagataattggtgcgaacctaccgttgtgtcgtacactgcttacatgaagatgcttttcgctgatgggagggtggaagaagccacggaggtgtataaggagatgttacggtcgcgggtttctccgaattgtcacacttatactgtattgatggagtatcttgtcgccacaggtcaacttcattctcttgcacactaagtgtttgttaaaatgcttagctgaaaatccaaaacttttgctttatgtagatgattctggtatctgaatgttttgtagccttgttgatgatgatgtgttagtttcttcgtttgattttgcaggaaaatgtgaggaagccttggacatattctttaaaatgcaagaaattggtgtgcagccagataaagcagcttgcaatattctgatagcgaaagccttgaaatttggggaaacatctttcatgactcgagttcttgtgtacatgaaagaaaatggagttgtcctacgctatcctatctttgttgaagctttagagacactgagagctgcaggcgaaagtgatgatctgttaagggaagtcaactcgcatatttccgttgaatcgttgtgctccagtgacattgatgagactccaacagcggaagttgatgacactaagaattcagatgatagtagagttatcagctccgttctcttgatgaagcagaatctggttgcagttgacattttacttaaccagatgagagataggaacataaagctggattcttttgttgtttcagcaatcatagaaacaaactgtgaccgttgtagaacagagggggcttcgttggcttttgattacagcttggaaatgggaattcatctcaagaagtcagcgtatctcgcgttaattggtaaatttctgagatcaaacgagcttcctaaagtgattgaagtggtcaaggagatggtgaaagcccaacactcgcttggttgttaccaaggagctatgttgatccacaggctcgggtttgggagaagacctcgtttagccgcagacgttttcgacttacttccggatgatcaaaagggtgtagctgcttacactgcgctgatggatgtttatatctcagcagggagtccagagaaagcaatgaagatattacgagagatgagagagcgagagataatgccttctttggggacatacgatgttctattgtctggccttgagaaaactagtgatttccagaaggaagtggcgttgttgaggaaggagaagaagagtcttgttgcttctgcacgtttccgagaaaatgttcatgttgaagacaaaatatgtgatcttctctttgctacaaatctgttgtaatctggttgcaggtgaaagtcaacatgtacatgtttaatctaggcccattaaatatgaggcctatactgtttttaagcccattactcatcattttttattattatatttaatttaatttcttcattttattgacatttctgatagattagcggttgctactgacgccggagaaaagagatggcgagatcgtgctctatctggacacctgttttgatctcactttcacctgtgaccggagaatcacctaaaatttcacggcgccgggtgattttcgccacaagtatatgatctcctcacgttcgtacaagtacaacagctttcgaagatccatataggtagttttctttttcgtggacaaatatgttgtgctatgtgtgtcaatgaattcgaagccttttaagtttagattgagctattagagattgctttctcacagattcacctgttgagattttgattcctttttaagccctaaacttgtggcagaataatcc

SEQ ID NO: 156854 - DNA, 437 bp, Arabidopsis thaliana landsberg
  unsure (1)..(437): unsure at all n locations
atgttacttattaagagaagccggtaccgaaccgaaccgaaccgagccgtcgtctttgattggttaaaagaaattcttgaaaatttacaaccgcctctcttttctgaaacggaagaaggatctcaggagtttctgatttctcttttaataaataccaaaagtcaaaatcggatcttcgtgtatataattgttcatttcctnnnnnnnnnnnnnnnnnnnagggttttgtttcttctctctcgccgattgatcttgaaatgtcttccccaattataattagggcaccgaagaagcaaccgccggagccgccatgtctgatttcgttactccccgaagaaatcgtcgtcgatatcgtagcccgtgtccctagatgctattaccctactctctcccaagtttcaaggcgtttccgatcactccccgcttctccggagatt

SEQ ID NO: 156855 - DNA, 1002 bp, Arabidopsis thaliana landsberg
atggatggatgtgctggtaaacgatctgttgaccggttggttgtgcctcggaaagccagtggtcttaccctgcgtgagaatatgaacaagacagatggtaagaatgttcctttctgcagccgagttggttgtactgcaaaggtaacttctaccaagagatctcggattggctctacggataacaatacaaaagttggtctgcctccggttccatctaccttaaatagaaaggaaattgttgggagctcatctcgtactcctggtggatttggatacttgagaaagccagccaaagttactgcaagaagacagccgtcatctagtttagacactgaatcttcggaaacgagttgtattcatgatgatccagctgcaacagagcccacacttccacgccaaaagactaaaagagtcacaatcaatgttcatcctcaaagcgctgtctctagagaagttgtaataacaaaggcaggaagctcaagtagaggaaccagcagaattagtcatccaaagtctgaattgggtacccgcgatgctctgacgggtccttctgtttctacatcttctggtaacagtgagcacactgtaagaggcggtttgagtaggcatagattgaggaacttgagctgcaattctgtgtctgatgttcttccaactaactcaaactcagcaacaaaaatcagtgtgactaaaaagaaaaacgctgatggagagagcagcttatctagcaaaggtagtaagactagtatgttggttccaaaggtaaggaatcaaatttcttctcatggcaatggcgtcacagtttctgataacagaagaaatcgagtagtaccaagtattagggacagcagtactgttgtttcaaatggttgtaggagagctggttattttggtagatcagagcgacttggagctactgcattctctgctacttctggacaaatgccttattctacaacaccaaccgatcccaatccttttttttcgttttgcccatcaaat

SEQ ID NO: 156856 - DNA, 857 bp, Arabidopsis thaliana landsberg
atgcaggtgaaccaattgcttcaggttgcacaaaaatgccagagcacgatctcagagagtgggtcagagggggtttctcagcaggatttacagtcaaatagtaacatgtaagttaatgcacattattcttttattgtcgatactctggcatttgtttctagtgctttttatcattgctgggtgccaatttgtgtatcagggtcttgggagcaggacggcaactggcaaagttcatggaactacagtcgctgaatgatcttggctatccaaaaagatatatcaggactctgcaggtattcctttgctcctttccttactgttactgttgtatatgaagtcgtaagaagtcctaatattgaggcatgcgagtgacagatatctgaagttgtcaagagcatgaaggatctgatgaatttcactggcgagcaaaaaatcggtcctattggtaagtatacaatttccatccacaatattcttcttgaatgagatccaaaaccaggtttcccctctggtggaccttttacttgaaatatgtactggtcgttgtaactctcctggtgaaaatgttctgactgaatctgaatgttatgatacctgcttatgtcatttatgtagaggggttgaaacggcttttggaacagacggtgacagtgaagctacagaaacagaaaatgcaagagatggagcagtttgggaataatggagctataaatgggccagttcaagctcaaatggtgttaacttcaggaacgatgaatggctcaacgggcaataacaccaataatcaccatcaaattgttggtcgtggagctatgagtgggccagctgaaggtcaaatggtgatatcttcaggaacg

SEQ ID NO: 156857 - DNA, 1914 bp, Arabidopsis thaliana landsberg
atggcagaccaaagctctgttgatgggattttagagtttcttaggaataatcgtttctctaacgctgaggaagctttgcgtaatgagcttagtaaccggtctgacattaatggctttcttcagaaacttatgctggaggaaaaagattcaagcaaagattcaaatgaaagagctaatggtaaagaacttcggaggtcaggttctcgagatagtgaagtctccaaggagctggttgtgaaagaagtagattgtgggactagcacaactgggtctgttatcaagtgggaaaatggtgcggctgctgagaacccgagcaagaaggaaacgtttgtaccaagtgagatgagctttacattctccaagaattcaggtgatgctgctgctcctcctgatgctcattcctatgaatttacttccggcaatggtactttggagccttatggaaacattgatgataatagtagtagtagtttggttgattcatatgcaatcgaacagttggctgacatcgataagaagatagtggaaactggtgaagatatcgttttctttggcaataagagtactttattgtctggaaattctagtaaagggaactccgggtcgaaaataaagaaaccaaatgagattgatcagctaggtgaaatttttggaaagcatgacagctataagggtagcgttcttttaagaactgaagatgtcatagatacctcagagaactggaaagagcgttctgttaagactctttttcaatcttcgagaggggatgcgtcaaacagttacaatctggttagcagctcggacaaaagagagggaaagaaaaaggcagagattagtgatgtgagggtggcaatcaaggagcaggagagcgaggtggcaagagctttattctttggtaaatctcaatccacttttgatgacaaaaacatcagcagcttaggttttccacttgtatttgatacccgcaaggaagagtttcctaggcttcctcctgttaagctcaagtctgaagacaatcctctgagtcttcactgtgaagaaaaatttgaacgtgatggttcaggtccaaggctaatcaatgatgatgaggcccttctcataggctcataccttgatgttcccattggacaagaaattagctcatcaggttagattgcttgacaatgcagccgcacaactgctaagtcttcataccttagctttttttcatgttatagtatctgcaagtgttttctctcattttcttccttccccactctgctttctacaaggacaatgtcgcttcgctttgtacctttttagtttaaccttaatcttatcaattttacttcaggtgtgaatgtaagttataatctcctaatgatctcatataggtggaaaaaaatctggtgggggaaactggctttcagtaagtcagggaatagcagatcttgtttctggttttgctactattggtgatggtttaagtgaatctgttgactaccgtaatgaatactgggattctgacgagtatgaggatgatgacgacattgggtatgtcaggcaacctattgaagatgaaacatggtttcttgcccacgaaattgattatccaagtgatcatgagaaaggtacgacccgtggaagtcctgatcaccatgatagagatgcaaacaaagacgaggatgatcagtcttatgcagaggatgagtcttatttatccggtgaacggtatctccaatcaaaagatgctgaacctatttcttcagaaaatgaccgaagacttacagtctcagaaatttatccagcttgtaagaaaaacgatttattagcccaatatgatgggcaattaatggatgaggacttgctcaattcgatgcggactgagcctgtttggcagggttttgtagctcagtcaaatgaacgtgtcgtgtt

SEQ ID NO: 156858 - DNA, 698 bp, Arabidopsis thaliana landsberg
atgcatctacacgggtaccaattctacgtggtcgggtcaggtttcggtaatttcaacccgagaacagacccggctaggtttaacttatttgacccaccagagaggaacaccattggaacacctccaggtggttgggtggcaattcggttcgtcgctgataatccaggttagatgatcttattgactcgaaagcatttgatactttgtaaccataggttaaatgatcttattgactcaaaaatgaaaaacatattttgatatacttgtggtgtaatgcaggagcatggtttatgcattgtcacattgattcacatttgggatggggtttggctatggttttcttggtagagaacggtcgtggacagttgcaatcggtgcaggctccaccattggatcttccaagatgctaataaaaaacttctaccgttggatctaaagaatttatggggtttggttttttgttcttgttttttaatcaaaaaaagactttgtgagtcttgatatgttaaagatggacaactgctctattgaaagtggttcaacctttgttttcgatgtacttttgttattttcctcgtaatagaatgagtgttttgatttccgattaagaatttaccaataaagctgtgttagttactaatgatcctcttgtagctgactttcccaaacaactttactagttattacctttataggag

SEQ ID NO: 156859 - DNA, 4578 bp, Arabidopsis thaliana landsberg
gattaagtactacaaattcgatttagtccgactaatgaaaaatccagaaggcaaactgataaaattaaggacatccagttttccaacataatccaaaaggctagagccaatctcactgctcttccttttacctcttcaaaacaattagtgttcgtaggacttgactccttgttcatacctgatacttcgaccaatgtaaaaaagaaaagtactcctctccctaataacactgtattttactcattttaggcatttttttatcatcatttagctgtgcattttttgtatcatatctttttgcaccattttagcttattttacatacttaggcatctatgatcatcttgcatacgcattgcatgttttggtgtgttttcaggtgcagaaggagctaaaaaggtctctactcgatccatccactcgatccaggcaactacataagagacatcaattcactcgacctctttactcgatcctggcagctatagaggaggctgcagtgtactcgaccctcttactcgatcaaggcagcttcagatgaagcagcagtccaaaagacgatcatacacgtccagcgtccaaaagacgttcaaatggatgtgtgatctacgaattccagagctttgtagactcgaccaagggattggcttttctgcctattggctttggtagattgtttcttaaaccctctctgctatgtttcatcaacgagagttgagattaggaagtggtagagttatgggggtctctgtcacgagagtggattgacccggtttttgaatctatcgtcatgggtatctacctttcgcctattagccatttgatgaatcctagagttgcccttatcaatgaatccatccttagaacttctattagatttatttgtattccctgttgattgcacttttatttacctgttatttgtatcccctatttgtatcccctgttgattgcattttagttcttaattttgtcacatgttggttctactcgacccaatgatcgagtagggctcttaagttctcatttttacttgttcgaatcctgacctaggattgttactagaaaccaaccatcattataatctgacttgacttagtcgtctctatacacatcttgattgctaacaatacaatggactggattgacaccccctataactgcatcgacatgtttgtgttttaggggaattgaactgaatcacacacatttagtataagtaggcataaaaacatgtatatcaatttggcgccgttgccaattcattgttgcattgttacattcaagatatcaaaaacttttaagatcaagttcttttacatttatcaagttactaactcatattttcgtctgcttgtttttgtggtataggtactaatctttgtgcatgcaaactcgatccgaaggttttgcacacctattaccattcagagacagaattgacaaaatagctcgtgagttatcagaaaccaaagcaaaggcagcctgtgatcagaacagaccagctgctatggatcaacagaacagaccagtttatgttcaagacccacctaatgttgatcaaccaagaaacattggtgctggtgatgccccaaggaatcatcaccaaagataagggatagtgcctccaccagttcagaacaacaactttgagatcaagagtggtctcatctccatgatccaaggaaacaagtttcatggtttacctatggaagatcccctggaccatcttgacagttttgataggctttgtggccttaccaagatcaatggtgtcaaggctatttcccttctctttgggagacaaggcacaccactgggagaagactctaccccagactccatcacctcatgggacgattgtaagaaagcttttcttgccaagttcttctctaacgctcgcacagctagattcaggaacaggatctccggtttcaatcagaaaaacaatgaaactttctatgaagcttgggagaggtttaaaagctacaccactcagtgcccccatcacggtttcaaaaaggcttcattattgagcacactctacagaggagctttaccaaagatcagaatgctgcttgataccgcctccaatggaaatttcctgaacaaagatgtagcagaaggctgggagttggtcaaaaatctagcacaatctgatgggtgctacaatgaagactatgatcgctcaatgagaggaactggaggtaatgaggataaacagagcaaggatatcaaggctgtgaatgaaaagttagacaagctgttgctggctcagcagaagcagatacacttcatcactgatgaagagcacttccaaatgcaagaagggggaatgatcaaactgaagagctgtgctacattcagaaccaaggagggttcaacaagggcttcaacaactacaagcccaacccaaacctctcctatagaagcaataatgtagctaacccccaagatcaagtgtatccaccacaacagaatccgtccaagccttttgttcagtacaacaaaggttatgtccctaaacaacagttcaatggaggctaccaatagcagaatccaccaccagggttcactcaacaaccacaacaagccctaggagctcaagatcctgaaattaagcaactcattcaacagaccatccaagggtaagctactggcgctatggcttttgacaagaagatagctgaattacacaacaagatcgattgttcatacaacgatctgaatgtcaagtttgaagctttgaactcaaaaatcaagtatgtggagagtcaatttgcatcaacctctgctccgaagcatcctcaacaacttccagggaaagcagtccagaatcctaaggactatgctactgctaatgctatcaccatccaccaagaagatgagtctccaccaagtcatcagactctcaatactaaggacaatatgattcaagaagggggggattcaactcaaattgctacacctgccactcagcaatttatctggactatagagcacacacctttgctgaatactcaacattctggaaaaagattcaaaattgaaaaactcaagaaagagcagaatcaagagatgattagcagtgccagcactcaagaaacatacaagaagaaagtcatccaagaaaagcttgatgatcccggttcattcactctgccatgctctttaggaccattgacattcaataggtgcctttgtgatttgggagcatctgttatccttatgcctctctctatagctcaaaggctaaggatcatggaattcaagttttgcaacttagctttactcttagatgatggttctgttgcacatcctcatggtctaatagaaaatctgcctgtcaagattggaaatgttgaaatacctacagattttgtggtattggacgtagatgaagaaggcaaggatcccctgatcctaggcagactatttttagcttcagctggagcaatcatagatgtcaggaatggaaaaattaatctgaaccttgaaaaaggcatcaagatgaagtttgacatcaaaaaagcttcagaaaaatcaacaacaggaggtcagactttgggattcaggacatggatgttgatgaagaaacagaagctggaatcccaccaaaagtcaaatatacttctcaactcagcaagctgaagagaacctttgaccacaagaagagagcaatagaaggggtagctcagactaaagatcctacaaaagatgacttgtatgagatgagaaaaaaaattaaatggcaaagcagagtcatagagggattatcttcaaggttgatgaagctgaaagatcaactatggatgtttgaaaaaagagttaataaattttcaaatggtattgacccaaagaagatggaaactgcactagctatcaaggtggacaaagatttcacagcggaatgatttgcgccagcagatcagaaaggagttcacttagagaaaggaagcttagagagcaaattgttgagtgaggaggaaacccctattccgacttattctccagaagtgcctaaactgaccaccaactcctctgctgaagaagaacacttgattcttgattatgttgctaaagaactcctagagctttggattggatataaagctcaggaggatacaattggaaagttaactcataagatggaagagttaaatagcaccattctggaacttcaagaaatggtcaaggactacccagctttgaaattgaggattggtcaaaggagcctggttcagaagaagaagactactctgctgatcagaaagaagcctacttttaagaaaaatcgaatgagtactcatcctaccatatctcaagagaggatgcatagtatgattcaagcactgaaaattcaaccattgaagatgaggacttctctgttcctctcttcaacctcttttctgactaagctctataagagtcaagcttagtgacttaaaacaagctcacttgggaggaagtcccatgtctatccatgtatataactttctatttttcttgttatttttgatgtttttgtttaagtgtttcaggtttgttttagtgaccctaagggagtcaacggtcgag

SEQ ID NO: 156860 - DNA, 908 bp, Arabidopsis thaliana landsberg
agaaaacgacgtcgtagtaaggaactcacatcagagaaactcaaaaacccaaaatctctctctctctctctatctcgcccgaggaaaagctccgataatggcgtggatgcgactgatacagagcgcgagatctgttcttacgacagcaccagcgtcttcgactcttaacttccatagattctactccaaatccgccgctccttatcacggtaaaccgtttttatttgttcagattttgcgtcggagaaatgcggatgctaaacttgcgtgtattggctgattcgttaccttagggttgttgcaagtttcatttgtgtggagattcatgattggtcttctcgtctgagtagattcagtttcagtgatcgttattgttattcaaagtttgcaagtatttagggaagactaactattgagatgttgtgaatggtttttgattgctactttgagatttttttgtagtgaaagttggaattcctgagtttttgagtgggattggtggaggagttgagactcatattgttaagcttgaaaccgagttaggcgatcttccgaaattgctcgtgactcgtacgcttagactcaagaagtttggtattccttgcaaacatgtaagtttccaagtctttattgttctgtgtaagttacatagatttcaatgtgcatttggttatattgttgttgcagaaaagtgggttagttaggttcacaggttttaatatgttactttaaaatgtgttccattgcgtattttagtgaggtatctatagaatttaaggtaaaagagaagaaaaagtcgagttcttttcactttttagacacaaagagattgattgaaatagtcttgaaacgttagtttagcttgttagttatcattcaaatatgaaatataggcttgttcacacttc

SEQ ID NO: 156861 - DNA, 128 bp, Arabidopsis thaliana landsberg
aggagatccaaaaaccctagaagagctagctctccgagttatcattttcaactattcgcgttgggttactgatattttcccggtcatctccggcgttaattttccgatcaggttagtaattttacgat

SEQ ID NO: 156862 - DNA, 245 bp, Arabidopsis thaliana landsberg
agttagttaccaggtccggtttgatgttcttgaatgtattgatgaacgcaaatgtcgtgatgaggtgatccggtaggtgaacacgtctcaggaattccgatgactggatgatgcgacgcaggatgaggatagaacggtggagcataagtaggtgcaccttgcaacgtgccgtaacatgaaggagaagctcctctgtttttgtctttttctttgcccagtatctctctctctatctctctgtctct

SEQ ID NO: 156863 - DNA, 1197 bp, Arabidopsis thaliana landsberg
ctctaattaggcccgaaggtttcaaaagggtattttggtaaaatcgaaagagaatcatggacgcttttgatgcgattccagatcctgtggtcatcgacattttgaacagagtcggtgacgtcaaaacgttaatacgatgtcgttccgtttctaaacgattcaactcgttagccactcagtctgagtcgctccttctccaactcgatcagatcctcggagccaccgaatctgactccgagatcgattctcctatcgctagcttcttccgatctctcttcaaatccattcacggtctccttcctcctatcttctccaaaccagctaactctgacgaaatcctgacccgatctccgaaaactccggctcagattctctccgaatttgaacggatccggaatctgtaggtggagttatacggtggtgatgtcaagcttgagaaaggcgccgccgttaagtggaaggctgagttcgggaaaactctcaagagctgcgtcatcgtcgctttccgttccgcgacggttaatacttcagcagctacggaagctgccgccgtcgtcgacggtgttgttgagtcagattcggagtttgtttgtggattgaagacgcgcgtggtgtggacgatcacgcgcgttgatggcggcttccacgcgtcattacttgatgagagatttggtgaaagatcacaaggagatggagaaattgattgtgcgtgacagtgatggagaaggtacggtggtgatggacacggcggggatgaaagaatacagagagacggaggtgcgtggggataataaagaatcagagcgcgtgggggaacgaactgtggtacctagcgtgaggatgagtatgagacacgcgccgtcgctgatgctgaagagcgggatttgtctcgaagcagcgacgctggtggtcgtaaggccgactggtgtggcttccgatgataacgatgttgagctggtgacggaggcgttcgccggagatggcgacgattgtatgtacggagaagctgttacggcgttgcttaagcgtaggagaaatgtgttagagatgaattctttctaaggcctagtgggctttttttgggcttccgtttgtttggccctttttaatgtatatacatacgcatcgtacaaagccaactgtactattggcgtacgacttttgggtcaaatgacatcaaatccgaattattcctct

SEQ ID NO: 156864 - DNA, 2483 bp, Arabidopsis thaliana landsberg
tctcctatggttactttggccaagccaatgtcttgggtctgcctgatactggtggacaggtatacagtatttagttggaaacttccatatcttagaacttggtgatcctctgttgattcaacttacaatctactgttctgatttgcaggttgtctacattcttgatcaagtacgtgcattggaaaatgagatgctccttaggatacagaagcaaggactggaagttattccaaagattctcattgtatatttgcttgctcactatcatctacttcgttcttcatgtttgaaagtatttgttattcgagttccaataaaattttatgcttctatgctggcttatataggtaacaagactgctacccgaagcaaagggaacaacgtgcaaccagaggttagaaagagttagtggtacagaacacgcacacattctgcgaataccatttaggactgaaaagggaattcttcgcaagtggatctcaaggtttgatgtctggccatacctggagacttttgcagaggttagcattaattagtagctagagttctatgtaacttctgcagattattcttgcttcttcacttagatgtggttagcttaaagttacggtgaattaaagaatatacttgttcgtatcacataggacaatctgcttcagctgtgtatgcatgccctatgtattggctaacactttacttctatcaatgtgactaggatgcatcaaatgaaatttctgcggagttgcagggtgtaccaaatctcatcattggcaactacagtgatggaaatctcgttgcttctttgttagctagtaagctaggtgtgatacaggttgacgggttttatgctctctgtaatattaaattcttttttgttgtcttttgttctgatctctcctttaccatttcggatgcagtgtaatattgctcatgctttagagaaaaccaagtaccccgagtctgacatttactggagaaaccatgaagataagtatcacttttcaagtcagttcactgcagatctaattgccatgaataatgccgatttcatcatcaccagcacataccaagagattgcgggaaggtaaaaattcatccgctattcaaaggcatgttattgcctctggaattgtggtttgatgccaacagaaactattttgcttttgtcacagcaagaacaatgttgggcaatacgagagccacacagctttcactatgcctggtctttaccgagttgttcatggaattgatgtctttgatcctaagtttaatatagtctctccaggagctgatatgaccatatactttccatattctgacaaggaaagaagactcactgcccttcatgagtcaattgaagaactcctctttagtgccgaacagaatgatgagcatgtgtaagtcctcttacaacaattctgatttagcaattaaaaaaaaaatctcagacaaccacataatattaagattggtttgcatgtctcaatcttcttgtgttgatgcagtggtttactgagcgaccaatcgaagccaatcatcttctctatggcaagacttgacagggtgaaaaacttgactgggctagttgaatgctatgccaagaatagccagcttagagagcttgcaaatctttttatagtcggtggctacatcgatgtgaatcagtccagggatagagaggaaatggctgagatacaaaagatgcacagcctgattgagcagtatgatttacacggtgagtttaggtggatagctgctcaaatgaaccgtgctcgaaatggtgagctttaccgttatatcgcagacacaaaaggtgtttttgttcaggtaacatgagataaattcccttgtatttggatttttttttttgttgagttagcagaccatctaatctctctttttccaccacagcctgctttctatgaagcatttgggcttacggttgtggaatcaatgacttgtgcactcccaacgtttgctacctgtcatggtggacccgcagagattatcgaaaacggagtttctgggttccacattgacccatatcatccagaccaggttgcagctaccttggtcagcttctttgagacctgtaacaccaatccaaatcattgggttaaaatctctgaaggagggctcaagcgaatctatgaaaggttggcccattctccttgacaggcttaacaatacaacttgtatcgcttcaacaagatgatggcttaataaggatttttgcatgtataggtacacatggaagaagtactcagagagactgcttaccctggctggagtctatgcattctggaaacatgtgtctaagctcgaaaggagagaaacacgacgttacctagagatgttttactcattgaaatttcgtgatttggttagtgtaacccactgttattcttttgatgtctacatctactttacttacattattctttttttcggtttgcaggccaattcaatcccgctggcaacag

SEQ ID NO: 156865 - DNA, 271 bp, Arabidopsis thaliana landsberg
cacaagagcttggagccactaaaggaaagattaatcactcacgtcagaaatagtagcagaacaccctcaagtagaagatgacctcgagtttatagaggaatccacggttaacgaaccggacagcataaccgagatccagatgaaccggtttgatcgaaataaagtgtatggtgatcgtctagagaacaggcgtgcggtaaagtttgctaacccaccattgttaacgaaggtcattgtgggcaaagaagatgaagaaccaagtgatggttaa

SEQ ID NO: 156866 - DNA, 2704 bp, Arabidopsis thaliana landsberg
  unsure (1)..(2704): unsure at all n locations
atggatgttcacatgtggcctgaagatggaattcagcctgaaagagttgaatgtagaatgaatcagttgcttaggcttgtccataatgagagatgcgagaagggaaaccctgatctctgcccttactctagcagggttcacgtacaaagtatagagagaagtacagaaaccccaaacgaggccttagttgttctcgaggttgagtatgcttctcccacaaatggctgttcttcagcagaatggtacaaatcacttactccagcctcggatgtggcgaaagaaattcgtaaagctcaacatagtggacttggtgaaggaactggatttccttaccccattctctctgtaattggcggaggaaagagagatacagacctctacgcctacatttttggtgctgacttgatagtcttctttctggttgccattttctaccaatcagtcattaaaaataaaagcgagtttattgatgtatatcagctagaagaccagtttccattcgactttgtcattattcttatggtaatccatttctataagtctagtttatctgttcacacccgttttgtatcagtgccctnnnnnnnnnnnnnnnnnnnnnnnnnnnnnnnnnnnnnnctaattgttgttgatcgcgtcatctatctttgctcatttgcgactggaaaagtggtatactatctcttcagtcttattctcttcacatatgcagtgacagagtatgcttggagcatatatcctacccagcaacacgctgctggcttggctctcagaatcatatttcttgccaaagcaatgtcactagctctccaggccatacaaatccgctatggactacctcataaaagcaccttgtatcggcagtttttgacaagtgaagtatcacggatcaattactatggttacagactttaccgtgctcttcctttcctgtatgaactgagatgtgtgcttgactggtcttgcacagctacatcactgacaatgtatgactggctcaaggtatgtcgtctgatcccatgcatttactttctggaacccttgctatgatcatggatcattcatgttagtttgaacatactgccaagggcttaagttttgttcgtttgcagttggaagatgtaaatgcgagtttgtaccttgtcaaatgcgatacagttttaaatcgagcaacacataaacatggggagaaacaaacgaaaatgactaaatgctgcaatgggatatgtctgttcttcatcttgttatgtgttatctgggctcctatgctggtaataattttcttacaacacaacttttataatgcttttgtaaagtttttcatttggaatctgaattatcaatacgttcttgggatgaatagtactcatgatgcttgtatttataggagaaagaaaaattatgtgctagcttaatccaacaattctctgtgatgtcttacagtttgagtatttggtgagtcatttgtttgttggcaatggctgctttatccttgcagatgtatagcagtggtaacccgacaaacattgccaatccgataaaagatgcgagcgttcagattgatttaaaaacagttggtggaaagcttactttgtaccaaacgaccctatgcgagagaatctcaggggataacattgatctcgggctagatctcgggtctcaaagctttttgccaacatacaacaaaaatgacatccagctgatatgctgtcaagctgatgcaagtgttttatggcttgtccctgacacagttgtgaccagatttattcaatcccttgactgggacacagatatggacatcacctttacttgggttcttaacagagaccgccctaaaggcaaggagactgtgaaatatgaaagaagtgtcgaccctctggaccttccaaaacgctctgatatccaaatggttctcaatgggtcgatggatggatttagagtgcataatttgtacccaaagttcttccgtgttactggttctggtgatgtcaggtctttcgaggatcaggtaaatcttgtctgcacaagctaagagttattttccagacaatgtttcctgttttggcttatacttccaatattgtaatgttgttgctacagacggatgaagtgagtgcagacatactcattaaccatgcaaatttcaagtggtggtggtcattccataatcttaaagcgtctgaaaatatcagcgcttgcgaggggatggatggaccagttgctatcataatgtctgaggaaacaccgccacgtaagttagctcttctaattcaagtgttatttcataactcatgttctattattgataccgaaaataatatgcagagggctttctgggtgacaccctcagcaagttcagtatatggggactctatatcacatttgtactagcggtggggcgtttcatcaggcttcaatgctctgacctgcgtatgagaataccttacgagaacctgccttcgtgtgacaggtaacatttgtaaacattgtccaagagttttgctgttccatgatactctcaacctctaagagattatgaccactcactgttgaatgtagattaatagccatatgcgaggacttgtacgcggctagagcagagggtgagcttggagtagaagaagttctatactggacgcttgtgaagatctatagatccccgcacatgctgctcgagtatacaaagctagactatgatgcttag

SEQ ID NO: 156867 - DNA, 492 bp, Arabidopsis thaliana landsberg
aatttggttggtgcagtgtttcgtgattttgggtgatcctagaaatgggagatggggctgagattgtaaccaggttatatggggatgagaagaagcttgcagaggatggtagaattagtgagttggtgggatctgatgaagtgaaggataatgaagaagaggtctttgaggaagcaattggttcgcaggtgggtctaaaacctgaatctctcaaaaccgatgtgttgcaagaggattttcctttagcttccaatgatgaagtgtgtgatttggaagaaacaagtagaaatgagagaggagtagaaaatttaaaggttaattattcggagattggagagagccatggtgaggttaacgagcaatgtataactacgaaagaggctgattctgatttggtgactctcaaaatgaatgattatgatcacggggaagtagcagatgcagatatttcttatggtaaaatggcatcaagcttggatgtggttgagaaca

SEQ ID NO: 156868 - DNA, 1635 bp, Arabidopsis thaliana landsberg
atggactttgctggaccacaagtggtgtcgatcgacaccaggagtgtgtcgatagacactccctatgaatttggaagtgaagtcgtccttagcttccttttccttacgcctttgctccaaaatgtcttcttatggacattgtagtcccattgcatagagtacctgaaaagatactaaaaagactcgagaaataacataaagactcaaaatcctatacttaaaacatagataaaatcggttcaaatcgggttatatcaacaacaacacttgtagtttttttacttaagataaagaggatttaggatcattaatataatctggagcttaagtactagataaagaagagtttatagtgtatttaagagtgtgtatgacaagcaataagctgccttaaggtagccctaattcgtgtaacactatctctctacattgtaactcattagttaaacacaagtaaagaagagagagctacacaaaacgatataagagcttgtctattattcttgttgtttttacaatgagaaacacataaaattaagtaaattaaaattaacaaaactggtaatgtacaatttgctctattactttaaataggcaaagaggagagttcgatctctacacaaagacctaagagagaaagcgacatgaagagagagagagtgaaacacgagagtgaaagtgacatgtcctaatgtttatacacatatgtgacctcttgaatacaaacttgtttccctcttcttgtctaaaacgaatgggcatcttccttggcccttctttctttcttttgggtctcaacacacgttcaagcccacctcttaaactctagccttggcataatgcacataaacatgtacgtacaggtgataagtctgtaatttgcatgttttgagcatccatttaacatcactttaacatcatatcaccactgttttataccatttcacatcatttgtcatcactttgcatgtttaggatagatttgcatgcatgttgcatatctgcgttgatttcaggtgatttggagctgttgacgagctatctggaagaagcggacctgatcatgtcaaaccactcgacccgaggtcgagtaggagcttcaagatctcaacataccactcgaccccctggtcgagaagaggacatcactacttcaccacatcactcgaccccgaggtcgagtgtcttcatcccatcacctgaccatcactcgatcacatcactcgaccccgaggtcgagtgtcttcaccttcattaccagaccactactcgatctcaccactctacattgaagtcgagtatcaccatcaccaccactcgactacagactcgattgcgagcttcagagtcttctttattctacactcaaccagacactcgagcacaaggaagagaagaagactccagcttatcactcgaccatccactcgaccacacgggtcgagtacagttcttaatccgtcccaatactgcgtcgttttaagtattagggtttcagaatatttggctataagtagcatgtacttcacattttcgaaaacaagttttttatctagttttattccgcagaccttatcttctagaccttttgtaatccggatttctctttatctattcagtattcagtattcagct

SEQ ID NO: 156869 - DNA, 1080 bp, Arabidopsis thaliana landsberg
gtggggggggtattttgcgtttagggactgtatcacccaactctctccttagtatccaagagcttacgatccttgattgcttcaccagatctctacaagacccgatctttgttaggtcgcactgagagttgtctctatgtgcgtttacaggagaaagattctgaccctaaccctcgttggttcactctctgtctgaaacctaatcgaactctaaccaatgatatcactgagaagaagaagaagaagaagaagaagaagatgtcaagtgggtatgttctggctgcaatcccagttctccattctcgtcctgcgtactggtcgggtctcgttgccgttggttctaatatctacaacattggaggacccatcgacaaagcacactcgtctatcgtctcggtcctggactgtcagtctcacacatggcacgagggtccaggcatgagagtagagcggagatatccggcggctaatgttgttgaaggaaagatatatgtaacaggaggctgcaaagactgcagcaattcctccaactggatggaggttttcgatcctagaacccaaacttgggagtctgtctcgagccctggcgcagagattggaggttgtagcatacataaaagcgcagtggtggaaggagaaatcttgattgcaaactctcatggtttgatttacaaacccaaggaaggtaggtgggaaaggatgaaatgggccatggatataggttgggtatggtattcttaaaaagttgttgagaacgtgctttactattactataagggagtcttcaaatggtatgacactatggcaagactctggagggatctcaagggtgtgaaaggactccccaggtttgccagatgtggtggaaaaatggcggattatggtggaaagatggcggttttctgggacaagattgtgacttccgatgatggatgtaagaacaagatgattttgtgtgctgtgattgcgcttgaaaggcgcaacagcgaagagatttgggggaaggtcgagtggcatgacgcagttcttacagttcccttgtcatatgaagtcgtgtatgctctttcccctaccgtttga

SEQ ID NO: 156870 - DNA, 430 bp, Arabidopsis thaliana landsberg
  unsure (1)..(430): unsure at all n locations
attctggtctttatgttcagcgataatgagttacagagataatgagaacaagaacgagagacagagagatacgagatcttacagactccacaagtgaaatttcatggcaagaacttgtcgaggctagatgtgagtgtggttttgggcactgcacctatgattgtatccttcttctcgccaccgacaaagatcatgatcgttgggatgcttctaactccgtactggccgggagtattaggagattcatcagtgtttaatttgtagaacttgatcttcccagtgtaatgctgtgctagatcgtttacaagnnnnnnnnnnnnnnnnnaaggtccacaccatggtgcccaaaagtcgacaactacaggcccagttgctttaagaactagagagtcccatgtcgagtcattgaccacttgaactgcaggatcaa

SEQ ID NO: 156871 - DNA, 1754 bp, Arabidopsis thaliana landsberg
aactctctctctctccaaaggcctctctgtcagcgagctacgcttcgtcgtacgagaaagaagatcttcaaccacgtcagggagctttcactgtgaaatcctcagaacctcccgcttcgtctcttattctcagctattcctcagcctaaagaactcaaatcctccaaagatggtgatttaggctcatcttcctctcgaggaaaatcttcttctttcctctcctctctccctcctcccgaatcctcaatttcacggaagcggaatcccaatccgtcgtcaataccgaaacgtgtcgtccagatcaggcttccagtaaaccctagaccgagcagtcttgatgatgaagacgacgaagaagaagagaaagctaggaagaagcgtaaacagatggaatctgcttccgtatctcacgattcatcagtaagatcgttcttatcaaccatgcctgcacctaaaagctcacaaacactaggtgctcttccttcattgggatcaggatcaggtcgaagatcgaatctcgaaacagaaacaccttcaattgcatttcctcaaacggattcaggtattagtgatcaacaaaaccagagctatgaatcgtttagtcatagtaatagcgaaacggaagaaatcgttggagtagataactattatgctactggttatgatggtggatacgaaacaattcatagtggtagtagtgtgggatatgatggtagtagctatggaggtaatacttggaatggtggtgggtttgaggcaatgacgggattgcctgaagcggttgtagctatggatagtggtgcgaggagaggaaggagagggaggaatcagatgccagagattgttgaggttaagcaagatgagcttatgaagaataggccacgagttgatcaggttaaatctactggaatcgcctttggacctgcgtatcaggtttgtttactttctaaactcttcttactcgtttttggctgcaagaacttaggaattgtctttagaaaagcctgaactggtaacactatagagtatagagcgttgtgaatttgtctcctgtttgtggctgccattgtcaagtttttacttgcgaaatttatttgcaataacttgggtgttgtcttgtctctaatgtctcttattattctcattctctggttctgtatatctaaaccctttgctggtaggagattttcattagagagcatatgagttgaatatgagttgaagattatctcttgtttggggcttctgttgtcaagttctttctgttttgctgataaacttctttgtggatttataggaaaagagatactttgattatcataccaattttattatgtgttcttcactgaaaatatacttgactgctttgtattgctttttaaatgatgtctttgttcaaatttgtcttgcagccggcaacatcttcatctaaagggaaagtgtcaaagcttcacaagaggaagcatcaaatcactgcgttgttcatggacatgaagcacaaggagtcggagttgacagagagacgttctagaggattgctcacgaaagccgagacacaagctaaatacggatggtgatttgcgctattgtttttccccatatgtcagatatgcgcgagattgtatcaagttgtgggatttatgtcgtgtactattttccaagatccaagctgtgaatgtaatactcattgccgtgaatgaatctaatctcagcagaatgctttgacccggaagctgaatatagattttgctgca

SEQ ID NO: 156872 - DNA, 1065 bp, Arabidopsis thaliana landsberg
atctttaaagggcattatgggttacctcagtggctcaaatggactagatagctccgggcttagctcatcagctgctgtaagtaactgaatcccgcctgtttttgtacagcagaaatttctccggaaagacaatttttactgctctttaatagtaactaaacatttttagcatatgagagtggtgtttacttgtcatttttggaaaatgaatcttgtatattattttatgatcgccagaaatgtgacaggttggtgtggcatacctgctagctctagagaatgcaaacgaattgactgtatccccaacagaaaatatcgaatatgacaggtatattcccttctaatgtaaccaagaagctcttctgtattgcttcatgagcagttgtttctctgtgaaaccagcaattagtgctgcaaattggtcaatttatatgtgacttactgcgtctgcaggcttattgagaatgggtatctgggtctgcggaatggaattttggatcaatcagctattttgctttcgaattatgggtgtctaacatacatggactgcaaggtaaaattccttgatttgtaagtgatatagtgtgcaaaaaagcaagaagcttgttcatgtggcaaaaccaagactgttcaatgggatgcctaagatgtttttgatctctaaactgaaaatgactcacgatcaaatcagatctacaacattctcattgctttcacgagaaaataagtgtttaatcttttcaattgcttcgattttaatgtatttcaatgctgagttcacttcttcctaaaatgaaaatgaatggttagaatcaggaggccttaaagaaatccttcctaaccagccatagatagggaaactttattttcttccagaaactgccatctcagaaaaactgtttgaaatatgcagactttggaccacgagcttgtacaggctcctgaactggagaaaccgttcaggatattgttagcattctcaggcttgaggcaggcgttgaccaccaacccaggatataatctgcgagtttctgagtgtcaagaggcagcaaaagttcttttcac

SEQ ID NO: 156873 - DNA, 1212 bp, Arabidopsis thaliana landsberg
catatcaaaacaaaactgagagagagtatccatatttggaggaaaaagaaaagaatgcagcagccctatgagtaccgttacccacaaggcactggcccttcggctcctccgccgcctccaaaagccggagtgatagtggatccaaagtactgctctctgcaccctgtagatttggcgatcgtacggaaggtgttgaagataacggacggtaacttcgtgataacgaatgcggaaggaaacttgttgttcaaggtgaaggatcctttttttagtcttcacgagaagaggatcttgatggatggttttggaactaaggtcttgactttgaaagggaaggtacaaatttattcacaacagagcacataacttgatatatacaattactaatagagctagatttgttaatattaagatttggtgattgcagatgatgaccatgcatgacaggtggcaagtgtttagaggagggagtacggaggagggtgctctactatacacggtgaaaagatcgtcgatgattcagctagcccccaaacttgaggtgtttttggctaacaacgtagaggagaagatatgtgatttcaaagtcaaaggggcctggctcgacgactcttgtgttgtctacgccggcgattctgacaccattattgcccacgtaaacaaactctctttccttatttttgttttagaagacagtattttacatgtaaatgtttatatcatatattttctaaatatcgaataaagtttttttttaaaatgcatttagtgatacattattttactacaagttttacagtatattaaatatttaaaaattaaagaagataaaatttttttgatacatctggaataaacatgtgtatatattatacccatcgatatatattattatgaactgggagtttgccaaggtgttattaattgttaaaacttgaaaaataaaagtggtatggtttgaatgacagatgtgcggaaagcaaacgatgcgaggctttttcttcggaaaggaccatttctccgtcactgttgataagaacgttgattatgccttcattgcatctctcattgtcatccttgtagaaatagaaaaagctggttttcttacgaaaatgacaacacaaatgataataggtttttaggtatcaatttttaaagcattatcatatcgttgtagtaatttaggttatcaatacaatttggtgtaatgca

SEQ ID NO: 156874 - DNA, 808 bp, Arabidopsis thaliana landsberg
aagaagaagagaaacaacaagaagaagtaatggcttcctctatgctctcctccaccgctgtggttacctccccggctcaagccaccatggtcgctccattcaccggcttgaagtcatccgcttctttcccggtcacccgcaaggccaacaacgacattacttccatcacaaacaacggaggaagagttagctgcatgaaggtaaatgtcattaatgaaaactgtcttttgtcatgtgcaattagtgcaactgaacaatactttagaataattgggaattcgaatttataggtgtggccaccaatcggaaagaagaagtttgagactctatcttacctccctgaccttagtgacgttgaattggctaaggaagttgactaccttctccgcaacaagtggattccttgtgttgaattcgagttggaggtaatatacactgaacttttcctttgtctctaagcatcctttattcttcttcttcattgctagaaacttaagtggataaccgaaatagactatcaccaatatatatatcatcaattgtattgaatggttttctttatatatagcacggatttgtgtaccgtgagcacggaaacactcccggatactatgatggacgatactggacaatgtggaagcttccattgttcggatgcaccgactccgctcaagtgttgaaggaagttgaagaatgcaagaaggagtacccgggcgccttcattaggatcatcggattcgacaacacccgtcaagtccaatgcatcagtttcattgcctacaagcccccaagcttcaccgaagcttaa

SEQ ID NO: 156875 - DNA, 632 bp, Arabidopsis thaliana landsberg
tttccgtctaaggctacatttgaaaccttcatcggtatcgagatgataaagccacagctgatctgaaactctttggtgacaatctaaaggtactgctctcttcgtagctgctgtcaatcaaagttgcatttctttacgttttcaattttcttttctctaagatcatttttcattttctactttccggtagctattggaagataatctcccgcttgagagtgtatacaaatcgacagatgtatctgctgctcctattcgggtcatccagttaatttacaattccggggtaagttcccctcggcatccatctgagataggaaaaggaagaaaatgtattgccgttattcatggttcacttgtttcttgattgtgacaggatgtgaagggtcctcagactgttgcttacaatttgccaaacgatgaaaaaatcgtgaaggatagaggaacatcaatggttatgctcaagaacgtccaagaggcaaagtaatgtcccttcttcctccatatttcatcaataaacggtgtcataattacatctaactaatgcttttttcttttctaggtttgaacatattttaaagcctataacaaaatcaccatcagcaaggaacagagaggattagttgatttta

SEQ ID NO: 156876 - DNA, 736 bp, Arabidopsis thaliana landsberg
tgatttttagaaaactcacaaatttcttggtttgatattgttaaaaccagggtctacaattctatatgtttgaagtccaaagcaaatgggttgctgcagtcttgtctggacgagttacacttccttcggtagatgaaatgatggacgatcttaagttgtcgtatgaaacacaagaagcgttaggtattcccaaaagatatacacataagttgggtaaatctcaggtacgacattttttagttacgaatatgctatggtaatatatatcaacttgacaaagaatatagtttcaataataaattttgtgtcttttagtgtgagtacctcgattggatcgcagaccagtgtggattcccacatgttgaacattggagagatcaagaagtaactcgcggttaccagagacttggtaatcaaccagaaactttccgtgatgaatgggatgatgatgatctcatggaagaagcatacgaagattttgctagactaaatctgatcaattttcatccttctcgttttctcgaatccggaagatgaagtttgactacgattgtaattgtgtctacttgtttggatttaaagtacattgcattataaaaataatgtgtgagtaaatagtttataagagtgtgaaggtcttcttggctagggttacatgttgttcgatctccgaaaatagaatcatggtgtctagaaacttttgttttttagaccaatatgttaagaataaaagtat

SEQ ID NO: 156877 - DNA, 902 bp, Arabidopsis thaliana landsberg
agaccggacctttatggttgtgctttggctcatgtgggcgtcatggacatgctacggtttcacaaattcactataggtgagtgagttcagttatctgcaatttgttttgtttgattttttgcttaatgtaattctaacttgaggtgttatgtatgtataggtcatgcctggacatctgattatggttgctctgagaatgaagaggagtttcattggctgataaagtaagtatatgaacttatgatatgatgttgtattgatttgattcccaatgctgatacaaagttacaatctgggtgtgaatgtataaaggtattcgcctctgcataatgtgaagaggccatgggagcaacaaaccgatctgtttgttcagtacccatcaactatgctactgactgctgatcatgacgatagagtcgtcccacttcattcttacaagttgcttgcggttggtctctcaacctcttgtttgcattttgtatcttcctcttcttcttcatcttccattgaaacccgattttgctttcgcagacaatgcaatatgaattaggtttgagtttagagaatagtccacagacgaaccctataattgctcgaatagaagtaaaagccgggcatggagcaggacgtccaacgcaaaagatggtaactatctatacataagacttctctgttaaatgtttttgtacaatataaatgcttggagtgtaatgtttgtgagttgcaacagattgatgaagcggctgatagatattcgttcatggcgaagatggtggatgcttcatggatcgactagaatttactcaaagagattagcttttctttcttgttatgttttagagagagctactatattataattctacagtccctcctcttttataaagaaaatgtacttgagt

SEQ ID NO: 156878 - DNA, 1075 bp, Arabidopsis thaliana landsberg
acaacaagtatctctgcctctccttctttaccgaaacaattctggtcaagacacttctctgccgtcgctgactcttcctcctctagctccgccgctcttggaagccaatcgagttcttctgctccacctcaaggtatgttgctcgtgctatgtcttccaatgcttgagcttggaatctggggatagtaagcatcaatttctgaaaagctaagccctttttgtttcagagaacaaacgagggtctaagtggtcacaattgttgttgttcttgcctggagcgattacctttggtctcgggtcatggcagatcgtcaggagagaggaaaaggtcagtacttcgaaatcaatggaagtcctttcatcgtctcaagcttggttatagcctgtcttagacttttaattgaaatttatattcaaaatgtgcttcacacatattctagttgtttttgtgatccgtaaaggagttagagtaactagatcctggagtcgtaatctgtgtgatctggatagagcacatactgatctatgctgacgcaatgcagttctctgcatcgtcatgtagactaattaagttgaataaatgtcagattccagcgagaatctaaatgttcgtaattctttcatataagtgatctggcgacactcttattgattgtaaatgcatgctgagtactggctaccatgcccatgtcttggttgagatttctcttattccattacctgatttcctatctttttctcttccaaatggttgctgaagctgagacatttaatattaattggttgcttttcactgagcagacccctaaagctttattcattacttgttaccgcagttcaaaacactggagtatcaacagcaacggttgaacatggaaccaataaagctaaatatagaccatcctcttgataagaatctcaatgctttagaatttagacgggttagttgcaagggtgtctttgacgagcaaaggtctatctatttgggtccacggtctaggtccatatcgggaattactgaaaatggattctttgtcatcacacctctaatgccaatccccggtgacctggatag

SEQ ID NO: 156879 - DNA, 199 bp, Arabidopsis thaliana landsberg
acaacaagaataaatacatcacatttttcagacaaaactccaatttcacagtgaactcaaaaacaatgacaagctccgataaatctccgtcgcacgacgttttcgtctacggcagtttccaagaaccagccgtcggcaatcttatcctcgaatgttcttcggtcatggtttccgctcaactccacggctagtacgtctc

SEQ ID NO: 156880 - DNA, 1272 bp, Arabidopsis thaliana landsberg
gaatccgcttctggtacttgattgttgctatgctgtgtctcgtggaggacgaagggtaatgttctgtttgcttgtcttttgtttccttttattggtgggttgaaacttaaatcttgtgctgtttggtgttgcagcggtttggtaacatggctggggtttttcaagtaatggcatttagtgttggtgcgttagagaaaggggagagtgattcagttttcatgggaaagcttgctaagattgctacagctgagattatatcttccaaggtgtgttgcgacggctgaatcattgttaaagatttcttttttgtacgtactgatagttagatagatttacgtagtgaacttggaatcgtaggtgagctacattatttctataaaaacaggggacacttcttgcaatgctcacaaactttctcgcaactgttcgtatatgtttcctgatcaattttggatcttttaatggttcatcataacgtaggaactaaatgctgattggcaaaggcaagcatcagggctgctcgtctcaattggaacacattttcctgatcttgtaagtcttgtttttttcttttctgtttgctaattcaaagagggatttcttgacattgagaaaaaactgtttttttagttccatgtgactgtacactcttgagttgttgccttttactatacacaaaaggttggtaacatgattggtggtgagatgcattacgattcggattatctttgatagattgcatgatataatatgagttgctgctgagaaaaccatagtagagactttcatctgccatcatgttaacatctatattgagacattttagatagtgtcatgagtaaagctggtccttgtctctatactgtcatttatgaggtagatggcagcctatcccgttagacgtggggcttgatttcccttctttttggataaagtccaagatatttgatattttttaaatgatatggacagatgatggaagaaatatttcttcatctgtctggtccggtaacagctgcacttgctatggttcaaatacttgctgactttgcctcatataatggttaatttctaactctcattcgtgtccctgtaatattttgtttctcatattgaaaagtttatggaccttgcagttctctgatattttgagttactttcatatttcctatgaagctttgcagttcactccacgcctgaaaggtgtactttcaaaggtgtcgcctattcttgggaatgttcgggacatacaccgaccaatatttgcaaatg

SEQ ID NO: 156881 - DNA, 1063 bp, Arabidopsis thaliana landsberg
atatgttccttttgctctcaacattcagctcatgcagttcctccatttcaaatcccgagcactcgagcttgcttctacttcaggtatctatctgatcgtaattaactctttagcaaaaaaataggtaattcactaaaggacccttgcattatgttttgcagatcctttgaaagagatgatgataggcgaaagtggattcagaaacgcattgtacatgatcgatatcggacagaatgatattgcggattcattctccaaaggcctttcttactcccgggtcgtcaagcttattccaaacgttatttccgagatcaaaagtgccataaaggtaagaactagagtttgtgggtttattctgaataaaacatgctagagtgtgctaaacaataagtcttgatattgggagagagttgaaatcttttgttaaatttgttttgcagatattgtatgatgaaggagggaggaaattttgggttcacaacacaggaccattaggttgtctgcctcagaaactttcaatggttcatagcaaaggttttgataagcatggttgtctagcaacttataacgcagctgcaaaactgtttaacgaaggactggatcatatgtgtcgggatctgaggacggaactgaaagaggccaacattgtctatgtcgacatttatgccatcaagtacgatctcatcgcaaactccaacaattatggtaagctttgatgcatataagtaaacaccattagtgtctgtttatcggttaagatcttatgtcatcataaatccttcatgtatgtgtaacttcgttaagcatttttgtgtcatgcatcaaacatgattaggtattttaatccggtctatctgatctgaatcaaaccttaaccatacttaggaacctgaaaaaccaaatctatgttttgtttccatggttaattatgatcatctactcaattgttttgtgcaggctttgagaaacccttaatggcatgtcacggatacggagggcctccttacatctacaatgtgaacataacgtgtgggaatggtggctctaaaagttccgacgaagg

SEQ ID NO: 156882 - DNA, 931 bp, Arabidopsis thaliana landsberg
gtacaatgtccagaattgtcgtcgggatgggttctaagtccgttgttgacatgatcgaagctgcctcgcgggcacatttttctggtttacacgtgaatgggcacatgaatgggttggaaccaagtgcacttaaggaaaccacttctgcatcagaagatatccaaagacagccttttgtaataggtgagttctgcttttgctttcatttttgattaatatatggtcgtggataaaaaaagcttgacgaatggtcttgattgatatgttgtgacttgaattggttaggtgttgctggaggcgcagcatcgggaaagactactgtttgtgatatgataatccagcaactgcatgatcagcgtgttgtacttattaacctggtaattttgttttgctaataaagtttcatagagctaagtgataaccaccggtttgatttgtgtttcgaatgtatatgaagtcaattgaattccacacaatttagagatctaaaaggagaatattaccagctaataacttatatatggctgaagtttaacattgttcaaccttgtcaccattgtttagatatttatgtcagtctatttatctaattctcaaatttctttggcatcatgataaaccacaaattgctcgacttaatatcctatgataatgatttttggcaggactcgttctatcataatctgactgaagaagaacttgctagagttcatgaatacaactttgatcatccaggtgagaatatatttggagtgtaattgctttctgtaatctactcttgtcaatacatagtgtcatcaggagtaaaaaatctttcctagcttctttggccattttttttattttttataatacttctttgggataattaaggcataactaacagccatattattcagtgatatcttactaattgatgtattctctttta

SEQ ID NO: 156883 - DNA, 3992 bp, Arabidopsis thaliana landsberg
  unsure (1)..(3992): unsure at all n locations
atgtgcgaaaaagtaaccaggaatgccactcttctaattcttattttttgccaaattaaaaataaatgagagaaatccaaataattggcaaaagaccaaaaaccaagacgacccaacaaagtatccgatccaattaagatccatgcccagcgacccaaaactcatcccaaacacttaagcgaaatccctaatttctaaaatcaaaccgtttctgctctcagaaaattcaaattttccaaaatcaaattcataatttctcgcctttcacgattttccgacgaattcttgattcgtgtaatagttggatggctcgtgttagagacggtattgctggccctgtatatgattcgacggagaagtcgtcgtccggtgaggtttcgacatccgaaccagttacttcaaaaattgagaacgacggagatgccgtcgacttggttccgaccaaacctgcaggtccgacagaaccagaaacacgagatgttgcggcgaatgatactacaaaagaaactgctgaaattgaaaaggctatggaggaaccgcgtgttggtgatgagggttctgaaattgaaaaggctatggaggaaccgcatgatggtgatgagggttctgaaattgaaaaggctatggaggaaccgcatgatggtgatgagggttctgaaattgaaaaggctatggaggaaccgcgtgttggtgatgaggcttctcctaaaggaaccgccgaaattgaagagaatcagacagggacaactttgaaacctctaattgacgctgtcattcaacaattcgaagaagcgaaagacgggaatggggaggagttggaggaggaggaaatggtgatacaatttcaaaagaaggggtagagaatgttaatcgtcaggtatatacaattgaatctctatgacacacatttgttttgtttgagtattagttctcgtattagttagaaatgttcaactagttcatctgtgacacatgtttgatttaagtaatttgatggaactagttcaattggtacatatgaattgttagtttggtacatatgaattcttcaattggttaatgtttattgaatttgcaggatacttgtgaggccgaggatgatgaggtttctgttaaagagacagaggaagatgaggctggcaatgatggtttggaggatgatgatttagattctcagccactgccgccacagaccatgcattttcctttttcagaatacggcaaagtgtgcaagataagcagtaggtgccaggtcacgcagacagatgaactgatagagaggaagtttaaagaagaagctgtatggttcaaaagacacgatcagttcaagcatatattccacatgcctcaggagcctaaccaccagacgcaaggcatgtgggtgcttatgctgcgcacagtgaagacagatttgctcgaggaggcttggtttgtggtaaatggagtacctattaggtattccattaaagagcatgcgttgttaagtgggtttgattgccacagttacccaaaaaaaatgaatacaatggggaatattaactttgtgaagaggatattttaaaaagaatctgggataaaggttgtagatgttcttgctaagtgctcgaagatgaagcatggttcagataggttgaagttagtgctgttgtacttcttggtcaaggtagtaaaagctggtgcaaagaatgatggaaacattgaagagtttctgttaaggattgttggcgatttgaatgcgtgcgagacgtttccgtggggccgttacacttttttggaatgtatggcaggaataaggaaaatgatgaagaacatgaatggtttcgtgaaaccaaaagcttaaccttgcttcagaggattcattgtgcctcttgaggtaagtaatttatgattattatatgagtataaggtgtaatgtacaggttttatgatattaacattgttttgttatttgtagattctggcttatgaggctattccacagcttggactgaaatttagagtccctgtaaggttcgagaatgagtgtccgagaatgtgtaaggcctcattctctagtagtgtcatgaaagggttctcgctggaagagataaacgaggagcttgaaagtgtaaaggtaagagttgtcccagttatctctagcgttgtcctagttatttctagagttagcccagttatctatgagctagaatatgattattttttatgtttgaatttgtataggttatctctagcgttttggaaccggattacgaggagaaagatatgttgaggcggattgtagatggtgatcatgttgatgatgggatagggtttgttgatccggttgtcgatagctggagaaaccgtttgatcaaagagaggaagagaatcttctggaaggatatgtttgaagcggatgtccgggcccgaagcggcggcgagcaaatggaggaagagaatgttcagagannnnnnnnnnnnnnnnnnnnnnnnnnnnnnnnntgctctttgaaggaagctattgatgaaggctttaagagagtgatggcgatgttggcggaacacaatgaaaggcttgtaaccattgaaaggagacaagccggtgagagtgtgcctccatttgagaagaaggtccattccgatgtgaataaggagaaggaagatggtggtaagaatgagaagaacgtgaatgtggctattgagaccgaggctagtgttgagcccgagactagtgttgagcccgaggctagtgttgagcccgaggctagtgttgagcccgaggctaatgttgagcccgaggctaatgagacccatgatgttgagcccgaggctgttgagacccatggtgttgagcttgagggttttgtgcccgagtttgttgagcctgagggttttgtgcccgagtttgttgagcccgatgatccgagttctgccatggttctttatgttccgcatgttccaatcggtatggtttgttttgtcaatctttgatctttttaatatatgatgtttgttggttatgaatggttgtcttttcttttgaaggtgatgttcaagttgaaagggatactgaagcggataaaggcgatgatgagacgccgaagaaggaaacgaagaagaaagggaggaagggaaagggaaagtgcaacgataagaagaatgagaagaagaaaagagacgaggattctgaggacgaggatgaaggtggcaaaaagaagcgtaagataaatccatcgagattccacaagccaccttataccgcggagagaatgagagggccaagggtctggtttacgtttggagaaaaatgtattgaagacttgtgtttttgtgggaacgatttacttatgtatttcggatgtattgaagacttgtatttttgttatttaggatgattgatcatgttgttttgggatttatgttacttatgtatttaggatggctgatcttgtttttatgggatttatggtatttatgatgatgttcaaaacaaaaggtacacgtagtttatagttaggtacaactcaattccaaaagaggtacaactaacaaatcaaaacaagtacaaatgagttcaaaacaagtacaagtgagttcaaaaaagaggtacaagtagtttatagagaggtacaactcattttacttctttccaagcaacccgaacctcgcatcgttctggaagtttgcaccaaaaagcgagcttaaacctcgcatcttatactttaactcgtgtattttacacagcttcagttttagctcgtcagtcagacagcctcagcttcagctcgtcaatcagacagcttcagtttcagctcgccagcctcagtttcagctcgtcaatcagacagcttcagttttagctagtcagtcagacagcctcagtttcagctcgtcaatcagacaccttcagtttcagctggtcagtcagacagcctcagtttcagctcgtcaatcagacagcttcagtttcagcatcagtttcatctcgtctttcagacacctttcagttttaa

SEQ ID NO: 156884 - DNA, 624 bp, Arabidopsis thaliana landsberg
atggcaatagaaaggcaagtgacggaagcagaggagccagtaagtccatttgcacgcttgtttagcttgccgggtctcgatgtcttcaacattgtaaccattggatgcaaaaccgaaggcaatgcctcaaccatcgtcgaaggcataaagaacacattgatcaaccatccacgcttctctagcatactggtacgtaatcaacgtacacacacatatacaaatatgcacatgtacacgcatttttattgttaatttataagttaagtttcatgattttccatttcaaaatcaatatcaaatgagtgtattaatccatatccacaatatattactttagggttcctctcattcagatgtaagatgcctaacattacatgatacttgtaggtgactggtcatggtgagcacaaaggaaaagctagatggattccaacgaaagtaaacgtagaagagcatgtcattgttccggatatagatcccaacattgagaatcctgatgagtttcttgaagattatacatcaaacatggctctttctccaatggatatgtccaaacctttatgggagtttcatttattgaaacttaaaacatcacatgcggaagctgtgaccgtggctaggttc

SEQ ID NO: 156885 - DNA, 555 bp, Arabidopsis thaliana landsberg
aaggttaaattcatggatgaagctgaagctatagccgctgcatcaaacactattactgaaacaatggaacctttaggagcaagcgtcaaggaaacaaatgatgcagttaaagaagctgttgagaaggttaaaagtgggtcaagattggtaatggggagactcttagcacctggagaaggtacttataacttgacttgcttctgcctaagcgatacttggatcggttgtgaccaaaagacatcactgaaagtcgaggttttgaaaagaacccgtgatgtggagggtgagaatgcagaagaaggattagaggaagaggatgatgagattgaagaggaggattacgaaagcgaatacagtgaggacgaggaagataagaagagagggtcaaagaagaaagtaaacaaggaatcgagttctgaagagtcaggatcagatgaagagtaaaagaacaaaaagtagttaacgttgatctgaaattattgtctgaacttatacaataatttttgttttcagagcttacacagtcgtactaaaagattttacagtatttaatct

SEQ ID NO: 156886 - DNA, 601 bp, Arabidopsis thaliana landsberg
cgccgactttggtctcgccaagttcctccaagattccggtacttctgaatgtatgtccgcaattgccggctcctacggctacatagctccaggtaacaaatttgcagaaaatggcatttaatcaaacacttggtggtgaaatgtaaaatctctgaacttgtttgttccttgttgagcagagtacgcgtatacattgaaggtagatgagaagagcgatgtgtatagtttcggtgttgttcttctagaactcatcaccgggaaaaaacccgtcggagaatttggcgacggcgttgatattgttcaatgggtgagaagcatgacggattcaaataaagattgtgtgctcaaagtaatcgatcttagactctcttcagttccagttcacgaggtaacacacgtcttctacgttgcgttgctctgtgttgaagaacaagcggtggagaggccgacgatgcgtgaagtcgttcagattctcactgagatcccaaaaattcctctttcgaagcagcaagcggcggaatcagacgtgactgagaaagttccggcgattaatgaatcgtcgccggattcaggaagtccaccggatcttttaagtaattag

SEQ ID NO: 156887 - DNA, 727 bp, Arabidopsis thaliana landsberg
gtgacgttgtaatagatgatgtgttgattatcataggagccgatgaagcaaataccgtttcaggaaagcaagagattactgtgcaagaagcgctagtgaagcttctacgagatgaattgtctcttgtggttcttcctgctggacaaagaaatatcatacaggatgcacattgtgtagatgatgcagaccaagagaacactaagtcatttgttagtatatcctcaacgaggagacctgcgattctggagaggttgatggttacaaaggcgtctctgtatcagtggttgcagcgcagaaagtagctgcctctgactgttacattactaatcagtcatcattgtattttatgctaattcaaaccatatgcagaaaagaatggggaaagattgcatatcatctcaatgcccatcatattgtatacaatcttctaaataaacaaaagagttgtcttctaaataatcatctgacagctatctttccagttctgtgtagattcaaccataacttaaaaaccaaatttcgatctttgcaataataattcacatgctaagaaacaggcaattacattaccagaaactcgaaatttgtagagtacacttgttggtctctctaattgaacaggaagacagcaacctgatgatcagagccaatcctgctgctgcagtttcaggggcaagtaaacttccgataaatactggaaaccaaaagagctcaacgcctgaatctc

SEQ ID NO: 156888 - DNA, 1494 bp, Arabidopsis thaliana landsberg
atgaacgagagtaagcttgacgcggtccacaatcaacttgtggaggatgtcgattatgttcggagcagaggttttccgaatcagagatttcatcaccaagaaggctacacaggttcctatgggaatggtccaactagctacactcaaaattctcagttccagcaaccgctacagaatagcaatagtttcagcttcacaagaaactataatcttgcttcttaccaagcccccccccccccttctacccagacctaagagcaagatagaatcattgctggaaccagattctggaaggtcaacaaaggatcttaaagagacctatccctagatggaatgagaggagcctcactatttcttggcacgctgcttcaatggaaagtgagtatgagttagtgaggattttgcagttgcataggcagtgttgaacgacaccaacccttggtgtcgatcgacaccatcgcatatatacgagacatcgggttgtgacgaagcaaaatcgaccaggctcgacattgatctccagaatcgttcgacacacattgatagtgtcaaccgaccccacctgggtgtcgatcgacaccagtaccaacttgaggaagtgttgacgtttgacggagcagaatcgagcaagattgacaaaggaggatcaatacgagatagtagtgtcaactgacactcacctagtgtcgatcgacactggacgcagactgcatcgctgaattgtcaacatcctaaggaaagtcgagttgtagcatgagtgtcgatcgacaccaccactcgcgtcgatcgacacacatcactagttgaagaaaaatcatcttcgatagctacttttcaagctaggatcactactatcagtctaagaactattgtcaagtcacacactgcacctctcctacttcatccacctcctaaaaagctaaggtactcattacctcctcctaaacggctaaggtactcatctcctcctcctaaacctcctgatttcatcaataaagaccttaaaatttccaaaaactgttttacggttaagcaagccacgagtttctcgtcgagcgcttgttctttcttctaatgcttttgcaggacaaaagagtattccacccatacatgagttccaccctactgatgctcctctcttcctagatagacctcatacactaattgcttatacaccagtatggatgatgagaggtctttctccgcaatatttactgccaccatctgatccacctgatccccaaattccatcaaagtcaagctattgactataaacaagcgcttagtggtaggcaacacactggtttgatttttcttttccctttctttcttttcttttatttttgatttatttttcccaccttcttcgtgtaacacccgtcccgccatatagaccaagacggcatgttttcatctgatcttgccaaaaacgttttctttgaacttcacacacgaacaaaatattgcacacaactcttcacgcttactaacctg

SEQ ID NO: 156889 - DNA, 802 bp, Arabidopsis thaliana landsberg
gtcagcattatcaaacccaatccccactgtatgtgtcttacatgtatcgtgctgatgattcaggtgactgtgccactcggaaatcatgagaagtgccctgtttcagtttctttcataggaagacacggtggtgaccgctttttactagatacggtgcagacaatgtatccatctttacaagagtactcgagtattattaccgatcccaaatcttctaaaaagactatcaccaaagaagagtcagccgagattgccaaagagaaggtcaattaatatccattgcatgtctcattttcttaatggcattatcatccataatctaatgtggtttttatatctttgtgtcccgtgattatgtaaaccagggtaaccaagcgttcaaagagaaactatggcagaaagctattggtctatactcagaagctataaagctaagtgacaacaatgctacctattacagtaacagagctgctgcatatcttgaacttaatgggtaaatgtttcgcagatccttaaaaatactttttagtgagcaaatctttctatgtggcattgccttgacaaatcatttacatacagctttcttcaagccgaagaagactgtaccaaagccatcaccctcgacaagaaggtaactttcattaaaacacagaaacaggtttctcttgaaaaaaaaccactctttactttgtaagaacactcaacacaaagatcgtttttgatttctttcagaaccctaaagcctatttacgaagaggaaccgcaaaaaaaataataggcgattgcaagggagccatagaag

SEQ ID NO: 156890 - DNA, 177 bp, Arabidopsis thaliana landsberg
aaacactcggcgcacatctcgtggaaggctcattctccgatctctcaaagccttgtctctgccgtaaagcaagtcgacgggggtgggtgcgccatgtccggtgtccacttacgcacccacaatatccccgttcagctcaagctcgacgcagccatcaaagaggccggtaacgtcaag

SEQ ID NO: 156891 - DNA, 1184 bp, Arabidopsis thaliana landsberg
atgtacggtggaggtaggttttgcgtcctctctaaaatctctctctgattgtacaaattcagcattacttctttagttcttttccttttcgcttgagctcgtctcgtaaaggtgtaaacttttccttggtggggttacttatatattgaacagaagaagtgtcagctatcgtagtagacttaggttctcacacttgcaaagctggttacgccggagaagatgcccctaaagctgttttcccttccgtaagtctcattctttacttcctctcttttcaattggttaaagttaggtccttttagtgtagagcaagcaattcgagaaatttaggttttttgttgttgctgttgttgatgtgttatataacttataaggtggttggagctatagatggaaatggaatggatattgatgatgctgcaaacaccacggaggatgcaaaggagtctgataaagaaaaaggcaaaaggaagctttacacaggatctcaagctttgaactttcgccgcgatcaaatggaggtcagttttctttgttaaacttcaaaatggttagggatgaagataaattttcaggtctctctattagttgacatttgtctgttccagatattgtcacctacaaaggatggcattgtaactgattgggatatggtggacaatgtatgggatcatgcttttaggtaatttgcagaatctgttagtttttgtctttaactgtttaatctttatcttttccatttatagttgattgatgatttcatctgtgtaaatgtttattattcaaggaattgtctaatgattgatcccacggagcacccaatgctacttgcagagcctcctctgaactcacagcagcagagagaaaattctggtttctctaccttttatcgatgctgagttcatcttggattaggaacagattattctggtggaacatcatcaatgcagtaattgaaagaacgcctcgagaaagacttggtagaagtaaggtagtatactggcatcgttaggctcattccagcaaatgtggttctccaagtctgagtaagtaacacattggattgctctctagatctcgactcacgtataaacagtgtcttctcatcgctagggtttgagtctttttgtgtacatgacaggtatgcagagcatggagcttcttacatccagaggaaatgccct

SEQ ID NO: 156892 - DNA, 1467 bp, Arabidopsis thaliana landsberg
caggtatactgtaggaaaaattacaccagtgccgaggcgagaagtgcgtgcttctgactttggtaagaacgctagaacaaagatgttcttccctagagacggctccaattttacccctccacacaaatctgtcgacttcgcctggaaagactattgtcctatggttttcaggtaaaccagctttcttctggctgattaccaaagaactttagaatcagagtagataatctttgaatgtgtatattagttcttggatactgttctcaagttagatgtattttgtaaaaattacgaactacttagctctgtgtgatccctcagttgttcctttggtcggatagaacacctttcttaaataaagtagtttaattaacgataaaccgtatagattgggtaacatagcaagtaagttttgtagagaggtgcatcttttttacgctttgagttccatgttatctgctttaggcagaaagttttaaccaaaaggattattttcttcatagacatgattcttagtgcatcctagaaaatcttactttttgagaaagccagaactttcgatttgggttgtttacctcccaaacgcaatgagtgcaatccattacttttttggattacgtagccgtgggacgaaaaaatatgaaacaagtgattatggaacctgttctttgaattgatagactgtgcgtgattttcaatggaatgtttcaggaatttaaggcagatgttcaagttagatgctgcagagtacatgatgtctatttgtggtgatgatggcctgacagaaatttcttcccccgggaaaagtggcagtatcttctacctttctcatgacgacagatttgtgatcaagactttaaaaaagtctgagttgcaggtttgaactaactgaacaaatctgtgatttgactttttctcgtctttaccgatagtattggtttagagtgatgttataagcccctcttgctatgtcgcataaacaatgtctatattgttgaactctttagtatttggtggtaacgttctaaatgtctatataacagatactaatgactaaaaccatccagatttttttgtttctaggttctactcagaatgttgcctaagtactatgaacatgtaggcgaccatgaaaacacacttataaccaaattttttggagttcacagaataaccctcaagtggggtaaaaaggtaagaacttctctcgtcccttttatagcttatattccattatgtttccaccttttttagcataagctttgtggtcttttgataggtacgctttgtagtcatggggaatatgttttgcacagaattgaagattcatcgtcgttatgatctaaagggttcaactcaagggagatttactgaaaagatcaaaatccaagagaagaccacattgaaagatcttgatctagcttatgaatttcatatggacaagctgttacgggaagcccttttcaa

SEQ ID NO: 156893 - DNA, 735 bp, Arabidopsis thaliana landsberg
tctctcttatcaggtgattacaagtacataaggtttgtttctctaagttttcttttcttttgaaccgcttgagtatagactagtaatgtcccttccaacattcttgatcacacttccaggaaacaaaagtgtttacttttctcatgaaactctctaagttccctgcttttaactttgttttatctaaactggatgaataaagaaacttggaagtgttttgtttgcgaatgccattaggtaaagcttgtgagaattccttgtcagatttgcttaccttaggattgctaggctctactaagtggaacttggtgtggatataaacataaaaactacttaactatgaatgctgaagattgctttccttccgctgatatgttgcttcatggcaaaaataattataaccggaattcagagacccttcggaagagaaacttgttgagaatttcctagatgatgagggtatagaagagaccaagaagacgaagatactaacgatcatcaatggaatgggtcagtttccagctcctactttttactcaacatatccaatcaactataatgtacatgatttatcacaacaattaagtcattctgttgtatataaatttgtgaacagaacaagtgtattctttccaggttttaaagacgaattagcaggagtagcactctgtgagtctcttccagaatttggggtagttcaagatgctgatcgccttgatgcaattggcgccatag

SEQ ID NO: 156894 - DNA, 431 bp, Arabidopsis thaliana landsberg
  unsure (1)..(431): unsure at all n locations
cactatctggacactttcgatttctgaagttgagagacgactnnnnnnnnnnnnnnnnnnnntgtcttgatgttggaggcgacgccggaggctgcgaggccctgggctagtgcggcgaatgcagaagttatcgatgcgcttccttatatagacgacgactatggcaatccattgattaagtcggaggtagaccgtttggtggaggaagagatgcgtcggagctctaagaagccagctgactttctaaaggacttgcctcctcttccgaagttcgattttaaggtgaatttcactgtgaatccttttatcgatttgtttgttcgtttctctagctagggtttggaaattttgttggattagggtttaaagggaatttggtgaattccaatcttttggtttctgggttttacttcatcttggactttatagga

SEQ ID NO: 156895 - DNA, 1965 bp, Arabidopsis thaliana landsberg
  unsure (1)..(1965): unsure at all n locations
aagcatctttcttgatagtactaagtatgttttgttcatcattttggtttggatttgacaggtctctattttagggttgtttttggttagaagttaaaaccaaaataaaatcttaacttttggaaatgggatctgttactgggttttactcaaatgaagtgtttgaattagatcctaaatgggttgttgatcctcaacatctctttgttggtcccaagattggtgaaggtgctcatgccaaaatctatgaaggaaagtaagtttatttctttatcagattaatttcatcaaaagttttactctgtatatggttctgaatccattattgtttccctttttctcggcgattgatctgtttggactggttctggtcttcttgagcttgtgtcttaatctttgcatatgtgaaaaattgaaacttttttgcttcaatatatctagtcatttgcatattcactatatcagtttcagtttaatggttgttgttcaatgagttcagaataaaaagaattactatggtttgtatcaaaaatttcagagaaatgttttctctagaaatttcagagcattagtgtgaatctgtggagcaaattcaatcataaagatagttttcatagatgttatagtttgatgaagattgaagagtattgagaatgatgtaaaatgtggtttcttgtttaggtataagaacaaaacagttgctattaagattgttaaaagaggagaatctcccgaagagattgcgaaaagagagagcagatttgcaagagaggtctctatgttgtctagagttcaacacaaaaatttggtcaaggttctgcttctttgcatttatctaatctccagtacatattgctacataatttggttagagacaaacaccaaaacgttttgatttggtatgttttgtagttcattggagcttgcaaagaaccaatcatggttatagtcaccgagcttttactcggtggtacattgcgtaaataccttgttagcttgcgtccagggagtttggacatacgtgtagctgttggatatgcccttgacattgctcgggcaatggaatgcttacactctcatggagtcatccatcgcgatctcaaaccaggtaattgtttacaataaatcacacttcaagacattatgagttaacaataatgttcttatatcttcttggattgcagagagcttgatcttaactgcggattacaagactgttaaactagcagattttggtttagctagagaagaatcattaaccgagatgatgaccgcagaaactggtacatatcgttggatggctcccgaggtacttaatggaatcttgcattttctgtgttctgcatttttcttttgcttctaagaacttgcttaatcacaaattacggttaaacagctttacagtacggtcacgttgaggcatggtgagaaaaaacactataannnnnnnnnnnnnnnnnnnnnnnnnnnnnttgtcttgtgggagcttatccacaacaaattaccttttgaaggcatgtcaaatctccaagccgcttacgctgctgcattcaaggtttcattcttgattttcaagtgtttcaaccatttggttctccaaccggacaatgtttttctgattgttgtctgctttataatatttcgggttagaacgtgaggccaagcgcagacgatttaccaaaggatttagcaatgattgtaacatcttgctggaaagaggatccaaacgatcgaccaaacttcacagagattattcaaatgcttctacgttgcctctccacaatctcatcaactgagcttgttcctccggccattaaacgtgttttctcgtcggaaaacacggtcttgccaccagaatcgccgggaacttgctcattgatgactgttagagacaaagatcagattcctaccgatgcaaactcggcgcagaatgaagttagaggaagcttcttcttcttctgctgc

SEQ ID NO: 156896 - DNA, 391 bp, Arabidopsis thaliana landsberg; identical to SEQ ID NO: 13438

SEQ ID NO: 156897 - DNA, 6807 bp, Arabidopsis thaliana landsberg
  unsure (1)..(6807): unsure at all n locations
atggatacacttcatgtacgaccccaagcgaaaggagtggatacaaggagtgagcttattaaattctatgaggaacactattctgccaacatcatgcatctggttgtatatgggaagggtatgttttggtgctaacacgaaactcaattgttttttttttaatggagataatgatgtttaaataggtaacatctttgctatttctctgcatgtcttcagaaagccttgataaaatccaagatcttgtggaaaggatgttccaggaaatccaaaacaccaacaaagttgtccctagatttcctggccaaccatgtactgctgaccatttgcaggtttttttctttccgcatatttagaatatttttacatgaagtgtatcatgctagaatgattatgatgtcgtatttttggtgatgttgtattactttggttttagattcttgtgaaggctattcctataaagcaaggacacaagctgggtgtttcatggcctgtaactcctagcattcatcattatgacgaagcaccaagccagtaccttggccatctaattggccatgagggcgaaggaagtttgtttcatgccttaaaaacgttgggtatgttttctatgggcacacaccaagttcgatcttcagtctccttctcttacactcttgaaatctgacaaaactcttttgaggttccctaaaatgatttatatattcttcagaaactacacctcttttttgtttcaggcgttggtggtatagataaaatattttggtatcttgacatggagtatagcctagggtgccctaaccaatttttaatagagtaggataggagaattttatagaatcattgtagaaagtgggcgtctttgtcttctagaggttccattctagtcatgtaaacaaacttattggatgggacaggttgctgatgtcattcatgtatgaaacatgctcgattacaacatttagtagtctggcttatttcttcttattacttgcaggttgggcaacgggactgtctgctggtgaaggagagtggactctagattattctttcttcaaggtttcgattgatcttaccgatgctggccatggtgggtttctctattatatttttattttcattctaagaagttcacaacagtctttcttgtgttgactagagagtatgggtgtgtttggtgttttgtaactattaaattcatgggttttctccttggtgggtttacagagcatatgcaagagattttggggttgctgttcaactacattcagctattacaacagactggtgtttgccagtggatttttgatgaggtatagatacattaacttgtacggctcattctaatgtatttccactgatatgctaagattgtagtttcccttttttcttcattttttgaccttgtgacttttatattgctaatacattgtttattgttattgaagctctcagctatttgtgagacgaaatttcattatcaagacaaaataccaccaatgtcctatatagtggatattgcatcaaacatgcaggtaataatttagctctttctctttttacctaagctttatttttttatacatgcttacatctgttaccatgtcatcaatcattccttcaataaatcttgcatataaagttatgcaatgtgattaaagttttgtaatttatatctttaaagcgcaaacctaagctcacggctaagaaataatagttcttttaatatcttctgtatactttgcaattactcttcagatatatccgaccaaggattggctggttggatcatcactacctactaaatttaatccagctattgtacaaaaggttgtagatgagctttctcctagtaattttcggtaagtcttgtggttttaagagttttactttgcatacataaaacttatgggtagctgcctattgtacactaaacttataatgaaatcattggttttcgcctaagctaattttactatntaagtttttttacatatactttctatttgggcaaatggctaattttacatctgttccatttattctgaaaataactgaggatcgcattagagtattttattgctattgatatatgatggctaatttatgtactattcccattagcttttctgcagtttactttcaccatttctggcatgttatcaaagtttacttgttaaagcactgatatttagacacagctcggacttgtttccaaagaatcttgataatgccattgcttttgtagaattttttgggaatcacagaaatttgaaggacaaactgacaaggctgagccatggtataacactgcctattctcttgagaagataaccagctccaccattcaggttcactttttgatatgttatattagctcgaaatgattcgtttattttctatgcgtctactacctccgcttcaattttgtttccttaatatctttttgtgtttatgtaaaataattacaggaatgggtgcagtccgcgcctgatgtacatctgcatttacctgcgcctaatgtctttattcctacggatttgtcattaaaggatgctgacgacaaggttcaatttcacggcataaattagaagattttttaaccttattaatgtatgaagcgggcatcttatatgatcaagtactggaacaggaaaccgttccagttttgttgagaaagacgcctttctcaagattgtggtacaagccagatacaatgttctctaaaccaaaggcatatgttaagatggatttcaactgcccacttgcagtcagctctcctgacgcggcagttcttactgatatttttacacgattgctgatggactatttgaatgaatacggtaagatttggtcgatacatctctcagtattttccatttaactaggtgttttatctaggctttagttcagagaactctgttctaattaagtggaaccgatcttctgaaattggtaaatttgtccagtaagcaccaaacttgtcttatgaatttttatttatttattacatgctgttgattgagcatttcttgtagcttttgacaacgtcttcactgctttctagttttcggctctgttttgcagcttcgttgtatgtctcgaagacaaatgaaaaatagtataaataagtaaaataaaatgtttgagtaaagacacaaatcttctattttgataaatctttcccatcactctttacttcttctatgctgtagcttattatgcacaagttgctggtctttactatggagtgagcctttcggacaatggtttcgaggtgagtttgacattgacctcatctccactacacacattttctcatcttttactgaatgctttttctcttattttttgtgactacctgtttttgttcctagttgacccttcttggttataatcacaaattgaggatcttgctggaaactgttgttggaaagatagcaaattttgaggttaaacctgacagatttgctgttatcaaggtaaccatgtcagacttcgtctctttttagaacttcacttaatggttgaacgacgtcctctgtaccagaataattgaatctgtgttattctgtttccgaatcttttacaaggaaactgtcacaaaggagtatcaaaattacaaatttcggcagccatatcaccaagcaatgtattactgctcactgatattacaagatcaaacctggccttggacggaggaactggatgtcctttctcatttggaagctgaagacgtagctaagtttgttccaatgttgttatcaaggacatttattgagtgttatatagcaggtatcaacattttgtgtttatttatttattttgcatgatcttttttggctgtgatgttttctgttcttttctatgtcttcttctttttccggaagctgaatacttacatatttcatatcaggtaatgtggagaataatgaagctgagtcaatggtcaaacatattgaagatgttctttttaacgatccaaaaccgatttgccgacctttgttcccgtcccagcacctcactaatagggttgtcaagctcggagaaggaatgaagtatttctaccaccaagatggctctaaccccagtgatgaaaattctgctctggtgcactatattcaggtaattccttattcgtaattccttattcagattaagaggtagctttgaaatttcttcttggcatctaccaatttttacttcttctttggagtttctttgtgtagatctcggtatcatcttagaacatatttccagagatcatattgttttgtctaactgtaactttggttgccacaaacaggttcatagagatgacttttccatgaatattaaacttcagctattcggtctcgttgcaaagcaagccacctttcaccaacttagaacagtcgagcaacttggttatattactgcacttgctcagaggtacattggaattttccttgtgtttcttaaatagtcccctgaattctgtttaactgcgcttttttgcaacttaggaacgattctggcatctatggtgtacagttcattatccagtcctcggttaaggtaccaaaccatccagccatctcagtcattttttctaattaaggctcatctccttaaattccttgaggtttaatctttaatagggtcctggacatattgattcgagggtggagtcattactgaagaactttgagagtaaactttacgagatgagtaatgaagatttcaaggtaagatggatcaaccaattaattatatatctcatttgatctagctatgcaatatggtcctcatccggagctatttaactgatatgagttactcttcctctagagcaatgtaacagctttaatagacatgaagcttgaaaaacacaagaacttaaaggaggaatcccggttttactggcgagagattcaaagtggaacactcaaattcaaccgtaaagaggcagaggtacatggaacagcttctttttccttctatattttctcataaactaagaaaaccgcctcccgaatgcatgacccatgcatatatacttcctcgaatagttgtatcacttgtacgattaaatacaagttggtatgatggtgttgaaagtgactgatcgatgagagaatggggttgcaggtttctgcgttgaagcagcttcaaaagcaagagttgatagatttcttcgacgaatacattaaggttggagcagcacggaagaaatcgctgagcataagagtatacgggagccagcatttgaaggagatggcaagcgacaaagacgaagtcccatcaccgtctgttgagatcgaagacattgttggtttcagaaagtcccaacctcttcatgggtcgttcaggggatgcggacaacccaaactgtgagggctgaatgaaactcacttctttattatacaaagacaaaattgtttttcgtttgtcctttttctggttgtaataacaatatttaggtgaaccttaaattgttagaaaacagtgtttgaatcatcaaagagaaaaacattgattactacgcatttcgctatatgaggctgtacctaagttaatcgctaagcaacccttgttcctcaattaataacataaatcacaaactctcaagcaccagctttgttttccatgcaatcgagttaaagcagagagaagcatagtaaaagataacaatccatttgatgaatagagttgtccagaaatgcttgtgtttgtggtttatattcagacatggtgcatatacaaaggcggtactgtcttccaccccctccagatacttgttgttgctgcatgtgatcagttaaacgagatcatcagtgttttgtttcattttggttgttcgatctgaattcaatctttgctttacaggattgttggtgtagtgttcataacgctggagctctacttagttcactaagaaaacttgaggaacactcaagacgataaaactgaatcaagccgaatcctttgatatggaaaaactcgagcaaccttgatgaattccgaatcaaagctatgaatactaagaagagaagagatattctcttttaatggtatttcttattattaaaatctataactcccacgaagataagaggaaacacaagtccttatttgaaagcaaaatgaaaaagaaagagggctttaattagacttgttgaaactttggatcaggactccgtttaagaatataagaatacactgactaaaacacttagtcgtgaatggaaacgtaagagaaaagtaatcttcaatgtcagatataggagtaggaccaaggcttagatactaagcggggtgatctctatcgcggatctccttgacaatcttagatatgatgttcttgatggcgagcttgtgatcctcgctaaaagaagttggctgtggaacattactcattattacactcgcctccgaacccatcccctccaggtcaaccatctcagatctgctggctttcttgacggcgagacggtgatcctcgttaaacataagctgctgatcatgattcatgattatcttaccgctggccttccggtcaaccatctcagatctggtggcttccttggcgagagcgagacggtgatcctcctgcttccgcctgttttccataaacaaaagcagttgctccttattcatgacaatcttaccacccgccgtcttgtcgtccatcgagatcggattcgggtttcaagtagaagggaatccctagggctgtttcggttccacacggactcaaccctaataataaagaatttagtatataccttttacgaatgggccccaaagaaaaacaaaacccactaa

SEQ ID NO: 156898 - DNA, 2388 bp, Arabidopsis thaliana landsberg
  unsure (1)..(2388): unsure at all n locations
atgcatggtgtaaagcagacggtcttgaattacctgaatcaacctatgcacatgtaagttcatctaatatccccaaaagaacccaattaactcgtcatatatttcattcatttcatacagctttgaatactaatgatcaaactgcagttcatgaaataagcaaatcaacctctaaagtctctatgagccaaccttgactaaattttatgtaaaaatcattcaactatatcagccttgtggccgatgtttgagattatgttattgcagcagattgatgttcttgtgtcagtgataagtgtattgccatatgaattcaacttctttcattggattctccttctctctcgctcatctaaaagcataacttgagtttgatatttggtgttgtatatgttggatctacatcagtgtatctgaagctggagttcactgtgatataattgcccgtgaactcaggattccgctgcttcaagtcaagtaaatctcctctcattcttactctctatctctatctccctcctatcactatttgataaagttacaatataaacaaagaaattttcttgacaagaacggctttgtctgtgtggcagggaagcgttagaacagctctcaaacgatggttgcatatactcgactttggacgagacatgcttcaaatcgactgctaacgcttgatgaaaattgatttatatgtcaacacatatcaatcctcctctcatgttcaaaagtcttttgtataggccctaaggtaggacaatatgtagttttaagactaaaaatctttcttatggcttttggatttttttttaaagggaactaaactcaaaagttcaaaatcattttcgtcacttgatttcctttgttatatggttttgagagaattttattctttttagagtgattatttttctaccgaagcgaaaacacaacatctatctaagaactgcaaacatgggttaattaataaaccatttatcaaaatcatttggcttttggatttaaactaaactcgaaagctttcctatggctttcggaattttaaaattcatttccgtcatttgatttcctttgttatatttgccaggttcgttctactggtaagtgtcaattagggtcggcccgaattntaagtcccggtccaatctgaatattgggctgtgccgttgaattttaccagagacattttattttatttttaatttggacgaatctaagtaccgtaaagttacaacatgaactttgcttactctgcttaaaattctttaatttttaagataaaaaattgtcaaacaaaaaggttttggttttccgtttctgcattagtgacattaccatggcaggttatttcttgtcgatgtgaaaatgaatatgtgatgtttttaatacatatgaatatgcaaattgtcgatttaaaaagtaaaaaataatgaaggcaaatagttgagatactaaaaataatatactagtagttacgagggtagttctgtagcgtcctgaatctccttgagacgttacacttacacctatgttttgttagaaagatactaatgttgtattttcagttttgtgatgtatttgtttagtgattgattagtttgactaccgatctttgatcatataagattgttgtcgatatttgttacttatatgatattgtaattttgttcagactaatttttgctagatacaaaggttaattagattctgtgatacgagatttaaaagcataattctcctgaatctaaagaccatggcctataaatcaactggaaaattaaccataaacttatttaagatgggaatcataagttttacacccaacaatctctctaatcaaatcgatacggagacgacggacggacggactggtgggacccttacaagttgtaaaactagtttgtgtttgtgtgttttgttgtttcttttgtcccgagaaaaaaacaaacaaacatagaaaagcgacgagagggagagagaccacgaaagaaataaaaatcaatcacatggagaagatacgaaaatacggatatgatccaagaagctaagatgctgaggcctatcattgcgtttcacatatccacgcgcttcgttttccgtgtacgcgccgaatgatcttcctctattcctcctccacagctcttcctcataactcttatgagcgtaatacgcctccaccacgcacgtcgacggcgcctctgtttccagatctccttcttcttcttcttcttcctccgccgccgcgagacgtatcggttgccggatgtaatgaccgcgactgattccttcgagctcgtcgagacgagagagaccgcgaggagaaaccgcgtaaagctcgccggtaacgtgatagcccgatccaggtttgttgaggaggaaagggactcg

SEQ ID NO: 156899 - DNA, 944 bp, Arabidopsis thaliana landsberg
catatctttcatcttctccaccagaatttgttttaggctctccttcttctgtttctttttctcccaaagagacaattagatatggagaaccttaccctagtttcttgctcagcttcttctccaaagctgttaattggatgcaatttcacttcctcgctgaaaaaccctactgggttttctcgtcggactcctaatattgtcctccggtgttccaaaatatctgcctctgctcaatctcaatctccctcttcgcgtccggagaacactggagaaatcggttagtttgcaaattccactcgacactctattatagcaaatgccaaaattttccggaaaaatttcccagtttattacttttatctatctaattgaaactcaaattgcgaacccatttcgactggtttaatatgagcttatgaattgctatatctctttaaaaaatccacactttgtgaatttgcaatttgaattcttgtagaaaccattcattgttagaattgtttactttaagtttatgttcgatttgcagtggttgtgaaacagagaagcaaagcttttgcaagtatattttcttcgagtcgggatcaacagacaacttctgttgcttcccctagtgtgcctgtgccaccaccatcttcatcaaccatgtaattttcctggttttggacaatgtgcttagtttgtatgtcgtttgattcttggttattaaattgtgttttttcttttttcttgtagaggatcaccacttttctggattggtgttggtgttggtctatcagctttgttctcatatgtgagtatcaagattccttcctaatttttttttcctctataaatattctttcttgcttcaatattgaataataaatgcttgaccttttttcttttctgatggcattgcaggtaacttcaaattaaaggtacagatcttggccctttgttta

SEQ ID NO: 156900 - DNA, 569 bp, Arabidopsis thaliana landsberg
ccttaatgttatgttataagcaactcggtgagtatgtactgtgtgcttttctacaagcagaattccaccgccacacttgtcaccatttgtggacaatgaagcagaaggatacgttcctgattatgccgaaaccatcaaaagactacaggcagcagcaagaaacgaagtgcttccattgccaggtgttgggaaagaggatcttgaagatcctcaaaatttattgtacgctggtgttatgagtcgtgcggaggaagccgaagctgcaaagaacaagaagaaggtttgactttgctgatatataagcaattcaagcctgtcaaacttttgtatgcgttgattaagttgttaactttgtgggttattttatgtagatggcggcgcaggagaagcaataccatgaggaactgaagatggaaataaatggaagtaaggatgttgtagcgcctgtggtggctgaaggtgagggtgaagaatcagttccggatgctatgcaaatagctcaagaggacgctgatatgcccaaagtgttgatgtcccgtaagaagaggaagctctacgatgccatgaag

SEQ ID NO: 156901 - DNA, 898 bp, Arabidopsis thaliana landsberg
  unsure (1)..(898): unsure at all n locations
tgtgtactaacgttgtaatttggattcaggaattcaccgagtattcgaatttcgagaaatgtttggagtacctgaaggatcgtatgatcaaggcttggtcctttcgatggtctcattgggttttcccaggtaagttttctacatttgaaattgcatcacaagagtctgatttgtgacctctctttgaaaaactctaaatttgattttgcagggtccaatttagtctgggggtttaccaggacagcaagctaaggtacgtcaatactaatgccactatagtattcatgatcagatttattaccaattcgggtttctgatttcattttcaactttgtgccagggaaggtgcatttcagagagtaccaaagattaagtttgttataatcattggagtagaaaagcccaaatccgccatattggccgacaatgcaaattcgtcttccttggaaactctagaacaactctttttaggtacattctgcaaaagctgatttgaaaattcttcaaaaccttgttcattgatgatcgagaatctgataaatggcttgtttgttgcaggagagactgattttctgaaaccttacggaactcagctgatagaatcgtacaagaatccggtggttgtccatcatcccaaaggccatactgtcccaaggcttgatgagaaaagcttggagannnnnnnnnnnnnnnnnnntaccttagagcatctggtgatggaggaagacaagaatggtgaagaaaatactagtaagccaacaaaatagataagcttaaaatgttatgtataacgaataattctttggataataatcgtgcaatgactgtaaataaatctggcaatgtttgcgaaaaaacaattattacaacacaaacaataatagacgattctttcgtt

SEQ ID NO: 156902 - DNA, 1030 bp, Arabidopsis thaliana landsberg
  unsure (1)..(1030): unsure at all n locations
atggttaccttccccaaaggtgatttcttgtcacgaatagaccctacggatttctttaaggtaaaaaagtttagcttatgttgctatgttgctttgttctagttacaaatgataatgaaaatgttagatgctctggtgagccaatttcagtatctctgatcttgttcagtgttgttttttttattcaggatcttgagaaatatgccggtcctagcgcagtccaggagtgggaaaagcttcttgtgggtgcctatgtgtgaatataaatgacatctactcgtgagatctcatctgctaataaccacatgactatgatgaacctgcagggagcaatactccctttgtcttctgctgctatggcgttaccaccattgtctattcgtggggatcttggtgttctctccacagctgctgctaggtatatatcagagtaccttgttctatgtgtatagtcagtcatcttttgctaggtgtttttttttttatcaatgacttctcttttttttcttgttagatatgctccttcgcttttaaaatcttttatcaaaatgggtcctaaaggagcgttgggagcgacanaacttctccgcccgttctcggagatcgttgattctttggagttaaaagacccgtttatacgaaactggattgatcttctcgcattcctgctcgcaggggtcaaatctnnnnnnnnnnnnnnnnnnnnnnnnnnnnnnnnntatgttaactgtatcctttattccacaacatgtctaacatggaaaaaagaaacaagattatcatacttttggtgcaaaagatcggttttaaatgaagtctttgtttcttatgtgtgcagatctacatgtttgcagaatggtacaagccaggctgcacattggagtaccctattgatggcaccggtgctgtggttgaagcgcttgtccgtggcttggagaagtttggtggacgtctatctcttaaaagtcatgtcgaaaacattgttatcgagaatggtaaagctgttggagtcaagctaaggaatggtcaa

SEQ ID NO: 156903 - DNA, 1435 bp, Arabidopsis thaliana landsberg
ccaccgacaccataatctgagtgcaagagtccatactctccatcagagagactcagatccaattctccttactggctgtaacagctcaaatttggaatcttttgtaaaaacccagatcagcggatctcgaatggcgaagcacacggcagcgttgaaggtgggactagctttgctggccctgagcatgattggctacatacttggtccaccgctctactggcacctcacggaagccttagccgtttcagccacttcttgctctgcttgcgtctgtgattgctcttcgttgcctcttctcaccatcccaactggtaatcactattgccctttattggatcttgcttgatcggctcctaagtttactcattttccctgagacaaatgagagcaagtttagtacctttttcatatttggtattgtttagtagtagttggtgattgagttgccagattgcatgctttagcttgattagggattttgagtttgaatctctatgcagatagatagacaagaattgtgtagatctacaagaattgttttgtttctctgattatttggtttgataagtatatctgaagctatagtttttggtcatggagatttgaagtttgcaggctgctgttcttgtttaaacaccaagtttgagtctttgagatctgacttgtgttgtgatttagcttctggtttacttgttctggtcattgtgatttctaatagcagtgtatgtggtttactcttaatgtgtctatctttatctttatccatgtatgtgattcactcttaatgaatttcatggaggttgatatggttgtccacaatgccttgtgatcattgcttctttactatctacaaacttctttatctactatatgtgtatttttcggatgataccgaaaataaaaagcctaactctttttacttgttttcatattgctgcaggactcagcaatggttcattcactggtgagtttctgtcaattggattcatcagttaaagagttccggtcatagagttcccggaagaaaactcttgactatgtttttagtaaatgagtcttttaagaacatcttgtcttttgatgcgcagattgtgcaaagcgtgatccagaggtgaacgaagacacagagaagaactacgctgaacttttaacagaggaactgaagcagcgtgaagcagcatcaatggagaaacacaaacgagtagacacgggtctgctagaggccaagaagataacatcatcttaccaaaaggaggcagataagtgtaactcgggtatggagacttgtgaagaagcaagagagaaggcggaaaaagcacttgtggagcagaagaagctgacttctatgtgggaacagagagctcgtcagaaaggatacaaagatggagccaccaagtcaactgttaaatccaaaagcggcactgaggttgcttaa

SEQ ID NO: 156904 - DNA, 2390 bp, Arabidopsis thaliana landsberg
tcttcttcttcgtcttcttctctgaatagtcacaatgcgagtcttcttcttccccaactcgtccatggcgattctctctgttttcctctccctccttctcctctctctccctcttccatcaactcaagatctcaacgccgacagaaccgctcttctctctctccgctccgccgtcggaggccgtacatttcgctggaacatcaaacaaacctcgccgtgtaactgggccggtgtcaaatgcgagagtaacagagtcaccgctctccgcttacccggcgttgctctctccggtcatataccggagggtatttttggtaatttaactcagctccggacgcttagtctccgtctcaatggtcttactggttctcttcctttggatctcggaagctgctccgatcttcggcgtttgtacctgcagggtaacagattctccggtgagattccggaggttttgtttagtcttagtaaccttgttaggttgaatctagctgagaatgaatttagtggagagatctcgtcagggtttaaaaaccttactaggcttaagactctgtacctggagaataacaagctctctggctctcttttagacttggatttgtctttggatcagttcaacgtttctaataacttgttgaacggatctatacctaagagtttgcagaagtttgattctgattcgtttgtgggaacttctctctgcggcaaaccgcttgttgtctgctctaatgagggaactgtgccaagccagccaatttctgttggcaatattcccggaactgttgaaggaagtgaggagaagaagaaaaggaagaagctttctggtggagctatagctggaatagtgattggatgtgtggttggtttgtccctgattgttatgattttgatggttctctttaggaaaaaggggaacgagagaacaagggccattgaccttgcaaccatcaagcaccatgaagttgaaattcctggcgagaaagcggccgtggaagcaccggagaataggagctatgtaaatgagtactctccgtctgcagtgaaagctgtggaagtgaacagttcagggatgaagaagttagtgttttttgggaatgcgacaaaggtcttcgatcttgaggatctgttgagagcttcagcggaggttctggggaaaggaacgttcgggacagcttataaagcggtgcttgacgcggtgacattggtggctgtgaagagactgaaggatgtaacgatggcggacagagagtttaaggagaagattgaggttgttggggcgatggatcatgagaacttggtgcccttgagagcgtactattacagtggagacgagaagctgcttgtctatgacttcatgcctatgggaagcttatcagctctcttacacggtgagaactacccctctctttctttctcagcgaaaaatttgatttttattgttaatagttctctgctgaatcttaagtttggcataattagtaatggattcgttaatatacattactgttaagaaagaaatgacaaagattctatcatgaaatgattagtttggtactgcatcacattgacaaggatcagtgaagagtttttatcattcacatggcttacacaggacgtctatgaattagtggggacagtagataaccttggattccttgactagctgtgataattgatcttttagaattgtattttgaacaaagaaaaatccagacctcctgtgttctactttcagacagtagttttttttgtgtcttgagcttaatgtcatgctatgttacaggaaacaaaggtgcaggccggcctccattgaactgggaagtcagatcaggcatcgcccttggagctgctcgtggcttagactatcttcactcacaagacccactgagctctcacggaaacgtcaagtcctccaatatcctcttaacaaactcccatgacgcacgagtgtctgatttcggcctggctcagcttgtaagcgcctcatccacaaccccaaaccgggccactgggtaccgtgcgccagaagtaactgacccgaggcgtgtctcacagaaagcggacgtgtacagctttggtgtggtgttgctagagttgctcaccggaaaagctccgtctaactcggtgatgaacgaggaaggaatggatttggcgaggtgggtgcattcagtggcgagagaggagtggaggaatgaggtttttgactcggagctgatgagtatcgagacagttgtctcggtggaagaagagatggcggaaatgctgcagctgggcattgactgtacagagcagcacccagacaagcggccagttatggtggaggtggtgagaaggatccaggagttgcgccaatcgggtgcagatcgggtggggtaagaccatcagat

SEQ ID NO: 156905 - DNA, 917 bp, Arabidopsis thaliana landsberg
gatgatggagaataagcgcaatgtctactcgcttgaagataacaaaattaaacgacacaagtcatctgatctctctttctcttccaaggtcttgtgatacatcaaaatcaaaattcattgtggctatgaagctaccggacattctgtaccagcatgctaatgatcttgaaactttgttgttctgtggtttaaacaggagaggaaagacatattagcagaacgtatttcagctcttcaacaactagtttccccttacggaaaggtactacttggtccgaaataatctttcttacacgctctttgtcttctctagccatgttcaagtctctatctatgcagaccgacactgcatcagttcttctagagggaatgcaatacattcagtttcttcaagaacaagtcaaggtctgctcaagttttctaatcaaatacttttcattcattcacctcctccaatccaatgatgattatgcttgattttctctgttcaggttctaagtgctccttatctgcaagcaaccccttctactacagaggtgagctgaatctatgatctggatctcgtttacttggatcacaatgcaagactgatattttccatctctgtaactaggaggaagtggaagagtacagcttaagaagtaaagggctatgtcttgttccattggagtatacatcagaagttgctcaaaccaatggtgctgatatttgggctcctgtgaagactccaacatcttctcatgcttttaatctctcgtcttctaattcgccctttcgatgatttgctgctaaattctctgtctcaagactaatgaaaattagccaaagctttggtctgatcatgtattgatggagagaccttgaagactttgaagtcggcgatggctgattctgttattttttactgattaatccca

SEQ ID NO: 156906 - DNA, 1382 bp, Arabidopsis thaliana landsberg
atgctaacaaggtcgatatcaccgttacctccagctaagagagaaagcatagcaacaggaattaggctaaccaggtcgatttcaccattacctttgtctaagagggaaaccagagttagtctagatacgcagaacaagtcggtttcacagacaagacgattatcagaaccaaaaatgggtaatactagtgcaccaagttcgtcagtgaggccacggcgcacaatagcatcaagaaaagcatctgacgctcctgagataaagaaactatctgccattgttaactatgatatagcaaaaattgcatctcttccggaactgaagataaaaccaaccaaaggtccttctaatgttatggtgaaaggggtcgagaaaactaaatcatcagcgtctgggattgaaccaagtggtaacaagaacaaatccttgtgccaaaatgatattgatgaaactccagtggttgagaagacagtagtgatggtgttgccaagttcagctcgaagtataagtagagatcaggtaaaacacgagaagtctgatgtagtctctgaaaactccaccattcgagaaggagttgataaggaaggcattgaaacaatgcaggagtgtggcaatgatctagtcttagtaagtactcttattctagctgagtcaattttaatttttgtttcaacggttttgatgaaaggaatggttattttgctttcaggttagattggagactctgagtgacttagtaacagaaacaccaaagtttctgacaagtcaaagtattgttgcgaaaccatatgaagctccatatgctcgggtttcttcgttagaagatccatgtacagtgtactcggactgttcccaagcacctccaccaagcttatattcaaatgagacagagcaagaaactgtcaaagtccttgtaccagagaagaagataagtgaggcctcggagaaatctcaaacgaaggagtcagcgtcaaaagggctcagaaaactgttgaaatttggaaagaagagtcagtcttcttctgtaagtgaacaccataccgagtctaataatgcatcttttaatagcaatgaggatcatgaaccagctgtaactgctgccacgacaagaaaaggtaaatccttgttacatccttttatcttttacagtagttgctcagaagaagcaaacgtctagtttgttggctttcttctgagggatgtttaggagtttgtccccctaaatagtttgctcgtggatttaacttacattatcccataacatcgagaaccgtctttttcacatcaatatggttctgttggtgtttgacattatgcagcttttacactgaagagtctcatatcgcaagacgaagcgcctacagcagcagttgcttcacagaaat

SEQ ID NO: 156907 - DNA, 377 bp, Arabidopsis thaliana landsberg
  unsure (1)..(377): unsure at all n locations
gaatctgcattaggtttaccgtgtggcgaagtccataagtcatcacgcgaggtttagatctatattggttagtggtggttctcggataagaccccaggaggattctttgaacaatgcaatagatatggttgttggaacccctggtaggattcttcagcatatcgaagaaggaaacatggtgtatggagatatcgcatatttggtacgcactactttgggatcttgactttatgttncctgattcttatggttttaggatcaacattaaattaagggcaatgcgaatctctttactcaggtattggatgaggcacacactatgtttgatcgtgggtttggtcccgaaattcgtaaattccttgccccactgaatcaac

SEQ ID NO: 156908 - DNA, 1563 bp, Arabidopsis thaliana landsberg
caatgagctctcgccaggtcgttgaacatggcctcggacaccttccctttacagaaaagcaagtggttactccaacaggtaagctaatgaaaaagattatatcttactacaatcttggagaagaactctccaatcatagtaatattataaactcatgttgagtttttggatttctgtaattgtaggatctgtgtattcgggtgtggacttctgtaagaaactgtgtggtgtctcagttatcagaaggtaaagaaatcagcttaaacactaatagttaacgtcaatactatataatgattttgtctctgaacacagcggtgagagtatggagaacgctcttagagcatgctgcaaaggcatcaaaattgggaagattctgattcatagagaaggcgataatggtcaacaggtttgtgttctttctctgctcatcaattctcctaactatttactaacaacaaatggcactcaccagcttatctacgagaagctaccctcagacatttcagaaaggcatgtgcttttactggatccaatcctcgggacaggtctgactcattgttttgtgaactctgtactatactggtagagtaaaagactatgtacatagaaacataacaaaagcatgttttgtatcgcaggaaactcggcggtgcaagcgataagactgctcataagtaaaggcgtgcctgaatccaacatcatatttctcaatttgatatctgtaagtttaacaaaccaaaacctttttgcaacttataagtttaacaaaccaaaacctttttgcaacttatctgcatagcctaaacagtcaaaatgaatgtatggttacgtatggtataggcacctcaaggagtaaatgtggtgtgcaaaaagttcccaaggataaagattgtgacttcagagatagaactcggtttaaacgacgagttccgagttgttcctggtatgggcgagtttggagaccgctattttggaaccgatgatgagtgagagagtgcgagcttgccttgcctccctcgaaaattttgatttcttttgtttcaactgttatacgtagtacttttatgatcggattcacacatatatgtatacggtaatatcaaaacaaaatgagtgtgaacgtattcacagtttttgggtcatcgtccacgtgtctctctataattgggtgactgttgaagtcatacaaaatgtaaaactttaaagagtcttttggtgtgcaatgaagtgacgtgagcgtataaaagttaccgacagtgaagcggtacattattattatcttggtaagtaaataaataaatacggagggactcgcgcttccaatttcaattgctctctcaatttctctctcctcccgcttctgcttctctcccttaacaagaaccatgagctcctccgatggcggctcctctagggtttcgattccttaccatctccgcaaaacccttcagaaaatcagagagtataccggaaagcagcactcggatgaggatatctttgccgtctataaggattccttcaatgatcctcatgagaccgctcagaagctcctcttcttag

SEQ ID NO: 156909 - DNA, 3144 bp, Arabidopsis thaliana landsberg
atggctagagtaaaagactcatctggagaatatgaatcaactagggttgaagcgaccggcgaaattcctccatcagtcgacgagaccgccgccgagattctccaaagagatgaagaaggcacagagcttcttacaacagaagaggaagccggagaaattcagcctacaaccggcgattgtgacgccgccgatttgggtaattcaaacgccgtcgcatgggaatcaattgacgatctttcagacccaaatgccgattcttgtgtagaagaagaagaggcaacgaatgcagttgttcaacatgatgatggagcaaataaggtatgatagaagaccgttatttttttgattaggctcgttttagaatattatgcattggtaaacgattggatttgtgaatggtgcttcagataaaacaagtagtacaactaggtcgtaaatttgtgaatggtcattcaggaacaagtagtacaactaggtagttaatgtgaaattgaaagtattttgaattgaatatgcaggatgatggtgatgatgataacctggcggagaatatgcaggatggtgatgatgatcttcagccgcaaaatatgcaggatgatgatgatgatgatgatgatgataatcaaccattgccgccagaagttatgtactttgatccaactacctacacgaaggtgtgtaagataggaacgaggtgtcagttggtacaaacagtggaatttatagagactttggatgcagaactgaagtggtttaggaatcatgaccaatttaagcatatattccacatgcctaaggagcccaatcacatgattcaaggcatgtggatgcttatggttcgcacggctaagacagaattggcgagagagtgttggtttgttgccaatggagtacctataaggtactcaattaaagagcatgcattgttgaccggtttgaactgccgtgagtacccaaaatactataagactttaggcagtttgaagtttgttgagaagttgtttaagaggactgaggacatcaagattaaagacgtggaagagaagctagaagagtttaagagtgagaagtctactgctaggttgaagttggcaattctgttattcttagctaaggttatgaaagctgattctaaaggggattcgaagatagaggagttgcttcttaggattgtggataatgtcagagcttgtgagacattcccgtggggacgtttttcctttgagaagtgtatggaaggggtgcggagagtaatgaagaacatgaaaggtgtggtgaaacccaaggcacagactgctttttatggatttattactccacttgaggtaagtagtcgagtaaattatatgagtggctagattttgttattgtgaactttcatttacttttatgtttttgtgtctagattctggcatttgagtgcattccgcagcttgggaagagatttagagaagctgtacgtgcagacaaggaatgtccaagaatgtgcaagcacaagttcagtgaaagttgcatgaagggatttactttggaagaaataaatgaagcacttggagatataacggttagctttgttctcttgaaatctatgtttataatctttgtggtgtttgaaatatatgtttacttgacaggatatttcaagcatcttggaacctgatatggatgagagaaaaatgttgtcacgcgttgtagagaagcatgttgatgatggtattggatatatcgatccaattgttgatagttggagagataggcttatcgtagagaaaaagaagattttctggcgtagtctctaccaagcagacattgatggtagacgtattgaaactgttgatgatgttccagctgtacctgaaatccctgggacatctattctctcgttccaggaagctatggagacaggatttgacaagctcacggacaagcttgctttgatggatagcgaaatcaagcggatttgtgtgagagtacaaggaatagaggaatatgtggcagatcagcttgagaaacaggcagaaaaagcctgataataggtttttagtcaattatcctaaagcaccaatcatgtcgttgtagtactgaaggttgtcaatccaaatgggtgtgatgctaacaatcaagatgtgatcagaagtcactaagtcaagccaagcaataacaagttttggtgtgttctagcagtcctaagtgaacatgcagaaaacggaaaatcaaacagaaacagtaaaacactcgaccaatacagctctttgcagagcactgggtgaggtcgagtgacaggtcgagtaacagacagaaagtataacacagatactcgactgcacagtttgttgccagacaactgggtggtcgagtatgaggtcgagtaacaagaaagaattgcagaaattaaacaacagatgacaagatgcaataaacaacagtagagtaaacaaagacttcaatcagataaagaattcgcgaggatggggtaattgagtagtttcgattcctcagtttacaggtgattgacatgctcaataaattatccctagagaacaagttcattaaccaaatctaagtgccactgcaacagagaccctcaagttaacctagtcccagactcaatcaccattgacgagagctaacctaacaggcattacgaatcaacaagttaaagccaaaacgctccatgcaaccaataccttggtacagggccacaaatctctggaattagtggttcagacatttcatcgaacaccttttgggcgcggaaatgtctgggctcaaattccagttgatcagaaagcaataggcattaagaacaactaatccagaagggatctatcaatcgaactaaaccacctagcatactcagaattctaaactactctaacccatcctcagaaacctattcactacttagacatcattgcagagaacataaatgttgaatggaatgaaaacatgatgacaacagagtaatagcaagatgataacaggatgaacaacagtaaacgaaatcaaaagcaaatactgaatactgaatagataaagagaaatccggattacaaaaggtcaagaacacgatgtctgcggaataaaacttagataaaaacttatcctcgaaaatgtaaagtacatgctacttatagcaaaata

SEQ ID NO: 156910 - DNA, 393 bp, Arabidopsis thaliana landsberg
tatagaaaggatattcgtcatcgcccatcaaagtgcttccagttccgaaaagacttgttttcttacaactaacatcatctttttgttaagttgtaggtcaatccaacctgaattactctatcgttcggcaactttcatgaccgttctcctagaaggctagatagttttgtacgtctcattgtctattctaaatcgattctctaattttcttgttccttttcattctttcctcttatttttttccgtaaatcattctaaattatggctccgtacacaaaaaagcacaagaagagaaagtggaatatataccacatttaataaaagaaaaagttcacattttgagttgttgttaccttataaattaataatgttagaccttgagatttattgatt

SEQ ID NO: 156911 - DNA, 220 bp, Arabidopsis thaliana landsberg
cattccacaaaaggtatatccttcgcttggtccacgaatggattccaaggcggtctcaagtcattagaagaccacaaaatctacatgtcagaactcaagcgatgtggttctaacgccctgagagacatcatcaaagccaatctggacgccaccaccgaaacagagcctatcaccggggtaatctactctgttctcgtcccgtgggtgtctacggtagcgc

SEQ ID NO: 156912 - DNA, 362 bp, Arabidopsis thaliana landsberg
gtgttgatcattgtattttgatactgcaggcaacagctatctgaatatattgcattctaacagaaacccttttaccattgtggctctgacgaagactcaagtgccatggatgcgtaccttatgcattctgtgtgtacacacttgtattcctttttctaagacaatttatgagtttttcattagactccgcatatcttcaggatttattgaagtccgtttgtcttatgcagttgaatcacatctttaaaactagagatctagtgaagaagaatgaaagtaaaatcgccaagcatcgagagacctccgaagaagaaattctttctgatgatggatttctggaccaaggatttactcgtccaaag

SEQ ID NO: 156913 - DNA, 488 bp, Arabidopsis thaliana landsberg
  unsure (1)..(488): unsure at all n locations
aaaaaaaaacacaaaagcggcgttgatttttttagattttcnnnnnnnnnnnnnnnnnnnaagatttgtctgaatctttcattcgaagaggttttgagttaatttcaaaatggttttggagaaaaaatctgcattgttggaagatttgataaagaaatgcggcggttgtgcggtggtcgacggtggtttcgctacccagcttgagattcacggcgccgccattaacgaccctttgtggagtgctgtttctctcatcaaaaatcctgagctcatcaaaagggtttgtgaaaatttgtgtttcttttccttatttctgattttgattttatccctaattttgaaaatttccatgataccatctttaggatttgctatgaacatcataagttattaagcataaaaatttgttttttcttatattntgatcgatattttgggaatacacacatctttaagggttttattgtaaatggaaaattttaatttct

SEQ ID NO: 156914 - DNA, 466 bp, Arabidopsis thaliana landsberg
cttaagggaaggtttcccttaaaaaaattttaaaaattcctccgggcaggttaggacccttaagtaagaggtaaagattctggaaagctttactgaataccatccaatcaaagatcattgcttggacaaaggccagtgaagtacttgagtctgaagacaacatttggatctgtgaaagctgtccaagtgtctactgtcccaactgcagaaacatcaggtacacttatctctatatgttttcttaacttgaatatgctcatttttaccgattttactatcgatatgttttgcacatcgagtgtgttcacatgtgggctgatgtgttcctagaaagtctcttttagttttcctttaatgctttctgatttattcttgttatcaacagctactatagaagtaaaagattctaaagagatcaagtcatctcgattaaacgctcagcttgttcccaagccttctgaggtgg

SEQ ID NO: 156915 - DNA, 631 bp, Arabidopsis thaliana landsberg
tcttcacaaaagcatccattgttcttgaagctttgtagtgcccgtattgtcagatggctctctcagcaacctgcatgccatgaaatcatccaagtgcttgtgttgtttaaggaaccagacggcttacgtctcaatgttaagacttgttttgcccacgatccacgcaacattagagaaggtaaatttcttaacctttctgcaaggattgctcttttcctatcctcactcactgttcctcattcagacttaactccctccgcaacagcgtctgatctgatagctggccatcacattattggtgactctatgaagtctcgggataaaatgttttagttattgtcctgattttgaaccacgaagttaactgctcagaggatagataatttgcactggagaaagcacttttcaggcatggctcaccggcattccatctcgatcttgagacacgcatcaaatgtacatttgtaggtattgcgacaagtacagatttattaaatgtagaataactacttcataactgaggaaacaaggagagaaataggagacttgtgacttgttgggtaaaggtttggtattcggtagtggtagctgcagttttggttggtgtgttgtaatattcagactactaata

SEQ ID NO: 156916 - DNA, 708 bp, Arabidopsis thaliana landsberg
tgtgatgctaacaatcaagatgtgatcaaaagtcactaagtcaagccaagcaataacaggttgtgatgtgttctagcagttctaagtgaacatgcaaaaaaccgaaaatcaaacagaaacagcaaaacactcgaccaacacagctctttgtagagcattgggtgaggtcgagtgacaggtcgagtaacagacagaaaataaaacagggatactcgactgcacagtctgttgccagacaaatgggtggtcgagtatcaggtcgtgtaacagtaaagaaatgcagaaattaaacaacagatgacaagatgcagtaaacaacagtagagtaaacaaagaattcaatcagataaagaattcccaaggatggggtaatcgagtagcttcgttttctaagtttacaggtgattgacatgctcaataaattaaccctagacaacaagttcattaaccaaatctaagtgccaccgcaacagagaccctcaagttaacctagtcccagactcaatcaccattgacgagagctacctaacaggcattacgaattaacaagttaaagtcaaaacgctccatgcaaccaataccttggtacagggtcacgaatctctggaattagtggttcagacatttcatcgaacaccttttggacgcggaaatgtcttggctcaaattccagttgatcagaaagcaataggcattaagaacaactaa

SEQ ID NO: 156917 - DNA, 1357 bp, Arabidopsis thaliana landsberg
cccccgatgtgacggttgtgctatacaatcctggcgggtctcctatataccaagtaagtagaaggcgtgtgttcgctgctgtcttgttggttctaaattcaggaaagtttttcaatatttctttgtttcagtttgaaatattatggttcatgcatgttttgcccgatctttaattagcatcattaaggcgtagcaagaatatttactaatcaacctcaactctgactttaattcttctttttttttttgcagtgcggcttagattcatttcaggccactgcaaataatatgtcaaataggggtacagttgtacagatggagctaaatgaactgactttatgcatggtagatgaacataagggatgtttgaaagaaagcctttttggtttagagtcagatccaggttcattaatcaatataagaaaggtcagatcggaatggggcaagaaagaagtgttacctgagggcgatggttctaagggtaaacaaactctggtggttgacgtatcagaaataggtcttttattttctttcaggagtgttgaagcgcttacagtaaatgcaatatcaagtcaggcttatattaaaagtttaactggttctagtagtaagaacaaacaggaaaaaggggcacatagatcgaagccgccatcgggcagagggactcaactgttgaaactgaatgttgaacgtttctctcttaatttcgctggagattcaagcctggaaaatacagtcattgatgatcctaaacgtgtcaattatggatcacaggggggaagaattataattagtgtctcagctgacggctcacctcgaactgccagcgttttctctactttgtccgaagaacatgagaagttgaagtacataatttcgtttgaaatactcaaattcggatttactctaaccaaggagattcagtctacacaggtagaacttgaaccagcaaaggcgatctaccaggaattttggaggaacctcaccaagttccagagtgacactttgtgacatccaaaacgctaagtttgtacgtcgaataggcggtggtaaggaagtttcaatctgttcgctcttcagtgcctctaatattgccgtcagatgggagcctgatgtgcacatatcaatggtcgagcttggtctgcgtttgaagtccctagtcttaactcagaaacttaagcaacatggtaacagaaaccctgaagaggcttccactgtaaccggtgataaccagaaggaagaaccaactactaccccgaattcacttgataagaaaaagaagaaggaatctatatccgctgttcacgtagagatgttaagcataactgcaaaggctgaagaatggggtggaggctga

SEQ ID NO: 156918 - DNA, 4880 bp, Arabidopsis thaliana landsberg
atggtggagaagactttagactttgttgaagatcctgtcaatattcctgaggataaacccgagaatgactgtggagttcggttatttaagcggtgtgctactggcattgtatttgatcatgtaggttagtcatcaccgagaatccagctctgaatctgtgaactgtattattattatgaatccgtcgagaaacttgttttcgtgtttttcttgtcaaccagatgagattagaggacctaaaaagaagcctaatttacgccctgacaaaggagttgaaggaagctctaaagaggttgttatcaaacattgttctgttttgcgcgggattatgaaactatcaaagctaatttctttctgttttttgtgggtactgcagtttaagaaacgagtaaaatcaattgctgttgatggttcggatattttaactgctgctatggaagcggcgaagaaagcctcggctagattagatgcgaaagaagtggcagcgaaagataaagctaagaaagaggaagagagaatcgcagagttgaagaaagtaagaggagaaaaatggttaccttctattgaaagggcaatgaaaaaggaaatgaaggtacgttatacatatggtttctcatatttgtgtttcattcttgtgttagtagtagtaacatatcaacttaacaaatctcgctatgtatttgcagcgtatcaaacataccgcatggaagtctgcaatgtcgtgagctttcttcttttgaacttattatcaattttggagtctcattaattgaagaagaaacacagaatcattcactcttggctacaaaacttttactgaaagaagattatgaaattattatgtagagtagagagagattatttgttcttaatgtagtgagagtgaagttcttcagagatgttgtcatcattgtcgtctttgatccagacgaagtcttctaatccatcataaatctcctctactgcatatgcatttttcttgggtacttgtttggatgatgtagagaaagcattctttattcccataatcagtctttttccgatacttttctgcggttgtgcttgtggtggagatgctcttcttcgccggtaagttgtgctcaggtttgaaacagaacctctatcgcctctctgcgtcttgtttacgttactcggttggtgaacgcaatggaaactcgcggatcgagcagaatccatcacgcttcttgacctcgactccacgatattccggtccgatttctgcttctctgattctttcgataggaatctcttcattgtgtcgagctctttctctaggctttcaatcctcgagcttgtggaattcatcgcagctcttagccgacagttttgcctcgccgccgtatctcgctggaggagcgatccaagcgtcacggaggagtctctcgcctctgtggcaatctctctgtgtcgaacaccagtaggagccgcgcaggacgcagcaacagcagctaccatgatcgagtggcgagtgttgagctgctcttgtagcatcgcccgaactataaacctcaggggcattttcgggttttgaacagcgtgaagtagtaaaggcggcgagagtttgtcacagtctatcgaattacatatctgaaccttctcttcctccgtcatctctccgtcatgttcctgaagaaaaattcaaaagttttatccaatcataagataacacgtaacataatcggttaagacacgtttgagttgacgaaagtaccctttttaccttcacataagcatcaacgattctataaagcaaatcgtgacgcgggaaccgctgctgcacggcgtcagcgacgacgttaaaatcgccggcgggaagtttaacagcttcttctagaaactcgttaacgccatcaccgtctccgatttccatcaaagcttctacacaacgtccgatcagaaacgcggtcgtttcagactccggaagaagaagaaggcacgaacggagaacgatctgaatgtaatcaacgtttacgaagacgactcgtcggagataagactccgtcaagttcctcaagctctctctatctcttcctccgtcgtcagcttccgtaatcagaagaacctccacggcgattctcaacgaaacgacattggacggcgttaactcaatgtgagcgccgtaacagaaaccggcaactaacgaaaacgtttcagccgttatgtttaacggcggtgagagagttaattcgttaacgcccgttaggtggcgttttaaatagccactctttgacagaggatcctatgggattataattaaaacatcacataatgacataaaacataacctcccaataaaaatcaaacctttttgcttattttgcaataaatgtgtaattttttaaatttataacaaatatacaattaaaaatcaaataaaaatatcatagtttttgttaaaaaaaatttgattttttttatgaaaattgacaaataaaagcttgaaaatatgtaaccttgtgaagatggaaccttgtgcctcccacatttacgaatacatcaggtttagagttattagccaacgacctgaataaaaatatagaaaaaacacccaaaaaaaagagaaattataatttggtaaagattttctaccaaaaaaaaaatgtggtaaagatttggtaaattttctaagagaaacattaccatttatggactcgagattcaagctccattgaaggagaagaagagagattgataggttgtttaggagaaagagacaaagatgaagaagaagaagataaagaagaagagtgatgatctacgtagtcttcgtcttcataaatcgtatcaacaaaccctaagtttgtccatcgcttcatgtctttttttccgagagagaagagatcaaagaatgagaataatttgtgtgagttttgagaagattcgaattcgccggttaggtttttagtatcaagaagagaaggaaattttggacagtgaatgggcaataaatgtgagtaatatgggaaataaatgaatttaagaggatttgttgtgatcgttattatatgcgtgaaagtctttaaatgcgtttttcctttttcttcaccatataaccttctaattcatgtagagggaccacgtcccacatgttctccaaaatgtacattcgttctaacattcaaatttcacgagatttcaattaggtttaaattgagcttaaattgttgtgtatatatagtactagtgcaagtttgattggttatttttctttacttattgacatacttgtcgttgtcgtaaaaaaaacatggattgtttatttgtttatatcaatttgtttgcaccaactaccacaagaaaattagtttgatcggccagtttaatacaaagtccacttcatatgatactcatttctttcataatttgttaccgcctctaattattattatgtacaacatcattattttgcttgaaaatatatatatccaagagtcttggaagtccttgttcaaacattggcaatgggttcgaagatgtatgagtttcggcctgaaattttctaccggatgtatatcaaattgtggttatggatgtctaatatctcgtttaaaaacattttgatataattttttttaattactttattcattttcctcatgcctcaaacacaaggtactatttgaaaaatacaattttgacctgcaaaatcaaaaaactcaaagaaatcatgaaacaagacaagaaacctgtaacgcccgcgatcctcaataggatcgttggctaggacttggtccgagagaggaaggtggagtctcggacaagtgagaaggagctggccataagctcggacaaaggggaaatcatgcaggctaagctaggatcgtaaagaaatcacttgggtcagctcgcccaaagctcaagctcagctggaaggagtgacggttactcaggtcgagtgacagtccagctcgggcagctggacgagtgacggacgagctcgaggcagctggacgagtgacggttgaactcgaggtagctggacgagtgacggacgagctcgaggtagatgggcgagtgacggacgaactgggcggttatgggcgaagagatacaactcttcggaaaggtgcaactcttcggaagggcgcaactcttcggaaaggtgcaactcttcggaaaggtgcaaggaacggatgtgttgattcgggaagcatccattcgccccctatataaggaagggcgcccaggaccattccactcaccacaacacaccgaaaacacaagaaaactcaccattaaaactctctccctcttgggagaataaatagtcttaggattcggtagccgggctgtggccggcaataaagaaggaaggtcggatcgacctaacctcgagaaggaaggtaagggatcctagactttgagtctaagggttctaggatgtgaattagtagtcggatccttgaaaggaccgactagagggctgagtagtatccgggtcatgtgcatcctacacaagactcggtccgggtagggatcggctgaggcggggacgcggctcggcggaggaccggcgggtcttaactgacctgccgagaatcggccggactgatgcgcgatcttcccctctctgaattctctccacggatcggagtagtgtatggcatatagagcattgcatggacttgcatacatatgattaagtaaataagattacttatggctctatgactttcaggaacgaatggtgatcgtgggaaggacttggcttaggcgcgagagactcaaggccgggatgatgggtggtgatagttcagatagtctagggatcgattatatgacttgtaatagcttatatgcaaactcataggttgtatcgaatcctttgcttaattaataaagtgtccgattgtttgttt

SEQ ID NO: 156919 - DNA, 1300 bp, Arabidopsis thaliana landsberg
aagcttaaacctagaaatcgtagaaaggtgaaaaaaaggcggaacgtttactagcttaacaatggctgaagaacaagagatcgtcgattccctgtcagcggaagtgaacccagaccagaaagtggacatggaagtcgaaaccgcgaccccgaaagccgagaccggcgatgagaaacgtgagagagaggagacagaggaagaagagaacggaggtgaatcgaagaagcagaaggttggagaggaagagaagtcaggtccggttaaacttggtcccaaggagtttgttacctctgtggcgatgttcgattactttgtcaagtttttacacttttggccaactgatctcgatgttaataaggtaatacatatttgggtttactcttcgtctttgtcttttggctttgtttattgtaaagtttcaaattttttggaaatattcattcctttgctcgagacttatataggttaatctaagagctctgattgtgattattaagttctgtgatgtgtttaggaagatgttttattaatgaatccgatgatgatcgtgctttgtatttaaactaaagaaattgagaattgggttcgcctttgtattggtcatatgatttgattttggattcagtgtttggtgttagaattttgtttttgtctcaaattagtggttgtttacaatgattgtggatattgtattatgtttagggagaggattagtgaagtggagatagcttgtaaattggactcctttgcagcttttttactagttgaaaagttcaaatgtatcgtgttcttactgattatatgattgtggattgtgtgtgaattagaaagtttttttgggtcttgatgtcatataatggttagaagaatgaagttaatgtcaaattttgagggcacaaataaaagataaaacattgcatagtcatgtcatatattacagttgttgcattttcttttgagcttccaactaactaactcgttgtactgaactttgttctggattgtacatttcagtatgagcacatggtgctgctaaatctgattaaaaagggccattctgagcctgaaaagaagatcggaggaggaatcaaaaccttccaagtaagaacccacccaatgtggaaaagcagatgcttctttctggttagggaagacgatactgtagacgattttagcttcaggaagtgtgttgatcaaatcctcccattgcctgaaaacatgaacactcctggcgctaacggcattggacatggtggaggtcgcggtggcggtggtggaagaagaggcggtcgttgtggtg

SEQ ID NO: 156920 - DNA, 828 bp, Arabidopsis thaliana landsberg
ctaatggattgtctacaacaacaaaactcagttctatttgtaaaacttctgatttgactattcacaagaaatcaaaccggactcgcaagttttctgtttctgcagggtatcggtatgtatgtatgcatttcgttcgctatagcgttctctcttctattgaattgacttaaaattgttgaaacttaattcagagatggaagtagaagcggaagcagtggtgatttcattgctggttttcttctaggaggtgctgtctttggcgctgttgcttatatctttgctccacaggtaatgatgatgtttactctttagaaacctaaatgggaattagacattatctcatgttttcaatggttttggtttatgttactgactgttttgatctagtcttttgaaatgatgagtagactgtgcttttgttccctacttatgcacattccactgcctaaaacagacagtatctttgttgttctcattactgcttcgttggttctattttgattggttcttggagctttggatgatataactgtttatctttctcatgcaatctaaaaagctgatggttatgattattcttgtgttgtggtgatttagatccgaagatcggttctaaatgaagaagacgagtacggttttgagaagccgaaacagccaacgtactacgatgaaggtttagagaaaacaagagagacactgaatgagaaaataggacaacttaattcagcgatagacaatgtctcttcgcgtttacgaggtcgagaaaagaacacttcttccctaaatgtaccggtcgaaactgacccagaggttgaagctacgacttga

SEQ ID NO: 156921 - DNA, 660 bp, Arabidopsis thaliana landsberg
atggacaaattcttaacatgcaatcgttggaatatgattcgacagttatatctcatgaagaaaatggagaagctagagaagaccctctctgatttctttagggcttccattttgacacacatccttgccgatcttcatcttctccgggccaattctgatgaacgttcccatgaggtctatctatctttgttttcttctctctcccttgtgatttcttgttcaccaagtttgaaggccatctctataatactcgtttcttttgcagcacgtcacatcaaccaaagggtgtgactacgacggacttggctcaattcagtaccagcacatccagcctaacctagacatggatatgcgggtcaccattttggaggctgaattccgcaccttctccaacaacgtcatcaacaacatgcttgcgatgaagcgagcgcaagatgtcttactacgagccaacggctttgaccccgagaccctcctaccgatgatgtctcctcctgcagcctccatgaatcctcctgcttgaccacatacgacttaggatacttgcaagccactcaaccttgcggactacgatctttaaaacacaaattgctttcgatttatgtttttcaattgttaaattatgtttcagtcacaattttaaatataatttatcgtcca

SEQ ID NO: 156922 - DNA, 467 bp, Arabidopsis thaliana landsberg
atggtcgaaagtgactggaaccggtaagagtggatattcctttgtcttgcacgactcctttattattaatgtcttgaaaagagacgttagtccttagtacacagatacgaatgttgatccttttaagaaattaacgtgtcgtcttcataaatacattttcattatttacaaaacgttccgtgttaagacttatgaggttagctagtgttcatatgttgcagttttgtgttgagttattagatatgacttttactttcttgtttagtttacaactgctagctcagttcttgatcttattcgaacatgaaggtttcatacataatgattcacaaataaacatgaacctttccttcttatctcatttgaagcatcagcagctccggtttctcgacatactcttttccactggcagcaaaaacgagctaccgtttggccatttagaactctatgatccggaagaatgttaa

SEQ ID NO: 156923 - DNA, 461 bp, Arabidopsis thaliana landsberg
atggattcagcgttgaaagtgtttgaagggatgattgagaaagatgtgatatcttggacagctcttgtgacaggaaatacacataacggatcttatgatgaagcactgaagttgttctgtaacatgagagttggaggcattactcctgataagattgttacagcgagtgtattaagcgcctcggcggagttaactcttttggagtttgggcaacaggtacatgggaattatattaaatctggttttccttcatctttgtcagtaaacaattctcttgtgacaatgtacacaaagtgtggaagcttagaagacgcgaatgttatattcaactctatggaaatcagggatttaataacatggacttgtcttattgtgggttacgcaaaaaacggtagagccaaggactcactacagtcatacgatttgatgataggcagtggcataacaccagattgcattcc

SEQ ID NO: 156924 - DNA, 254 bp, Arabidopsis thaliana landsberg
cagaccaagagacattgaatctcttcacaccccatcccttcactcgatctccacgaaaccccatcttcaccttacccactcgacttcttctctcttgccaccgagttcaatatctccgagacttgtttctcactccgatcatcggagacttgcctcgcttccgtctccgttggttcctccagtcgctgaggtttcgtgtttcttttggttttggaatcggaattgtcggttgacttgttacattgacttgatag

SEQ ID NO: 156925 - DNA, 1697 bp, Arabidopsis thaliana landsberg
aagtgttgtactttggtaaagctctctgctctaaaacccaaactgaaacataaagccaaaagatctcaaaacagttccaacgagaaaaataaggtttgtagttatcttccaattttcataatgtttttttatattcctttgtgcaatcgctaagtcaaaccaaccctaatattatttcgccgtaatttttaatttccaaagataatcataaaagaaaaggaacaaaaaccctaaggttcttgcatcgccgtcgtattattccgtcaacactataaaacccacattttcctatctctctcaatctaaagtctttgttagggttctttatttttaaaacaaacagtaaccagaaaaaataatcaaatcatcgaatgggtttgagtatcgcttaataaagttttgatctttgggtttagttctaaaaacagagaatttcggggattgtatatatttgaggtataaagttttgatctttatattttttttcgtaatggtgtgagtataaactattgaattgattttgggttttttgttgtttaggtgacaatgataccggaactagggagaagaccgatgcatagaggtaacgaagattcatcttttggggatgattatgagaaagagattggagtattgcttggtgagcagcagagaaggcaagtagaagctgatgagcttgagagagagcttaacttgtttagaagtggctctgctccaccgactgttgatggttctgttagtgctgccggagggctttttagcggcggaggtgcggctccttttttggagtttggtggtgttaataagggtaatgggtttggtggtgatgatgaggagtttagaaaagatccggcttacttgtcttattactatgctaatatgaagttgaatccgagttgccaccacctttgatgtctagggaggatttgagggttgctcagaggcttaaagggagtaataatgtgttaggtggtgttggggataggagaaaagttaatgataatcgatctttgttctctatgccaccgggttttgaaggtgagaaaactggtgcttctgcttctgaatgggatgctaatggattgattggtttaccgggtttgggacttggaggcaagcagaagagttttgctgatatctttcaggttggtgatacctcttcttatttacttcttttggttgtctatagttgattatgctttgatgctttgctaatgttttctctgtgtgtgtgttgtgtatatttctccttgatattcttccttatgtaaacttggtgtattgcttttgtgcaggctgatatggggcatggacatcctgtcgcacaacagccctcacgtcctgcaagtcgtaatacctttgatgaaaatgttgactctaataataatctgtctccgtctgcatcacaaggcattggtgcaccatctccatacagctatgcagctgttctaggctcttctttgtctagaaatggaactccagatccacaggccattgctagggtgcctagtccctgtcttactcccattgggagtggaagagtgagttcaaatgataagaggagcacaagtaatcatagcccgttcaacggtgggctcaacgagtcttctgatcttgtcaatgctttatctggcatgaacctgtctggcagtggcgggttagatgaacgtggtcaggctgagcaagatgtggaaaag

SEQ ID NO: 156926 - DNA, 626 bp, Arabidopsis thaliana landsberg
tatacatcaaccaactttttttttttttttttttttttttgtaattgttgttgtttagcttaccttttgttcttctccgtataagttcaatatctgcgaatccacaaatctggattcacacctgagaagtttgttaatcggtacatctctagatttttgcaatcggagatggagatcgaatccgtcgcagctggttcttgttccaaggagaatcaaatgatctacaaggaatggttcgaattctccgattcaggtctcgtttcatgttcattttgttgtcttgtgttcttcagtcttcgattctcgtcttcactatatgcgctaaaagcttattctctgtttggtgtaaatgagcagacggcgatggccgtattactggtaacgatgcgatcaagttcttcactatgtcgaatttgcctcgtccggaattgaagcaggtaaggattttgtgttgaaatttattacgttgcttacttgtggaacctttattaatggccattataatgattgaccaagttcatttggggatggagttgtattaatgagttaagagaaaacacataggtgaatgcttgaatggttttgagttctaggtttaatggagttacaaataacaagcccttgcg

SEQ ID NO: 156927 - DNA, 276 bp, Arabidopsis thaliana landsberg
aaaagattttctcaagaagcagagaaagcctattgtattaattgggttttgagaaaaggagaaaactttcgacgatcggaagatttttcagatacgaaaaatggcggtacagtggcttttggtgtgtcacgggatgatgacgttgacggtggtcatctccttcctctgtggtcaatggccaatcttcaaaggcacaccttttcaatggattcactacttcctcactttcggcgcctacgattacttcctgtactacttcttctcatctgattgatt

SEQ ID NO: 156928 - DNA, 299 bp, Arabidopsis thaliana landsberg
ggttgactttcttgctctctcgatgggaaagcttcaacatggatctcatgaatgcgagttgacctcgcggggaatcgtcgcaaatgggatctgcaacatttgcttcaaagatgaacttgttgaattcgcatgtgacccttgtaatttcgatctctgcaaaacttgctcagatcttccccagaaaatgtctcaccatcttcatccggagcacccgctagagtttcgtattggcaaagttgatcgggaaaccaaatacatggtgtgcgtcgggtgcggaaacatgtcttctggaacctact

SEQ ID NO: 156929 - DNA, 1952 bp, Arabidopsis thaliana landsberg
atgatgcgaggtgcttcagtggaagatctcagagcaaagctgttgaagaaagataacagtaatgaatccccaaaatctaatgggacatcatccagtggacgggaggaaaagaaaaaagtttccaagcaaccagagcgtaaaaaaaattataacactgacaagatccagcgcaagggaagggacctgactaagcttatctataagcatgttgctgattttgttgaaccagaatccaaatcctcatctgaaccacggtccttaacaactctggagatatacgccaaagcaaaggaggaacaagaaaccactccagtctttagcaagaaaacattcaagcttgaaggcagtgcgattttggtcagttgatagcatcactatcttgctctcttttctatttctattccggttagatatacatccatcagtatcttctaatgccaagttattactccctctaaataggtgtttgttactaaactttccggaaagacgaaaattcatgtggcaactgattttaaagagccggttacccttcactgggctttgtctcaaaagggtggagaatggttggtaagataattcttttttatttcttaaacaagaacatactttaacatcagctccttctcaatcggatgtctggtctggtctcatttggtctgagtttgtgagtcattgacactgcaggacccaccttcagatatactgccaccaaactctttgccagtacgtggtgctgttgatacaaaactgaccatcacttcaacagatcttcctagtccggtatgacaagtcgaatctattaatactactataagtctactagcatttggattcagagatggtatgtaaaagctctcatgttaaccaaaaatgtaggttcaaacttttgagctggaaatagaaggtgacagctacaagggcatgccgtttgtactcaatgctggtgaaaggtggattaaaaataatgacagtgacttttatgtggactttgctaaagaagaaaaacatgttcagaaggtttctcttccttcttggtcttttaaaattcgctttcaattgcatcttattgtcccctagaggctgaatctttaattgttccttttgaaaggattatggcgatggaaagggtacagccaagcatttactggacaaaatcgcagatttggagagtgaggcccagaagtctttcatgcatcggtcagttttatgctcaatcatcctggttcttagttcatgtttcagacttcgagaagcttaatccatatatgatgatcacttatacaaattagagtcattcatccatatttaatacattgattgatccatgttctgtgatcaccaaatttatattcccagtgatacatctcttttgtgcatgagttgatttacaacttccggaactctgatatctgaaggggtggatcttgccattttttttcttttctagattcaacattgcagcagatcttgtggacgaggcaaaaagtgctggtcaactgggctttgcagggatcctagtctggatgaggtttatggctacaagacagcttgtgtggaacaaaaactataatgttaagccaaggtacagttcaaataatgtgacattaattggaagtttagactctgtccacctttcttattcggccccaagggaaatattagcaaaccttatgggagtcttataatatgttttgacatctgaaaatgatatttaaataaatatacagcatcgtttcagtaattttcacaccaatttactgcagggagataagcaaagcgcaggatagactgactgaccttctccaggacgtttatgcaagttatccagagtacagagaacttttgcggatgataatgtctactgtaggtcgagcaggtgaaggagatgtcgggcaacggatccgtaaagagattctagtcaaccaggttggactttagatttcgtatta

SEQ ID NO: 156930 - DNA, 243 bp, Arabidopsis thaliana landsberg
ttttatccggatggtgaattcgaacctcttctctcttctcaatttacaaagctctatacagaggattggatcggtgtgaaaacattggatgatgcgggaaaagtgaagtttgtgagtgtagccggtgaacatatcagaatggtagatgaagatgtcgtcaaacacgttgtaccttatctccaggaccaaccgtcttcggcgcaaagcttcaaccgcaagacgaagcagcccttgcatgcttaa

SEQ ID NO: 156931 - DNA, 1068 bp, Arabidopsis thaliana landsberg
tctctccgtttcgagactcatctgaaaaacacgaatttgcagtgagaggtgaaacgcagatcactatattgttttgggttttgtgtgtgagtggtttatggtgattttggatttggaagaatcgttgccatgaatgggaatattgtaggaaaggttccgattggggaatgtaaagcgactgtagtttacatgtccggttacttaccaggagctgcgtcggagaagtccccgattctctcccctgttcccgtgcgtttatcggcggctgttcacggtggagattcgtggaaagatgtatgtggtggtggttgtggattcgctatggctatttcaggttggatttattgaaaagatcataactttgggattcttggatttacaacaaagatgtgttttttttaggggatttactaattttgtttgttgatgggttttagagaaaggaaagcttataacttggggttctactgatgatgaaggacagagctatgtggcttctgggaagcatggggtatatttctttaagatgattgaattttgtctcttcttattacctttttttttttttttacgaaattgattcgattgttgtcttgtattgaatacgattggttaaggaaactccagagccgtttcctcttcctacggaggctccagtcgttcaggcttcttcaggatgggcacattgtgcggttgtaacaggtaagtttaacttctctactttggcttctattacattacactggtctatgacttgaaacatgaaatggagtaatgatacttgtaactgtcattttttgtccatgacctgtgttttgctgtgtaacagagactggtgaagcatttacttggggttggaaggagtgcattccatcaaaggatcctgttggaaagcagcagagtggctcaagtgagcaaggtgatatcggttgggatatctttggttgtagtgttgttatttttttattgttgatggatatggtaacgttttcaattgtgatagtgagtccagcatcacaaggttcaaatgcggctagtggtacgacactacagaatgagaaccaaaag

SEQ ID NO: 156932 - DNA, 705 bp, Arabidopsis thaliana landsberg
  unsure (1)..(705): unsure at all n locations
aaaggcatttacatctccttcatcatcaatcggtttgttctttttattcttcnnnnnnnnnnnnnnnnntgcttgttgtcctctgcagcctttctctatcaagttgttcttcattttctctaatgttttctcactttttttttcaaggaaaaaagagtatatctaatgtttttgtctgaaaacatttgcagggtgtgaatcaaaagtcgtgccgtatgattattctgcaaccatagaggcaagcaattgttctgtttacttacctgaccttagagaatgttcgttgtaattcttgttgtaataattactctgtttgttttggtgcagtgtctagagatacctttaaaaccacagtacaatggaggaatcatcgtcagccctgacgtacgagatggcaccctaggctggacaccattcggaaacgcgaaagtcgatttcagaaaatttggaaaccataactttgttgttgctcgagacaggaaacaaccttttgacagtgtctcacagaaggtttatttgaaaaagggacttctctacactttctctggtaaaaataattctgattttgtgttccttgcaccacactctttaagattctgttccaattctaatctgatgtattttgtgttcctcgtagcttggttacaagtaagtaaaggaaaggctcctgtgaaagcagttttcaagaagaatggtcaatataag

SEQ ID NO: 156933 - DNA, 3453 bp, Arabidopsis thaliana landsberg
  unsure (1)..(3453): unsure at all n locations
atgcagaaagcaattgattctgttatttgtaatacttccaagtggtctcttgcttttgcagaagccttgttatcccttgttacagtcctggtttcatcatcgtctggatgttcagccatgcgagaagctggtcttattccgaccctagtgcctctcatcaaagatacagatccccagcacttgcatttggtcagtactgctgtgcatatattagaagtcttcatggattacagcaatccagctgctgctttgttcagagatttgggtggcttagatgatactatctttcggttaaaacaggaagtctctcgaactgaagacgatgtgaaagaaattgtttgctgttctggtagtaatgggcctgaagacgatactgaacaacttccctattctgaagcattaatttcgtatcacaggagattgttgttaaaagcgttgttacgtgcaatatcccttggaacttatgctcctggtaacactaacctctatggttccgaggagagcttgttgcctgaatgcttatgcattatcttccgaagagcaaaagatttcgggggtggagtattctcgcttgctgccactgtcatgagtgatctcattcataaagatcccacttgtttcaatgctttagattcagctggtttaacttctacctttcttgatgctatatctgatgaggtcatctgctctgcagaagccataacatgcataccgcagtgtctggatgctctgtgtctcaacaatagcggtcttcaagctgtgaaggaccgaaatgccttgaggtgttttgtgaaaatatttacttctccctcttatctgagggctcttacaggtgatacacctggttctttgtcaagtgggcttgatgaactcttgagacatcaatcttcgttgcgcacttatggagttgatatgttcattgaaatcctcaattccatgttgattattggatctgggatggaggccaccacctctaagtcagctgatgtgcctactagtgctgcacctgttcctatggaaattgacgttgatgagaagagcttggcagtttcggatgaggcggaaccatcttctgacacttctccagcaaacattgagctgtttcttccagattgtgtgtgtaatgttgctcgtctctttgaaacagttcttcagaatgcggaagtatgttccctgtttgttgagaagaaaggaattgatgcagttttgcagctattctctttacctcttatgcctctatcaacctctcttggtcaaagtttttctgtcgcttttaagaacttctcccctcagcattcagctggtcttgcccgaatagtgtgctcctacttaagagaacatctgaagaagacaaacaaccttttggtttccattgaaggtactcagcttcttaaattagagtctgcggtccagacaaagattttgagatctctttcttgcctagaaggcatgttgtccctctccaactttttgttgaaaggatcagcttcagttatctcagaattnnnnnnnnnnnnnnnnnnnntactgaaagaacttggtataacatacaagcaaacgatttggcagatggccttgtgtaatgatactaaggaagatgaaaaaaagagtgttgatcgagcatctgataattcagtttcagcatcatccagtactgctgaaagagagagtgatgaggattcaagcaatgctttagcagttagatacacaaaccctgtatccattagaagcagtagctctcagtctatttggggtgggcatcgcgaatttctgtctgttgtgcgttctggcagaggtgttcatggtcatacccgccacgcaatagcccgaatgaggggtgggagaactcgtcggcacctggagtcttttaattttgattctgaaattccagcggatctgccagtaacctcatcttcccatgagctgaaaaagaaaagcaccgaagttcttattgctgaaattttaaacaagctgaattgtacactacgtttttttttcacatcccttgtgaaaggatttacctctgctaatcgtcgcaggattgatgggccatcattgagttcagcatctaagactcttggtactgccctagctaaagtatttcttgaagctcttaacttccaggggtacggtgctgctgctgggcctgatacatctctgtcactgaagtgccggtaccttggaaaagtggtagatgacataactttcctgacatttgatactcgaaggagggtctgttttacagctatggtgaatagtttttatgtccatggaacatttaaggaacttctcaccacctttgaagctacaagccagttgctttggaaagtgccgttttctattcgtgcatctagtactgagaatgagaagtcaggtgagagaaatatatggtctcacagtaagtggctggtagatactcttcaaaactattgccgagcactggactattttgttaactctacgtatcttttatctccaacctctcaaacgcagcttcttgtacagccagcttcagttgatttgtcgattggacttttcctgtaccaagggaacctgagacttttgtgcgaaatctgcagtctcaggttctggaagtcatactacctatatggaaccaccctatgtttccagattgcaatcctaattttgttgcttcagttacctcccttgttacacatatttactctggtgttgtggatactagggaaaatcgaagtggtgctacccggggtacaaaccaaagagccttgcctctacagcctgacgaagccattgttggtacgattgttgaaatgggattttcaaggtcaagggctgaagacgcattacgaagagtgggaacgaacagtgttgagatggctatggactggttgtttaccaatcctgaggatcctgtgcaggaagatgacgaattggctcaagcacttgcactatctcttggaaattcatctgaaactccaaaacttgaggatacagaaaagcctgtagatgttccgcaggaagaagcagaaccaaaagaacctcctgttgatgaagtcattgctgcatcggtaaagttatttcagagtgatgattctatggctttcccgttaatggatttgtttgtgacactatgtaaccgaaacaaaggggaagatcggccaaaaatcgtgtcgtatcttattcagcaactgaagcttgtacaacttgatttctccaaggatactggtgctttgactatgataccacacattttagcattagtactctcagaagatgataacacacgagaaattgctgcacaggatggtattgtgaccgtagcaattggtatcttgacggatttcaaccttaagagtgaatctgaaactgacattctggctccaaaatgcattagtgctttgcttcttgtattgagcatgatgctgcaggcacagacaaaactctcgtctgaatatgtggaaggaaatcaag

SEQ ID NO: 156934 - DNA, 949 bp, Arabidopsis thaliana landsberg
actttctttttgcatacagtcactactaagttgtgtttccttatcaactatttgtaatttattcatagggaactcaatgataatcatctcacgggtcatataccaccagagcttgggaagcttactgacttgtttgatctgtaagtagttcttcctatgcttgacatgttttgatgctcttatgcttatatgaactatgtacatataggaatgtggccaacaatgatctggaaggacctatacctgatcatctgagctcttgcacaaatctaaacaggttgtatgtatctctttctctgaaaacttctcacttgaatgttcaagattggtgctttatatgattttgtgtctcattaatgtaatgtagaaatgttcatgggaacaagtttagtggcactataccccgagcatttcaaaagctagaaagtatgacttacctgtaagtatcgacgctgagaatctctctaatcttatataatatatagttccacagcgtttgttttttcgaatttcaagtcattaactactgagttattggttgcctttgatttatcggttcaaccagtaatctgtccagcaacaatatcaaaggtccaatcccggttgagctatctcgtatcggtaacttagatacattgtaagtgtttcttgttttctgtgaagtatacatcattatatgtgccttgtctcacatttattaaatttaatgacatttgaagggatctttccaacaacaagataaatggaatcattccttcttcccttggtgatttggagcatcttctcaagatgtgagcatccataagacctccagttttattgtttatttctagcaaaagatgaaaatggtttgtgaactcttgcattcttgttataggaacttgagtagaaatcatataaccggtgtagttccaggcgactttggaaatgtaagaagcatcatggaaat

SEQ ID NO: 156935 - DNA, 100 bp, Arabidopsis thaliana landsberg
ttttgtgatcagtccttttttggtcattgcagtggcagcaaatggatgttgaatatactttctggcaaatgcttaacctttgtacatctccgaaagttgt

SEQ ID NO: 156936 - DNA, 299 bp, Arabidopsis thaliana landsberg
caaaaggttgtaacttttacggctgcgttcatgtaacgttgagtacattcataattgtcattcaagaagagtcattgtatccacaaaacaaggacctaattaacaaaaaaaaaaaaaaagaggagtcataacgatccaatgttgtttcttcttagtcgtacggaatctggatataggcagcatcacagacaaacgggatgtctgcgtacatacccgcaagtgcaccccgtatgctttcaaggacggttaacagataagccaacgcaacagcagtccagaaatgcatcccaaacttaacc

SEQ ID NO: 156937 - DNA, 587 bp, Arabidopsis thaliana landsberg; identical to SEQ ID NO: 21113
  unsure (1)..(587): unsure at all n locations

SEQ ID NO: 156938 - DNA, 780 bp, Arabidopsis thaliana landsberg
atggctcctctgcttagttcttgtcgaaaacaggttctcctttgatgatgaatctgtatccttactatgtttatatgctgaacaaaggtgtggttccgctcgataactgtttgtttgagccattgacaccgtctaaagaaatggtggatccgaacactttgttgcattacacgaatgttcttgatgctatggttgatgctgcttatgtctcgatgaaaaacttaaatgtgtctgatgtggctgtgcttgtgactgagagtggctggccttcgaaaggtgactcgaaagagccttatgctactatcgacaatgctgatacgtacaactcgaatttgatcaagcatgtgtttgatagaactggtactcctttgcaccctgagatgacttcaagtgtctacatttatgagttgtttaatgaggatttgagggctcctccggttagtgaagctagttgggggttattctatgggaactctacaccggtttatttgcttcatgtatctggaagtggaacgttcttagcgaatgatacaacaaaccagacttactgcattgctatggatggtgtggatgcgaagacgcttcaagctgcattggattgggcttgtggacctgggagatctaactgtagtgagattcaacctggggagagttgttaccagccgaataatgtgaagggacatgcttcgtttgcttttaatagttattaccagaaggaaggaagagcttctggttcatgtgacttcaaaggtgtggctatgatcactactactgacccaa

SEQ ID NO: 156939 - DNA, 682 bp, Arabidopsis thaliana landsberg
tgtgatgctaacaatcaagatgtgatctgaaatcactaagtcaagccaagcaataacaggttttggtgtgttctagcagtcctaagtgaacatgcagaaaatagaaattcaagcagaaacaataaaacactcgaccaacacagctccttgcagagcactgggtgaggtcgagtgacaggtcgagtaaaagacagaaaataaaacacagatactcgactgcacagtctgttgccagacaactgggtggtcgagtatgaggtcaagtaacaagaaagaacttcagaaattaagcgacagataacaagatgcagtaaacaacagtagagtaaacaaagaattcaatcagataaagaattcccgaggatggggtaattgagtagtttcgtttcctcagtttacaggtgattgacatgctcaataaattgaccctagataacaagttcattaaccaaatctaagtgccaccgcaacagagaccctcaagttaacctagtcccagactcaatcaccattgacgagagctaacctaacaggcattacgaatcaacaagttaaagccaaaatgctccctgcaatcaataccttggtacagggtcacgaatctctggaattagtggttgagacatttcatcgaacaccttttgggcgcggaaatgtctcagctcaaattccagttgattag

SEQ ID NO: 156940 - DNA, 893 bp, Arabidopsis thaliana landsberg
atgtttcgtcagagacctgggcagaaagcagtatttgtgacacagaatggtttcctccctctaatggatctactcgatattcctaaatctcgagtatgttttagttgtaatcaggcaggattttttgttgtccttcatcatcagtagttggcttatgcttgtgaatatttttggtgttttcaggtaatatgtgccgtgctgcagctgataaatgaaattgtaaaagataataccgacttcctggaaaatgcttgtcttgttggtcttgtaagtcctactctgcatttggttgctgactttatgaatcaccagttgttcgttggaatctgcatatttgtttttacaaagactcgtatcttcatttctatattaaatgtcaaacatccaattcaacagctaatacctttttgggaaaatccgtagataatatacccatgatgttgttatattatcacctaagttttcatgatgtctcaagtagataacaaaaatcccataaaaattgattatttccttgtgacatggcagattcctttggtaatgagttttgctggttttgagagggatcgatcacgagaaattcgtaaggaagcagcctacttcttgcagcagctttgtcagtcaaggtcacgactcatcaaatatacataattttgcttctctcttttttttttttttttttttcttttctgcaagtcatatagttgataatggtagcatctttacagctccttgacgttgcaaatgttcatatcttgccgtggaatacccgctttggtgggatttcttgaagcagactatgccaaacacaggtgcgtagagtttacaatcttcttacaatgtatggactacttttatgtattaagtgctgaaactaatgtaagatatatcaa

SEQ ID NO: 156941 - DNA, 295 bp, Arabidopsis thaliana landsberg
cttcaaaatacgaccactctctcttagtttctttcttcttcttctttgtaataccgtgctgtctgacatggataaccatcgcaggactaagcaaaccaagaccaactccatcgtgacttcttcttctgaaggaggtaagctgaaaacttaaacaccttcgttttctaatttttccaagtttttttttaaacttttctctatatataatgagacccctgactcttggtgaaaacaaggaacagaagtgagtagtcttgagtgggaagttgtgaacatgagtcaagaagaagaggat

SEQ ID NO: 156942 - DNA, 203 bp, Arabidopsis thaliana landsberg
ctctggatttcctcttctccacgttctcagagttagttacacagctttcaacgatgaatcacgtcgcgctttcaagatccggtacaccgcccgccttaaggttcttcctaagcttttcgcaactggtccgaagatctttatcatctcttcgccgccgcttccaccgtcgcaacttcagctctaccggaagtcctctccaccag

SEQ ID NO: 156943 - DNA, 1113 bp, Arabidopsis thaliana landsberg
atggcagaaacagagattcttgagccctatcaactgtcgttctcggatcttcttttgtcctctcgtaatcgctctcaatggatctcgaaaaatgtgatggacgctcttggccccaccggtcctggtctcctttgtatcaccggcgttcttggctccgcctttctccgccgtaaactccttcctatggctcggaagctggctctgctcgatccggacaagcggaaactcattctcatggtaaccccccggcaatttttcaagatttccattaatccaagttgtatatctggtgctttgttctcaagattgaaactttgattagtgttagttggttcatgagtgttactgattcggtgtgtttactgccaaaaggagcaccacttgggtagcgacgttcctctcaagaatccagaacgagatgtctcctcttttgcaatgcagctcaattatgaaagaacaacttataaatcctcactgggaaagctgtggttcgatgaggctggatcaaaactggacttgcaggaggatgatgatgatgctttcacaaatcttggtggtgcttttaaagaactcgggttctgcatgagggagttgggcttgtccatagctcgtctatgcgacagggagattggcggaggcttgctggaggagagcttactggattcttgcacagccaaaggacgtctcatacattaccactccgctgctgataaatatgctctcagagaatcccagaggagaaaccaatctggtaaccgagtatcaagcaagaggagagtccagaacgctgctgagcaagagctgaaccgtagaaatggagctggtttgagtgggagtcacttcaatctgtggcagcagtggcattacgattatggcatctttactgttctcacggatcctatgtttctatcgccgtattcctatcaggaattcagtttgatgagcagccattcttacctgcagatctatcatcccagcaagaacaagttctacatggtcaagactccacaagacagttttttggtccaaatcggagaatctgctgatattttgtccaaagggaagctacggtcgacccttcactgtgtgtgcaaaccagagaagctggatcac

SEQ ID NO: 156944 - DNA, 704 bp, Arabidopsis thaliana landsberg
tttgtttggtttagagctgtacattcacccggttactgagactcagcttcgtgttgatacatcaagaggagagaagctacggattaatgtaaaactttgttcttttgcttactagtttttgtttaagggagtgcttttaataacttgtcatatacgatttgtagtttgatgttacattccctgcgcttcaatgttcgattattagtcttgattccatggatatcagtggggagaggcaccttgatgtggtatgtcctggtgaattgttttgttccattacgtttgtttttttcttttcaaattgagattatgtgtgtgtttactttgtctgattttggattctgttcgtttgtatggtgcagcgacatgacattattaaaaggagattagactcttctggcaatgtcatcgaggcaaaacaagacggaattggtcatactaaggttggtttttctatggttttgaaatttttcattttcatgtgtcatctctgatctcattgcaagaagttttaagagattgaaagtgttgaagttctgtcttgtttgcttcgttatgtctctaattacctaatgttattgtttatccatagattgaaaaacctttacaaaaacatggtggaaggttggaacacaatgaaacatactgtggttcctgttttggagcagaagcggtaagcttccctaaattattctgagaatatg

SEQ ID NO: 156945 - DNA, 1696 bp, Arabidopsis thaliana landsberg; identical to SEQ ID NO: 18140
  unsure (1)..(1696): unsure at all n locations

SEQ ID NO: 156946 - DNA, 1167 bp, Arabidopsis thaliana landsberg
gtgtatggtggagtgagtctggctgttagcgttgatgtcaagccaaaccgcaaaatccatttggcaaagatgggaatggacctaatggaagtggggtttacacttgtcactctctcacccattctatgttccactctttttcttctctcatgtttgcgcaaagatactaattcggggttgttcctttttcacttattgaaagtgtatatctttcaaaacattcagaaattttgtgggttagtgttcactaaaatctttggttaattatcaagtcatccaaatattacaagtaccaaatattaggacaagtctttaattttcacaccttttttcttacctatatgagagaagttttgttgtaagagtgaatgtgtttcctcgttagtggagtatgatgaactatgcaacttcaaggcagcacatcggacattttggggtctacaagattatcatcgtagatttttaacgcgccatttagaacttctcagtctcatttgggtgatgaaaatgccttccaaggcataatcattttttgttgacattttggtactttctcatgaagttgatgcatatgattatacttggaagttggaacatatatatatttaaaataataaaggtcctctgttccaggcttattgcatccgcaaattcatgagtacaatcctttttgaacagagaacatcgaaagaaaatcatacgaaagattttacaatcgtttgagaattaacaaaaatcattaacttatatagtttccaaaattcaaaagttcaaaacgcattacgaaatcgaccgaaaacaaaaatacaaatcgataaaacttaggtgcaagtttcacgggaaattccgagcctggaatttggaacgtcgatgagaactcggtggttctgttgctgcatactagcgatgacgttaaggacagagttaacgttgaccggagctgcagccatggcgaggcagctgaggttacctgcggagctgtggatgagaaggttgtctggaggcagagtcacgttcattccggcgaacataaacgtcaccgacgggaacacgacggagccggagtagcatgtgtcgaaacctcctagtgaagttgcgtttgcgttcttaacacgtctcctgaactcgtttctcaccgccacgtaagctggttcgactagccttgtg

SEQ ID NO: 156947 - DNA, 2030 bp, Arabidopsis thaliana landsberg
gtagatatctcaagttcaaatccacaagctcaagacggagttgatgaggctcttgctttacaattgtttaattctcagccctcaagtattggacaaatccaggcaagagaagctgatgtccaagctctttctgaactaacgcgtgcgcttgacaagaaggtttggccagttaattctcagtctatacatatgtgatatgtttccgttcttaattctcagtcttctatacaattttaactctcttatattttctttttctatggccgggttgcattttatatctttccatattcataacaggcgtgctatcgttaatttttttgtttccttcacattatagtagagatttcattaggatgtggttgaatagaataaaagtttctaattgactaataagaaaatatgaaatcataaatattactaatgctttaatggactcataaaattttgaggttcggtatgtttattcactccatttgtatatagtttccttctcgttcatgcatgtcttccatgtttttcatgctctttcgacattattgtttccatttcaactaattgttgatctacaacactacaggagctagttttgagggagctaaaatgcatgaacgacgaggttgtggaaagtcagaaagatggacataataatgccctaaaggattctgaatcttttaagaaaccctaccagcagttctctttcagctaagcgaaatcaatgagcaggcatgagtttatgaaggaactatatgagtcatcttgttgtctttactacatacagcttctgatgtatcgcattttgtgtcttgctatgcacaggtttcattggcacttcttggcttgaggcaacgaaatacttaccaggagaatgtaccatattcatcaataagacgcatgagtaaatcaggggaacctgatggtcagttgacatacgaagacaataatgcatcagacactaatggattccatgtgtctgagatcgtcgaaagttctagaataaaagcacggaaaatggtatacagagctgtacaggtgtgtgtataacgagttcacctgtttctatgtttgggattcacatatgaaaaagcttctgagtggataatttactcatcattggttgcgcttcgcaaggtctaagttcaacagtttcggctacgtaatgattttgtctctgtttctggtgcaggcattggagttactgagaaaagacgaaaataataatgtaaatatggaagaagccattgattttgtaaataatcagctctcaatagatcaaacagaaggatcatcagtccagcaaacacaaggtggccaggatcagcgtcttccctctacaccaaatccacctagctcaactcctgccaatgattcccacctaaaccaacccgatcaaaatgacctgcaagtcccgtccgaacttgtgtcccgatgtatcgctacattgcttatgattcaggttaaaatcttaaacccactcagtaatgttcgtactgagagccatctgcccaattatattattaggctctacctttctcttcatagatttagatattagaaaaagttaagcccttattgctgttctttatgctctcactctgtggttgctgcattagtcatcttgtattggggttcttcttttgttcatagtttgtgatcctaacacagcaattttgtgaataaaaacacaatgcagaaatgtacagagaggcaattcccaccaagtgaagtagcccaggttctagactcggcagtggcgagtttacagccttgctgctcgcagaaccttccgatctatacagagattcagaagtgcatgggaatcataagaaaccagattctagccctcgtaccctcctaaagtaagaatcctaaaaccataacttaacctttgtgtctcttcataatgcttgtttctctttgtaaaatcaatatctccttatagaaaatccttttatataccccatttatttggagtgactcacaacagtttctcgatttcacatttatttatatgtaacacatcatttgtt

SEQ ID NO: 156948 - DNA, 942 bp, Arabidopsis thaliana landsberg
caaaataatagcattgtatccctttgttgtttctaagcatcttatgagttttgttttcaattcagttctatatgaaactggaggagaaaatacatgctaagaaaacagaaacaaaccaagttcaggccaaaacacaggtaacatcatcatcatctccatgtctctttgaaaatgtaaaacatgtcatgtcttttacatgtcgaaatgagctaattggattggatcaacatttcggatgcagcaaaaggcagaagctgagattaaacagttcaggaaaagcctcaattttaaggcaacaccaatgccttcattctacaacatcggtactagaccggtgtctcataacaaggtatgtttctactattgcaagctttgtctgaacacaaaataaggagcctctcaactctcaagtgtccatcgactagtctacatgtagttagaatctcaatcggtcactataattatatctttcaaacgctaagaaagtagaagccatcaacttaatactctataacttgttttctctaaatattttcagaccgagccatctaaagtagcacaatcaagatcacgaccagcgacctcagcctcaattacaaacagggcggtcaccagagtttcttataaacacggttttgaagaagctgaaatggtaaaggtaatggtcagtaatagaaaacagagtgcggctaaagattcagatttgcaaaagggtaatcttatggcggttccaatgaaaccccagattggtgctcgaagaaacagaaactaaacagaggcaatttgaattctgcggttggatgcatagctttatattgcgattagtactttaaccaataagaaaagtataaatagtatagttatttaataataacattacattcggctgtcaaaaaaataaaaaaatatcaacattacatccatttatttcatttttaaaaa

SEQ ID NO: 156949 - DNA, 1275 bp, Arabidopsis thaliana landsberg
atgaagatgaaagcaagccatgagacagagaacaatgtctcatgcttcagaccaagaagcttggcttctgtgtttgcacaagaaggtggctctgcagtgtttagctatgaaggtaattgcagttctgatcaagatctccttcttctggacttgccgtcaaacgggtcatttcctcaagcagagctacttcaccaactctgaaaggtcaaagctacaaaacctcattgagcttctcagagcttaaaggaaggattcttaagctctctatctcttttctttgatgagagatatactcttaagctttctgagaaaacgaccaaaatgaggtttctgctttagaaattggaatttgcagacataaaaaaaaaggaaggatatttatttgagtcttgcttgggcttctctttggtggttaagtttataaagtgggtcttataatatacatacatatacataaagcctcttctcttacctctctttctgtgacccttttaattttaaacttgaaagttccatcttttttggtttcttatctttggacttttttagtttctgcttttttttttgtataggatgaaaaagatactgtaatatcatgtaaacttccgaaaatgcagaaaatggaatacatgagtactactttattagaattttgggagtaatgcaaaaataccaagagttgtccaaactagaaaagaatacctcttttcctttttccttttttgtgtatgtgaaaagattaatgcaaaagacgttgatgcgcttgctttagtatatgtataaatactttttttattttatctttataatcaactatcaactttataattctaccacttgaattacaaaaaattttcagttttaacgtgttttctttgaaatttagcaatggaccaaagcgacaagaaccctaatcggcggctccgagtgattcccaagtggtcggagctttgtccggacttgttacgaagtattttcgaacaactgagtttcacaaatctcaatcgagcaaaattagtttgtaggtcatggaactctgcttcgagaggctgcgttcccaaacgaaatcagattccgtggctgatacttttccctcaaaagagcgaaaacaatagtagcaataactgtgttttattcgttcctgatgataatgacaaagtttacaagactcgagatctcggtgttgactttgcacaaagtatttgtcttgcgacttacggtagctggctcttgatgtttaaccatcttcggaatctctacattcttaatcattga

SEQ ID NO: 156950 - DNA, 694 bp, Arabidopsis thaliana landsberg
aaaacagatttcactgctagctacagaagctttgatcacatggaagatcgaaaagaggtttttattttttattttctggtctaatcccttcgtcttctgtgttttctccttacataatattaaagttaaagtgatacattaaataaaatgggatgttcatgtcaacttcttgcattaatattcgattttgatgtgagaaattagtctctgaatcttggtgaaaaagtctttttttgtgtgattgatttttaggattgtgtttttttctttctaatggttcttgaaaataaaagtaattgaaatggagatttatttggcagaacaagaactcgccatggctatcagtaccacagtttggagattgggatcaaaaaggaggatcaattgattactcaatggatttctcaaagatcagagagatgaggaaactcaacaagagagatgcttctcgagccagtcttggcaacgaggaagaactcattaacccttttcatgatcagcctcctgttgatactgccaagcctaagaagctaactacggttcacagtgacaacaacaaccgcaatgagttctctcaccatcacccacactctccttctgtaagattcttgttgctctatcttaaagattcattgttttgaatgtcagtccattgtatatgaatttgtattagctcctgcgttcattgaaaccg

SEQ ID NO: 156951 - DNA, 1246 bp, Arabidopsis thaliana landsberg
agacacaactagagaggtctggtaacacctgttcttattcatttcaacatagatcggtaataatggctcgtcctcacccatcggacgatagccacacgctagtgaactcgacggtggtcgccattgacaaagacaagaacagtcacttcgctgttcgttgggccgtcgatcatctcttcaatatgatcattaattccaaaatgattctactccatgttcgtctcaaaaattctaatcgtaggtatcttctcctcatcttttttattctctaatcatacacaaatcgcatcttctaaattggatgaatcaagaaatgttgttgcagatggaggaaacattgatgatagtgaattaaatcagctttttgttccatacagaggctattgtgcacgtaaaggggtatcatttctcattcaagcatttcgttgaactttacatgcattaaagacttagtaattgtttcttttgtcttacatagatttcaatgatggaggttattctagacgataccgacgtttcaaaagcagttttggattacgtgaacaataaccttgtgaccaaccttgtgttgggatcatcctcaaagagtccatttgcaagatctctcaaattcaccaagtcacatgacgttgcatcttccgttctcaaatcaacgcctgagttttgttccgtctatgtcatttctaaaggcaaagttcactcttcaagaactgctcaaagacctatcaccaatacacttgtccctcctcgtgtaccttcttctacgtttcatctacctgaccctgaccatgatcgttcacctaggtatttattagccaaaactcttgggaatgtttttgctatgttttgtttgtatatatataacaagtgttaagaatttgttcttgaggatattgtaggagtcagcgtaatgggagaaacacagttccagagaggtattcccatgaaaataaaggcttcaaacctgtgagagaaatgcataaaatccctacaaatggatcgttggacttcaattatgagtttaggcagggaaagggtcaaaggaactctactggaagaagttcattttctgatgaatcgtctgatgttgggtctatgatgatgatgggttctattgacctaagtgctgacaacttggatatggatctgatggatcagggtcttctgatgagtctgattcgcagtctacggcaagttaacaagtatagcaatagactttatgatgatatcgagtttgataagatta

SEQ ID NO: 156952 - DNA, 435 bp, Arabidopsis thaliana landsberg
  unsure (1)..(435): unsure at all n locations
gaacatacgtcgtcgttttggtcttcttctacttgcatgcacttgcttgttgtctctgagactctgttttggtgaggacagaatcactttctcaactcctatcaaagactcagagtcagagacccttctctgcaaaagtggtattttcaggtttggtttcttcactcctgttaattcccactactcggttacgttatgttgggatttggtacgaaaagattccaatccattctgtggtttaggttgcaagctaagactctcccaccatcgtcgcttccggtgtttccgatccactacatgtaatnnnnnnnnnnnnnnnnnnnnnnnntcgccttgtatggtctaccaatgtgtcagtaccagcagcggcaaaggccccgtgggtgcagcctatgaagtctgcgaatcttatgttacaagacaacagacccaatg

SEQ ID NO: 156953 - DNA, 332 bp, Arabidopsis thaliana landsberg
ttaagatggagcatagtaccttgctgcacataaatacagcattgtaccatgttccatctcggaatgagtaataggtgtggaagtcaaaaatatgagtcgtaatggaagcgacccaaaggtggaagaacatgaagatagtatactgcttgagctgcattatgcaaatgaagaatgtcaagagtggaatcaagaactacaaagacttatgggagttgtatcaattgtagctacaacagaagacgttgatgtcaagaggaagttgtttagtattaccacaatacaagagaacaagttgacgtcaagaagaagttttctaatactaccagagtaag

SEQ ID NO: 156954 - DNA, 555 bp, Arabidopsis thaliana landsberg
  unsure (1)..(555): unsure at all n locations
cttctctccnggacaagcgtctcctcaattctctcatcacccacgtgtcctccttccaccacgcagatcaatacgcctccctcaggcacagactgaagcgtgcctttgtttccacgacttacgttatcgagaaagatccgattttgcttgagtttgagaccgtccgtacggttctcgagtcgatgaaactagcgaaagcttccgggccagcgttggctttggtggagtgtatgtttaaaaacaggtactttgttccttttgatctctggggggaattagttatcgatgtctgtcgtgaaaatggaagcttggctccgtttcttaaggtttttagggaaagttgtagaattgcagtagatgataagcttgaatttatgaaaccggatttggtagcgagtaatgcagctcttgaagcgtgttgtaggcagatggaatctttggctgatgctgagaatgtgattgaatctatggctgttttgggtgtgaagcctgatgaattgagctttgggcttcttgcttatttgtatgcgaggaaggggattcgagagaagatta

SEQ ID NO: 156955 - DNA, 445 bp, Arabidopsis thaliana landsberg
tcacacacacataaacactccacacgctctgcttcgaccaatcaccaaacacgctttaatgactctcacgttttcctcctccgccgcaaccgttgccgttgctgctgcaaccgtaacctcctccgctagggttccggtttatccactcgcttcgtcgactcttcgtggattagtatctttcagattaaccgcgaagaagctgtttctgccgcctcttcgttctcgcggcggcgttagtgtgagagccatgtctgagctagttcaagataaagaatcgtccgtcgcggcgagcattgctttcaatgaagccgccggtgagacgccgagtgagcttaatcattcccgtactttcttggatgcgcgaagtgaacaaggttagttactcttcttcgtcttctttcctgaggaatttgaattgacttgtggtagcaattcggaaatggaa

SEQ ID NO: 156956 - DNA, 525 bp, Arabidopsis thaliana landsberg
  unsure (1)..(525): unsure at all n locations
gttatgatacagcagtacatgcagagtttaacgggaatggtgcagtttatagtgaccatacatggagatctccagctcctgagacagaagggcctgctccttttagctatgggattggaggaggggttctctcttcagatgtttcagctagaagttcatctccaggttatgttggcagtcacagtgtgaacaagagtcacccaaacagaggtaattgagttcagagtaattttctgctttaacatgtgattctatgaaaagcaaaggactcttgagaaaaagaatttagaaagcctagatagtttccaaatttttgattatcctcgtcttnnnnnnnnnnnnnnnnnnncatggtttagggtcttgcactaatggtgatctagaacaccttcgtatcactagtgaattggcttttcctcagaaacgcgaatatacgtgcatgcagaaaccataccccttttgcatgtttattgttttttaaaaaatcagaagattatttagaggaaagtttctttccgtgcttta

SEQ ID NO: 156957 - DNA, 881 bp, Arabidopsis thaliana landsberg
atcccatccagatgatgcatttgggcatcaaatgattagaaatttggaggtaagaacgtgtactctactactctagttacagcgacatcttcattagtaaagcttttttgagatttttgtcaaaatatggatactagtatgacactaaaatattctagtattgccacatgggttcatgttgtactgatcaattaccttcatttaaacttgttctgaaagcttaacggtgtttctgttcttcagagtcggggatgtgcactcttaagcattgatgcatcaccaactttacttgcaaaggagagattgtttcttgataatggatggcaggttcgttttgcagttagaatattatgattaaagcagggctaactttcatgtataatttctgatataagcactctcatttctttaccctcttctttattctggtgtttcagagagctgttgcctgggacatgctaaaagtgtatggtagttttgttgatactcaagaaaaacgcaggtcagtactgtacgttttgttaaaactgtgtaagggcgctatgccttcatacctagtatctggctgaactctgtcaagaaatatctgtaaaatgctgttgcccgtgacttttgagctttccaatgttttttagatgaacctcttacagtcttactatatatatcctgttttttgttttttcttctctctcactctctctctcactatcctgttttggctctcttgtttcttcaattcatgagctttcattagaaagcctacttctcttggaatatatcttaaatgagaatgtcgtgtttctaggatcgagcgattggagttgtttgacgaatttgaagagtggcacatgatgcaggcaagtctgtctatacctcattaa

SEQ ID NO: 156958 - DNA, 376 bp, Arabidopsis thaliana landsberg
aatgacatattgcttagaacacccaagcaaaaagctgctgcttatgccaatcgagccatatgaacctaatcctgcttgctatgtctgttccgaggtatacacatcattgttgtttagccttctttcataagctttcttgtattaccagtcttctgattttctttttggtttttatcaacagaccccattagtactcgagatcaatactcggaaatcaaaactaccggatctagttgatagaattgtgaaaaccaaccttggaatgaacctaccgttgattatgcacgggaattcccttctgtatgaagttggcgatgatcttgatgatattatggttgcaaactacaacgctaatcttgaaaagggttggtcttga

SEQ ID NO: 156959 - DNA, 427 bp, Arabidopsis thaliana landsberg
acaacaacacatcttctcacttctctattcttttgctctttggtttaagaacaggcgaaaactttgtttttttatccaggatttcaatgatgcgattgccgtataccctgatctcagtaatgtgaagtaagtaggatcatacatcaaacttgaagtttctcacaaaaattatgcgtaaaggttctctctgttcctcgtacccatctgctaactttatggtgtttccgtgttgtttgtagattgacggacttggaaactctgcttcaaacaatagtcactgcagcttaagacatttgtctcctattcatttctgactgttcttctgcaactgtacatttgttgtttatgtttgataaaattttcattaataagaaaagaagattcaaatgtataaaaatagcagtacaatacaatcaagacctaccct

SEQ ID NO: 156960 - DNA, 1081 bp, Arabidopsis thaliana landsberg
gaccaaatgtaacagctcacgatcaaaataaaaaaattgtaacgcagacgttttgagatatcttcaatggcgaagaaagctgtgttgattggaatcaattaccctggaaccaaggcggacgtacggggatgcgtcaacgatgtccggagagtgcacaaatgtctcgtggatcggtttggattctccgagagaaacatcactgagctgattgatactgacgagtcttccaccaaacctacagggaagaatattcgaagggcattgttgaatctagttgaatccgctaaaccgggtgatgttcttgtcgtccattacagtggacacgggacgaggttgccggcggagactggagaagacgatgatactggttatgatgagtgtattgttccttgtgatatgaatcttatcaccggtaagtcataattagatttgacattgacatttttgaactttgtcctgtttttttggttagattattagattcaggggaattatgtttttatgcatttggtcaaaaatcagttgaattatttcatcaattcaagaagatttttttgctattgtttcaaattcactcgttttcatatattctcagatgatgagtttagagatcttgtggagaaagtaccaaaggaagcacacataacaatcatctcagactcttgtcacagtggtggtctcatcgatgaagctaaagagcagatcggagagagcacgaagaagaagccaaagaaagaatctggaggctcttcaggacttggaatcaaaggctttgtgcgtgaagctgtgaaagaagcactggaatctaaagggatggccattcctcaccacaaagatgagaaagacgaaagcgagactaaagagcttaaactagaccatgccccaaaagtccatgtcgtgaacaaatctctgcctctacaaactctaatcgatatcctcaagcaaaatacaggtaacaatgatatcgaagttgggaaaatcagaccaacccttttcaatgtgtttggagaagatgcatccccaaaggttaagaagttcatgaaagtgattctaacaaagctgcaagaaggtaaaactgaag

SEQ ID NO: 156961 - DNA, 418 bp, Arabidopsis thaliana landsberg
atgtcattgagcctcggcatccaagcatattcttatggagaggacagttttatggagagcaagatgatttcagacgctttttgtattttgtccgagctgcgctagagttgcttattcagtccggcaaaaagcccgacgtcatacattgtcatgactggcaaacagcttttgttgtacggcttgatcttatttttaagcagtaacgtaattcattttgtttaggacacatcttgaagctttctttttttttttttacataacaggcgccgctgtattgggatctgtatgctccaaagggattagattctgcaagaatatgctttacatgtcataattttgagtatccaggtgccgcgtctgcttcagaataaggataatgcgggcttgatgttaaccagcttaaatagaccagacagaa

SEQ ID NO: 156962 - DNA, 256 bp, Arabidopsis thaliana landsberg
ctagtatttgatgaatgggataggatgaagaatctggtgaagggtaccttgttcagccagtctctcaagtggaagatcatgatgctgtgggtaatgacatcgagccgatcaatgaggacaatgatccagatgaagaagaagaagtcgaagatgacctgccaattcctgaccagtccttggcttcatcatctcgcccaaagagaaaacgagatgacgatgatgacggtgaggatgatgacgatggtgatgaggaacg

SEQ ID NO: 156963 - DNA, 301 bp, Arabidopsis thaliana landsberg
gtaaaagaatatcgcgaggcggtgatgaacaacaaaatgagtgttcttgagaaaagtctgtacaaaaaacggaagaggggaaagctcgaggtgaaagtctcataccggactttcctgtgtccttattgtcccgataataagaagaaggttggtttgtatgttgacattcttcagcatgcttctggagttggtaatagccaatccaagaaaagaagtttgactgagaaggctagtcaccgtgctcttgccaaataccttattaaagatcttgctcattacgctacttctactatatctaagc

SEQ ID NO: 156964 - DNA, 627 bp, Arabidopsis thaliana landsberg; identical to SEQ ID NO: 49218

SEQ ID NO: 156965 - DNA, 816 bp, Arabidopsis thaliana landsberg
ttagttgtcatcgtatgggtaacggcggggtggagttcatgcactcggaggctcggtgtggcgaagaacaacctccgagtgtctttgcctgtatccatcacagggggatatgaatgtgcccttggaaattttggcgtacctcaatacggcgtaagcatgtccggtgcggtggtttatcctaaaactaatcacaaagcttgcaagaactttgacgattttgagatttctttcagatccagagtcgctggattgcccacattcgttcttgtggatcgaggaggtgtctctctctcttcctctttgattattttgttacaatgcaaagagaagacttgtcacacaagaatttcataaaaggtgacttgtgagacaaggcacctaatatatatatgttattgtctcagattgttactttactttgaaggcgtggaatgcgcaacgagctggtgccgcaaccatcttggtggcggataacagacccgagcaactcatcaccatggacgcaccagaggatgagacgtcagatgcagattacctacaaaatatcacaattccttcagcattagtgagcagatctctagggagtgccatcaaaacggccatagctcatggcgatcccgttcatataagtctagactggcgggaggctcttccacatccaaacgatcgagtagcttacgagttatggaccaacagtaatgatgaatgcggatccaaatgtgatgcacagatccggtttcttaagaggtttaaaggagctgctcagattcttgagaaaggaggctacactcgcttcactccccattacatcacctg

SEQ ID NO: 156966 - DNA, 1008 bp, Arabidopsis thaliana landsberg
  unsure (1)..(1008): unsure at all n locations
ctcagaatcctcttttaagtctctgtttcataaataaaactaataaagaagaagaagaaaacagagcaattaaagtccttaaatcttcttcttctccaattcaatggctcttccgttgccattgatcttccttatcttctctcatttgttcgtttctggtacgaatcttctcctatagatcaactttagttatgattaataatactgtgattctgatgattttatggttttataaacaggagttagatcaacgagcttcattatggtgaacaaatgcgaatacacagtctggcctggacttttatcaaacgccggagttccaccacttccgacgaccggattcgttctccaaaaaggcgaagaacgaacaatcagcgctccaacttcatggggaggaagattctgggggagaactcaatgttccaccgacaccgacggaaaattcacttgtctcaccggagattgcggatctggtaccctcgaatgctccggatccggagcaacaccaccagcaacactagcggaattcacactagacggatctaacggactcgatttctacgacgttagtctcgtcgacggttacaacgtcccgatgctagtggctccacaaggaggctcgggtttaaactgtagcagcaccggatgcgttgtagatctgaacggttcgtgtccgtcggagcttaaagtgacgagtttagacggcagaggtaaacaatccatgggatgtaaaagcgcgtgtgaagcttttcgtacnnnnnnnnnnnnnnnnnnnnnnnnnnnnnnnnnnnnnnnnnnnnnnnnnnnntcgtcgtactcgttgatgtttaaaactgcgtgtccacgtgcttacagtacgcttacgatgatcagagtagtaccttcacatgtgctgaatctcctaattacgttatcacgttttgccctactcctaacaccaggtgattattccatttatacccttttataactattaacacaccttgcctatgagggtagttttgtcaa

SEQ ID NO: 156967 - DNA, 366 bp, Arabidopsis thaliana landsberg
tcaccgactaaaaacagagacaaaaatcacgagatcaagatttaaacgatctgtaaaatgagagatcaagtatgtgcgaatctgagaacattatgcgtcaatgaattttggaaagaaagcaaacgaattttcataaacgtagaagaaaaggaaaacgaatctatagggtttagagtaaacaaacctcagcaaaatctggatttgagaaagctagagcctttcgaaaaccatcatttctgggttcatcgaatcctggggattaggtaatgggaattttctggaaaatgctcgtctctcagagcttaaggcgttcagattcgaaagagttcttgccactacaccaacctttcacatggtgcggagagc

SEQ ID NO: 156968 - DNA, 509 bp, Arabidopsis thaliana landsberg
atgatcgtgtatgggtctacgggttgtattgatctggtaaaactggttttaaattgggataaacaaattgtgttccttgttcacaagatgattattgtcactgtactgggtttatcacaaggatgaacatgataatgtgagaaccagtattgatataatgtttgcaaatattagagagttccgatttcaatttttgttttcaggaagcagttttaaattattcccatgcatgttgtttgtgtaggagaagagagttttctagttaactctaggttatttttatgtcttaagaggaatgaattacatctctggatgcaggttttgaacagcttggcagaagaagtgaaacttgagagagtaatggagaacttggaagatctgaaaattctggctgagcagtggtcgcatcaaggaattgaatatcttcagaagataccaccgacccagctgtatgccgccattggtgtgaaattgttaccagccatcttgcacttcctatccagtatgta

SEQ ID NO: 156969 - DNA, 218 bp, Arabidopsis thaliana landsberg
ttattttatgcttaaattatttcacacgaaatttaaacagatgggagaaatcggagagaaattagatatcgattttgtgatttctactggagataatttttacgacaatggtttaaccagcttgcacgatcctctatttcaagattcttttaccaacatttataccgctccgagcttgcagaaaccttggtatagtggtaaatgtgtggttcaatgtg

SEQ ID NO: 156970 - DNA, 465 bp, Arabidopsis thaliana landsberg
gataattaaatcagagaatagggctgggcatatgagtaacccattcaagttcgggtagaaccgttcgggtagaacccgttcgggtagaacccgttcgggtagaacccgttcgggtagaacccgttcgggtttgggattaatgggtatatgatttactacccaatagaataattctaaatatttggttctggttcgggtcgggtccatttgggtttgcgtcagtttggataaaaagtttcagaccctaaaaatacccaaaaaaatagaaacgggaaatttgtatgtagatagcgggtctccaaacaaaaaaaacttttaaatttgttaagttttaataaatttaattatatttgaatatattttactaaattttgacaaacataacatataatttttgaatagtttagttgttttggatatttaggtccaaaattaattgatatatttagatttataattataatc

SEQ ID NO: 156971 - DNA, 863 bp, Arabidopsis thaliana landsberg
tgtgatgctaacaatcaagatgtgatcagaagtcactaagtcaagccaagcaataacaagttttggtgtgttctagcagtcctaagtgaacatgcagaaaacggaaaatcaaacagaaacagtaaaacactcgaccaacacagctctttgcagagcactgggtgaggtcgagtgacaggtcgagtaacagacagaaagtataacacagatactcgactgcacagtctgttgccagacaactgggtggtcgagtatgaggtcgagtaacaagaaagaattgcagaaattaaacaacagatgacaagatgcaataaacaacagtagagtaaacaaagacttcaatcagataaagaattcgcgaggatggggtaattgagtagtttcgattcctcagtttacaggtgattgacatgctcaataaattatccctagagaacaagttcattaaccaaatctaagtgccactgcaacagagaccctcaagttaacctagtcccagactcaatcaccattgacgagagctaacctaacaggcattacgaattaacaagttaaagccaaaacgctccctgcaaccaataccttggtacaaggccacgaatctctggaattagtggttcagatatttcatcgaacaccttttgggcgcgaaaatgtctgggctcaaattccagtttatcagaaagtaataggcattaaaaacaactaatccggaagggatctatcaatcaatactcaatcacctaacatactgagaattctacactactctaacccatcctcacaaacctattcactactcagacatcataacagaaagcataaacgttgaacaagctaaaaacatgataacaacagtgtaa

SEQ ID NO: 156972 - DNA, 552 bp, Arabidopsis thaliana landsberg
gctccttctcctgcttccatggctatccaaaagctatgctctgtgttgggtatttttctttcttcttttgtctctgtttgattttctcctactgcgatagggttattgcaattgcagctagttttgatcgaatcagtgacctagttaaagggtttaacgttgttttgttggatttgaataaatgtggaaactcatttgatccaccaaatctggccaattgcagattcacaatttgaaatcgtcagagtctctgagaagtgcaaatcttgtaactttgatgtatacatgatgcaaatttaggatttttagagaagaaatatcatatattaatatatcaatctattcttcatagagggactactaggatcagtgattttatggttcattgtggtgagagttgaagttagaatttggggaatgtttgttttataagcagaagtgtgatttgttttttggtcattcttgtgtgcagactcagttagtcctgcagatgttgggcttgaagaggtatctcaagacgatgatcgaggctatggagtatctggggttagg

SEQ ID NO: 156973 - DNA, 384 bp, Arabidopsis thaliana landsberg
ctatcgttggagaatctctcgttctctgcttccctgtcctgttcagatctcgagccgcatttcgtggatgggtcaggggtcgcgttaaaacctactcgcttctctctaaccctagggtttttgaatttttttcgggacgagggagaaatcaatgtctgtgaagctttgaggaagctatatggttacacctttggttctggttagtcttcgttttgatcggcggagagtgttcgccgaggcttggtgtctccgtcattgactaatggtggtttttgatttgagacaagagatgcggaactttgcgatgcttctgctgttaattcttcttcttcactctctcgcctcgttttctatatgctttggtatgaactagttaacaaattt

SEQ ID NO: 156974 - DNA, 330 bp, Arabidopsis thaliana landsberg
atcagaatccgttattattcctccatttattcatctcaaaacccatatctctctgtcttgatctctctctcactttctaataagatcaaagaagatgtcgaaagctaccatagaactcgatttcctcggacttgagaagaaacaaaccaacaacgctcctaagcctaagttccagaaatttctcgatcgccgtcgtagtttccgaggttcgtttggtttttagtctctctcttttttttttcttgcgataaatcgaatttattcatatggaactcctgcagatattcaaggtgcgatttcgaaaatcgatccggagattatcaaatcgca

SEQ ID NO: 156975 - DNA, 357 bp, Arabidopsis thaliana landsberg
gtgaccatgcaaagctctgtccgagtgcctctcgaccgtcaggtggttccggttcatctgacgtccatgctgagatcagcgatggcttttcaccgctcgatacttctcacagagacgtcgctgatgaaggtacacgatttcaatggtcccttgtttctttcctttctcaccattttgattcaaaagttttgatttttacacaaatgctctgaaattttttgagtcaggttcgttgctcagaagagcacagatgtatcaagactacatcaagcaagtaccaatcccgacgaatcgtggctcgttgattccgttcacaagctgggttggattaagcatttcaatgaaacagctttatgg

SEQ ID NO: 156976 - DNA, 1582 bp, Arabidopsis thaliana landsberg
gtgaatatctgtacgatgagttatggaaattatgcgcgggacctcttgttgatgttcctcaagctcaagaaagagtttattattttcctcaaggtcacatggaacaagtaagcagcttctcttttagatcggtgaaattttgagaaagattttttttaatgaaacatttctatttttggtggttcagctcgaagcgtcaacgcaacaagtcgacttaaatacgatgaagcctctttttgttcttcctcctaagattctctgcaatgttatgaacgttagtcttcaggtatactttccacatttagcaaaaccgaatttatctgatgatgtgtcgtccattagttaaagcaatatatatagatggatattgtagaaaatctatgaagaagctggaaatgattagactaaatatgagtggaagttctggatcttgtttgatttcttcatttctgttcttgtcaggcggagaaagatacggatgaggtctatgctcagattactttgatccctgttggaactgtgagtgacacaattagatcacttgattgtttttgttgttgcaacttccttaaattcaatgtttagtggatctctaaatgtaaactgtaggaagttgatgaacctatgagtcctgatccctctcctcctgagttgcaaaggccgaaagttcactctttcagcaaggttttgacagcgtctgatacaagcacccatggtggcttttctgttctaaggaaacatgccacggaatgtcttcctccgctggtattaggacacgcttactatttgtgctttgtttcccaccaaaatggcctttgatatgaatttcttatgttcttatcctttaggatatgactcagcaaaccccgacccaggagttagtagccgaagatgtgcacggttatcagtggaaattcaagcatatttttagaggtggtgaatccatttcttgttaactcagatcaaactttatgtatccatgataattgtataaaatgaatgataattcattaaacaggccaaccacggaggcatctattgacgacagggtggagcacctttgttacatcaaagagattggttgctggggacacctttgtattcctgaggtattatacttcacgctgctaccttgttttgtttcttttgatggtccattggtagattttgaacttccaagctatattatattttccagaggggagaacggagagttgcgagttggagtcagacgtgctaatcttcaacagagcagtatgccttcatccgttatatcaagtcatagtatgcatctgggagtgcttgctactgcacgccatgctactcaaacgaaaactatgttcattgtatactataaaccaaggtagacagttattactctatgggaatatctgaggtgagttttttcgacattctgcttatcgaattactctcggtttgagcaggacaagccaattcatcattagcttgaacaaatatctagaagccatgagcaataagttctctgtagggatgagatttaagatgtcgttttgaagggagagggattcccctgaaagaaggggagtctgaattttttctt

SEQ ID NO: 156977 - DNA, 392 bp, Arabidopsis thaliana landsberg
gtaaacacacatctagtctagatgaccatgtgacactcgccatcgcctttgctatacggttatggacctatccaatagaaaatgatgcgaaggtgtgtgaagagtgacacgtgaacgatgtgtgcttacacatgcaagcttcctattcagccgtccgtcacgtgtcgttgatttagtccccaccgctcccgctttttaaagttaactctttgttgcttctatacgaagtaagctttgtctcgtcggaatctgatggaggagaagaagaagaaaggcgatgatgaattgaactcgaaaccgccgttaatggcgttgaccatgtgtaaggctttgtaagacgtcaaaagtcttcgagtctacacaaggtattaggtcgtgagatagacgtcagc

SEQ ID NO: 156978 - DNA, 1146 bp, Arabidopsis thaliana landsberg
  unsure (1)..(1146): unsure at all n locations
atgatctatggaggtgcttctacgggaaaaaccagtgttgttcttcaggtgctcaggcatctcaatcgtccctttgtttattcaagctgtcgtacgtgttacaatccccgtatcttgtttgagtcgattctgaatcagttgttgctacataggaagtgttctttaaacgggtattctagtgcgaaacgatgtgacaagccatctgattttgtcaacttgcttcgtgaagcccttagtagtgtgataaagactctcgagtctacttccggaacctcaagatcagataagccggatgaaaaacccatggggaagatggtgtacttaatacttgataatgtggatcttatcagagactgggataaaggcaccatcattctgcagtttcttttcagtttgtatactgttttgaagatgcctcaacttggtataatacttatcagtggtttgccaccagatgtgtattactcaaacatgggatacacagatcctatacctctttattttcctgagtattctgaagaggatcttcgtcaaattttcttgagaaatcaacctaaccgaaaattgtactctgcattccttgagtaagactgtagtgcaaccttgcctccctactagctttctctatcgtttactcatattgtgtactgatgtagtttttggtgtcaaacagcgttgtgttgaaaccattctgtagagtcaccaggagagttgaggaactgtctactaccttctcattattgttcagaaagttttgtgagccacttgatgatttagggatttcaccaaatgaagacatgaagagaaggctatatagccatcttaagccgattattgctcattgcttaaatgagatattcagggtctctagtcaccctcatgatggcgaaaccagaggcgagagaaggcagaaagccagctacagttctgaaaaccgtgaagaacttgaaatattggacttccatatgtctacttcagcaaagtttcttcttctttcggcatttctcgcttcgagaaacccagcaacgctagacgcgtcaatgtttgactccacaggnggaatggataatcgtaaaagaagccgaagtaagctccaaaatattaaccattggatattgcttattggagtgaaattctcatgatgca

SEQ ID NO: 156979 - DNA, 697 bp, Arabidopsis thaliana landsberg
  unsure (1)..(697): unsure at all n locations
atggtccattgtgctcaatgtggcactacttgggatatcaaaggtaatcacatcaacaggtcttgcaagcgtgtctagttgtttttgaacttttaaagttgagatctcctaatatgtttaactttgttctgatatgttgacgttctgtttgtcccttaagcagatgcaatgctacttttggaagtggatcgtgttctgaaacctgggggatactttgttttaacttctcccacaaacaaagcacagggaaacttaccagataccaagaaaacgagcatctcaacacgggtgaatgagttatctaagaaaatctgttggagtctaacagctcagcaggatgagacgtttctttggcagaaaacttctgattcaagttgctattcttctcggtaagtgtgatcctgaagcatattcttggcatttaaagcgtaagcttggctttcctgtattgatgctttttctttcttttctggttggtctagttcgcaagcttctatacctctttgcaaagatggagatagcgttccgtattaccacccattggttccatgtataagcggaaccacgagtaaacgctggatttctatacagaacaggtctgctgttgcaggaacaacctctgccgggcttgaaattcatggaaagtatttctttggataaccacttcgntggttctttctcaatggttaaattttac

SEQ ID NO: 156980 - DNA, 1243 bp, Arabidopsis thaliana landsberg
ttatgagagaaattataagcctctggtagataacatgatcaagaacgatttagccctgaaaggaaatctcgataacgttgaccttttgatttttgcatccaaccagcttccttcgaattgccagcgtaagaatgcttaccaaaactcttacacttcgtagttcgtacctgtgcctatgatcattttgttgatggtttctagatcgtaatgccaaaactcttacactttgtacacatgattatcttgtcgctgactcctgtttgataagtctttagaaagtagcaccgatgattcaaaagtatactcagaacttaatgccagtttagtctatatgaaatctactgcttacatatattacccttgcaggctggaacatgttatatttcctttggggtgtcttccaaggaagaaaagagactaacccacaaaagaacacatctttgcctacttcaaatgttttgccgcgtgacagagaccccaaggagctgtgtcaaacgagttctccttccaagcatttggagaaagggtcttctctacgtgagagctccagcaacggaattgaaacacggaatgggacagatgcacgtagtcatgagaatccaaataacagggaatcctctattgagcgatcaccgagcaaaaaggtgggtttgttttgtagtccctgtgtaaatcctttgtctctgaacttgttgtaggacattttcatctcttaatataaggagtccctttcgtctcactcttaagttccttaatacaggaggatattgctcttaaagtggaagaagcaggtgtgaatcacatcccccctcaagttactggatcaaattctggagatagtctagtgaggaaggttcagaaagtcgaggaacaagaattaggtggtaggaaggatctgccattgacggtcatgggctcagggatccagtcccatgggcaagataatcctctagagaaagatctcaacagtagtcaggctagtcacaggaagcgtccactttgggaactgagtaaccccgctaacgagaattcatctgccataaaccagaaagtggagctcaataatgacggtttatgcgaaggatctccgaataagaagctgaagacagaaaacggaagcagcagcctctgccgggatacatctggtcacgattccgggataatgaaaaagagtccaaaagtcgtgttcccattggacttgaatgacgacagtgaaatggtggataatgctcagcccactagc

SEQ ID NO: 156981 - DNA, 713 bp, Arabidopsis thaliana landsberg
ggtgcaagtagaatctattctggtcaacctgaaagagaagtcagatgtagaaaaattgcttctggtcaggcattctttaccctaacttgaaaatttcaatatatttatcagatggattatatttttatgagagcattgttttacttctcaaggaaatttctgatgattagaaattcttatttcctgtttctttttatcacaatgacgttgtatttccggaaattgtgaaatttctcaggtttctattaaattttgatatcattgaatgatcaggaactgaaaaggacgctagagtttgaaagggaacttgaaatgaaatttggtggtggtgggagtatcggagatgacataattggtggagggggaaataatagtcagaaagtgggatttgtattgacattgcttcttctttttcggttctactaatattatgacactcagtgaccacttgagccattgctcactagttacttgacctggcagtttaacttccgtggaatgatatcttcttgcttcgagcctcatttaaccatatatattgagaaggaagagatggaacttatgcaactcctggagaaagttgtgcaggtaatttaatttttttgcttaacgtttacgcccaaggttactaattttctttttctttctgtcaggaggaaacatgggatattgaggaggaaagtcaaactaatattctatctagcagcatacag

SEQ ID NO: 156982 - DNA, 1932 bp, Arabidopsis thaliana landsberg
atgacattcagcaagttcgtggctcttccaccgttggatgaattctacacaccgctctcaagtccaaaacatctattagctgcaatggaagaccaacatgacgtgcacgatgatgaaaaattagatagaagaatctcaagttcacgtccatcgttttcaacgccttcttggttgagactgaacatcaatgccaccggcaagagctcacggcggcgtttggtggatgaggaacaagtggtggatccattcacgataccaacagggtataagtggactagtaactcagataattcaggtaattgtaacattaattagagatctattgagtctactagaagtcatttagatgttgatagttctgatcaatacatagataggacaatttcatgcacattctttcaatctttctaatcaaggatagatcctctatttccttttcaacatatttcactaaactccttttaaacaatagaatactacatttctctacgcttatcttattaatctttcctaactagaaaggaacacaaatacaagtatttcatcacatttcataacaataatatgtctcatgatgctattttattcatttattttgtaggtaaaaagaaaataacactatcatgtggatgcgctaaagtaaattttccaaaaagataaatatcttgggaccatgcatacgtagttagtagtatgtgatagtattgtcattgtgttgttgttattcggatttaaatttggcaaaatacatattgttgaggaacaaaatatggggcgagtgttataagccgatattttaagcgttagacttagatcattaacatatctatgtgatttatttttgtgtttgttgtaaaacaaagtactcgtcactcatgaataattaatctaaacattttacacagatgattttgatgtctattaaccacagtttaggggctacaagtccttcgctattttaacttgtttagacggttttgtaaatgcatattttatcatatatatccgatcgatttttcatataaaaattgcgatatttccagtgactggtgtttgagacattttgataccctaaacattgatttatgtttaaactttacatttcttccatgattatagaaagtggaattaggacttttagagttataaaaatagaacaagttttgtggagtaaattatggaactacaaaataaaaaatgatttcgtatgattaggttcttcttatgcgttataaataaagttgaaagattccaaaacaacgtttgctttgcaagttggaaacgaactaacttgagttggcaagtccattccatgacaacccaaaaatcatatttaaacattttgtatcaaacaataaaagctttagataaaaagacgacaagcaaatagggaatatatagtataattatattacattaaaaacaaaagattgacaacccatccactattagtctacattctccacatttccacttatcttgctcatccaaaatcggtcattctctctttagtctttaccaagaagagctccaagaatcagaggtatttgtttgtttggtcatgcttatatattcatagattattcgatttcaactaatatgttctgataggtacataagatattgggatcattataaaatggcgagtgaagcacctagttgggcggatcaatgggggaccggaggaattggggtgatggctgcggaggagacaactgacggcaaaaaagacgtcaccgggaaaaagtccggcaagaccaaagcagggattaacaaagccaagattgttgtatttattggtgtcaattggatgaagaatcttgtgcagaggaagaagaaggattctacttcttcatagatataaaacatgctattgcttcttctatttgaaatgtcacaatcttctatgctattattattcttaattctttt

SEQ ID NO: 156983 - DNA, 624 bp, Arabidopsis thaliana landsberg
atgcggagatatccatatcttaatttccggcgattgttacaagacaaagaaccaaagtcagacactgtgagagattttttcccctagaaatgtcaatggaaccgattaggctatgaaaacgctataaacaaagcgttgccaacgtttggcgggatttttttacgcctggttgaaattttagccgcgaatgttttttttggctcttaaccgtttaaaatgggccttaaaaggcctcgagccggcccaacgtgtccagaagctgaaatcacatacggtatctgatgaaagacaaaagaaaaggaaacaaatgtatattcgattaaaccggtagtgacgctgtgttggttcgttcttaccgactaccgtacagttcaaaagattttacatcaaacataaggaaataaagcaaagaaagaaacagagtaaagccttttttttttgggttgtggtattcaacttaatttaggctagatagcggtaaagtttccggtctgtattatccctctccaagaaatcacgctcaatgagtgattcaattctcttctttatctctgttgggtttgccaagaaccgcgtaaacaactgtttggtgacctctgcgattatgttgatgtgatccaacac

SEQ ID NO: 156984 - DNA, 6661 bp, Arabidopsis thaliana landsberg
agtcagttggtatctctacagctccgatcctgattggaaggttttcgagcaaaccatgagggatccttactgatctgtcacaaaggatgagggatatattgcaggatttgtattgagtgaacctcaatcttttggcgacagagagcggcatgagactgaccaatgctcctaaatcacataggcatctgttgaaagccaatggacctaaagagcatggtagagtgaatgaaccaggatcactaggcttcttaggaatgatcttcttctgtatgatagcactgcattcatgactcaataccaccatctcttgcactttttgaattctctccacgatcaagtctttcagaaacttgtgagagtctgggattagcgctagagcgtcaacaagaggtatccgcaactcaacctccttaatattcttggcaaacatagctctacatttatctgccaacgctttcttgtgacggccaggaaatggaagctgtggttggtagggaggagggacatagaccttttctttcttcttgacagcaactggttttggagcagttggtgatgctgctgggaagataggtcaagtagttggtggagtaacgtggtcgagtggcagctccagttgttggtcgagtggctgctcgagtggttgctcgagtggtcgctcgagtggtttgtcagctcaatttttatcgagactgaaatcctgcccatcttgatttcactgtccttagtgactgtctttggttcctctctagttggaagtgcttttccacttcgcagagtgataccgtgagcatattcttatggattctgaattgctttgcctggaagttggcttatctgttttggagtagaggaagatgcagaatgtccttctaagtatctgactttggtattcagtgtttccaccttgacattcaaatcattgtagctacagtccagcttattatgtaactcagatatcttctttgccatctccatggagccagaggtttctccgtgaagcagctgttgtagcatttgtttcatgtcagcgtcaggagcagccggaccttggttttgctgaggtgcaaatccagcaaatccagttggtggttgctgcaaatccagccttcttcaacatctttgttctggaaattcccattgctggcggtatccagaagcattcagatgcgtggtagaacttctctgtaaagagtgctgagcagagacgctttagtgaagccatgatgagggcattggttggtgtaacccttgaaacgatcccatgcttcacagaagctttcaccagtcttctgtgaaaaaccagaaatctcatttctgagtcttgcagttctggcgttgaagaagaactttgatagaaaagccttcttacaatcatcctaggtggtgattgagtcaaggggcagattcttctcccagatgtgggctttgtcgcccaaggagaatggaaccaaacggagcttgaatccgtcttcacagacaccattgatttttgttaggttgtacagcctatcgaattcatcaaggtggtcgagcgggtcctccacaggcaggccatgaaatttgttcccctgaatcatcgatatgagaccactcctaatctcaaagttgttgttctggatagcaggaggtgcaattcctttccgctgacgctgatcacgtggtgcatctccagcaccaatgttggcagggccattttgttgattctgttcgtgagccatttcgagtggttgctgaggtagaaggttgactgtgtttctcctttctctgagttcgcgagctatgcggaaaatgttgtcgttgaaaaggaggttctgattgcctgttgatcgagttttcatacagcagaggtgtaccttgatcaagaagacaacaagaaaaacacacagttagtaacagaaaagaaaattgaaaaagaacttgatctaagcaagtctgaaatctgaaatataacaaaaaaacacccaattgacaatggcgccaaattgataataggtttttcagtcaattatcctaaaacaccaattatgtcgttgtagtattttagggtgtcaatccaaatgagtgtgatgctaacaatcaagatgtgataaaaagtcacatagtcaagccaagcaataacaggttttggtgtgttctaacagtcctaagtgaacatgtagaaaacagaaaatcaagcagaaataagaaaacactcgaccaacacagcttgttaccaagcactgggtgtggtcgagtaacagatcgagtaacagacagaaattgtagtaggaatactcgactgcacagtttgtcaccagacaactgggtgtggtcgagtatatgagtggtaataggaaagaaatgcaaaaactaagcaacaggtgataagaagcagtaaacaatagctgaataatcaaagaaatcaattggatgagaaattcctaaggatggggtaattgagtagttagtttcctcagtctacaagtgattgacatgctcaataaactatccctaaacaacaagttcgataaccaaatctaagtgccactgcaacagagacccttaagttaaactagtcccagactcaatcaccattgacgagagctaacctaacaggtattacgaatcaacgagttaaagccaaaacgcaccatgtaaccaataccttggtacagagccacaaatctacagcactagctcctgtaactcccaagggtccgaagaaaatggtcaaagtgatcatgggagggtcgaagctctttcgagattctatcagcgggattaagcagcacgagagaaaaatagtcacctcagtggcgaaaaaaaacaaaacaaatcgagctgattgtcccgagatttcgttttccgaagaggaaaccaacgacttcaataaaccccatgacaatgctttggtaattactctcgacattgcgaactgcgaggtgcagcgaattctcatcgatactggaagttcagtcgatctgattttccttgacactctcgtacgaatggggattcctaaaaaagacatcaaaggagctccgagtcctcttgtgtccttcaccagtgaaacttcaatgtcacttggtacaataacgctccctgtcaccgctcaaggaatcattaaaatgatcgagttcaccgtcttcgatcgtcctacggcgtacaatgccatccttggaacaccctggctatacgagatgaaggcggtcccctccacttatcattagtgcgtcaaatccttggaagtcagcgtgcatcgagaatgtcctatatgactgtacacaagctcaaaatcaaatagcaaccacaagtcgaggcggctcgcaatcctatcaaaaaagtcggagatgacctcgtagagagagtggtgattagtgaggagcacctggatcaacttgtcggcgtcggggttaatctgggtgaaagtttccgcaacaagttgatactttttctcaagaagaataagggaactttcgcctcgactgttgggaagatgactggaatcagtacggaagtcatttcgcatgagctcaatgttgaccaaactttcaaaccggtcaagcaaaagcgtcgaaaactcggctcagatcgtacagaggtagtgaattctaaagttatcatgcttctcgaagctggtttgatccgcgaagtcaaatatctggagtggcttgcaaatcccgtggttgttaagaaaaagaatggcaagtggcgcatttgtgtggatttcaccgacctcaacaaagcgtgtcgaaaggactgttttctgcttcctcacatcgaccgacttgtcgaatctaatacaggacacgaaatgttatcttttatggatgtttggggtacaatcaaatcttgatgaacccggaagatcaggagaagacatctttcatcatagagcgagggacctactgttataaagtgatgcctttcgaactaaaaaacgtgggggcaacttattagcgcttagtaaacaggatgttcaaggatctcttcggtaaaaccatggaagggtacatcgatgatatgttggtgaaatccgccttttctacgtcgcacctcgatcatcttcagcagtgtttcgatattttgaatgagttcgttatgaaattgaatccctcgaagtgcactttcgccgttccctcaggcgagttcctcggctatattgtgactgaacgaggtatcgaagcgaatccaaggcagataaacgcttttctagcaatgtcttcacctcggacaataagtgaagtccggcgtttgaccggtcgagtagctgccttgaacaggttcatctcactatctaccgacaagtgcttgcctttctaaactttacttcggaaggcgaatagaggttgcgaagacgcttttaagcagttaaagaactacctttcggaacctccagttctcgcaaaacccgaattcggagaaagactctttctctatatctctgtctcggtaagtgcggtaagcagcgtcttagtacgagtcgaacgaagtgacgagcgacctattttttacgttagcaaatccttttctgacgccgaaacaagatacccgatgatggagaagctggctttagccgtcgtaacttcagctcggaaactccggccatattttcagtctcacccaatcgtggttttaacatctctgccacttcgggccatccttcacagtccgtctcagtcaggacggctagccaaatgggccatcgagttgagtgaattcgacctcgaatttcgtgcgcggacaagtctgaagtctcaagttctcgctgatttcctgatcgaactccctctagctactgctgaatccgatgttccgagtcaaccctggatccttcatgtcgatggcgcttcatcaaaacaaggctctggagccggagttcgcctcaagttacctacgggcgaagtcctcgaacaatctttccggctcgctttcaacgcctccaataacgaagcagagtatgagtctctgctagccggtcttcgcctcgctattggagttggggtacgggacctacaagctcactgcgattcgcaactggttgcaagccagtactccggagactacgaggctaaagatagtcgaatggaggcttacctggatcaggttcgcgagctgacagcaaagttcgaaaagttcgagctgattaaagtccctcgtgctgagaattcggcagcagacgccctagcctctttagcgtctacttccgaaataaccgtcacacgaataattcccgtcgaaacaatagctcggccgagtatacgtctcgaggaaacgaattttgtcaccactcgagctatgcgtaggcgactcaacgaacaagcaggcagtcctgaacctcaacaacccgacgatgggatgatagtccagaatttgtacctcccattgccgaggacgaaatgcccgtggttagtaatcccgaggtttctaacccgatacctcacgattggggggcagattggagggaaccaattcggaattatatcctccacggagtgcttcctcccgacagatgggcagctcggaaattaaaagctactagcgcgcgtttttgcatagcaaatgacatcctttacaggagacttatttcggctccggatgctatctgtatcttcggcgaacagacccgaaccgtcatcaaagaaattcatgacgggacttgtggaaatcactccggaggtcgttctttggctttcaaagtcaagaaatatggatatttctggccgacaatgatggtagactgtgaagcgtatgcacgacgatgtgagcaatgtcagaaacatgcaccgtacatcttgcaaccagccgaacttcttacctcggtatctgcaccttatccattcatgaagtggtcaatggatatcatcgggccgctgcacgtttcaactcggggcgtgaggttcttactcgttttgaccgattacttttcgaagtgggttgaagcggcggcttattcaaacataactcaagttcaagtccgagctttcatttggaaggaaatcatttgcaggcacggcttaccatatgagattgtaaccgacaacggacctcagttcatctccgaacagttcgaatctttttgtgaaaaatggcaaattcgcctcagcaaggtaacggtcaggccgaggcaatgaacaaaaccatcgtttcaaacctcaagaaaaaactaaacgagtacaaaggtgcttggttcggggaattgcaaaacgtactatgggcagttcgcacgactcctagacgagctaccggtgagattccttttgctctggtacacggaatggaagcggtaatcccagccgagattaaagttccaagcacaagacgcatccgaaatcctcaaaacgaagccgcaaatagcgagatgatggttgacgttatcgatactatcgacgagcgacggaatcaagctttaattcggatgcagaactatcacaacgccgcagctcggtattacaactccaacgtacgaagcaggtccttcgaagttggaactctcgttctacgtcgaattcaacaaaacacagccgagaaaggagctggaaagctaggaattagctgggaaggaccttacaaaatcacccacgtagtccgcaatggagtctatcgccttatgaacatggaaggcaaaacagttagcagggcatggaactctgctcatgttaaacgtttttacatttga

SEQ ID NO: 156985 - DNA, 4550 bp, Arabidopsis thaliana landsberg
gcagctacagaggaggctttagttcactcgatcctcttactcgatcaaggcagccttagtggaagcagcagattgatctactcgcccgtcctactcgatcctctactcgaccaagggtgaccaactctacaagacttgttgatctatcaaagtgacttcggatcctcctcattccccactcaaccaaacatctgagcatacagataggagaggaagatgcatctactcgaccaattgatcactcggagcatagacacaaaggcgcagactttgcagcatcctctttactcgatccccaagatcgagtatccgtccaaaccgcctcaagtctcttgtcttctagtgaatctagggtttcaacatcttactataaatagatcactttggggtttgtccaaaggatctatgctttatctttcaatttttctttgtgtttatgaatcttaaaaccttaattactcttaatctatttcttttttgcatttgattgtttaagtaaagttgtttagcttgtttagatctacattttggtatgatttcagtaatttatgggtttgtgttcttgagaatgttgcttgagtagtgattagggttcttgaggatggattagattagggtaatctctaggttagttaggtggttagtgtttaggtttatatccttatggattcgcttggcccctatgcggtttttgcaggctaatgtgaagattcgaccatagacgtccagcgtctaaaagacgttcaaatggatgtctgatcttacgaattccagagatttgtagacttgatcaagagattagctagtctgtttattggctttggtagattgttgcttaaaccctgctctgctatgtttcatcaacgagagttgagattaggaagtggtagagttatgggggtctctgtcacgggagtggattgacccggtttttgaatctatcgtctagggtttctgccttttacctgttagccacctgatgaaccctagagttgcccttatcaatgaatccatccttaggacttctattcttcttagatttatttgtattcaccccctgattgcacttgtatttacctgttacttgtgtcacctgttgattgcattttagttcttaatttgtcacctgttggttttactcgacccaatgatcgagtagggctcttaaagttctcatttttgttgtttgaatcctgacctaggattgtttttagaaaccaaacatctctataatctggcttgacttagttgcttttgtacacatctttattgctagcaataacagtggactggactgacaccccctatacgtgcatcgacatgttagtgtttgtaggggagttgaactgaacctcacattcagcatatataagtaggcctaaaaaaaaactacttatcaatttggcgccgttgccaattcattgttgcattgttacattcaagatcacagaaaaagttaagatcaagttcttttacatttatcaagttactaactcatcatttcgtctgcttgtttttgtggtataggtactaatctttgtgcatgcaaactcaatccaaaggttctgcacacctattaccattcagagacagaattgacaaaataactcttgagttacaagaaaccaagacaaaggcagcttgtgatcataacagaccatctgctatggatcaacagtatagaccagttgacgttcaagacccacctaatgttgatcaaccaagaaacattggtgttggtgatgccccaaggaatcatcaccaaagacaagggatagtgcctccaccagttcagaataacaactttgagatcaagagtggtctcatctcaatgatccaaggaaacaagtttcatggcctacctatggaaaacccctggaccatcttgacagctttgataggctctgtggccttaccaagatcaatggtgtcactgaagatatgtttaagctcatgctatttcccttctctttgggagacaaggcacaccactgggagaagactctgaccccagactccatcacctcatgggtcgattgtaagaaagcttttattgccaagttcttctctaatgctcgcacagctatattgaggaacgagatctcaggcttcacacagaaaaacaatgaaactttctgtgaagcttgagagagctttaaaagctacaccactcaatgcccccatcacggttttaagaaagcatcattattgagcacactctacagaggagctttaccaaagatcagaatgctactcgacactgcctcaaacgaaaacttcctgaataaggaagtagcagaaggatgggagttggtcgaaaatctggcacaatctgatgggtgctacaatatgacctatgatcgctcagtgggaggagttatagaaactgaagatagacagagaaaggatatcaaggccctgaatgaaaagctagacaaactgttgctggctcagcataagcagatacactatatcactgatgaagagcatttccaaatgcaagaaggggggaatgatcaaactgaagagcactaatgtagctaacccccaagatcaagtgtatccaccacaacagaatcagtctaagccatttgttcagtacaaccaaagttatgtccctaaacagtagttcaatggaggataccaacagcataatccaccaccagggttcactcaacaaccacaacaagccccagcagctcaagatcgtgaaattaagcaacttattcaatagatcattcaaggacaagctactggagctatggcttttgacaagaagatagctgaattacacaacaagattgattgttcttacaactatctaaatgtcaagttcaaagctttgaattccaaaatcaagtatgtggagagtcagtttgcatcaacctctgctccgaaacatcctcagcaacttccagggaaagcagtccagaatcctaaggactatgctactgctaatgctatcaccatccaccaagaagatgaatctccaccaagtcatcagactctcaatactaaggacagtatgaatcaagaagggggggattcaactcaaattgctgcacctgccacccaacaattcatctggaatatagagcacacacctttgctgaaaactcgccatccttaaaaaaagctcaagattgaaaaactcaagaaagatcagaatcaaaacatgattagcagtgcctcttagccttatgcctctctctacagctaaaaggttagggatcatggaatacaagttctacaacttagctttactcttagctgatggttctgttgcacatccacatggtctaatagaaaaatctgcccgtcaatctaggaatgttgagatacctacaacttttgtggtattggacgtagatgaagaaggcaaggatcccctgatcctagggagaccattcttagcttcagctggagctgtcatagatgtcaagaatggaaaattaatctgaaccttgaaaaaggcatcaagatgaagtatgacaccagagaagcttcagagaaaccaacgacaagaggttagagttttgggattcaggacatggatgttgatgaagaaacagaagctggaaccccaccaaaagttaactgtacttctcaactcaccaagttgaagagaacttttgaccacaagaaaagagcagtgacacggacaactgagcctgacgatcttacagaagatgactggtatgagatgagaaaaaaatctaaatggcaaagcagagtcatattaagattatcttcaagggtgatgaagctgaaagatcaactatggatgtttgaaaaaagagttaataatgctccaagtggtattgaaccaaaaaagatataaactacactagctatcaaggaggacgaagatttcacaacagaatgattagcaccagaagatcagaaaggagttcccttataggaaagaagcctagagagcaagttgttgagtgaggaggaaatccctattccgacttattctccaggattgcctaaacggcccaccaacccctctgttgaagaagaacacttgattcatgattctgttgctgaagaactcctggagctctggatttgatataaagctcaggaggatacaattggaaagttaactcataagatggaagagttaaacagcttcattctggaacttcaagaaatggtcaaggactaccccaactttgaaattgaggattggtcgaaggagcctggttcagaagaagaagactactctgctgatcagaaaaaagcttattttgaagaaaaatcaaatgagtattcatcctaccatatgtcaagagaggatgcagagtatgattcaagcattgaaagttcaacaactgaagatgaggacttctctgttcctctcttcaacctttttttgactaagctctgtaagagtcaagcttcgtgacttaaaacaagctcacttggaaggaagtctcatgtctatccatgtatataaatttctatttttctttttatttttgatgtttttgtttaagtgcttcaggtttgttttagtgaccttgaggaagtcaaatgtcgag

SEQ ID NO: 156986 - DNA, 9952 bp, Arabidopsis thaliana landsberg
atgtatggtttacaggtggtgacgaggatgatggttttggttatgactatggtactggtaagtggtattctttccatttggaaagggtacatcgggttaataacttgggttaatgctaaaacctggctttctactagtaaataataacctgaccaactaaaagcaactgcttgacttacccccacataaagctagtccactacagccaaacaggacacttgctgagtatgttgatgtgtactcacccttgctctacacaccaaacccccccccctccccaagttgtccgcgttgcaaccactgctcaggagaagatgaagccgtggaagaagacttccagtagttccaagattacgacaagttttaggcgtgggttagcggcaaccccagtcggctgcctgtgaaggcgcgtgtatgtacgtttcattttcgcactttgattattgttaaagactatgtggatgtctcagacattatgatgtaatagaatattatgtccttttctaatactatttgagcactgtgtgatgatgtccatgttatgtaactgctgtgtacgtgaattgctcgatcctggcacgtacatggttcgcattcggtttgccgtctaaaaccgggtgtgacataaggtggtatcaaagccgtgttgactgtatgacctctaacctagagtagaatggtcgttctaaggattatagacccctattctcaccttgactttgatatcccttcaaaagtttgtcatatcgaacaaaaactatgttctactatatattataccttgctgaaaattgtgttttgttctaatccttcatttatttatgattcattacttgctggtcatattaattctgttctcactcttttgcttgcggtgtcttttgtagatggctcgtcttagacacactgcacgaaagtctgtcatccccttcttaccctcccgccttgctgagcgtcacgttcgccgtcccgtggccggtcagtccatttcgattcctctagcttaataactctggggacagtgctatctaagtcttggtgagtcagttaataacttcatcttttcttttcttatgagtcagttgtgtcattttaacttagatagtcattttattgagtcaaaacttttgtctgaaattatgatctatctctcgagtttattgcctggattgtttaagtactgtagattcaaatcaatccgactaatgaaaaatccagaaggccacaaaggctggagctaatctcactgttcttccttttatctcatcaaaacggttagtgctcataggattgactccttgtttataccgatagatcgactaatgtgttaaaatgaaaagtattcctcgccccaaataaaaaaaaaataataaataaacaaataaataacgagagattgagaagactttcagatagtgtgtaggggtatgaatgtttcctatgaccccattattatacattatttggaacgatcaattacaaaggttggaaaaatgccgagggtgtcgatccagtatgcgagttcccctttgtttactctctataaagaataagtctgggggagagaaagaacaccaaaaaaataaaaataaaggaatggtcgatttatcatggtatagtacatgattgagtctagaaggttcttaagcattcacttgattgatgagacccaacgatgatagcctaatggatatagttgagtgctttggcatgaaatctaggatgttgtgtgggctaacgaagaattacatggtggtcaggatttgattagattgggagtatgatcaaggtaataaaccaaagagattgggagtttctatgtttttcaaacctctttcacagattcaaccttttgttttgctttagggcaagcaaaagctaagtctgggggagttgatatgtcccggtttttactaatttctaacacagtttccgaatggtttttagagtctttctagttttttttcgtacgttttgagccatttcaggtacactcacacatctgggaactatggagcacaataaggaattttggaagcttttcagcaataaagatcttgaaggacgtttttcagaagctggtgtcgatcgacaccagacctatgtcgatctacactcttatcgttgccaagagaatattcgttttccaccaagcctttgagaagccctgaagtcttccttatttgcaaaataatccctgcacgtttttaggactatatacctaattgtttggtcattgttagacccagtttttgttcttgagcttttgttacactttagagaaaagaatccaatccctaaagagaggattctgaactcctttgctattattcttaattcatcaatgaaaactattcagattatgatttgtgtttctattgtcatgtctgagtaatcaccatgttgggtctagggagtctcaatagggatttagatggattagtagatcgaaaaccccttaggattatttttagagttcttcatcttgattattcttaatgctagttttagattgatcacctagaacttgacattagataataggtattcccgccataagtatttgttatttgaaccatcatagatgagcctaggcatttaagaaagaacaggtaggctcatagaagggctctggtttagatactaggtgaattaatcaagcttattaacaatgcatactttagcataggatttatcggcttctctagttatcttagctttaagtatagagagtttcgcggaacgccaccggttactctagaatcatagtttgagtttgagaatcgtgcgattacaatcctgatattagctagatctacaatttatatatctcccgagacaattccttagacccgatgctttaatcacttgaatctacaactcatttacttgcttatttgtcttttacattcaattacttcatttagcttattaaacaacatcataagtccattgtgtgagcatcgagagctcagtggaattcgacccttaagtgctaaagacgatcttttatttgagggagtaagcttaaggcaatttgagctatatcaaatttagcggcgttgccgaagttctattttagttcaccattagactaggtgtcattttaagtctagatattacttttctaccacctattgacgtgtttctttgtcttttggtctcttgtgtctccggtaccttcaaattgagaatcactttcccatggcagactttcacggctgtatcgacagacaatatcagggtgtcgatcgacaccctctgcagaaccagacggctacaataggcgatttaacagaaatgatctcttctacacaaaccgatcagcattcaagctacctccaatgaatcaccattagatcatttggaagtcttcaaaggcatcggttcctctattaaagcagaaggtgtaccagctgattacctactttgcaaactcttcccccactctctcgcgagcagaggaacatcatggttgcgtcaactggaaccaggttccttaaccaattggactgatacaaagaatgcattcatgaatcatttcttcgatgagtccgtgacagaggcaattcgtttgcaattttatttgttcacccaagctccagcagaatcccttagagcatcttggctccgattcaggtcttatcagcgtgaatgtccccaacatggtttccaagagagccaactcatcaacatattctacaaaggaatagactagccataccagattcaacatgatgcagcaagctcctgtaacttcatgacaagaaccactagtgaagcattaatcctaatcaccaatgctttaactggtcattcaacgcaggaattgacaaagaacgaagaatttgagccgagaaagctaccaagagcaaagagactcatgtttcggcaatttctgctcctatcctagcccaccctccaccctcatcagaaaccagaatggagtccatgttctctctccacagatctccataccaaatatgattttctctccacagatctccataccaaatatgattctctctccacaaatctcattagcaagtttgacaatctacgctctcaattctctaatctctcacctacatcagcttctatcaatgcagttacactacgcagcggaaagcagctcaacccaatacttcagcgcgaacaatcggctcagccttcatcttctccaattgcagaaaacgaatcagtgtcgatcgatacaccagggtgtcgatcgacaccaattactctgtttttcctttgtcgagtggaatcgacaattttgcggaagaggaggaaacaattcccgatggtgtcgatcgacacccagctcctgtcgatcgacacccacttcgatcagactatgtgcaaattccaactgcaagtcagcaaatcggcgaatttccttccccaagagtcctaaaaagtcaagacaagccttagatgatgttagatgcaaggctatgattaataagctgattgttgagatgcctctagttgaagctattcatctatctcctataataagaaggtatgttaagacaatggttactaagaatttgacgaaagaatgaagtgttatgatgattttagagcaaggcagcgacattatttaggaacgaatcccgaggaagatacctgatcctggaacttttgtacttagtgtcaccattaatcatgattccttcccaaaagctttacgtgatctcggttctagtgtgaatctgatgcctcgttcagttgctatgcgtcttgggtattccaatcttgagcctacctttatcactcttgtgttagcagatcgttttacccgaattccagatggaattcttattgatgttcccgtgatgattggaaagagcatgattcctacagactttgtagtcttgccttatgagaaggaacctaaggatccattaatcctagggagatccttcctgcacacagctggagcaatcatagatgtttgccaagggaggatagggctgaatgttggtgatcttactatgcagttcaatatgaacactttggtcaagaaacggatcatagaagggaaaaccttcttgatagattctttcacttcatcagcttcagatagtatttcagagatggaattagaagacccactagagcgagttttggtctcttccatagtggatagtgcagatttggacagtgaaacttctacatatactaagctgcaagatgagaccgaacatgtgatgcaacttacggttgaagaagctcttccatctgtgattccaacaccgactattaattcagattgggatccagcaaaggctcctcaaatcgatttgaaaccacttccagcagggctaaggtacgcttttcttggtgaaaattctacttatcatgttattgtgaatgtttctcttaatcccgcagagctcaccttattgctaagcaagctgcgcaatcatcgcaaagctcttggctattctcttgatgacattgcaggtatatctccagatgtatgcatgcataggattcaccttgaggatgagtctaagtcttcgttgaacatcagagaaggctgaatgcgaatctgaaagaagtggttaagaaagagattatgaaactgttggaagcagggattatctatccaatctcagatagcagttgggttagtccagttcatgtggttcctaagaaaggaggtgtcacagtagtcaaaaatgagaaagacgagctgattcctactcggccaatcacaggacatcggatgtgcatcgattacagaaagatgaatgctgctacccgaaaagaccatttccccttaccatttatcgatcagatgttggagaggttaacaaatcataagtactattgcttccttgatggatactcatgattctttcagatcccgattcatccagatgaccgggagaaaatgactttcacctgcccctatggtacatttgcttatcggagaatgcccttcggtctttgtaatgctcctgcaacatttcagagaggtatgatgtctatcttcacagacatgattgaggatatcatggaggttttcatggatgatttttcagtttatggatcatcgtttgaggatttctaagagaatctttgcaaagtgttagcgagatgtgaggagaaacatttagttttgaattgggagaaatgtcacttcatggtacaggatggaatagttctcggacacaggatttctgagcatggtatagaagttgatagagctaagattgaggtcatgacaagtcttcaagcgcctgataatgttaaagcagtgaggatttccttggacatgctggtttctataggagattcatcaaagacttcagcaaaatcgcaagaccactaactgctttactctgcaaaaaagtcaaattcgagtttacaaaagagtgtcatgatgcctttcagtatataaatcaagtcttgatcagcgcaccaattgttcagccaccagattgggatctaccttttgaggtaatgtgtgatgcgagtgattctgcagttggagttgttctaggacaaaggaaggataagaaacttcatgccatctactatgcaagtagaactcttgatgatgctcaaaggaattatgaaactacagagaaggagttgttagctgtggtgtttgctttcgagaagttcatatcttatctcgttggaaccaagggtattgtacacagatcatgctgccgtgaagtatttgatgcaaaagaaggatgctaagccaagacttttcagatggattttgcttcttcaggaatttgacatcgaggttagagaaaagaaaggagttaagaatggtgtagcacatcatttgtcacgcattaggatcgatgatgatgtccctattaacaatttcatgcctgaagagaacatatacatgatagatacagttgaagaagatgactacaaacttgatagtttgcagaatcgagtttcagtgtcgatcgacactcccattatgtcgatcgacactcacatttcagaggaagtagatagtccaagttgtgtgatggtgtcgatcgacaccactgcacctgtcgatcgacactcttctgaatcaatgagaaatgggtcaccaactgagaattgcgccgtcacagcggtcgagaaagattacccatggtatgctgatattgttaattacctagctgcagatgtggaacctgataagttcacagattacaacaaaaagagattccttagagagattaggcgatattattgggatgaaccttatttctataagcattgttctgatggagtttaaaagagatgcattgctgcaacagaggttcctgatatactatcacattgtcacagctctagctatggtggtcattttgcaactttcaagacagtatccaaagttcttcaagcaggcttttggtggcttacaatgtttcgggatgctcagaagttcatatcgcaatgttacccttgtcagagaaagggaaagatcagcaagcgtaatgagatgcctcaaaaatttatcctcgaagtcgaagtcttcgattgttggggtaaagatttcatgggacccttcccaccttccaacaagaatctctacatcctactagttgtggattatgtctccaaatgggtagaagctatagctagtccgaagaatgattcggcgtttgtcatgaaactcttcaagtcaatcatcttccctcgttttgaagtgccacgcatagtcattagtggcagaggtaagcatttcattaacaagattcttgcaaaattgcttttacaaatatgcagttcagcatcgggttactactccctaccaaacaaaaacgataggccaagttgaagtttgcaacaggcaaatcaaagagattcttgagaaaacagtgggtaaagcgaaaaaggagtggtcctacaagttagatgatgcactgtgggcctacaagatagctttcaaaactccgcttgggaccacacattttcatcttctatatggtaaagcttgtcatcttttagtgaaattagagcacaaagcagcttgggtagtcaagatgatgaatttcgacatcaaatcaactggagaaaggagtcttattcagttgaatgagcttgatgaattatgaattcacgccttagacaactcgaagctctacaaggaacacacaaaagcttaccacaacaagaagatcctcactcggacctttgagcctaatgaccaggtacttctttatgattctagcttgacaatatttccgggaaaattatcttctccttggtcaggtccctacacaatccactcggttaggccatatggcacagtcattctcaaaaacaacaatggaaacccatttgccatgaatggaaagagagtcaaacactactgggctgaaccaagattccagtagaaaagcctttggatcttcaggacgcacctgttgattaagcaactgcagaatcaagctattgaatataaacaagcgcatagtgggaggcaacccactagtaagtatacttctttttcgttctttcattcatttgagtttaccttagaatttttggttttataggaacctttggttttgctttgtttcagactatttgttatttgttttgaaacttgttgcacctatcatcttaagctttgttgaacctattgatgtgtgttttagtgatttaacagtctaactggaggatccatgtgaaaacactaaccccagctctacaacaatgagctgaattcgcaaagctatgcagaaacgactagggtgtcgaccgacaccaccctggtatcgatcgacaccactctcaggtggcaactcacgtttctctaacttttaactattgactatttttctttcgattcctctagcttaataactctagggacaatgttatttaagtctcgggaagtaagttactaacttcatcttttcttttcttatgagtcagttgtgtcattctaacttagacagttgttttattgagtcaaaacttttgtctgaaattatgatctatctttggagtttattgtagattcaaatcaatctgactaatggcaaatccagaaagccaaccaacaaacttaacgacatccattcccaacataatccacaaaggctggagctaatctcactgctcttccttttacctcatcaaaacggttagtgttcgtgggacttgactccttgttcatacttgataagtcgaccaatgtgatataaagaaagtattcctctcccttaaaaaaaatagatagaaataaatacatgagagattgataggattttcagacagtgtatagggtaggaaagtttcctatgaccccattattatacattgtttgaaatgatcaattacaaaggtttgaaaaatgtcgagggtatcaatccagtatgcaagttcccctttgtttgctctctaaaaagaataagtctgagggagagaaagaataccaaaataaaaaaaaaaaaaaaattgaacggtcgatttgttatgttatagtacaggaatgagtctagaaggttctgaatcattaacttgattgatgagacccagcgatgatagcctagtggatatagttgcgtgttttggtatggaatataggatgttctgtgggctagcggagaattacatggtggtcacgatttgattagaactgtttagtgcatggatttggtttgtatgatcaaggtaataagctagagagattgggagtttttacgtttttcaaacctctttcacaaatttgggggagttaatatatcctgatttttactgatttctaacatagtttgagagtagtttttagagtctttctactctttttcgtatgttttgagtcatttcaggtacacttacacatttgggagatatggagcataataaggaattttggaagcttttcagcaatgaagattatcgaagacgtttttcacgcgatggtgtcgatcgacaccaaacctatgtcgatcgatacccttaa

SEQ ID NO: 156987 - DNA, 6881 bp, Arabidopsis thaliana landsberg
atgtttaggatatttttgcatgcatgttgcatatttgtgttgatttcaggtgatttggagctgttggcgagctaactggaagaaccggacctgatcatgtcaaaccactcgaccccctggtcgagtagatgcttcacgacttcaatagaccactagaccacttggtcgagtagaagacatcagcacttcacgtcaccactcgaccccttggtcgagtaccgccatctctatcactcgactacatactactgccagcttcagagtcttcttcattccgcactcaaccagacactcgagcacaaggaagaaaagaagactccagcttatcactcgacctctcactcgaccacctgtgtcgagtacagttcttaatccgtcccaatactacgtcgttttgagtattagggtttggaatattttgctatatgtagcatgtactttacattttcgagaacaagttttatctaagttttattccgcacacactgtgttcttgaccttttgtaatccgaatttctctttatctattcagtattcagtatttgttcttgattttgtttattgttgttcatcctgttttcaccttgctattacactgttgttatcatgttttcatttcattcaacgtttatgttttctacaatgatgtctgagtagtgaataggtttctgaggatgggttagagtagtttagaattctcagtatgctaggtggttgagtttgattgatagatctcttctgggttagttgttcttaatgcctatagctttctgatcaactggaatttgagcccagacatttccacgcccaaaaggtgttcgctgaaatgtctgaaccactaattccagagattcgtgaccctgtaccaaggtattggttgcagggagcgttttggctttaacttgttgattcgtaatgcctgttaggttagctctcgtcaatggtgattgagtctgagactaggttaacttgagagtctctgttgcggtggcacttagatttggttgatgaacttgttgtctagggttaatttattgagcatgtcaatcacctgtaaactgaggaaacgaaattactcaattaccccatccttaggaattctttgtctgattgattttattgtttactctactgatgtttactgcatcctgtcatctgttgcttagtttctgcaattctttactgttactcgacctggtactcgaccacccagttgtctggcaacagactgtgcagtcgagtatccctgtttcattttctgtctgttactcgacctcacccagtgctctgcaaagagctgtgttggtcgagtgttttactgtttctgtttgattttctattttctgcatgttcacttaggactgctagaacacaccaaaacctgttatgcttggcttgacttagtgacttctgatcacatcttgattgttagcatcacacccatttggattgacaacctaaaatactacaacgatatgattggtgttttagtataattgacttaaaaacctattatcaatttctatggtcaaaatatgtcacaatccaatgcatttgactaattagaagagttagagatggattaggagtgtttagacaaacttatacccattttcacctaaaagaggctaaaaccaacaaaaaattgcttagaagcagtaaacagctttgttagtttttctatggtcataatgtgtcacaatccaatgcatttgactaattataagagttagagatggattaggattgtttagacaacacttatatccattttcttctaaaagaggctaaaaccaacaaaaaattgtttagaagtagtaaatagctttgttagtgtttctatggtcaaactatgtcacaatccaatgcatttgactgattatatgagttagagattgattaggggtgtttagaaaacacttatacccattttgactcatcagacttcgactacaccatcaaagctttgagaagccagaagaagccatgttagtgttttggagtcgaatatgacttgatgtcatgtgtatgattgagtataagaacttaaaccgcaacctgatcttaaaagcctaagtagtgtttccttgttagaggatacaaaggcaaagatgataagtattttgcatgttttgagcatccattggtcatcattttagcatcatatcatcactgttttataccatttctcatcatttgtcatcactttgcatgtttaggatagttttgcacgtatgttgcatatttgtgttgttttaaggtaattcggagctgttgacgagctaactagaagaagcggacttgatcatgccaaaccactcgaccccctggtcgagtagatgcttcacggcttcaatagaccactcgaccccttggttgagtagaatacctcaacacttgacgttaccacttgaccccctggtcgagtaccatcacctccaccacttcaccttcactcgatcaccctactctaccacaaggtcgattacattcatcagcttcactcgatcactctaccaccaagccgggtaccatcatttctatcactcgactacatactctatggcgagcttcagagtcttctccattccgtactcaaccagacactcgagcacaaagaagaaaagaagactccagcatatcacttgacctctcactcgataacctgggtcgagtacagttcttaatccgtcccaatactacgtcgttttgagtattagggtttcagaatattttgctataagtagcatgtaccttacattttcgaggacaagttttttatcttgttttattccgcagacactgtgttctagaccttttgtaatctggatttctctttatctattcagtattcagtattcagtatttgttcttgatttcgtttactgttgttcatcctgttatcgttttgctattacattgttattatcatgttttcatcatgttcaacgcttatgttctctacaatgatgtctgagtagtgaataggtttctcaggatgggttagagtagtttagaattctcactatgctaggtggttgagtttgattgatagatcccttctggattagttgttcaatgcctattgctttcagatcaactggaatttgagccagacattttcgcgcccaaaaggtgttcgatgaaatgtctgaaccactatttccagagattcgtggctttgtaccaaggtattggttgcaggaagcgttttggctttaacttgttgattcgtaatgcctgttaggttagctctcgtcaatggtgattgagtttgggactagattaacttgagggtctctgttgcggtggcacttagacttggttaatgaacttgttgtctagggataatttattgagcatgtcaatcaccggtaaactgaggaaacgaaactactcaattaccccatcctcaggaatcctttatctgattgattttattgtttactctgttgttgtttactgcatcttgttacctgttgcttagtttttgcatttctctcctgttactcgacctgatactcgaccacccagttgtctggcaacagattgtgcagtccagtgtctttgtttcgtttactgcctgttactcgacctgtcactcgaccacaaccagtgccctacaacgagctgtgtgggtcgagtgttttactgtttctgcttaattttctgttttctgcacgttcacttaggactgctagaacaaaccaaaacctgttattgcttggcttgacttagtgacttctgatcacaccttgattgttagcatcacacccatttggattgacaaccttcagtactacaacgacatgatagtgctttaggattaattgagtaagaacctattatcaattaatccaagcgatgtttgatccaagtgattcttctcttatatcactcattgtttttctaatcgtcatgtaagtaccaaaggatgtgatgtaattttcacaattagagaagtatttacataaataaacatgttaatgtaagtgttctaaaaagcggtcaccttgaccccaactaggcgctaggttcttatgcgacacctaaacaactgtttaccccgcctaaactcgcatatacctcgttttaatgtatttttctagttttcaactaagtgtatatttatgtaaaccagtataaatgtttatgtaatgtttgatatagttacatgaatattttttctgtttttgtttaccattcaacatatttattattttttagatattttctataatatatatgtttaaaatcatatttataatgtttagattataaatgcctaaaattgctttccatactaagcgctaggcattgggtcaccacttaattagcgcctaatgctttcttaaacattggtaaacataaaagtcaacaaaatactacaaaggatctagtgcatattggaagagagcccactaaacataatttgataaccagataaaattcagacgacaataagttagtcggtctcactctgaaaaattcaagactcggaggtggtggaaaatagcactagactctatgcataaaccagtttcgtttcattctattgatgtgttactttaaaatattcattctatttgcaaaaagaggttccacgatatcttacactttaaaactataacaataatattttatttttattttagtattgattatattatttttaacaaaataataaccattaatatcatattttagaaattccttagttgttattataggttaagatttttaataacttttcgatatataaacgtaactaagtatatattaaaaaacaatctttaaaaaaaaaatacctgcaaatcagttttttgagaaaaaattctttaattaaacaaaaaattttaattttttaatatatgggataatatgataatataggcaatatatcaacatgtgccacaattatgttaatggcaaattttgagaaactaaaattattttacgctaaacttttctttactccgtcttttaaatatatatacatatctatactattaagagagaatgagggacaaaacatttctatgccattttacaaaaacacgttacaggaaaaaagcaaacaaaacaaattaagggtaaaaccgtcattatttgtgctcttcacagccgacccgagcagcgaccgtaaccgacccgtttcaatgacgcgcagatcctctttctcatgcaatgggcctcgtttctatttctcatttggcgtcaaagagagcagttagcccatttgcgttaaacaccactcttagcaaacatttattgctcaataatttgcctcctttccaagatattcttagttcttgaagatattctacaaatcaccaaccaattatgtatgattcctatattctattgagatagtatatttagttatgatttcatatataaaaatatccggtgttgctctagggtttcagaatcaagtcctaacagtataaatactcaagtaatatcatcaattctagagcatcacttttctttctcatctatacacataatcaatgagtttacctttaggtttaacgtatcttagtgatgtcaaacctttcaaaacgaattggcgtgtccgagtcaagatccttcatctatggaggcaaaccaaagatgcatcaggagaaacgttagatgtcattatatgtgatgaaaatgtaagagagaatgctattgattaaatatatgaatctatatatatttcggttcgaaacatttaacatgttcttatgtatttttgtttatttggttttgatatagggatctaagatgcagatcaccattagaaagcattatattggcaagtttcacaggtcactaaaggttggtgattggatgattattgataccttcagtttgagtccttcgtatggcaagtacaagatatcgagtttgagctatcgaatgggctttaaccataacacagatgtgattaaatgtgatcctgtatcggatagtgtttttctggatctaacagattttgaaggggttaagaccgagagttatgataaaaatgttctaattggtacgtattttctaaattccctatcattaggtttaactcaactaaatgtctgttatggattttaatattaacagagtattatttacaatgggagacatattaggtcaagtggtgagttggaaaaagtgaatgatattatggctcaaaacaaacgaaacaaaaaactagagattcaaataagagatgctaggcaagtagaacattgttttcatataatttttgattcataataactatgttttcaaacaagtaatattgaaatcgtttgttactgtattaaagcaatgagggtttgtcttgtactttgtggggtgcgtttgctgagaaaatatctagtgctttaaaaagtgtaaagcatgacgagaagacagtggttctgatatgctatgctaaaatcaataattttaaaggtattcactcttcccttaactatgtctaaagtagtcaatatttgatgtatatgtacatgtctgaattaacatatattgtctaattcagttataaaggtgagattagtattacaagtgcttttgatgttttggatgtcataatcaatccaattcatattcctgaggttgaactgttcgttaaatcgtaagtgcaaatatattatgaccttctttgttctgtttaaattcacaaacattttaaacagacaaatgtggatttgcagactcccaagtgatggtcttgctctcactattcaagataattactgaaccgtgacataattaaggtgaaaacggatattttttttttattatcctgccaaaaagattgttgctttacttgctgggaaagaagaaaataaatttcccctaattccttaatcactgcttttaggtgaaggacc

SEQ ID NO: 156988 - DNA, 836 bp, Arabidopsis thaliana landsberg
atgagcatgagcatgagcatgaacacggtatgttatagtgttaccaaataatggccttattacttaataacgatcgcctacatgcattgattagtttgcttctgaaactgcagagcatcaccattctcatgatcacacccatgaccctggtgttggttcagtcagtatagtttgcgaaggagacttagacctcgagaaggtattaacccaatatggctcaagttgtgtcacatgtgatgcataaaactgtagcacctgacgtgttacttataattaaaacgattgttgagatgtgcgattgattacttgcatcatctataaccttagttttgaaaatggatcaggctaacatgtggcttggggcgctattgtaccaacgtagtgaggatatctacagaatgaaaggtatcctctccgtacaagacatggacgagagattcgtgtttcaggtgaccaacctttgtcattattttgatcatttcggatgaattctaaagcatcgaagccttgtgatgtaaattatctctgacgtttgtggtttataatggttggaacagggagttcatgaaatatttgaaggatcacctgaccggttatggagaaaagatgaaacaagaaccaacaagattgttttcatcggcaagaatttgaaccgggaggagttagagatgggtttcagagcttgcttgatttgattataggaccaaatatttaaaatcattccattttgtaatcaactggtcaatagatttttgaacaagaaatatcgtctaaagcttgacactaactacaagaggctgaatcaagaacatattaaagccttcacggtacaaaaa

SEQ ID NO: 156989 - DNA, 1423 bp, Arabidopsis thaliana landsberg
gtgctctcttttccactatcgccatgattgctcaaacgtgaattgaatgatctgatccataatctaaaaaattgagctttcatcagtaaccgaagcaatggcacggaggtctggaaattgcatgagatgtctagtgatattctcggtggtttcagcattattagtgtgtggacctgctctttactggaaattgaataagggtttcgttggatctgctcgtagcaccaattccatttgtcctccttgtgtctgcgattgtcctcctcctttgtctctcctccagattgctcccggtactgttgttacatctgggttttcaatttgattcataaattaggagactttataaatctggaaatgcttagatcgtgcttggaacaatcttgtggtttctgtgatggatctttctatcaaagctacggcttttaaattgtatacataagaagagtctcaatttctaatgaagtttcattcttttgcagggcttgcaaacctctctattacaggttagatctcgttcccaagctttgaaactctgtatgtattgtttcttcagtttctctagtatctctactgatttagtatgaatgagaatgcctatctgatgatttctcactgagaacccttactgaatcgtttgaaaacctaggaatttgtgaatcagtaaccaatgggtgcaactatatctcttaaagttagactttatttgggtttcttgatcagacataggagcctaagattctcttatctgttgccaattgcattaggaatacttttaacaaatagtttttttagttatctgttgagaagatgttcctcttttagtccatggaaaagtagaatatgatatatctgttgacttgtggtatgtatcaggttgtggcagcgatgatccagagctcaaagaggagatggagaagccgtttgtggatcttctcacagaagagctgaagcttcaagaagcagtggcagacgagcatagtcgtcatatgaatgttacacttgccgaagctaaaagggttgcttcacagtaccaaaaggaggctgagaagtgtaacgctgccactgaaatttgcgaatcagctagagagagagctcaagcattgttgctcaaagagcggaagatcacttttttgtgggagcgcagagctcggcaattaggttgggaaggtgagtaagtaattcactgtttagtgacttcttcacagtctactctgacgagtttctcaatggaagcaaactagattttctcttccgtatacaactcgtgagaacatgggaatcgcttaattcgcaaggcaatgtttttgtctcacatgttctctatatatgtagttcttttttgttttgctcttggatctagacattgctaaagaaagggttggccttgtattgacttttttcttcagatatatatttgtca

SEQ ID NO: 156990 - DNA, 479 bp, Arabidopsis thaliana landsberg
aggccaatgatggacgacatggtcaagaagaaaacctgcacgctgttaccaaccgagtgtttagttttataaacaccacaaatgccagttccgaccacgctctttcagcaggactacactcttctggaggaggactagaggaggatggcatccaaccccacatctcctgtactttgatcgatgcaccgaacactgcatactgtattataagatacttagcagtgaatgttattgcatattcaggtgagacttccatattgcggggctatcctctcttgcaaaataccaacagagtatttgccataaccggttttgattaaaacaatggtattttccaaattttctacgttcgttacaccaatccacttttgccatcaccactccaccggcctccattttttccaatgcatcatttgtcatcgtttatccttttcactagcaagactcggtactctctcttctttttagctttatattag

SEQ ID NO: 156991 - DNA, 251 bp, Arabidopsis thaliana landsberg
tatccttgcgcttgatccagattcggttcagattggagctgccatggaacgtatcatcggcggcaagtacaagctcggccggaagatcggcggtggttcgttcggagagatttttctaggtttgtgttctcctctgttcttgtccctttggttttccgagtttgctttatgatttgaaattgacgcgtcttctgtttgttgttttcgcagctacgcacgtcgataccttcgagatcgtagctgttaagatc

SEQ ID NO: 156992 - DNA, 671 bp, Arabidopsis thaliana landsberg
gacagaagtaatcaagcgcaagtgttcaataacaaaggcccttgtctttaaggctgatagatctttctttgaccgacttcgtcaacaggtgaatttagcttcatcaattgattgtctgatttttatccgtctgttgcttttgaagttaattgtttgtgtgtcatcagatctataagctggagatggaacaaaaaagagtagaagaagatgcacttgtatataattggctccagcaacagcttaaactctcacctgcatacaaaaaggttaaaaaccaaactcaatcacttgtttccaaagattgtgtcctatgtgtccaaaacctcaaaaatctgttcaatgatgtttctgattctagattaatcttactgattgttgttgctgtctgataaaccagtagagtcttatctcctgtattggactctgttagcataattgggacttcccttgagatttttggttatctctagttaaagccgttaatactctttatgatactactataggttcttgaaataagcgcttccatggaactcaaagacaaatcgagcacagagttagacaatccagatgatgaattttcagacatttccttcgaagagctattggaacaagaaaagaaagactcgttttggtcagcatttctctccatctctcctcaagcttattag

SEQ ID NO: 156993 - DNA, 626 bp, Arabidopsis thaliana landsberg
  unsure (1)..(626): unsure at all n locations
atgactcaatctcttacacttcgatatctcctcaaacacatcaccagacaacaaatttcttctaacagatacaaactcaagaaccggaatatcgcagatccgaggcaacaaaccggtaatgccattgtaagagaaatcgaaaccaatgagattgttacagtttacgattgattcagggattgatcctgagagattgttatgagacaatgaaacaaactttgtcttgtaacagaatttaaacagagaatttggaatctctccaaagaacgcatttttcgacaaatccaagaaccttaaattaggcaaatcaccgataaattcaggaaccaaaccagacaatgcattggaactaacattgatcttccataaagtctgtaactttaagtaatccaaaggtaaattacctgtaatcctgttgccaaacagagtcaaaacccttaaagaagttaaaccagacaatgccggcgttagggttccggcgagactagtgttccaaagaacgatcttttcgacgaatccttcttggttacaagannnnnnnnnnnnnnnnnnnnnnnnnnnnnnnnnnnagacccaagaagctaaactgttgtacggatcatcgttgatgttgtctttgaattgaa

SEQ ID NO: 156994 - DNA, 6969 bp, Arabidopsis thaliana landsberg
  unsure (1)..(6969): unsure at all n locations
tccaagattcttcaagcatgcttttggtggccaacaatgcctaattacgctcaggagtttgtatcaaagtgtgattcatgccagagaaaaggcaacatcggcaaaagaaatgagatgcctcagagtccaatcttggaagttgagatctttgatgtatgggggattgattttatgggtccattcccatcttcatacggtaataaatatatactggtcgccgtagactacgtatcaaagtgggtcgaagctattgctagtcctaccaacgatgcaaaagttgtgctgaacttgttcaagaccataatcttcccaagatttggagttcccagagtagtaatcagtgatggcggaaagcatttcatcaacaaggtttttgagaacctcttgaagaagcatggggtaaagcacaaggtcgccactccttatcatccacagacaagcgggcaggttgagatctccaatagggagataaaaacaattctggaaaagactgttgggattacaaggaaagactggtctgcaaagctagatgatgcattatgggcttacaggacagccttcaagacccccataggtacaactcctttcaatcttctctatggaaaatcatgtcatctacccgttgagctcgagtacaaagcaatgtgggcggtaaaacttctgaactttgacataaaaactgctgaggagaagcgattgatccaactcagtgacctcgatgagatccgtctagaagcttatgaaagttctaaaatctacaaggagagaaccaagcttttccatgacaagaagatcatcactaaggatttccaggttggtgatcaggtgctgctattcaactctcgcttgaaactctttccaggaaaacttaaatccagatggtctggccccttctgcatcactgaggtccgtccttatggagcagtcactctagctggtaagagtggagattttacagtaaatggtcaaaggctcaagaaatacttagcggaccaaatccttccagaggtgacatcggttcatctccaggagcttcttgatgatcaaaggagtaaaggagtcaagctaatgactttaaacaagctcacttgggaggaagtcccatgactatctctgtgaataagtttttcttttcttgttatttttgatttttttaagatgtgtttgtggttcttaggaatagaggaataacgtgaaggtaaagtgaaaattcaaaacttttactctatagatggcctagagatcgaatacacagtacagtggagtgcaaaaattttaaaactttttgttgcatctggagaccttgcactcgagtgtattggtcgaggatgagtgatgtttaaaacccaaaaaaatttaaatcatcattttactcgcccaacaaaagatacagaagatacagagacttacagggagttcaacatgtttatagaggatttcctgaggttttcccagtaaacagggaacaaagtccaaagacaagtcaacaaagtgtggaccacgcgttttgttcctgaagataagatggagagagaatcacagaatcaatctccaccataccttttgaactcgaccacacattccccaaaagtaaaacctactcgacccatctctcttcatctcaccaccgacaatccaatttctctagtcaaccatgaatcgccatctttcaccaaagagttactcgactcaacttcacttgagttcgtcgctatactccaccatttcacttttccgttcgccgtcactttgttctcaccacactcgaccttctctgcgccgccacagtcgagttccccacctccttcaccgtcgaagtctcaggaactagtcgattacaaccacaggactcgaccgtcaacttgtgattttgtccaaccaattccggctcatcgaagaagtactcgacctctggtgctagcaatcaacatagccactcaacttcaaaactttactcgaccaccggtctctaatctactcgatccaattcttgatagagtaactggggagcactttagtttactcgagtattatactatactcgaccaaattggtccatttcattgcttgttgattacaattttggtttcattgttatctttgagacagacctattgacatttgagttttgagttctaaatcttctgcaggacaatcatgagtaattatagtggcagttcttcagttgatcctgactacaacatggatgagacagagtcgtcgtcttcaaggccagagagagaacatagagaatatgatagtttcagaagaaaagctgagatagcccgagggaagagagcaatgacaaagagatatgagcttatagatgaggatctggaagacgagtacatgcctgagcatactcgaagagccaccaaacttctgcataaacctgatgtattgtttgttgaggaatatattaagctcttcaaattgaaagagttctgtaccacaaggtattcatgctcgaccacactcgcacaacttggattgctggaggatgttcagcacttgtactagagttgtcatctggacactttaatggcttatccgtatgtagcatatgaagaagaaacgattcagttcctctccacactgcaagtggagctttaccaaggtatgacctttgatgatttggaatgcgaaggattgggattcttgagattctctgtgtatggtcatgagtataggttatcaatcaagcgcttggaaggattgtttggtttccccagtggaacgggtactaagcccaagtatgatagagaagagttgaaagatttagggatcaccattggcaactctgtaccgctgaattcttccaggtcaaagagcaatcagatacgtatccctgctgtaggtactgccagcggtctatagccaatgtactctactcttgagagatcacaaggactgaactaattctgatatggagatgatcgctatggctctcaagggaactcttcgccaaactaagaacagcatgtctctccaaggtgaaatcaatgacacacctctctctgtactttttctgatccatctgtgtggatacaagagctgggctgtcggcaataacaaaagagagcactaggcgctctgtgcataggtggtgttgtgacaccgattctgatcgcttgtggagtcacaatcacatctgatggactcaagccacgggcaatggatatcgagcatctacgccactgcaaattcctagagttcgcaatcgttggcgacttgcaccggttcaggtttgagcactctacagataagagagctaacatccttctccctagccctgaggtcacacggataatagagggagataacattgattttaggcctgagattggacgcctctactatgagaacgctccgccattagatgaggacgatcttcttcaagaagctgcttcggatgggatggatgaagatggagcagtaaagttcgacactagcatgtatcactttgctgaacatgtacctccagcgaggcagagcaagagcttgactgaagctcataagaataacagtaaattgcagaagtggggcaagaagcaggacaggctgatcgccaagtgcttcaagcttctgacagacaagctgagttgctcttcctccaccactgctattccacaggtacaacctcctatggaaatgccatcgaggagaattaatgcacctgcgcacaggcctgagnnnnnnnnnnnnnnnnnnccacatgtccaggctaggcattcgtcattcgaatcccgggaacacaagagaagaaggaaggctacactcactcgatctagcagcagatcacgcctcattcactcgaggagatcactcgaccgtggtgctggccgcagcaaaaggagagaggtcgagtttcctcagagcggtgctggccgccacagagctgatgaggtcgagtacccacctgctggagctgatacagaacaaggcggttcgtctatggcatgggagcaatcgcaggcagccattgacgagcaactacgttcattcttcgatgaggtaagcgcttcacttcaccattgtatttaccgtatgttgtgatttgtttcttcattttttgtttctgtgattggatttgtcctgagtactctcttccaagtttattcacacaatggactgtgtgatttaagtttgggggaggactcaggaagtgtgtgctgcattgtgtataattttgagtctgcattcatctaaggcatagaaaaaaccaaaaaaaattgaaaaaattcagaaaatgatttcataaaaaaaagagtgttcatgtagttgcattacagttaggatcgagtctaaagtgtttcatttaggattgttgcatatgcataggggataatgatgagatagccttgtaagcattttggttcacctgataaactcagtgctctcgttgctagttgtctgttgcgtagtcaatgaatttgaaataaaactgaaccatgcctagattgctctactcgaccacactgtcatgatctgataccattcccaatcaatttgaacctgaatctgatctttaattatcatgtctgcatcaaatttgaactcatggataccctaaaaaacttggattttcttattcattttgatcactcttgtaatccaagtagctgactctccttattagagcagttaacccaaacccaaacctagactttcttccaagccctatatcacttgtgagtgtttgtgaggtcttattccgattaagcttggtagaaagtgttaggttcgtaacgacagagatagtgtctcatgtagttctagtccgcatttttcggactagataggactaggtgggcgcttatactttgggttgggatgtgtttaaaagaaaaaaaaaaaggggttgattcaatgataagaaaaggtagaagactctaggggaagtaagctaaagaagcagaaaaagtctaataaaggttttgggatttgtaaagaaaagaaagagttcttgttagctattggagatgggcaaaagcccttggctttaaaatgttaaaaacaggaaccttagttgttaaagaaatccatggtgtagtcgaagtccgtatgagtctttgtctttgtgtcttctaacaaggatacactacttaggctttaaagatcgtgttgcggtttaagttcttatactcattcatacacatgacatcaagtcatattcgactgcaaaacactaaccaagcttcttctagcttctcaaggctttcatggtgtagccaaagtccgtatggtgtagccaaagtcatacatataacattgttagaaggtttaatacatgcacatgtgtattgaagggattaatgaattgatgtcaacaccaatgtataggtcaacataaagtcgatagatatacacattggtatataatgcaatataagcattaacacgataaattcgacttatagttcaaaatatacagtaaatgatcttactaattctggcaaaaaaccatgtgatattattattttataatgttaaattcttatagaatatgttcattaagattattgacccgaaatggatccagtgtttatggtttagtataaaccttattggcttattgagataaatattcatgtataacatatctggttatttgtaaagtccatatgtagacaaacaatgtttatgttttaaacattttgagtggataaacaagaactaaatatattttgatattaaaaccgtgatgtaagcagtataaatggatctaaagttgtaacttatctacataatccgtatgataagttatcaacgatgatgtacacctttgaatatttagcatataaaacaataaagtcatagccatcaagtataaacttgagttacaacgaaacatagaaatcctggtttattatggttgtgatataatatctttgaacctaagctttgtaatatacactcacgattttatagatcaaagtatataacctcattgcggattgtttaatgatatcacacctaatatgacttgatatagaatcgtgcaaattaacctactatggctcataacatctaggtgtaaaatttcatgtaaaataatcccaagatatcaacatgattaagtatacgatgtcaataggtatgaacatacatatatcatgtcatatacatttggacttgtgataagtgtgtattttgcatgttttgagcatccatttgtcatcactttagcatcatatcatcactgttttataccatttcaaatcatttgtcatcactttgcatgtttaggatagttttgcatgcatgttgcatatttgcgttgatttcaggtgatttggagctgttgacgagctatctggaagaagcggacctgatcatgacaaaccactcgacccagaggtcgagtaggagcttcaagatctcaacagcgcgctctactaacaggtgcagtatcaccatcatcattcactcgaccaatcactctaccacatggtcgagtaccttcatcaccttcactcgatcactctaccaccaagatgagtctcaccatcatcattcactcgaccaatcactccaccaacatggccgagtatcaccattatcattcactcgaccaatcactctaccaacatggccgagaatcaccatcatcattcactcgaccaatcactctaccactaagtcgagtactacagccaccatccactcgaccaatcactctaccacatggtcgagtcccttatcatcattcactcgacgtccttactcgactgccagcttcagagtcttctccattccgcactcaaccagacaatcgagcacaaggaagagaagaagactccagcttatcactcgaccattcactcgaccacctgagttgagtatcgttcttaatccgtcccaatactgcgtcgttttgagtattagggtttcagaatatttcgctataagtagcatgtattttacatttttgaatctaagttttatttttcgtagacattgtgttct

SEQ ID NO: 156995 - DNA, 2297 bp, Arabidopsis thaliana landsberg
  unsure (1)..(2297): unsure at all n locations
atgggccgtagcaaaagcaaaaggcccattgcaactgtgaagaatagacgaagccttaaaataacaccaattcgctactttactcttaaaataaactctccactaaaaaatatgcaatcactactcttgccgccggcgagttcctccggcgtatccgccgtggcgctacggccaggtttccagcactcatttaaccaccaaagcctctctactcgctccctgccattgtttaatccacttctcttcgctccaaagaagaaaaccaccatctcctcataccaatctctgtccgtctacggtttccaaatcggaggatctaaacctagtttcgcaccatccacggtggcattttcatatccgagttctccgtcttnnnnnnnnnnnnnnnnnnnnnncgacaaagcaaaactcgctcaggttctctctccttctctttatccatttcttcggctttttcacaagttagctgaaattgaatgtagaaagagagaaaatgatctaaaaaatcgaaatttagttacatctgcttttgatttgaggaagtagataaacaattttggatttgagttttcagaattgagattttgaagtttttagtgtgaagaatctttatgcagtaactgtattggtgtggaagagattgttttgttttttatgagtatgggtggtttattcacaggttgcaaagagattagagaagacttcaaggtacttcaagaggctagggagtattggtttctgggggcagcttgtgtcaactgtggttgcagctgtgattctatccttctccattgttgtaactgggaaacctacttcacctgctactttctatgctactgctagtgggattgctgctgcgtttgtctcggttttctggtcgtttgggtatattcggctctccgagaggctccgtcgaacttccatcgaccctgccaaggtaatatatgtcgttctcttcattgtagttcaatcctaatcagtgaacacccatacaatagcgcttgtaggtacgtatggtcaactttgtttgttaaagaccggtctgtgaaccttagatttagcagcagctcttgaaccttggatcatgtgcgagtcctgaagctgatcgtatgatccaggcaaggggcacaggtctcccaatagctgcaactactcctacttgactcctgctactcagactagtacttttgagtctaaagggaaaaatccagtctcaatataggttcgtgttgatgcacgcgccgcctcgcgctgatgttgtgaaaggtttgaggagcgggattatggtaaatattttgggaatgggagcagcactactcgggatgcaagcaacggttggatttttagttgcaaaggctttaacaacttcagcaaaccctttctaccaaggagtctctcagggatacagtcccgttcttgctctcgatgtcttccttgttcaggtattggatcaaaagctctaccataagtcttactcaatatgtaaaaatgtgtacgttcactgtttgacgttagagctcgctttgtgcaggcatcggcgaacaccttactctctcatttccttggccttgtttgctcgttggagctgttgcggtctgtgacagtgcccaattcggaatctgttgtagttcctaaggttgcttgagtttctacctttttcagcctcacttcatgtattcataaacgttgaaaactggggcttgtttccttttataaccgagaaccaacgattgctgattcaatggctttgttagcaacattattgaactacataactcaatatcacataagagtaacttttttttttttattgtctctatatcaatttcaagcgctaaagtagaaaaaagggaacaaattatcgagctttaaaccatttgcttgcccgaaacttccccaatactctgattagaatcacatttggttcctgaagtgacacagacatggacttctccatccacagtgtctatataaagagagaatcaaatgaggggttgattcatgacaaaaccacactcaagtctcaacttctctaattcatctacaatcatagcttgttacgtcgcctgttgcactctttacttagttttaccttcccactcagtcctattctgtcttgttttctttcactgcatccaacgaaaagagtactaacagattagtattggtctatgaagaggttatcactatggtgtaatatgttcaaagaagcaaatatgcaactggtatcaacacagaacatgcaaaattgatgtaccactgatatctatataagcacttaacagaacatctaagca

SEQ ID NO: 156996 - DNA, 2618 bp, Arabidopsis thaliana landsberg
ccagcaatatcgaaatcgctgaaccatcatcattcaccctaatcggactagttatcaatctaaccggtttaatccgaaccagcaaactagatgtcctcatgcgggtttgggtaggccaaaatataggccaacttgggccagtcttattttccaaaatacacaagttttgggtttaattatttctctttcttcatcgggccatagagaaagcccaatacatatcgggaagtcgaagaacaatacattttatcaaaccaaccaaaggatcttcttgcgatgaatttaaatgcactttatcaaatacataactaaataacactgtatatcaaaaaagaaaaattatgtatatcgccttacctttaaaatacattcaagaatacagtactgatgtagaaagtgcataactgtatatgtaaatgaaatgatttacatgcagttatgcatataggcagcatgaatattgttttatcatctcatttcttggcttttattttttaaaatttttgtcctttttttctaaaacgagaaagtttcagtgctttaaaattaatgatgaacacctgctagctttaacatccaaatcacatgatttatgcacatcagctctcatgatcaacattcccctctctctttttggtttttaatacaattcgcctctactttagtaactaactatttctaaacgtctatatgtataaaaagtcagacacattttctaccaaatcattttgtgaaatttgagtctctcaatggcatttaagaacaataacaataccaaactaaccaaaattatcagtcacatctctcaaaacctatcattatctaccttatggaaatccttaacagtttccggtgctctacttttcttgttacacacatttgcattcaacaatcctcataaaatgatgacccataacctttttgcgcctcttgaccttagtttctcctcctcttcatcttcctcctcctcgtcagtatcattgtccttgcaaataacaagagagcctccaacaaatatcagccatctattttttgtcaatgatggtagcccaaacacggggagagataagagaggctacatagagccttggtggagaccaaacattacaaaaggatatgtcttcctcgaaagaccacctggccctgatctcttgccttggcctcaacaatctcctcccttctctgtcaacaaagagtcattcatcacaaacaaattcaagactcagatccgccttttttattcgcttcaagagtcttttaagaaggcgtccaaagagacaagatggtttgtgataggagatgatgatactctcttcttcttggacaatttggtgaaagctctcgaccgatataaccacaagaagcactattacgtcggaatgaactccgaaaacgtttggtccaacgcgattttcgcttttgacatgggatatggaggcggcggatacgcattgagctatccaaccgtagtaacacttctcagcaacatggaagaatgtatcaaaagataccttggagtttacagcgatcttctctcatttcgttgcttggccgacttgggaattgatcttactttagagaaaggcatgcaccaggtagggttgttcagtccaaatttatcagttgtttagtgtgaaaagagtgactaaaatagtaaccaaagattcttgtgtctcactctgtcttccttgtggtgtatattacataccagaatgatctacacggtgacatatcaggtctgttatcagctcatcctcagtctcctcttatcagcctccaccatttcgatgtaatagacccgatattcccaggcatgaaccgccagcaatccgtgaaccacctcatggaaaccgcgaaaaccgaccagtcccgtgtcttgcaacaaacaatatgttaccaaagaggatataactggtcagtctctgtctcttggggctactcagtccacatttaccaatctatatacccaagaagccacctgaaacgccctctcgaaacattccgaccatggaaggatgttagaataccggcgtatggatttaacactagacgggtgacgaatgatccttgcgaaatgcctcgtcagtttttctttgattcagttgtggaagacaagaaccaaagcttggtaactaccatctacaagatgaaaatggaaaggcgtttgcctccttgtttgctaaatggcaaccattcttctcgtaacattacacaagtccgagtcattgctactactatgcacaagatggtaaccactagaccctctatactcttttaatcaaatcattaatcaatttctatattatctgaagtcaacttcaaatattaaacaggttgagggaatcgaatgttgcgatgtgcaaaatgttaacagtacggagattttggaagtgaagataagagattgtcatatagatcaagctcttgcttagactaagtcttatgatacatgtaatcatcaactatgattgatctgaaaatctttttcatttgtataacagcagcatctgtcatttattgatatgctgtacaagttccaacctgttgagaaaatcagatcccaaatggggggaatcaagcggtttcaaaccccaaatgcataaagtctttacgtggtt

SEQ ID NO: 156997 - DNA, 1020 bp, Arabidopsis thaliana landsberg
tcctctatctaaatgcaattgcaggcactccttgtttcaggtggcagtgatggcttacttgtactgtggagtgccgatcatggcgctgactcaagggaacttgtacccaagcttagcttaaaggtactcttttatgcctactctttcattcaaagttcaagagaggatattaccatgaccgttcaattcttaggcctggaaagatttgccagatttggttacagctgaggctaaggcaccattgttcttagttccagtgaaccttctgaattgatttctgtgtctgtttctgaatgttggatacttgcatttagatattctttcattctttttataaaaggctgagtaatgattaggggactatgacatgctcgtgcttttttttttttttttggtgtaatagacatggtcttgtttgcttaattgagtggataatttccacttctctgttatactttttttttttttttcctaatcccttcttggctccttctaatgtttttgttctgattgtattaggcacatgatggtggggtggtggctgttgagctgtcaagggtaagtgggagtgctccacaattgattacaattggggctgacaagacattggccatatgggatacaatgacatttaaggtaatggtgtatctcatgtatggatttttcatattttcccgatctcatttattaacatgcatatctactttttttctacaggagctacgtagaattaaacctgtcccgaaactagcttgccacagtgttgcatcttggtgtcaccctcgagcgccaaaccttgatattttgacttgcgttaaagattcacacatatggtatctttgtttaagatttggtattgtatatggtagaatatatttatgtatattagatgagtggtctaattgtttgaatttttgcaggtctattgagcatccaacttattcggccctgacaaggccgttatgtgaactttcttccttggttccgcctcaagtacttgcaacccacagaaaacttagg

SEQ ID NO: 156998 - DNA, 916 bp, Arabidopsis thaliana landsberg
cagagggaaacaagaacaaaaacgtttgcttcattctctaatggcagccaccacgagacggttgctttactctgtgtccaaaagattctctaccgccggagtgcggcggagctatggcggtctgccacaatcgaattccaaatctcctccgtcttcttctcaacgattgatggaattggaatctgaattcagtgcccacaagtaaagtctctttctttcctcttttggggttctgggttttgcacgttccatcaaaagttgtgatatttgggatttgtttggttcgatcggacttgtatgtatatatgtacatgccatagctgtatagagctcatgattctgaaacttgagaatatattaactggagtggtgatctttggtttttagttattgattaagatccatgatgacgactcataataaagctgataatcgtttattgtaacggttcatatccaattcgattcctatcctttgttctttcttttagaatttgaaaattatgaactttagcttcgtcttaatgtaattttctcttctatgtgttaaacttcagttaccatcctgttccggttgtgttttttcgcgcttatggctcaactatatgggaccctgaaggaaagagatacattgattttcttgcagcttactctgcagttaatcaggtaatacaattccaaatccgcttcccgtcactctaagatacaatatgtggagagtttctacttgttagactcattgtttgtgttttaatgcttaactttgtttattgttgcagggacattgtcatcctaagatcatgaaggcattgcaggaacaagtggagaagctcactttaagttcacgagcgttttacaacgataaattcccggtatttgctgagcgtctcacaaacatgttcggttatgatatggtg

SEQ ID NO: 156999 - DNA, 813 bp, Arabidopsis thaliana landsberg
cctgacggagttcccggtttgataccaaagatttttgggttttacaaaggtgaagtttcacccctttgtatatcggtgtaaagcaaaaaaaaattagacgcaaagactgtgccttataaaattctgtctcaaagatgggtttcagtgtaaggtcttgcttcaaagtcagggctaactgttttattacatagcttccccattgacagaaatgttcgagactatgctcaatgaaaatgatgccgcgcagatgggtagagggctattaggagacttctttgcaacttcatctaatctgcctgtaagactctatcttaggagaacaaatgattagcatgttgtttgtcttgcagttcatattatttaactagtaatgtgctcttggttgttcttcattttgttgtttcgattttactttctctagtcatgagataaactcacggaaacaaattatttacagactctgattagaatctttcccaaggacacacttctatggaagcttcaattgcttaagtctgcttcagcgtctgctaattctcagatggacacagtcaacgcccaaacactgatacttctgaggttaatacactagtaaacttctctgctctgaatataagtggaagttcagtgatctatttttttttaatgagtttagttaattggaagctgagttgtgtagatttaataagcctgtgttattgcagtggacgtgatcaatggttaatgaacaaggaagacattgaaagactccgtggtgcattgccaagatgtgaagttcgtgagcttgagaataatggacagttcctcttcttg

SEQ ID NO: 157000 - DNA, 523 bp, Arabidopsis thaliana landsberg
ttcatttcttatgtttcctcacctcttttgttcttttcatgtgtaaataggtttttattggagtgttgcaaacataaatggaaatgcggaggcaggtctcctaactttaaaaactgtctgcctcattgagactcttcttggttataggtttggattgcatgcacacatttttgtttatgcttattatattggagttagatatgacgatctgaaatgataaaccttgaatgttggacattacttatatcaatacatattggagtacaatggttatttaaaatctgtgttgttttccagttctatttctctgaatttttattgatacagctccttggagaacatacggtgcatcatttttgtggatagggtgataacagccatcgttctggaatcccttttggctgagattcttccaaactgtaataactggaaaaccaagtacgttgcaggaaataactctggtctgcaaaatcaaactcggaagaagcaaaatgaaattgtggaagacttccggagaggcttg

SEQ ID NO: 157001 - DNA, 379 bp, Arabidopsis thaliana landsberg
ccacgccgtatcggagtcggacgtctccgtccactccacattcgcatcacgttacgtccgtacttcacttcctaggtacaaaaaatataacacaatcttgatcacattatacttctatattttcgataaaaatggagggctaaaaacgtagatatcaggttcaagatgccggaaaactcgattcctaaggaagcggcgtatcagatcatcaacgacgagctgatgcttgacgggaatccacggttgaacttagcctcctttgtgacgacatggatggagcctgagtgtgataaactcatcatgtcctccatcaacaagaactatgttgacatggacgagtaccccgtcaccaccgaacttcaggtatatatagttctaa

SEQ ID NO: 157002 - DNA, 151 bp, Arabidopsis thaliana landsberg
gctgctgctacattttctggaacgtagttgtggcattcgtcatcgtcgacattgcagagaagttggttttgtcaagctctaaaatttttggacctagttagtgttgtggtgtatgctgcttgttcatcgcattgagatagctactgttttc

SEQ ID NO: 157003 - DNA, 319 bp, Arabidopsis thaliana landsberg
gtttaaatggtttcgagattcaaccaactttgaagagttgttaatgcagttgcagaagcatgttaaccgaaaatcattccaaaccggagaatatcaactcgaaccagaataccaaaccggaaattccaaaagtgatcgtgctatgtttaagttaaaatttaaattaagcaaacaccggagagtgattggatcggggaatttgggaaaagtatggagaagaagacgaaagtgctaattgtgggaggtactggatacttgggtcagcatcttcttcaagctttcgccggcaactatggcggtgaatgtgagctatacgacg

SEQ ID NO: 157004 - DNA, 1225 bp, Arabidopsis thaliana landsberg
ttaattcacagaggatggttcgagcaactcaagctttgcgttcctgagtagtttccagagcaatttgttagcagatggtctgaagaaccaggtaggttggggacatgtctggaaccgatacgctggaccgttaagctgtccaaaacagccaaaccaatgcgccttcacgccgcttgcacctcctggttggtgggacggtatatggcaatcgcccatcccacgggacactcgtaggcttgcagctttcggcattgagctttccgggtttggtacggttaacgaagaccggttccacgcctattgtagcgccaagaaagagtacgtaagcactgtaacaatcatataatgacttcttgaaaaagattctggactcttggttataaatggactcactggttttattcttcaaatctccttccccttctttaattgaaccggccatatcaaactttttgttctaaataaccggacccaaaccgaattaagcaaaccgaacgcccaggcctacgagtaactggctggcctcttggttcaatatatggttttactactcccttcttaaattgaaccggctttcttaccaggtctaaataactaaacccaaaccgaactaactaattaaaccgaagtcaaatatatccagctataagtaagagaagacttttggtgtttattagaaacaaagtaagattaagagaggaataaagctggtgtcagacattaaagatggaacatcatctcgtggaatcaaacttttcctaatacaaaaattgattctcggttagtgaaacttcaatttactaccagattgttaatttcattattattattctcgtcgttagaaatatgctactaacattgcaagtaggttcaggtataggtgagagctagtttaagatggacaaaactaattatgtaagtagttcttgtaaaatatgcattttaaaggtaacaattgctattttggtgtaaacttttgtaatgaataaaagtaaataattgtgatggaaataaaatctgattacaaaaagatttgagaacgtcatgattcattcataatcatgtactgtctaccatactttttattctacgtactaccatacaatctccaaattttaagagtggtatggctccatgactcacatcacatgatttacattacatattgtactaatgtcagaaccttaaccgatcgtaaaagccgatcaacaacgttaaccatcat

SEQ ID NO: 157005 - DNA, 634 bp, Arabidopsis thaliana landsberg
atggttggatcgactccaatgcgaactcctatgcggtctaacatggagggttcgactccaatgagatcaaacatcgtcggatcaaccccgatccgatcaaactacatggctacaccgatgagaactcatcacgattttggtacaccagtgaggaatttagctggaagacgaatcttaactgaatcggagttaggaccatcgccatctgaagtggctgacaaattggcgaaagatagatcgcacgaaacggaaagttcaatactcagcgaatggagcatcgatgaatctagcatcgaaggattgcgatcaaaactcgagagatggcgaacagagcttccaccgttgtacgacataggaacaagccatataagtagcactgattacgatggcgcgagcgttccagctgcaactgccgggggaggaatgagttcaagacggaaaactccgacgacgaaaaagcataaccgccgtcacacagatggaggtaatggacttttctcgtgttttagtaagatttgtggtgtggaatgcagtttcgtatgcggtggtggtggtgggccgatggtctccgaaggatctactaagaaaggtggagccggacgtgtgcaacgcacatattccgctgacgatctga

SEQ ID NO: 157006 - DNA, 413 bp, Arabidopsis thaliana landsberg
  unsure (1)..(413): unsure at all n locations
atagtctatgagagacttggatttaatgttttcaattgtatgaaggtggttgtctatgaagatgctgttagagagaaaaccctcgagtgtcgaagaagcaaggagtacattaagaggtaagctcacatgatttgttttgcttactataactcaaggcttaaggttaaagaactaaattcaaaacacaggctattccaaggggcatacagcaacagtgagttctgtggctgtgacaaatctcaaaacaggagtcagaaaaggaggcgtcgatagagtggaggtaacnnnnnnnnnnnnnnnnnnnnnnnnnnnnnnnnnnnnnnnatttgggaaatatatagcatcagctgatgatgtaaattcctaacagatctatttcaatgaacaccccgcaagagactatcgagaaactg

SEQ ID NO: 157007 - DNA, 1704 bp, Arabidopsis thaliana landsberg
aaataaatgtaaaattttcacgttccaagcgatcaaatctatcaattaccttcaaagtggcaataggtgcgaaagatttggaaactccccacaaaatgagacagaagagagtgaaggccaacaccaacgtaaacaacaagcacgagtaaaacctcgttatccttctcctcttctcatccggaccgtccatttcatcgtaatcttcatcttcatgagttcgacggtcaagatcatgcacttggacactgctgtactcgtttctcaatggtcctgacgatcgtggatacgaagatgactcggccaccgagtgatgttgaaagttgctgacctgaccctgatcgttaaggggtgacccgaatgggctaaaacctgaaccggtcgatatcttgtctacgtctgtgttcggtgggctatgcacgacgtaaactggcttcctcgtcttttgcggcgatgatctagccgaaacacgtcaacatctcttttttttttttatcaaacactatttatattaaattatcgggaagagagtctccgctagagaaagccattcaggaaccgatgtgcttacatgggaaaaagactatttcgagcctgagcttttttagctagacaatgtgctcgagtattagaactacgaggaagaaagacaccaatacctctcagctgttatgtcaaatgttttatatctcactattcgtctctattcctcttcttaaaatctcaatctccaaagtctttgttcctagtttcatccttctcattctctctatggcttcttcatcttcttctcgaaattggttatatgatgttttcttgagcttcagaggggaagacgtccgcgtaacattccgtagccactttctcaaagagcttgatcggaaactaattactgctttcagagacaatgagatcgagaaaagccactctctctggcccgatcttgaacaagccatcaaggaatccaggatcgctgtggtcgttttctccaaaaactatggtgtcttaacgagttgctggagattgtaaattgcaatgataaaattatcataccagttttctacggtgtggatccttcccatgtgaggcatcaaatcggtgaatttggaagtatctttgaaaagacttgcaagagacatacagaagaagtgaaacaccaatggaagaaagcattgacttatgtagctaatatgcttggatttgattctgcgacctggtatggttattattcatgattagatacatatactaactcattatataattgttgatacatcttgaaataaattgttgtttcatatttgttaaattatctttcatcttattaggaacgacgaagcaaaaatgattgaagaaatagccaatgatgttttgggtaaactgcttttaactacacctaaggattctgaggaacttgttggcatcgaagatcacatcgctgaaatgagtttactgctgcaactggaatctgaagaagtgagaatggttggtatatcgggttcatcagggattggtaagactaccattgcaagagctctgtttaaacgactttctcgacatttccaaggtagtactttcatcgacagggcttttgtatctaatagtcggaatatttatagtggcgccaatccggacgaccccaatatgaagttgcggctacaaggacacttcctatctgaaattctcgggaaaaaagacatcagatag

SEQ ID NO: 157008 - DNA, 592 bp, Arabidopsis thaliana landsberg
  unsure (1)..(592): unsure at all n locations
gtcctccatcacgtaccaagcacgtgctctttcccatgaagccaactatcaacacgaagcggattatctgttcgccggctagaactccagcgaagtatcggcggaggcagaaaccgaaggtggatctagcaccgccgttgatgaagcaccgaaagagtctccatctttaatatccgctctcaacgtcgaacgcgcgctacgtggccttcgtaatccctctctcactctctctgcatctcatttccattttttaaaattattggtttgaatcttgaaagaaaatgaataagaaaaattgatggtggtttggattagaatgcagcaattacagnnnnnnnnnnnnnnnnnnnnnttgggattttcagaaattgttcttatgatcaggtctgttttaatgtgtcctcattttcattctctttagattcaattttagattataagaaatttagatacatgttgagattgaaggactcggtatgaagtttttattggtatttatcaggttacaattggttacaaagaaagagttaaagagttgaaggaacaaggactagatgaagaacaactcaagaccaagatggatcttatcaaa

SEQ ID NO: 157009 - DNA, 947 bp, Arabidopsis thaliana landsberg
atgacgggtgtgggtggtacgtataagaatgaaaaacgacgtatttgaaaaaatacgcggtgaagtaacttaattaccggtgagggtttttttaatccatttttcccataaaaacaaattttaaacccaaaatactaaactctatttttatttcttaaaggccacattaaagtgaagttgttactatattttgttatttttatttcaaaaaggtaacaattttacttttctttctagtgtcattgaatcttttataaaatttatttagttaagttagtttccagttcaaatttatacttttcattttattaaatttacaaggtgatatcatttcatgaccacttgattaatgatccgtttaaagaaaaacaacattttagtacgaagtgtttgtacatattaagttacgataggacatacattttatttatgcagcggtgccaaaacggctacttatataaacgaaacgacatagatatgaagtggttacaaggggacaatgccatgcatgaagatagatgcttaagaaggtacgtagtagagtggatttgggagcttaaaaaccctcccaggggtatcctcaaccaaatcagcccattggtctccgatattgccaacgatgttgtatcctttcttcacgagactcttcctcacctttgacttgtacaccacttgcctcaagttcgaaccattaggcctacgtttccatatttagtacttgattcaatcacatatatgatacttataacttatttaattactgtataactacttgactattcttacttcaatatgagatgcttccagtaggtaacgccagcagcttcgagattgtcgagggtgacattctttcacaacttccaacggtcactgagtatgatgggttcaatcccgagctctatgatgttttggtaaagatgcaaggcctccgggagtccaggggttga

SEQ ID NO: 157010 - DNA, 1573 bp, Arabidopsis thaliana landsberg
atgaatcaagtaagctcacatggctttgtaaattagtttaggaacttgagactttaaaatctcaaacttctctttggtagcaacattttcaaatgagtaaacatgtttattgtagacataacataatagtaagcatacatgcatgatgaatggtgatgacaacatttttttggaaatgaaatcatggggaaaaaaccaaaaagaacaattactgaagggtttgatcgtaattaaaatgaaatccaattaagattgcgttggatctttatttatagagatagtgttgaatcaaattatgtcgaatcacaactttaaacagaaccaaagcaaatcgagaaaatttcggttctactgaccgcataaacttatttattcttgaactagggtttgtttaatactttcttaatcaaatctaaatctcttgcagcctttgcatttcgttaacaacatgttttacgcatgtatctgcttctcaaccaacccttgaagctactatgctttcggaggaaacctgtgttggtgagatcatctcctcttctctctaatgatggcttatcatcttctttgctgcaaactcctccttgtttcatcgtcagcgctaaacgttgtggaagacttgcgaaagagggaaaactcgtgattttgaatccttatgaagatgaatgcacttctttggataagaaggtgcctatggcgtcgctgtatgataatgaacttgtaaccatcggttcatcacatggctggatagctactttgagtcatgacgacagactactgcgtatccaagacgaactaaacccggttgcatcggatactaacccttaacgcattcccttgcctcctcttgtatactctgcctcattgccaaactcaaatggtcaccaatgtgtcaatgtcctcatcttctcccgaggatgaaaactgtgttgtggctgtcaagttcttgggacctcaaatcagcttttgcagaccggctcaacgtaactctgagtggatcaatgtcagaatcgcaaacccttgtttctactcctctcgtgtcatgttttcggagaaacatgacttgtttcgcattcccggatcaggaggccatatcattgcttcatgggatctccacaaagacaagcacaaaaatcccaagtttcagaggttgcggttccaaaaccttccaaagctgacaaagaccaaacgagaggttatggattcgtgctacaaaagcgaacacttggtggagtcaagaaccaccggtgaaactttcttggttaagtggtacaggaaggccgtctggagaggtatgtcgaaattgagcacaaaagctttaatggtgtttaggctagacgacgaaggaaatgctgtttacactaaagacattggagatctatgcattttcctctcaaaatctgaacctttttgtgtctctcttagctccttaccacgcatgtttttccctaacaatgttgaatacatggatgctgacgaagacggatattatgatctggaagattcttcaatcgttggtgatcttacaagaatggggaccggtgtctatattccacctcaaaatatagacaactag

SEQ ID NO: 157011 - DNA, 884 bp, Arabidopsis thaliana landsberg
gctgctgcggttccttgtggttttggacgagcaattggtaacaaggtatggtgccatattaggaaagttgctcacatttatcaacaataaaaagatctcataaaagggaaacaatggattatctcttaacattgtcagatgtttgcttaaatggttcttttcccttttccattgttgacatcttatctatattatgatagagccatttcttgtctcattagggcgctgaaggtgtgcgactcacaatgtatgatcgagtactgagctttgtaaattgtactcatgctgcacatctagaagctgttaatcggagaaatgctgacttctaccatgtttatcgaacaatgaccttctcacggcagtctagttcactcaatgcaggagttggtatgctacaaaatttatttctatcatgctgtgttgcttgctcagcttattactttttacctattcgttggtcactcttgttattggtctcctccattgcagctggtgcgtcatttggtgttacaatgcctcgtggtggcaatgtatgtatttcttttgattgcatagttgctatcacttactttcagagaatgcaatgtataatttttcaaaaagtctaataactgtcctttcacaggctttgggtgtcaatacaatcgaagcaaggcctgaactatctgaggcagacatggtcatatttcttggagattttaattaccgtttggatgatataacgtatgatgaaacaagggatttcatatctcaaagatgttttgattggctaagagaaaaagatcagctacatactgaaatggaagctgggaatgtttttcaagggatgcgtgaagcaattatcaggttccctccaacatacaaatttgaaaggcaccaagctg

SEQ ID NO: 157012 - DNA, 398 bp, Arabidopsis thaliana landsberg
ccacatggatgcagtggtgctcgttagataggtctaaaaaacctgttttcgaagaaataatccacatctttacttaagtaagctaaaacttacacttaaagatttaaagccgacccagattcgcactaaataagctgatagtaaggcagaacaatataagccgagtccgctcgcacgttctcgcttacctagaggcatccacagggtaagccggacaccagcgccgcacctacaaagtacgacgagtcagtctcgcatacttcatacgtaagccttgtgattcgagttcaacgtatacaggataagtcaagggacgccttgccccataatacgtttcgaaatcaagcttaaacgccaaggaaaacctcgcaaaatataagcttaggataaccttgcac

SEQ ID NO: 157013 - DNA, 3754 bp, Arabidopsis thaliana landsberg
gcccaaggagaatggaaacaaacagaggttgaattcgtcttcactgacaccattgatctttgttaggttgcagagcctttcgaattcatcaaggtggtcgagtggatcctccattggcagaccatagaatttgttcccctgaatcatcgagatgagaccactcttaatctcgaagttgttgttctggatagtaggaggtgcaattcctttcctctgatggtgatcacgtggtgcatctccaacaccaacgttggcagggccattttcttgattctattcgtcagccatttcgagtggttgctgaggtacaaggttgactgtgtttctcctttctgtgagttcgcgagctatgcggttgatgttgtcgttgaaaaggaggttttgattgcctgttgatcgagtttgcatacagcagaggtgtacctggataaagaaaacaacaagaaaaacacacagttagtaatcgaaaagaaaatggaataaagaacttgatctaagcaagtctgaaatcttgaatgtaataaacaaacacccaattgacaagggcgccaaattgataataggtttttagtcaattatactaaaaccccaatcatgtcgttgtagtattttaggttgtcaatccaaatgggtgtgatgctaacaatcaagatgtgatcagaagtcaccaagtcaagccaagcaataacaggttttggtgtgttctagcagtcctaagtgaacatgcagaaaacataaaatcaagcagaaacagcaacacattgagcaacacagctcgatgcagagcactgggtgaggtcgagtgtctggtcgagtaacagacagtaaatgaaacaaagacactcgactgcacagcctgttgccagacaactgggtggtcgagtattaggtcgacgaacaaggaaaaattacaaaaactaagcaacagatgacaagatgcagtaaacaacagtagagtaaacaataaaatcaatcaggtaaagaattctcgaggatggggtaattgagtagtttcgttttctcagtttacaggtgattgacatgctcaataaattatccctagacaacaagttcttaaccaaatctaagtgccaccgcaagagaaaccctcaagttaacctagtcccagactcaatcaccattgacgagagctaacctaacaggcattacgaatcaacaagttaaagccaaaacgctccctgcaaccaataccttggtacatggtcacgaatctctagaattagtggttcagacatttcatccaacaccttttgggcgcggaaatgtctgggctcaaattccagttgatcagaaagcaataggcattaagaacaactaatccagaaaggatctatcaatcaatactcaatcacctagcatactgagaatcctacactactctaacccatcctcagaaacctattcactactcagacatcataacagaaagcataaacgttgaacaaattgaagacatgataacaacagtgtaacatcaggaagataacagaatgaacaacagtaaacgaaatcaagaacaaaagctgaatactgaatactgaatagataaagagaaatccgaattacaaaaagtctagaacataaagtctgcggaataaaactagataaaaacttcttttctgcgaaaatgtgaagtacatgctacttatagccaaatattctgaaaccctaatactcaaaacgacgaagtattgggacggattaagaactgtactcgacccatgtggtcgagtgggaggtcgagtgaatagctggagtcttcttttcttccttgtgctcgagtgtctggttgagtgcggaatgaagaaggctctgaagcttgtcatcgagtatgcagtcaagtggtgtgatggtgatactcgacttccaggtagagtgatgaggtcgagtagaggtcaggcaatggggataagtcactcgacctgggggtcgagtgatgtgatcgagtggaggtcaggggatggagatgaagacactcgacttgggggtcgagtgatgtgatagagtggtggtgtcttctactcgacctggggtcgagtggtttgtaatgatcaggtccgcttcttccagttagcttgtcgacagctctaaatcacctgaaaacaacacaaatatgcaacatgcatgcaaaactatcctaaacatgcaaagtgatgacaaatgatgtgaaatggtataaaacagtgatgatatgatgctaaaatgatgtcaaatggatgctcaaaacatgcaaaatacacacttatcatacaccatcaaggctttgacaaacaagaagaagcttggttagtgttttggagtcgaatatgacttgatatcatgtgtatgattcagtataagaacctaaactgcaacgggatcttaaaagcctaagtattgttcccttattaaaagatacaagaccaaagactcatacggacttcgactacaccatcaaagctttgaaaagcaagaagaagcttggttagtgttttggagtcgaatatgacttgatgtcatgtgtacgattgagtatagaaacctaaaccgcaaaaggatcttaaagagcctaagtattgtttcttttttagaagatacaaagcctaagactcatacggagttcgcttacaccattaaagctttgagaagcaagaagaagcttggttagtgttttggagtcaaatatgcctagatggcatgtgtatgattaagtattagaactcgaaccacaaccagatcttgaaagcccaagaagtgtttccttgttggaagatacaaagccaaattctcatacggacttcggctacaccatcaaagctttgacaagcaagaagaagcttggttagtgttttggagtcaaatacgacttgatatcaggtgtatggttcataccgacttcgacatcaccatcaaagccataggaagcatgaagaggcttggttaagtttttagagtcaaatatgactagatggctgataagtaggtttttaggcctacttatttactgaatgtgaggttcagttcaattccccttaaacactaacatgtcgatgccgctatagggggtgtccattgagtccactgttagtgctagcaatcaagatgtgtataggagcaactaagtcaagccagattataatgatggtgggtttctagtaacaatcctaggtcaggattcaaacaacgaaaatgagaactttaaaagccctactcgatcattgggtcgagtagaaccaacaggtgacgaatttaagtaactaaaatgcaatcaacaggggatacaaataacaggtaaataaaagtgcaatcaacagaggatacaaataaatctaatagaagttcaaaggatgggttcatcgataagggcaactctagggttcatcaggtggctaacaggtgaaaggtagatacccttgacgatagattcaaaaaccgggtcaatccattgtcgtgacagagacctccataactctaccacttcctaatctcaactgtcgttgatgaaacatagcagagaagggtttaacaaacaatctaccaaagccaataagcagacaagccaatgtcttggtcgagtctacaaatctctggaattcgtaggtcagacatccatttgaacgtcttttggacgctagacgtctattatcgaatctccacattagccagcgaaaaccgcatagtggccaagcgaatccagaagggtataaacctaaacactaaccccctaactaaccttgagattaccctaatctaa

SEQ ID NO: 157014 - DNA, 1127 bp, Arabidopsis thaliana landsberg
atatggaagtaaaatttcaaatgcttctttgtggaactctagctctcaaggaacagaaaggagtttgatagaccaaattaggcccggtttaatccgcaacgcgtcggttagcaataacatccgtggtagtgattattggactaacaacaagtctttccaaaacatctactcttcttcaatttctaatcactttccgaaactacgacacgatcatcacgaacggaccaattcagtcacattcaacagcattcaaggacactcaagaacttttcaaaagttccataacggtgttgaggagaacactaatcattcttattgtagcaagacaaatggcaaaagagacgcaagtaggagcattgatcttgatctatctcttaagctaagacaaccggagaagacaattttggaagagacagaaacagcagcaacaacaacggatcaaacgttgtccttgtcgctatgtccagggtcgtcttcgtggaaaaagagccgactgatgaaagatgaagaggatcggacggttaagattggtcaggagagtactctggatctgactctatgaattatatttaagaatgagacaaattctaagtgagatcttgaggtacttaccgatatcttaatattcagtgtcgttgttgtttatcattaatcatgtattttctttattattagaaaggaaacaaaaatgtttgattatattaacggtcttgagtttgtttgataccgccaatttgtatcatcacatatataaacaaatattactagccacatcataatgattcgatcttttgtcttctcatagcaatatactatatgaaaattacatatacatataacaacaaatttacatcgattagagtatctctgctggtgagcttcattcatttgtagatgagacttttacgtaaatagtacaaaaattttggtttcgtatttatccgaacagtacatggacaattttgtagttccaaaacatgttatagttaatagtagtgttttcaataatttccaaaatctatcttcactcatttttcccttttcagagacatagtgaaacaattttacactatgcaaatccgaagccaattatttttgaggtttttactatatgtgaacaagattaa

SEQ ID NO: 157015 - DNA, 109 bp, Arabidopsis thaliana landsberg
aggggtggagtctgaagctacaatcacaatcgtaggtgctggtaatgtaagttcaagaacaagtcaacctgggaacttgtatatcaaactaaaggtttgttaaagcatc

SEQ ID NO: 157016 - DNA, 440 bp, Arabidopsis thaliana landsberg
agattgagactgacattgtatagattctttgattacaggtaaatccacagttctatgcatttaggtggatcactctcctcctaacacaagagtttagtttctttgacagtcttcacatatgggatgcactcttaagcgaccctgaaggtccgctggtaagatcgtaatatcttctccttgatgcatacccgaaatcaaatcgatagatgcagaagtcacattagtttactgttccactcatttgcttgattaaagaagacccggtctgtatcgtattgttgcaggaaagcttactggggatatgttgtgcgatgctggtactggtgaggaggaggctaatcgctggggatttcacgtcgaatatgaagttacttcaacactatccaactacaaacatcagtcatctcttgtatgtagccaatacttcgttcaaatggagt

SEQ ID NO: 157017 - DNA, 971 bp, Arabidopsis thaliana landsberg
atccgaagagatgagcagcccgccgcctttaatcgaatctaagccgttaaattccagccaaccaaatctagacggctacaattatcctttcgatatgtaccgtcgatatttagatctaacggctgtgaaggctacggcgcaatctagtgaatctggatctctaattgttttgagaaaagatcttggagcgcgtgagtattaatactccaaatcgcaagaattaatagattacacgtgttactatagcgcgtgtaatagacgcggataccgaccgacattgtctccactattttgactattttatccactaaacgcgccctgtaaatagcgcgattgaattacacgtgccatgaatcttttgattttcaggcccattagtgaatatcatgaggctacccattagaagactatttatttttctacgtaatgctcttgtatgggcttgggaagactgtttattatgttatcacctttgcaaacgaatgttgacaatttcatcttcaagcttaaatgacatgaaaacgaacaatgtgaaaaagaaaaactttaatgattgtaaaaggcatacatatatacaactttcttgtaatttttaagcaaaacaaaaaaaaacataaatttgagattagcaatttagagaaaacagcattttataaacaaaatactaactaaagaagaaagcaaactaaaaaataaaacacagaaacatatgttcaaggtgaaaattaaataaccaaagtttatcacttgctatatttttagttctacgaagggccatgtgtgatacgatacgatcgggaccattcatcattttcaccattgtaaatccaacggtggcgaatgaaagaacgtcacagacacaaagctgccttaacgtcgagcctccacgcaaaaccaccaccgtccattctccacacgtcacaaggcaccgtgacggatcctctttctcgatcttgacacgtgtactgtaa

SEQ ID NO: 157018 - DNA, 152 bp, Arabidopsis thaliana landsberg
agaaaattctatttcaagaaaagaaaattcagaagcttaacgagctggtccgagatctaaggaggcagttgctacaatgcagaaatgaaaatcaggttgagttaacggagctagaaaccgagcttgatcagctgctggtaacaggtgtttag

SEQ ID NO: 157019 - DNA, 334 bp, Arabidopsis thaliana landsberg
gatccgcatgcattatggtcatccagatgtctttgacagagtatttcatattacacgtggtggtatcagcaaggcctctcgggtcatcaatattagtgaagatatatttgctggtaaatttgattttttaattgacagttaccttcaaaactgttcgatgttttaagaatataaaaacacatgaataatgaaaagtgcaattctgagccattttttaataccaatttcttccacacatgatggacgttgattatatgcctccacggtttgcaggtttcaacacaaaaataaaacaagggaatgttactcatcatgagtatattcaggtccgtac

SEQ ID NO: 157020 - DNA, 947 bp, Arabidopsis thaliana landsberg
ctttttgtactacgtatttccaatccgcatctgttttaccaacaacaaattccaaaacattcatattttgtgtttcaaaaacacatccttttaagcttaaaatgttgacactatcaactgcgtaaacgtaatacatttcaagtttatcaacttcttacaaataacagaagtaatacatttgagacatgatttaatagaaacaactttttaaaaactttgcgttccttattattacaatgcccacattttaaacattcttacatgaagctaagacaccaaaatacctcttagctaccgcaccattcaccatcacgtcatcaccatcaccatcacattaccattaccatccaccgttcacccattcaccatcagtctatacagagtcacaaacactaatctccttccaaactcctaaaaccctaaatgagtcctacaaataggagttttcatcacagagcaaccaaaaatacagctcccccggaaaaattcacttgtttttttttttccagttttaccaaactcccactttcaatttactgtttctactgctttcaaccaccataacgaggaatctaccaagttttaagagaaatctaaaagaacaacatttgtcacctgagccctgtgtgaaccagctactcactttgatccacaaacaaaccgtggcaccgcttcttaatctcacagtttgtttcctatatggttaaacttaacccctcacaaattcagagttaatctgaccaccacttgcacttgcacgggttgttgtcgactcgctaactggcgatgcactacgaccaacgttaagtaagaagttccgctggtcttcattagtatgacgaagactcgcacgtaaaagctcggcaggcatttccctctttatagctaactccaacacatcagctgcattgtcgtggttctgaccatggattgtctcgtacttgctc

SEQ ID NO: 157021 - DNA, 1086 bp, Arabidopsis thaliana landsberg
ccaccatcctctctatatctctctccaggtacgcttcgagctcgtttttactatttttagtctcctttgaatccaaaaccattgtaaaggagccgactttttctccaactgtactctacaaaattgtcaaatttcaaaactttttgattcgagttcgtgaaccatggcgagaggcgtagctggagttttgcgtagagcctatagttcaagagttagggttctattctcgacacgaaatttacattcttttagagaatctgagtctagatctctttgtaattctgattttgatgtgcccacgaaccggttttgttcgggtaatcgggttcggattcagtttccatggaatgattacagatttgggtgctttgagattggtaaagttaggagcttttcgtctactgtggataataacggcgaaaatgatgatattgaagaaagtgttggttctgagagtgatgattatgatgaggaaggtttgattaatgaacttagtgatgtagatgaaggcttgttgaatgattcagtggttgctgagacggatgagattggtagcgaggctgctcgtgctttgaacgatcggtatcatgatcctgtggagttgtacagggagcttaggggaagtgaagtgcgttctaagcttcagcatagtgaatgggatagtttacatgagattttcgggttttttgcgcagtcgggatgggcggctaatcaggctcttgcaatctatatcgggaaatcgtttttcccaactgctgttagcaagtttagggacttcttcattgagaaatgtggaattgaggttgttcaggatcttgttcgtgttgggccaactgatgtagctgttaagtttttgttccctgtgtttgttgaattctgtattgaagagtttcctgatgagatcaaacgttttaagagtattgttgatactgcagacctcacgaaacccgcgacttggtttcctttcgctcgtgctatgaagcgtaaaatcgtttaccattgtggaccgactaacagtggcaaaacgtacaatgctttgcagcggtttatggaagctaagaatggattgtattgcagccctcttag

SEQ ID NO: 157022 - DNA, 495 bp, Arabidopsis thaliana landsberg
  unsure (1)..(495): unsure at all n locations
tctaaaaccttatcttctccgcccatggccgccttctccgtcnnnnnnnnnnnnnnnnnnnnnnnnnnnnnctccactgcttccacctctctctcatcccgtcggaaaattctctctccttcatcgtctcgcctccctcgcatctccactcaatctcctcgtgtcccatcgataaaatgcagcagtagcttacctaagagagatacagagactttctcaaaggattctctccttaaaaacctagctaaacctctagccgtagcctcagtctcctccgctgcttcattctttctattccgaatctcgaatcttccgtcggttctgaccggtggtggaggaggaggaggagatggaaatttcggtggatttggtggtggaggtggtggtggcgatggaaatgatggtccctttccccggaaattgttttctccttcaccagcgagatgctgatgaagaacaatcaccggattgggattctcatggtttaccggcgaa

SEQ ID NO: 157023 - DNA, 255 bp, Arabidopsis thaliana landsberg
ccatcttcagagagtggtgaaaagcggatatctactgcaaccaatcctaatgcagaagaatctgcagatctcttgaggtatgaataacccttgccctcttcttcattctttagtataaatttgcacaatatgagcttgattaggatttctatgatgagtttaggatgtgtgtgcaatgcggtgtaccgaaaacatatacaagcgcaagaggaatggtatgcccgatttgtggtgaccggccattaccggacgtag

SEQ ID NO: 157024 - DNA, 2114 bp, Arabidopsis thaliana landsberg
ggattgttgagtataagcgatggcgggaagaagacggaattgttgacggatgaagcagacggtgttagatttaagctgacggatgcagttaccgttgctgataacggcgttttgtatttcacagatgcttcttcgaaatacgatttctatcaatttatctttgatttcttggaaggcaaaccacacggtcgtgtcatgagctttgatcctaccacacgtgccacacgtgttcttctcaaagacctctacttcgctaatggcatatcaatgttccctgatcaaacacatttcgtcttctgcgaaaccatcatgtatgtgcattacatttgttatgtttctaactcaaaaccaattggtaattagtttttatttatagattttgtatattactttaggagaagatgtagtaagtattacatcaatggagggcgtgtggagttatttattcaaggcttaccaggctatccagataacatccggtatgatggagatggacattactggattgcaatgccttcggtaactataaaaattgaaacccttcttagagtttattgagttggttttaggtctcggtcatattcagtatgtgtgtcatcttttatatcatcttttattgatcactattgtatcatcttttattgatcactatagttgaaaacagggagtaacaacgttgtggaagctttcaatgaaatacccattcttgaggaaaatcacagctatggcggctaagtacggctatgaacctatgtttatggagaatgcaggagttttgcaggtggatttggatgggaaccccatcgcatactaccatgatcaggcgctctctcacataaccaccggtgtcaagattgggaactatctctattgtggaagtctctggcattcacacattctccgacttgatctcctaaaataccctgcacaaaacaagaagctttgaaacttcatgtttataaaaaaaaaaaacttttacattttaggagtattcactgtcacaaaatgtaaactcattgtcctgagaatgaatcatgatgtttctctatctctaaggatattagtaacctgaaacaatggataccaaacgaaaaaaatacaatgaagacaaaccaaatcatacttaagatgcacaattcctaaacaaagcagatatttttctttgtttagaactcaaggcaacccattgtccatacaatattggccctactggtaacatagtaaaagcccacgagatttcgactaatagttggttacaacttacaagggactagagtcaaagattattatgagtcaacgatgatttgcgatttcatcattaaatacacgtgtttaatttagttgtttttctcttcaatcacaagttcacaactacaaaattggcatgttcaccatttttccacaaactcaaatttgctccaatgcctgtacttttctcctctcgttctctcatactctccattattgtccccttacttatatctatcgctctctacaaactcgacacattcgaccccgctattgttccttccgatgcattcacatcctctgctacttcactcccgccgcttataaacgacgaatttctcaccggagctgagtttatcggtgtcggtcttctcaatatacccgaagatatcgcctaccataaggaatctaatctcatctacactggttgtgttgatggatgggtgaaacgagtcaaggtcgccgactcggttaatgactcagtcgttgaggattgggtcaatactggtggtagaccgctcggaatcgcgttcggaatccacggcgaagtcattgtcgcagacgtacacaaggttggggttttgaaatcgaattttgaaaaatcacaatcttaggtttgactttgttgttatgtatagggactgttgaatataagcggtgacggaaagaagacggaattgttgacggacgaagcggacggtgtgaagtttaagctgacggatgcagttaccgttgcagataacggcgttttgtatttcacagatgcttcttacaagtacactctcaatcaattgagtttagacatgttagaagggaaaccttttggacgactcttgagctttgatcccaccacacgtgttacaaaa

SEQ ID NO: 157025 - DNA, 381 bp, Arabidopsis thaliana landsberg
cgattttcaacttcttgttctccaagaccacgtctcactttctctctctcgctctctcttggaaaccaaaacaatgacgatgactcacctgaatcgtctgatcttgatctctcttctctgggtctcttggcatctcaaatcctccaccgcttcttcaaccgtcgtcgacgaaggaaacagaacatcaagaaacttccgttaccgaacgcaccgattcgttccgaggtttaaccaccacccttaccacgtgactcctcaccgttcgtgtgattccttcattcgtccttacgcgcgttctatgtgcattgagcttcagagaatccaccgtagcagtcggaagcagccacttctttctcctcctcctccggagattgatccaag

SEQ ID NO: 157026 - DNA, 449 bp, Arabidopsis thaliana landsberg
atgtcgtttaagaaatgtggtccgacgctaatgaatgggaacacgagatctacggcggtgcgaggaacagggaattataggctcgagagggcagagaaggaattaaagagttttggaagggtaaaattggaagagaaagagtattttagtggtagcttgattgatgagagtagtaagaaggaacttgttcctgctttgaagaggtcctcttcttacaatattgataggtacacaaaaacatcaacaataatcataataacattataagttgctaagtaagtcacatctaagatgatgaatttggtatttacgttgttctaatgggctaatggcgattttaatcaactaatgttggcttaggaaatcaaggatggggttgacgatagataaatattgggaagagttggcttgggctacttttatttcgggaaaccctaattttgtggttg

SEQ ID NO: 157027 - DNA, 229 bp, Arabidopsis thaliana landsberg
gacactggtataggaaagaaactcatacttgctttgcagacacttggggttgtatttggtgatattgaaactagcccattgtataccttcgctgtcatgttcagaagatctccaattagcgacaaagaagatattattggagccttgtcattggttatatacactttaatattgattcctcttgtaaagtatgtacattttgttctttgggccaatgacgatggtgaag

SEQ ID NO: 157028 - DNA, 619 bp, Arabidopsis thaliana landsberg
agaagcccagtctcttcaccacaaatgtacgcaccagcaccaattttgatatttacttcaaaatcataaccagaaccgcatgcaggcttccccaagagaccagctgcatacgcttctcttctagccttctgtagattcaaacgctcattcacatattcacccctgatgtaaatatacgcagcactagctctcattccaacaccagcaatcaaacacccttccaacaatttgtgagggtcatgacgcatgatctccctatctttacaagttccaggctcactctcatcagcattgacaaccaaataggagggacggccatcagaaactttaggcataaaggaccacttaagaccagaagggaaaccagcaccaccacgtgcacgaagtccagatttgttcatttcattaactatccagtctgcccccttgatcaccaaatccttggtcctataccagtcacctctcttcatcgcgcctttcaggaaagggtcatgcagaccatagaggttggtgaaaatgcgatcctcatctttgaggccaccaaagtgagtcttctctggagggggtgggggaggcggaggctgtggtgtgcttgacgtagtggcggcctgggtgctaa

SEQ ID NO: 157029 - DNA, 129 bp, Arabidopsis thaliana landsberg
gggaggcagagaagctgtctaaacagcatgctgagacggcggtaacacatcacaagaagtttgagatgatggataaactcctctacgatggtgttgctcagaaactggctggccgttacgacctgaaag

SEQ ID NO: 157030 - DNA, 391 bp, Arabidopsis thaliana landsberg
atgactcaatcaccacctgggatgattgcaagaatgcttttctatcaaagttcttctccaacgctagaactgcaagactcagaaatgagatctccggctttttacagaaggctggtgaaagcttttgtgaagcatgggagcgtttcatgggtttataccaaccaatgcccctatcatggcttcattaaaccctctctgctcgacactctttatagaggcgttttaccacgcatcagaatgcttctggataccgccagcaatgggaatttccagaacaaagatgttgaagaaggctgggaattggttgagaactttgctcaatcagatggtaattacaacgaggactgcgataggaccatcagaagaacagctgactctgatgacaaacaca

SEQ ID NO: 157031 - DNA, 526 bp, Arabidopsis thaliana landsberg
atgaggctacctctagagtctatagaacctgattgggacattcttgaagattccttgacatcattcaagaattcagcaagtggtggtcactatcaggcgatcgcgagccttgtcagccatgtctcgaacgtcctgcgatgtttaagcaacaccggtctcatattaacgcagcagagattcacaattgctagagaagtcattatccacaccgagctattagttggtaccactactacacaagagaactacctcatcggaccagaactcttcgacgaactcatgatctacgcagctcgttctgataatctaatcaatctccctggactaaccggagggttcctagtagatgccatgatcgaacacttggaagaaagaaacatttcctgcggattgttaaagccattgactgctaaacaagacgagctgattcgaggtgttattgaagaagttccaaagtgggctcgggttaatatggatgaggttatcggtatcgaaatggatcttgaaacgcatttgtttggagttg

SEQ ID NO: 157032 - DNA, 936 bp, Arabidopsis thaliana landsberg
acaactcatagtcgcttttaaagagcatcaacaacaaccacacgcttctcaaacatcaaaccaagcctctctttcacttcctcatggaatattccgacgacagcagattcgacgtgattgtcgtcggagcaggagttatgggaagtccgccgcgtatcagctggcaaaaagaggtcagaagactcttttgttagagcaattcgatttcctccatcaccgtggctcttctcacggcgagtcacgcaccatacgtgccacttacccggaggattactactactccatggtttccgagtcgactcggttatgggctgcggctcagtccgagattggatacaaagttcattttccaactcaacaattcgacatgggtccggcagatcagcagagtctcctctccgttgtggccacgtgtcaaaaacacgggctagctcatcgggttatggattctcatgcagtttccgagcatttctccgggaggattagtatcccggagaattggatcggagtttcgacggaacttggtgggattatcaaacccaccaaggccgtctccatgtttcagacgcttgcgattggacatggtgccatcttaagagacaacaccaaagttgcaaacataaagagagatggtgaaagtggggaaggggtaatagtctgcacggtgaaaggagataagttctacggtaaaaaatgcattgtaaccgcgggtgcatggataagtaagctggtgaaaacggtggccgggatagattttccggtggagccccttgagactacggtgtgttattggagaatcaaagaaggccacgaggagaaattcacgatagacggagagtttccgacgttcgcgtcatacggagctccgtatgtgtacggaactccgtctttggagtatccgggactgatcaaagtggcggttcacggtggttattg

SEQ ID NO: 157033 - DNA, 730 bp, Arabidopsis thaliana landsberg
  unsure (1)..(730): unsure at all n locations
cagagcttaagccaaagatctctcattgacctttgcttcttcattttcttcttcgatcacagcttctctctttctggattccaccattcttctctttgtcgactatgtgacctattctcgatacgatccatggaataatctctnnnnnnnnnnnnnnnnnnnntccccttcaaaagcagacagattcgaaactttcccccaaattcggggaatatatgtgttagggtttgggttattctcaaatagaatcaatcagatcgttttttttttttgttagaagaagatgaagatagcggccaatggccggttcttcacaatcggactcgtagcgtcatggtattcatcgaacatcggagttctattgctgaacaagtacttgttaagcagctatggattcaagtgtccgatcttcctcaccatgtgtcacatgacggcttgttcgttactcagctacgtcgccattgcttggttgaagatggttccgatgcagacgattcgatccagagttcagttctttaagatcgcagctctaagtctcgttttttgtgtgtcggtggtctttggtaacatctctctccgctttcttcctgtttcgtttaaccaagccattggtgctacgacgccgtttttcaccgccgtgtttgcttacctgatgacgcgtaagaaagaggcttggttgacttacttcactctcgtccctgtcgtcaccggagttgttattgctagtggg

SEQ ID NO: 157034 - DNA, 1086 bp, Arabidopsis thaliana landsberg
cgaggattcaaacaatggagaaagtgacaaggttgttgatgagagtgaaggtggaaatgagataagtaatgaggaagctagggagatcaattacaagggagatgatgcgtcgagtgaggttatgcatgggacggaggagaagagcaatgaaaaggttgaagttgagggagaaagtaaatctaatagtactgaaaatgtcagtgtccatgaagatgagtcgggtccaaagaatgaagtattggagggttctgttattaaagaagtttctttgaacacaactgagaatggtagtgatgatggtgagcaacaagagacaaagagtgagttggattcaaagactggtgagaagggcttttctgattctaatggtgaattgcctgagactaacctgtcaacttccaatgcaactgaaactacagaatcttctgggagtgatgagtcaggatcgagcgggaaatccactggttatcaacaaacgaaaaacgaagaagatgagaaggaaaaggtacaatcatctgaagaggaaagcaaagtcaaagaatccgggaaaaatgagaaggacgcgtcctcgtcccaagacgaaagtaaagaggaaaaacccgagagaaagaagaaagaagagtcttcgtcccaaggggaaggtaaagaagaagaacccgagaaaagggagaaagaagactcttcatcccaagaggaaagtaaagaggaagaacctgagaacaaagagaaagaagcgtcttcctctcaggaggagaatgagattaaagaaactgagataaaggagaaagaagagtcttcgtcccaagaggggaatgagaacaaagaaacagaaaaaaagtcttccgaatctcagagaaaggaaaacaccaacagtgagaagaaaattgaacaggtggaatctactgattcttcaaacacacagaagggtgacgaacagaaaactgatgaaagcaagagagaatccggcaatgatacttcaaataaggaaacagaggatgatagttcaaaaacagagtcagagaagaaagaggaaaataacagaaatggtgaaacagaggagacccaaaacgaacaagaacagaccaa

SEQ ID NO: 157035 - DNA, 13075 bp, Arabidopsis thaliana landsberg
  unsure (1)..(13075): unsure at all n locations
atgggcgacccttgggtgtgttcggatgcacttatccttgtgcttcctcgaacacttttctcgatccatcccatccgacgatcggtctgtccgacccgttccgtcagacgatcggcctgtcccatccgacccgtccgacgatcggtctgtccgatccgtctggccgatccgatccgtctgacgatcggtctggccgatccgatccaacgatcggtctaccagatccgattcgtctctaagacgaacggtctaccctctccatcctctacactccatcgaaccgttggaccgggaggtagcatgcgcatcagttcggtcgagttatactcgccgagccgcaccccctttccgaccaacaactctaggatgtgttgggactcctttaagaatgttttatggtgtttggatgttgtgagatgatttgagattattgtgagattgtgagatgatgtgagatgccttgggcgtcctcccttatatagggggcgaatggatgcttcccgaagcatcacatccgttccttgcacccctccgaaaggtcccatccgttccttgcatcctttcgaaaggtcacatctgttccttgcatcctttgggcgatgcaaccgttcgttggtacccgctcgaccttacaccttttggccgagacacctcttcacccgtgagctacgaaagtccaccagctcgagtgtcagctgaccggaccacccagctaggtcagtacttgatcagctcaccgagctcagtcgagctgtcggtcagctgacctagctgagctagctagtcttccagctggtttagctcacatagcttacctagctagttcatacagcttgtccagctcacctagctggtttggcttatactttctcgttcttcctacttagtattttggtccgttcctcgaccatgatctagttttctcctaaaacaaacctgcctctttatgaacgcgggtcgcggtcgttacaagtgtacccccccttaaactgaattcgtcctcaaattcggcgggtgtaagatcttggttactccctaactcgggacacgggcgttacaagtctacccccttaaactgaattcgtcctcgaattcagcgggtttaagatcttgtttactccttaatctttagtctttccgagactttagatatcacatttgatcaaatctctatttccgagtttgatcaagtttcccgatctttgtctcttacgacactcgatcaaattcctgatcctggtcctctcccggactcgatcattatttcccgatctttgtcttttcctggacttgatcaatattttccgatctttgtcctttcttggacttgatcaacgttttccaatctttgtcctttcctggacttgatcaacgttttctgatctttgtctcttccgacattcgatcaaatttttgatcctggtcctttcccggactcgatcattatttcccgatctttgtcctttcctggacttgatcaatgttttccgatctttgtctcttccgacattcgatcaaatttctgatcctggtcctttctcggactcgatcatattctcgacttaagtctttttccgactttgtcaatatttccaaccttggtccccaaaggactcggtcaatatttccgacataggtctctttccgaccttgtcgtttttccatgatcttggtcaatttccgataagatcaaaaccccagaaatagtcaaatcccgactaagtctgtacccgatcttagtcaagttccgactagatccaaattccattgatatcggtccatctccgaatatatcaactcacttttccgtcatgtttaagttttgactacaaggataatatcttggttcgtgatcgtgagttgggtaactatttccgtttccaaacacatcgatccctcaacttccttatccgccaaaaccttactataacgttttctcgagcacctatccatcctaggatcaagcatgctctgataccaacttgtgagaccccgtcccggacgtctcggcgtccggcgacgttgtactcaagttcgcgcctcttcccggccgaacctcttaatttttcgcgattcaacatagaattgcctttacgaggctaaattctataatcgctctcttattacacagcggaagtctttctaaccttggtttaattctaaccaattcttgtaccggtttcatcgtctttgttccttagacttagatcgatcctttactcggtcaagacatgcatatgttcgctaaccattctaagccaaacaatcgcatattcctttatcctactttcacggtcaattaccaaacgtctatcttaactaataagctagatcgttacataccttggtcaatatgcggatttgattccttagcccgtttgtcgccttactccattcgttcaacgactcgtcatcggtcgtgaattgatgaaccaatccctatcgttacttagccatacaaccaaccaaccccactggtctaagtacaacgatagagattggggatcgtacgattcccttggttcacgatggccgaatcaagctcttggcttattggtccattcgttctccaaacgtacgcccctccggctacatggtggacgattgagccctcggcttatcgaaccatccatgtttccgttccggtcgtttaacactacgaccgcccacggtttactaaccgtttacccgtccggtccatggtggtcgataaagctttcggcttaatgatccatccatgcggtccgaacgatatccttatcacacccaagggtccgtggattcatccactggatcatcgtaggctagcccatgaaatctttcttccgtcggccttaggtttgctcgcgggtccaacatccgttttgtccatcggttcccaccgtggactttcctgttggttatccgtcgagtcaccctttggtcttaccgatctctaatcggtttcaccatggctgaagagatagatacatgaaggcggccacgatgttgatcctatatggtgaatcacgttccttacccattcttggtgctttctccctttatcggtaagattgcatccatgggcgacccttgggtgtgttcggatgcacttatccttgtgcttcctcgaacacttttctcgatccatcccatccgacgatcggtctgtccgacccgttccgtcagacgatcggcctgtcccatccgacccgtccgacgatcggtctgtccgatccgtctggccgatccgatccgtctgacgatcggtctggccgatccgatccaaggatcggtctaccagatccgattcgtctctaagacgaacggtctaccctctccatcctctacactccatcgaaccgttggaccgggaggtagcatgcgcatcagttcggtcgagttatactcgccgagccgcaccccctttccgaccaacaactctaggatgtgttgggactcctttaagaatgttttatggtgttttggatgttgtgagatgatgtgagattccttgggcgtcctcccttatatagggggcgaatggatgcttcctgaagcatcacatccgttctttgcacccctccgaaaggtcacatccgttccttgcatcctttcgaaaggtcacatctgttccttgcatcctttggacgatgcaaccgttcgttggtacccgctcgaccttacactttttggccgagacacctcttcacccgtgagctacgacagtccaccagctcgagtgtcagctgaccggaccacccagctgggtcagtacttgatcagctcactgagctcagtcgagctgtcggtcagctcacctagctgagctagctagtcttccagctagtttagctcacatagcttacctagctagttcatacagcttgtccagctcacctagctggtttagcttatactttctcgttcttcctacttagtattttggtccgttcctcgaccatgatctagttttctcctaaaacaaacctgcctctttatgaacgcgggacgcggtcgttacaagtctaccccccttaaactgaattcgtcctcgaattcggcgtgtgtaagatcttggttactccctaactcgggacacgggcgttacaagtctaccccccttaaactgaattcgtcctcgaattcagcgggtttaagatcttgtttactccttaatctttagtctttccgagactttagatatcacatttgatcaaatctctatttccgagtttgatcaagtttcccgatctttgtctcttacgacactcgatcaaattcctgatcctggtcctctcccggactcgatcattatttcccgatctttgtcttttcctggacttgatcaatattttccgatctttgtcctttcttggacttgatcaacgttttccaatctttgtcctttcctggacttgatcaacgttttctgatctttgtctcttccgacattcgatcaaatttttgatcctggtcctttcccggactcgatcattatttcccgatctttgtcctttcctggacttgatcaatgttttccgatctttgtctcttccgacattcgatcaaatttctgatcctggtcctttctcggactcgatcatattctcgacttaagtctttttccgactttgtcaatatttccaaccttggtccccaaaggactcggtcaatatttccgacataggtctctttccgaccttgtcgtttttccatgatcttggtcaatttccgataagatcaaaaccccagaaatagtcaaatcccgactaagtctgtacccgatcttagtcaagttccgactagatccaaattccattgatatcggtccatctccgaatatatcaactcacttttccgtcatgtttaagttttgactacaaggataatatcttggttcgtgatcgtgagttgggtaactatttccggttccaaacacatcgatccctcaacttccttatccgccaaaaccttactataacgttttctcgagcacctatccatcctaggatcaagcatgctctgataccaacttgtgagaccccgtcccggacgtctcggtgtccggcgacgttgcactcaagttcgcgcctcttcccggccgaacctcttaatttttcgcgattcaacatagaattgcctttacgaggctaaattctataatcgctctcttattacacagcggaagtctttctaaccttgggttagttctaaccaactcttgtaccggtttcatcgtctttgtcccttagaattagatcgatcctttactcggtcaagacatgtatattgttcgctaaccattctaggcctaacaatcgcatattcctttatcctatttttacggtcaattccctaacgtctaccttaactaataagttagatcgttacataccttggccaatatgcggatttgacaccttagcccatttgtcgccttattccatttgttcaacgattctgatccgatcgtgtattgatggaccaatctctatcgttacttagccatacaaccaaccaaccccactggtctaagcaaaacaatagagatcggggatcgtacgattcccttggttcacgatggccgaatcaagctcttggcttattggtccattcgttctccaaacgtacgcccctccggctacatggtggacgattgagccctcggcttatcgaaccatccatgtttccgttccggtcgtttaacactacgaccgcccacggtttactaaccgtttacccgtccggtccatggtggtcgataaagctttcggcttaatgatccatccatgcggtccgaacgatatccttatcacacccaagggtccgtggattcatccactggatcatcgtaggctagcccatgaaatctttcttccgtcggccttaggtttgctcgcgggtccaacatccgttttgtccatcggttcccaccgtggactttcctgttggttatccgtcgagtcaccctttggtcttaccgatctctgatcggtttcaccatggctgaagagatagatacatgaaggcggccacgatgttgatcctatatggtgaatcacgttccttacccattcttggtgctttctccctttatcggtaagattgcatccatgggcgacccttgggtgtgttcggatgcacttatccttgcgcttcctcgaacacttttctcgatccatcccatccgacgatcggtctgtccgacccgttccgtcagacgatcggcctgtcccatccgacccatccgacgatcggtctgtccgatccgtctggccgatccgatccgtctgacgatcggtctggccgatccgatccaacgatcggtctaccagatccgattcgtctctaagacgaacggtctaccctctccatcctctacactccatcgaaccgttggaccgggaggtagcatgcgcatcagttcggtcgagttatactcgccgagccgcaccccctttccgaccaacaactcgaggatgtgttgggactcctttaagaatgttttatggtgttttggatgttgtgagatgatgtgagagatgattccaaaggccttgggcgtcctcccttatatagggggcgaatggatgcttcccgaagcatcacattcgttccttgcacccttcccaaaggtcacatccgttccttgcatccttccaaaaggtcacatccgttccttgcatctattaggcgatgcaaccgttcgttggtacccgctcgaccttacaccttttggccgagacacctcttcacccgtgagctaccacagtccaccagctcgagtgtcagctgaccggaccacccagctgggtcagtacacgatcagctcaccgagctcagtcgagctgtcggtcagttcacctagctgagctagctagtcttccagctggtttagctcacctagcttagctagctagttcatcctagcttgtccagctcacctagcttgtccagctcacctagttggttcagcttgaactttctcgttccgtttctcgaccatggtctagttttcccctaaaacaaaccggcctctttatgaacgcgggacgcggtcgttacaagtctaccccccttaaactgaattcgtcctcgaattcggctggtgtaagatcttggttactccctaactcgggacacgggcgttacaagtctaccccccttaaactgaatttgtcctcgaattcagcgggtgtaagatcttgcttacttcctaactcgggacacgggcgttacaagtctaccccccttaaactgaattcgtcctcgaattcagcgggtgtaagatctttgtttactccttaacgctttcccatctttagtctctccgagactttagatatcacatttgatcaaatctctatttccgagtttgaacaagtttcccgatctttgtctcttacgacactcgatcaaattcctgatcctggtcctctcccggactcgatcattattcccgatctttgtcctttcctggacttaatcaatgttttccgatctttgtcctttcttggacttgatcaacgttttccaatcattgtcctttcctggacttgatcaacgttttctgatctttgtgtcttccgacattcgatcaaatttttgatcctggtcctttcccggactcgatcattattccagatctttgtcctttcctggacttgatcaatgttttccgatctttgtcctttcttggacttgatcaacgttttccaatctttgccctttcctggacttgatcaacattttctgatctttgtctcttccgacattcgatcaaatttccgatcctggtcctttcccgaactcgatcattatttcccgatctttgtcctttcctggacttgatcaacgttttctgatctttgtctctttcgacattcgatcaaatttccgatcctggtcctttcctgaactagatcattatttcccgatctttgtcctttcctggacttgatcaacgttttccgatctgtgtcctttcctggacttgatcaacgttttctgatctttgactcttccgacattcgatcaagtttctgatcctggtcctttccaggactcgatcattattctagacttaggtctctttccgaccttgtcgttttttccatgatcttggtcaatctccgataagatcaaaaccccagaaatagtcaaatcccgactaagtctgtacccgatcttagttaagttccgactagatccaaatttcgttgatatcggtccatctccgaatatatcaaccaacttcccgtcatgttaaaagctttgactaaaaggataatatcttggttcccgatcatgagttgggtaacaatttccatttccaaacacatcgatccctcaacttccttatccgccaaactcttactatgacgttttctcgagcacctatccatcctaggatcaagcatgctctgataccaacttgtgagaccccgtcccggacgtctcagtgtccggcgacgttgtactcaagttcgcgcctcttcccggccgaacctcttaatttttcgcgattcaacatagaattgcctttacgaggctaaattctataatcgctctcttattacacagcggaagtctttctaaccttggtttaattctaaccaactcttgtaccggtttcatcgtctttgttccttagacttagatcgatcctttactcggtcaagacatgcatatgttcgctaaccattctaagccaaacaatcgcatattcctttatcctactttcacggtcaattaccaaacgtctatcttaactaataagctagatcgttacataccttggtcaatatgcggatttgattccttagcccgtttgtcgccttactccattcgttcaacgactcgtcatcggtcgtgaattgatgaaccaatccctatcgttacttagccatacaaccaaccaaccccactggtctaagtacaacgatagagattggggatcgtacgattcccttggttcacgatggccgaatcaagctcttggcttattggtccattcgttctccaaacgtacgcccctccggctacatggtggacgattgagccctcggcttatcgaaccatccatgtttccgctctggtcgtttaacactacgaccgcccacggtttactaaccgtttacccgtccggtccatggtggtcgataaagctttcggcttaatgatccatccatgcggtccgaacgatatccttatcacacccaagggtccgtggattcatccactggatcatcgtaggctagcccatgaaatctttcttccgtcggccttaggtttgctcgcgggtccaacatccgttttgtccatcggttcccaccgtggactttcccgttggttatccgtcgagtcaccctttggtcttaccgatctctgattggtttcaccatggctgaggagatagatacatgaaggcgaccgcgatgttgatcctatatggtgaatcacgttccttacccattcttggtgctttctccctttatcggtaagattgcatccatgggcgacccttgggtgtgttcagatgcacttatccttgtgcttcctcgaacactttactcgatccatcccatccgacgatcggtctgtccgacccgttccgtcagacgatcggcctgtcccatccgacccgtccgacgatcggtctgtccgatccaatccgtgtggatgatccgatccgtacgatgatcggtcatgccgacccgatccgacgatcggtctgtccgatccgatccgtctctaagacgaacggtctaccctctccatcctctacactccatcgaaccgttggaccgggaggtagtatgcgcatcagttcggtcgagttatactcgccaagccgcaccccctttccgaccaacaacttcgggatgtgttgggactcttttaagaatgttttgtggtgtgtggatgattgtgagataattgtgagattattgtgagattatcccaaaggccttgggcgtcctcccttatatagggggcgaatggatgcttcccgaagcatcacatccgttccttgcacccttccgaaaggtcacatccgttccttgcatccttccaaaaggtcacatccgttccttgcatctattgggcgatgcaaccgttcgttggtacctgctcgaccttacaccttttggccgagacacctcttcacccgtgagctaccacagtccaccagctcgagtgtcagctgaccggaccacccagctgggtcagtacacgatcagctcactgagctcagtcgagctgtcggtcagctcacctagctgagctagctagtcttccagctggtttagctcacctagcttagctagctagttcatcatagtttgtccagctcacctagctggttaagcttgaactttctcgttcttccgactaagtattttagtccgtttcttgaccatggtctagttttctcctaaaacaacctggcctctttatgaacgcgggacgcggtcgttacaccacccatttgctcaagggggtggatatgaccgtggtggatgttccaacccgtccactggaggtggtggcggataccgcaacataggcagtaatgaataagaagtatgtggtgccggaaatggagcaagcggtggtggttacgagaagacatagcagaggttacatatctggtggaggttgtggtggaaaaggatacggtggtggtggccgtgagggatgtggctaaggaggaggtggcgctggaagttactgaggaggcgtagtggggtttggtaatcaaagatagtgtagtttattgtgactgttagattgttgagagatatggaagatgatgataaagcctataagatttaaatttgaattttgaatattgaggttgtcctctaatatttgattttgattctggaaaaagagagagaggaagaagagaagtaagagatggtgaagaacaaaataaatattgctaaagagaaacagaaaataagattaagggcaaattggaccatttaacaagccaaagtgacttctcctttgaaaatgctcaaaacgacaaatatttttgtaaaagtgtccgacagtgtaatattctgtaaacggataccatgaatggactctttgccatgagtcaatcagttatttcgcttattactgatgacgacttcgagaaagttacaaaacattatagtagaaatataagtttgcatgtagattttgtcaaaagataggcatttgaataacacacaaaagatgagattggagttattactccgttaatcgttaccttcatcaaatttaccaagtctctcttatgtggagcaaattatcatgttcccttgatgcgtcttgctagtctgggaagcaaacattcaatacgtacattatttgttagctttaattctatttctctgtcataaataaataagaaatatatatcacagaaacattctgattctaaattacacatatatcataattcaagtaccataatttactaatcaaaagggatcatcattagaaaactactatgtaagtatttattttatttctgatgtagatgactattagggatgggggctctatatccttgtacggtcaaagggaaatcgaatctaagaacactcaatcatatataccaaaacaaaaccattgttataaaaaatactaattggcgtctaatccttgaaaatcccttttaaattcatatgtgagtaccttttcatggtatcagagcttatggaaaggagatccatggaactttacagtgttccgcaactcaacattttcaactgtgttacagtcactctcacgcagcaaaattacattctttggaccaactcctacgtttcctattccggatatcaatggcgtcactactgagagaccaaatccggagtttgatgtttggttcaaaacagacaaggtggttaagtcttggcttcttgggtcttttgctgaggatatattgagtgttgttgttaactgtgtcactgctcatgaggtatggattactctcgccaaccactttaatagagcttcttcttctaggttgtttgaacttcaacgacgtttacaaactctagaaaagaaggataagcctatgcaaatttatcttaaggaattacagactatttgtgatcagttagcttctattggtagtgcggttccagagaaaatgaagatctttgctgctttgaatggttcaggtagagaatatgaacctatcaaaacaagtattgaaggctctattgatattccacctacacctaagcttgatgaaatcatatcgtgtctcactggttatgatgacagactttagggttacgcaacaagttccgatgttagtccgcatcttgccttcaacacggttcaagcaaactctgtcttttactcgactcgtggtagaggacaaggaaatcgtggatcttgtgggtctcgtggttcaaactccttctcaactcaaggccgtggcttccatcaacaactctcttacaatggttcctacaactcttcttccaaacgccctacttgtcaaatctgtggcgagcgtggtcataatgctctcacctgttggcatcggtttaataatagctaccaacctgatgatctaccacaagctctaacggcgatgcaaatcacagacatcacggatcactcaggcagcgaatgggtcaccgacagtgccgccactgctcacataacaaattcaccacgccacctgcaacaaaccaagtcttatgctgggtctgattcagttatggttggtaatgggaactttctccctattactcacactggctcaacaagtcttgtctctacttcaggtaagcttcatcttaaggatgttntggtatgccctctcattactaaatcgttgatttctgtgtcaaaagttacaaaagattatccctacatttttgagtttgattgtgatgaagttcgtgtgcgtgataagggacccaagaagcttcttcttcagggaagtaacagagatgggctgtatgtgttggatgaaccaaagcttcaggtgttctactcttctcgtcaagttgcagcctcagatgaagtttggcacagacgattaggacatccaaattctcatgttctctag

SEQ ID NO: 157036 - DNA, 243 bp, Arabidopsis thaliana landsberg
gtataattgtatatcattcatataaatcttaatcttcacttcaaagatgcgactttctcctccaaaacatatttacgtagatggcatctcatgatgttcacttaattataaattaacatcacgaatttaacagaataatattattaaaaaatccagcaggtaacatagttataaatggcacacgtgtggggctcatacccagataaggtctcgttccctatactcttaacgctcacaacaaac

SEQ ID NO: 157037 - DNA, 383 bp, Arabidopsis thaliana landsberg
acaaacaaaaactacatttgaatgactattttccacacacaagaggttttatatacagaacccttttgtcatcattgttgtattcaaaaccctcaatattgatactagcacttgtttttatacacatgaagaatattaagaaggaccccaaaaaatccccaagaaacgaaagatcaaaaattaacatagagaaagataaaaactggttcaatccaatcataggctacctcctccatataaacatgtgttattactctgaccgaccttgcggattctcccttatgtctcttagaagatcttgcagctcggggaataccgatcggagtagcagctccagtattgcaaatgtgagttgctttatgcatatgtttgactgcgataga

SEQ ID NO: 157038 - DNA, 356 bp, Arabidopsis thaliana landsberg
gactaggttaacttgaggatctctgttgcggtggcacttagatttggttaatgaacttgttgtctagggttaatttattgagcatgtcaatcacctgtaaacttaggaatcgaaactactcaattatcccatcctcgagaattctttatctgattgattttattgtatactctactgctgtttactgcatcctgtcatctgttgcttagtttctgcagttctttactgttactcgacctggtactcgaccacccagttgtctggcaacagactttgttgtcgagtatccttgttacattatctgtcttctactcgacctgtcactcgaccacacccagtgctctgcaacgagctgt

SEQ ID NO: 157039 - DNA, 203 bp, Arabidopsis thaliana landsberg
catccccttattattaaaagggaagtacaaattgaaattttgtctaatttggcctcaattttaatttcaattttggattttgttctttgctattcaaaatcattaagggtaatttggtcttaacaatctcctaaactttatatgatccgattcaatctaaaccattcaataaaattaattcccttcaatctaaattattattt

SEQ ID NO: 157040 - DNA, 426 bp, Arabidopsis thaliana landsberg
tatttaagtagtgcttgtcatgtgttcatataacgtcaagacatacatcttgaatctcatttgtttactcaagaccaaaatgtacaactggatttttttccctgttttcctctgtttctactaaacattacaactggattaacaaaactcaagtcataatgaattagtcatatataatataacactcgcgcatacctttaaagatccccaaaagttctaaggaatatactcaatggatctatctttctttagccattcgaatttactctagttttccgagtggggactcaagagcatgatcatcgactagccatagactaaagtcttgaaaacgtttcatcttcttgtcgtaaccgataatgtagttattgtggactatgacatgtttcccccttgtctcgttaacccatgtctcattcctgaagt

SEQ ID NO: 157041 - DNA, 112 bp, Arabidopsis thaliana landsberg
ataacactgatttaataaagtggagagtgttttgttttttatttttgaagtgttgttgtgaatttctggtctggttgtttcttgtaacatatgattgattacgttttgattt

SEQ ID NO: 157042 - DNA, 364 bp, Arabidopsis thaliana landsberg
  unsure (1)..(364): unsure at all n locations
atatgttaatacaattttttttttaaaccggaaaaataataattcagttagttatttttcagcaagacctgtgtttcaatcatggaatgtatgatactttgaggatgaatgacaatctctatatcgtcatactcagctccaaacaaataatgcnnnnnnnnnnnnnnnnnnnnnnnnnnnnnnaaatcaagaactcatctaccttgatcaaaggtactttcaaaatcagagttaagaaaataatcttaaccttgttgaaaagcgtagcagagtccacagtgattttctttcccatgttccagtttggatgcttcaacgcatccgctactttaacttcctttagcttttcgacaagccaatacct

SEQ ID NO: 157043 - DNA, 101 bp, Arabidopsis thaliana landsberg
attcccactttattagacaggtagctaattgcggtcattgaccggaccgatgaacttcgcattataatcaattgttacaagaagccaccacagagttggga

SEQ ID NO: 157044 - DNA, 200 bp, Arabidopsis thaliana landsberg
aaagaaagatcaacttcacaaagaaccatggaagctgagaaagaaacagaacaagaaggaaactcgacagtaatgaaacttccggtgttaccaactaaacgcgaacactcacagccactctatgacatcaccaattcacagttccatatcagcttcggttccctttagctgggaagaaaagacaggtatgcattaacaac

SEQ ID NO: 157045 - DNA, 152 bp, Arabidopsis thaliana landsberg; identical to SEQ ID NO: 35863

SEQ ID NO: 157046 - DNA, 377 bp, Arabidopsis thaliana landsberg
tagatagtctcttcaatgtcacaaataatcgaatcacacaatattaaacactaaattattcacagttttcttggagaaaagattcaagttcaagtacaagcagagaaagtgagagagagagagaaatgatgggtagcttgaaaataatatctccaccacctccggcgacaagattccggcaacgagtaacggcgaacggagatgggttttcggcatttctttcgaaggagatacataacataaaagatccattcgcaagagctttagctcaaaggattgtacgaattcctgttcctcttcagggtcttcttctttttctctgtctcttgcatgagtagcttaaacagagaatcttggtccttagtttcttgaatttt

SEQ ID NO: 157047 - DNA, 93 bp, Arabidopsis thaliana landsberg
aaaaaaaaaagacaaagaaaaaaagaaaaaaaacaaaaaaacaaaagaaaaagaaggacaaagtagaaaaaaaaaaaaaaaaaaaaaaaaaaa

SEQ ID NO: 157048 - DNA, 284 bp, Arabidopsis thaliana landsberg
tctttccaacagatctaatcttcttcacttcccaagtgtaaaaacctcaactttcagccaacaaaattagggtttcaagctgagattttctacttctgttacacaaaaatacccaatgagtaaagcttcggtgatcctatacattacgcgaggaatcctggtgctcttcctcgtctcttattcaccgaagaagaagggtgaccacgatcaccaccatggtggtcacaatcaacatcaccgcttaaaactccggtcttctttcaatttcaaacccactcgtcacg

SEQ ID NO: 157049 - DNA, 190 bp, Arabidopsis thaliana landsberg
  unsure (1)..(190): unsure at all n locations
tgttttttgttcattcatgttctattataattaccttcttgcctcggacaaaanaggtatatttcttatgaaagaacaagatgtgttttgtgtataaaccaaaaaaatcacgaaaagtttacgtaacccgtgaatatataaaagtttagacgttcncgattgtatatatttttttcgatatatataattt

SEQ ID NO: 157050 - DNA, 273 bp, Arabidopsis thaliana landsberg
  unsure (1)..(273): unsure at all n locations
ggatccagtgagcaaccgaggattatctaatccaaacaaaaaaccagaatacttgagcaaggaaccagtgaagaagaactctttcannnnnnnnnnnnnnnnnnnnnntaacaagctatctgatccagcctggtgagaaatcccaactcgtttaacaccaagtaactccgctattttctccagacctccatagaggttagtacagaatcccatcaagtatttgatatcatacactaccgggaaaaacttctccatctgatcaaagaagtccga

SEQ ID NO: 157051 - DNA, 767 bp, Arabidopsis thaliana landsberg
ctaatctgtaatcatcattccatatttgatagatcagttcactatcttattaattattacattgtaataaaagtaaaaatatattttggtatacacccaatgcaagctattacacgtaactaatccatatacatatataaccctatccatcccccaatagaaacgaaaaaaaaaaaaattacaaaatcgatatacaaccgtcggccatatataaccaaagactaaaattaaattttgttctttgttttggttcaatggtatgagaaactatatactaattaaaaactagaaacgtatataataacctgtttcggtttctccttctagagagatgggtttatgcaacgaagtcgggcaataactgagccacatatctcttctggttctgtatgttcatcccattgtaagccgcggcagctgccgctgatgaatgtgcggttgtggtcgagctaccaccattgatggtggcgggtccatattcctctgtttctcctattttcactcttctccctataggaatcctatggtgggtctgcatgaaaccctgatggtgcgtggacgacaagctatcacaatgaggtaaacctaacgtgagggacacgccattgttgtttcctgagtacctttgcgccatgagctcctggtctgagactacatcaaatcttgacatctcatccatttggtattgcccgaaattacccatgaaagggtagccaccatctgatcttatcccttgccgttcttctagaatcttcatcgtgagcttc

SEQ ID NO: 157052 - DNA, 382 bp, Arabidopsis thaliana landsberg
actctctcttgcttcatcatagtcctttgcatgccattcggcttttagcggcggtgatgctacattgagctagtacccacttgcctctcttcctctcttttattgcaattttcgacctaacccaagtgttcgaagctgtgtggcattcccgtaattctcttattcctctcattgtgattctctcactcgcttaccaattgagcattgtaaactcccaatttcattgcttttgtgtcaatttcctagttgctctatggaaatttggaatctttagcgcattacacagtccagcataattctgttagcttggtttcagtaaatacctgataaagtaaagtactttcttcattttttcagtcactggaagatttaaattgggttt

SEQ ID NO: 157053 - DNA, 201 bp, Arabidopsis thaliana landsberg
gctactcacacaagcatcaaaagcagaaacaaatatatacatcaccataatcatcatcatcattagaaccttcatctttttgagcaacaaagttatgggtttctcgggaatttggttaaatctttatgtggtgtttggatctttaatggtttttgagagactggcggagacgaaggcacacccgccgcatccagcacttct

SEQ ID NO: 157054 - DNA, 374 bp, Arabidopsis thaliana landsberg
agttgtgcaagtgaggtcgagcaaggatacctcgtgctacataactcattcagcttgaaaagcctaccatattcctcagcaggcaatacatcgggcttgtgcagaagtttggtagatctgcgagtctgttcaggcatgtactcgtcttccagatcttcgtctataagctcatacctctctgtcatcgctctcttccatcgggctatctcagctttccttctgaagctttcatattctctatgttctctctcttgccttgaagatgacgactctgtctcatccatgttgtagtcaggatcaacagaagagctgccactgtaattgctcatgattctcctgtagaaatttagaactcaaagctcaaacgtcaatag

SEQ ID NO: 157055 - DNA, 294 bp, Arabidopsis thaliana landsberg
  unsure (1)..(294): unsure at all n locations
catgtaccgtggtgtggaccctaagagcccatatagcttagtttccgtggtacgcatttcttcttcttcttccctatgacagtacaagacaaatggtgtcgaacttgaacctgcctgtactttgtgttttcattgtttgctttcaccctaaaatgttttttttttgtttggtatctctgcaactccaggtttgttattatggacagcattatcactgttttgcatatagtcatgagcncgatcagtgantaatgtgcgatgaccaaaacgtcaaggtaagactttccttcaccg

SEQ ID NO: 157056 - DNA, 196 bp, Arabidopsis thaliana landsberg
ctggattttccattttgcgcaattgcttaagaaccatgttgggtttgattctgattcgtacgtggaccttcatgaccttgggatgaagctgtatccggaagcaatggaggatgctgtcactggtgaagatgcgcaggaactctttcaaatcgctgctgataagttccaagaaatgggggcactagctttgttgaac

SEQ ID NO: 157057 - DNA, 194 bp, Arabidopsis thaliana landsberg
  unsure (1)..(194): unsure at all n locations
aaaaatattaaattaataactacttttaatcttgtgtttctccttttccaccattattcatacatctttattcatctcttcgttaatccaatccatgcattcacgataatcatcanagttatcgtctatcttcatatcatcttgatttacagattctatattatcgcatgactccatcatattattttcctcag

SEQ ID NO: 157058 - DNA, 363 bp, Arabidopsis thaliana landsberg
atgcaaacgatgatgctgacttagaagagtttatgggaaatgatggtgaagcaagtaaccgaagtagacgtctctgtgccatttgttttgatgctccaagagattgctttttcctcccttgtggtcattccgtctcctgttatgaatgcggaacaacgtaagttattttgtccacgaaggtctttaagaattgataatatacaactagacatatcaaaatcacttgattgatctaaactttgaaacgttatgaatctgcaatatgtgaaggatgcaagaagctgatgggagttgtccaatatgtcgaaggaaaatgaagaaagtgaagcgaatctatacagtgtaagatgaatcaaatataaa

SEQ ID NO: 157059 - DNA, 144 bp, Arabidopsis thaliana landsberg
caaaccagcagctgttattgaaatgagtgttgagattctaagattccatcatcttttgctcgagagatcatatagtctaaaagaaggatcaaagacacgtttagattgtcgagttcgctatgaagctgtgttccacttagtcga

SEQ ID NO: 157060 - DNA, 331 bp, Arabidopsis thaliana landsberg
tgaagtttaccagcaagtttaggaagtgttctccagcttccatgtccatttttcttgatatgcgcaacaagaacctcattctctttaggcgtccaaggacctttcttcaaaccaatcttgtcacaacaaggtgttctttccatttgttcctcaccccactaacaagcagggaaagactctttttgaatttctttcggttttgtagaagaagaaacacagaatgactaatcttttgaacagcttgttgacttttagactcataataggagagaccagagtaatgcccaaggtgaaattaagagtattatgattggattatagagagaatttt

SEQ ID NO: 157061 - DNA, 830 bp, Arabidopsis thaliana landsberg
gtcagagatccattcgatagcactttcctctctttctctcatcgtaaaaccgttcttcgttttttctatttctctcgtctctttcttctacccagatcactgattgattagtcgtgaattttactctactctttcatcaattttactgtgtttaattcataaaacaaaacaaacgatcgatttttgtttttttttggggatgacgatcagaagcaaaaaaagcaaaggctatcgtcaagagatcaaatcaacttgcaccgactccaacactctgttctcaaaaggtacttttcgtcttgttggaatttttggccaaataacgtcttttttttatatggtatctaattactgtattctggttgatcgcaaaacaaagaattctcatgtttaaagtgggtttcgtctaatccaatttgaattttaggtcttatattatttccctagctctaaccctaatcatatatttctcaaagtttttgatttttattcaagattccttctaatcaattatttcttctttgtatgtagatgtggttgcaacttcggagcttttttcatctgtgatatcgtagcgtgtgaaagacggataattctacagagacaatgcatcatcccattcggctaggtcaattttcatctctatcttgtttataatctataatcttatagatagtttaattacaaaaaaggtttttatacttttgatttttcaaaacaaaatatatttctcaaagtttttgatttttaaaggttttaactcttttttatttttatttttttctataaatactaaattaatttgaagttgtgaaatctaatcggattttgga

SEQ ID NO: 157062 - DNA, 94 bp, Arabidopsis thaliana landsberg
cctacatgttatatgcataagcaaaaagaaaaaaaaacatccacatgttaagtttttcaacaaatcacgttgccgtaattcattgttcagaata

SEQ ID NO: 157063 - DNA, 481 bp, Arabidopsis thaliana landsberg
tatttgatctatgcatagtaattctttgaaatataaagtttacatatgactatcctgtcgtgcaacctagttctctctactaaaatctcatttcttccaaactagtatcacaacaaacaaaataaaatatttgatgtcaagaggttcagacttcagagacataactaaactactcaaaatccaagaatcttgggagcaatgtgaagcaaaggctccaaagcactcggagcaaacttcctcgcaaagagataacacatggaagtgttgcgaccattgtaactgcagtttcttccatcaaagattttttcaaagaagttttctgtaatgtccgatcgcccaaacgtagctgggtggggactcgcccttgaccagtccacccatgtcaagcctccggtagccagactgttggtttctcaatcgcaacattgctgggagtaatgcttgccacatagcaagcgggcctgcagactcttgaatttcg

SEQ ID NO: 157064 - DNA, 196 bp, Arabidopsis thaliana landsberg
gctgactcatgaggcactcgcccaccagttgttcgacgaaattcctaaaccaaaaaatttcgcccacagagatttagattgagtctacctgaaatgtgggataaatttcgtattttgcgtgaggtttcgcggagtttagagaatcagtggcgcactggcgcgtgatgcgttttcttctactcttttgggtacgtat

SEQ ID NO: 157065 - DNA, 369 bp, Arabidopsis thaliana landsberg
tatttccatcaaatactttatatacaacgacgaattcatttgcttacacatttatacatgaaatcaaatataatttcaagacaagtagaagaaacagtagtaccaaaccataatttaaagcgatggaaaaatattttgcatgtcttctacttatctttgtaagatgagtgctgctccaaccaaaccaaaccacagtgtcaaagcaagccaaaagactcggttcttctccataccgaccaccggtcgccaaaccaagagctttcctagaaaatcatcactcgagttgagctgattcgtagtcgatgcattcattcgccgctccttatccctttccttatcactccatgtcactgcatagctgcgcacaca

SEQ ID NO: 157066 - DNA, 234 bp, Arabidopsis thaliana landsberg
ttcgtcgagcttaaccgacaaaatttggcaaccaagccggagagtgccgagaggaagagcatgagccaaagctcgaaccaagtcgttccttagtacacctcttacttctccataggatgccggtccaaccgattctcttcgtttaatccttttctcgatcaaagcatctcttatcctgttttagtaccataccggaaatcattataactagataaggttagttaaaatagaaat

SEQ ID NO: 157067 - DNA, 378 bp, Arabidopsis thaliana landsberg
  unsure (1)..(378): unsure at all n locations
aagagctgaaggagaagattgcaagcggatcaactcaagaaatcaaagacaccatgacagctcttacccaagaagtgatgcagattggccagtctctgtacaaccaaccccaaccaggtggtgctggttctcctcctggaggtgaagcttcctcgtcgtctgacacatcatcctcagccaaaggtggagacannnnnnnnnnnnnnnnnnnngctgacttcacagacagcaattaatacgaattggattcatacaaggattatttatggggtttgtccatgattttgtaggaatgataatgtgatttgtgggcagcaaatgaatggtaagagtcaaattttgtctttttaaacacatgattgaagcaatattctggag

SEQ ID NO: 157068 - DNA, 327 bp, Arabidopsis thaliana landsberg
gagaagagatcgagagaagaatagtttgatcatcttgtgagaaaaataatggctgcttcagtgatgctatcttcggtgacattgaaaccagctggtttcacggtggagaagacggcggctagaggattaccgtcgctcacaagagctcgtccctccttcaaaattgtcgccagtggcgtcaagaagatcaagaccgacaagcccttcggttcgtttatattattattacacagacttttacaacatatacacgttaccgttcatgtatagcttatttccgttaatcgatgtgtgtgtaggaattaacggcagcatggacttgaggga

SEQ ID NO: 157069 - DNA, 226 bp, Arabidopsis thaliana landsberg
gttactatatgaacttaaattgattggattagaataggatggaaattgagagagattattacatatctgaaaaccaaacagaaattaaaaaaaaaacaaaaaaagaaagcaaatagaatataagaaatacatcgaaattcttagttctttatagattctctcaaatgtcctcttcttgatagaaaggcattttattaatggcttcaattagtgttacggtacctag

SEQ ID NO: 157070 - DNA, 378 bp, Arabidopsis thaliana landsberg
tgactttgttcttgctttatttcagactatttgttatttgttttgaaatttgttgcacttattttcctatgctttgttggacctattgatgtgtgttttagtgatttaacagtctaactggagagtccatgtgaaaacactaaccaaggctctagaaaaatgagctgaattcgcaaagctaagcaaaacgaccagagtgtcgatagacaccaacatggtatcgatcgacaccactctcaagtggcaactcacgtttttctaacttttatcttttgattattttcctttcgattcctatggcttaataaatctggggccaatgttatttaagtctgggggagtcagttactaacttcatcttttattttcttatgagtc

SEQ ID NO: 157071 - DNA, 123 bp, Arabidopsis thaliana landsberg; identical to SEQ ID NO: 69173

SEQ ID NO: 157072 - DNA, 319 bp, Arabidopsis thaliana landsberg
aagattcttcctaaacattttaggttcaaatttatagacttcacttattaggagaataaaactagaaatgaagttatagatgaagcacacgcaagaaaaaagaagggaacatatattcatacatgtatatatatgtaaggttatatgatcatcttcttcctcgcctgatctctttccatcatcagctctctgcttacacattcattaatgcgtacgtacaaagataaacataaatcatacacacgcatatatatctatacacatatatatacgtataagtgtatatatgtgtgtatatatataaaggctttagtaatag

SEQ ID NO: 157073 - DNA, 437 bp, Arabidopsis thaliana landsberg
aaattgtgtcctctgttttaagtttctgattttggatttgaagatccgatttttgcatcttgatgattcatttcaaaaaatgtctaattttggtatgatttttgcttgtctcaggtaagattcttagagtgattttgacttatctaagaatggagctaaagagcattaaggatgcgtttgatcgtgttgcgacgaagcagaagctctcttatagcaaaactaatgagattgttcatatgttgtctcaagaaatcgataaggctttgagcatattagaggagacaccatcatcagatactatgcttcttgatcatagatctatcctcgctgatgtgaagaaagtgtttatggagattgctccaatcactcaacttgaagctactgagaaagagctacatgcggctttgaccaagtaccctaaagttcttgagaaacag

SEQ ID NO: 157074 - DNA, 272 bp, Arabidopsis thaliana landsberg
aatggcgactatatgttgaattttccagggaagtcacctcctttacatcttacacagcagtttaaaatgtttgtagaaatcagaaaatcggtggaatgaaaaaacaataatcagtgatttttttaggtaacaatcacaatcacaataacataaagattaaaacttttgacataacaaacaaacaaaaagactagcctagccctgcgctttcgtcttggcgaggagcgtcttctttgatgcgcggtggtctaacaatcttatcaataagtcca

SEQ ID NO: 157075 - DNA, 92 bp, Arabidopsis thaliana landsberg
taaagaaactaaccattattatcatccatcctagtctcacacaagagttttaagaaaacaacttacaaggatggaccacttcatacgtagag

SEQ ID NO: 157076 - DNA, 414 bp, Arabidopsis thaliana landsberg
tgaaaccaaaagaggtcaattatcaaaatgattgtttatatatggtcagcaaatcagtaccgacacatcatgggaacattaggaaaactaaacctcaagctcatgaggttattaaaagttcattttataacaaaacttctttattcgaaacaaagctctcactgattaaaccagctgagaaaagacgggtttaagagaggcatgagtaagcgaggtccttctcttccttcaactcctctgctgtcaaatccatcttcttcctcgatgcgtcatcaatcggtaaacctgtgaataacaacaacacatattagaccaatatctagttctatgagctaatcatcgcagcaagaaccagccttgcacacttaggattagaagtagacaatccagtttacggttccgttacacgatcag

SEQ ID NO: 157077 - DNA, 244 bp, Arabidopsis thaliana landsberg
caaggtaagatcaccattgatgcagatgttttgtcaaaatatcttatgaaaactctgttttcttgcgtttgcgattagatgataaagatacaataaatggtatgatggatgagtaacagaaagatccagaaatgaattgatttctagttcgagatatttccttagctttattttggttgtttaaaattgaattctctttgtttataattgttatacatcgttgtcgttttgactcatgtatctt

SEQ ID NO: 157078 - DNA, 69 bp, Arabidopsis thaliana landsberg
aacgtcatctctttctcatctcgggaaataaacaccattgccggattccaaccttcttccgcgaacata

SEQ ID NO: 157079 - DNA, 65 bp, Arabidopsis thaliana landsberg
ggtttttggatccgtgagactggtcaagctttcgatcgccttggttgtcgtcttcaagttaaaaa

SEQ ID NO: 157080 - DNA, 116 bp, Arabidopsis thaliana landsberg
acttgttctcctccctttggtataatccttttccgtggtgccgccggtaattgagcattttgcttcttggagctaacgcccttgagcatatatcacagtagtcttataaacttttc

SEQ ID NO: 157081 - DNA, 441 bp, Arabidopsis thaliana landsberg
tttctagattagtttaggaacttgagactttaaaatctcaaacttctctttggtagcaacattttcaaatgagtaaacatgtttattgtagacataacataatagtaagcatttatgtataatgcatccatcaagtagtagatgatacaatggcgtaaagagggaataaacggtgaatcaccataccggttgattcagcgacattggtttgatcttctatatattcctccggtaatctccaatcataccgatgcactaagttagccaaagtcacctcaatcaagatcacagcgaatgatattgctggacaaatccttctccctgctccaaatggaataagctcaaaattgtgacctcggaaatcgacagacgaatttaaatgtctctccggtctaaacttctccgcgtctggtccccacgtcgcagcctctctcccgatcg

SEQ ID NO: 157082 - DNA, 216 bp, Arabidopsis thaliana landsberg
tagggaacggtctgagtaaaaacacgttcctcgtcgttcccattatacttatagcatcttctcgggcatgctcgttgtttttatcatcagaagctctctgcccgttactaccaattttttggacgcagaagaatgaaagaggatgattgatcgatccaagttggtttgattgtaccatttacatagaatgcctttgtaatgtttaactcttcatat

SEQ ID NO: 157083 - DNA, 191 bp, Arabidopsis thaliana landsberg
aacagcacgaggaacgtaacgaccaccagaagcttcattgtaataaacattgatacgttcgagctgaagatcggcggaatcaccgttgtaacgtccggtgggatcaacgccgtgttcgtcgcagataacttcccagaatttggaaccgatttggttaccgcattggccgccttggacgtggaggatttctc

SEQ ID NO: 157084 - DNA, 253 bp, Arabidopsis thaliana landsberg
attaaattaaaacaaaatgagtatttgttttgaaaaacatgtaatagaataaactagacttaaaaagtcccagtaaattttcttattaaccttataaactgtaaacatttggggtagtctagttaataaaactatttataatgccagaaataaataaataaaattgtgagaaaaactattattgagtttgacaacttgatgacccattatgtaggctcacatcacctgactagacactagactactaaaaata

SEQ ID NO: 157085 - DNA, 186 bp, Arabidopsis thaliana landsberg
taaatcaaaataaatattgttctatcattagcaagttggggataaatacaataacgttgacatagtgacggatgtaaaagtcaaactaatcacaatgctttgactctaattaattaaggttgatatccacagtctaaaccttcgattcgtttcgtttcgtttagtttcgtttcggttcgtttcgtt

SEQ ID NO: 157086 - DNA, 339 bp, Arabidopsis thaliana landsberg
agagaaagataaatccaaaccagagtcttgaaagaagaagaagaagaagaagaagaagaagaagattgtgaagcaggaaggagagaaagagggagataaagaatcggaaagccaccggtttggacaagagtagagatccatttactgtttccaccttcattgtaataaaaccgaccaaggagaacagaaatggcttgagcagagatgagaaagaagatgcttatgaaaacaagaatccaccaatggcttcgatttagtttcatgagttgtgtaggaacactagttcttattcttccttcatcttcttccttaaacagcaacattgcttcttcttcatct

SEQ ID NO: 157087 - DNA, 534 bp, Arabidopsis thaliana landsberg
gaaacccaaaaaagggttaatagataaatgcgtagagcacaaggaacacatagataataagtgcagaaggaacaagtacaacaagaggaacaatagctgcaagtgcatgaaagcttctcttacattccaaaggtccaagtttaatctgaacaagatccactaacgccattgtcaagaacccacatcccaaaaccgacgcaacacacgaagcaacaatcccaacccttaaagctgccaagttcacacgcccctctcccgcgttcaacacacgcgcctcctcctctaaacagttcccgtttgttgttgttgttgtcctaattgcttgcttgagagacatagcgatgagactggagaagaggaataaactgaaggagtaaacatggcttgatactagcctctccgctaatgcgggaccttttgcagagatacatcggcggagatggtggttctcggaggctgatgaggaaaccgggaaagtgatgtttccacatgtggttaggccgaggaaaagagcaagcgagaagagtgaataac

SEQ ID NO: 157088 - DNA, 161 bp, Arabidopsis thaliana landsberg
gcaaattagggtcgacccagatttaagtgtttatctctttcattaaaccatatttggcctcaactatattaaagtttcggatacattctgcgaaaactctatgtttggtccacttctaaattcatattatggaagaaaaaaatctgggccatgattgttgg

SEQ ID NO: 157089 - DNA, 80 bp, Arabidopsis thaliana landsberg
ttttttttttttttttttttttttttttgtttttttttttggtttttttttttttttgttattgtatttttctttttttt

SEQ ID NO: 157090 - DNA, 370 bp, Arabidopsis thaliana landsberg
  unsure (1)..(370): unsure at all n locations
gcaaaaactcggttcaagctgaaatcgaaactcgaaccggactgtgatggtggtttccnnnnnnnnnnnnnnnnnnnnnnnnaacgtcggcggcgagatcttcgaaaccaacgcgtcgaccattcaatcatcttgcccagactctctcctcgcagctctatcgacttcaacctcccatggatcgaatccggttttcatcgatcgtgacccggagattttcgccgtcattctcaatctcctccgtactggtcgactcccagctaattcctccggcgttttttccaagcaagagctactagatgaggctatgtattacggcgtcgaatcactcctcagattggcgatgttaccgccgccgctgctaagtttc

SEQ ID NO: 157091 - DNA, 374 bp, Arabidopsis thaliana landsberg
aacagatatcctctctctctaaacgggatatcgactcaatacatattgtgtcattaacaatgtatgagggaacaatacaacatgacaattacaaaacaacaaaaccctagatccccaaactcattatcaaatcgtattgatcagattccactgtaatcaccacgagcaccgtcgttaccaccgccagcggtagagagcatcggtccataaggtgattccagatcgtcactcacaagatcatccgttcctcttaacgcagcgtgtaagatcaaaaccagaacaccaaatccaacggtggtgagagctctgagccaaactccggtggtaactagcgacccaatcgaaagaccaatgagaagcacagcgacgatgcc

SEQ ID NO: 157092 - DNA, 80 bp, Arabidopsis thaliana landsberg
gccacagaaagcttaaggtatatgttctgtactctttgagaaaaacaaaaggcaaaaaataaactctgctctgtttgatt

SEQ ID NO: 157093 - DNA, 666 bp, Arabidopsis thaliana landsberg
tttttaagtaaatgaacaaaagttattctttcttgatttattattcaaacatttctttcttactccatataacacaacaaaatctaaagaatcttatgttttttgcttcatacactttccatgttatcgagcttatattttggctcatcaataacgttgaacaggcacaagttgaagaggtattttcttgacaatagagatattaccagcttcttccatatcaatgtcttcacctttagtcccatcaggcatactccaatcaaaataataaagcaaattcatcaatgctagttccacagtagcaatcgccattggcatcccgggacaaatccttcgaccagaaccaaacggtaataggtcaaaatgttgtcctctaaaatctacagagctatttgcaaacctttcagggttgaattcttcagggtcattccaacgcttagggtcacgtccgatcgtccacacgttaagctggatttgtgttttcggtggaatatcatagccttggatcttgatgtgagacattgtttcccttggcaccacaaatggaagtgccgggtgtaacctaaaagtttccttgagtatgtggttcaaatactcaactttgcctaaatcttcttcagtgattctttccttcttgagacccagagtggttcgaatactttcttg

SEQ ID NO: 157094 - DNA, 375 bp, Arabidopsis thaliana landsberg
ctttttttttgttttggatcatcttttcatgccgattgcatcagtgcagatttccttatttactctttctcttctcaaatttccatttttttctttatctctcccactcccactcataaaattagttttgtctttctttccccaaaaatctttacttaaaatctttttcacccttttgctttaacttttgtttgctcctcctctggatcgtatcagtaaactggaagaagaaattgtgagaaaaaatggagaaaaccaagatgattacgtctatgacctgttgaagaaaccctactcagaataagagtaaaactctgtgatttttctgactaacagagagagagacacctaaatgggctcagagcaggatcaggt

SEQ ID NO: 157095 - DNA, 479 bp, Arabidopsis thaliana landsberg
tgatttagcagagatatcaatcctagatgcctcagttaacagatgaagcataaaggacgcaatgcaccacagtccattacatacaacaggctgagagtgccaaggtattaaaccttcaagtggtggataccacatttgatgctcgtttttgtaatctaaggcagtctgaagaattgtaacacatgcatttgagagttcgcaggctctctgcacttgagttcctagtggttggtcagctctgattatgtattctagttgcctgttcagacaataaaacacttcctcaagttcagataccttgctgtagaaaacttcagcattatctctgtccatcaaaagaactgtatttcgccgggctctctcccctacaaattgaataagatcccaaagggcacatgaaacttgatcctctgagccagcttgcggcgagccaaatctagctgcgcggttctggttaatcatattctgcagttcccgga

SEQ ID NO: 157096 - DNA, 393 bp, Arabidopsis thaliana landsberg
tcattacctaaaagacaaaaaatattaattttttatttattattatttacatatttaaaattcataaaacattattaataattaaatttataaaaagtttgatatatcaaaaaaagataacatcattatataatatatagagtttaaaaaatctcaaaaaaaaaatcgtcatattttgtgattcgaaattttaagaatgaacatatattaactaattggcgaaaaatgtgtgggttcaatgtcccgcaacgaataaaatattttgacaatgattcataaacatattataaataaaatcaacattaataaaataaataaaaaaaatttgtggacgggtttggcgggacgagtttggcaggacgttacttagtaacaatggtaaactataaaata

SEQ ID NO: 157097 - DNA, 413 bp, Arabidopsis thaliana landsberg
tctccaaagccataccacttgaaacctctctctctctctctctggttgacccgataatttctctctcgcagacgcacagatctctcttcgaatctgctagatctgttccttttcttacatctgtattgcgaaacctctggtaatttcatactttcatgtctctccgtttcatttcgattttcgtttcacagctagggtttgctttttgttacatcgatttctgattttcctggtgttgttgcctcttcctcagatcggaaggtttcgtttacagatctaccgatacgagtttcgttgtatttccgagttccgacgtatgctttgttttcagatctgggtttgttgtatatctaaaaatagcggagactttgaaagaagattcgattatgattcgggaggtttggatacaattg

SEQ ID NO: 157098 - DNA, 257 bp, Arabidopsis thaliana landsberg
aatcacaaaccgacaagtatcctccctcctcatccaaaactataccaagaggttccaaagtatcactctctcttcttccactatcaattatgggacgatacactcaagttgagtgactcaacgttgcggaatccatcatcatcgtcaaaagaatggaacaacatggcggttctagctcacagaaacgtcacgcagtgtgcataccttatccagcacaaggacacatcaacccaatgctaaagtagccaaactcctcc

SEQ ID NO: 157099 - DNA, 151 bp, Arabidopsis thaliana landsberg
gtcaaaagcagttacttatgcagagaagggaagagagagtagaaaatagatatcttttgcgtgagcctctctttgcccgtacgattcttcgggctctatgagatatcgaattttcttctcaaggttagatttttcgctttctactaaaatt

SEQ ID NO: 157100 - DNA, 89 bp, Arabidopsis thaliana landsberg
cttcgattgcaggcagtagggaaatgcactctctgcttaagcacccgtcagcacccaacggccactccttgtggtcatgtgttttgttg

SEQ ID NO: 157101 - DNA, 356 bp, Arabidopsis thaliana landsberg
gactagtttaacttgagagtctctgttgcggtggtacttagatttggttaatgaacttgttgtctagggttaatttattgagcatgtcaatcacctgtaaactgaggaaacgaaactactcaattaccccatcctcggaaattttttatcttattgaattttttttttactctactgttgtttactgcatcttgttatctgtggtttaatttctgcagttcttttttgttactcgacctcatactcaaccaccctgttgtctggcaacagactgtgcagtcgagtatctgtgttttattttctgtctgttactcgacctgtcactcgacctcacccagtgctctgcaaagagctgt

SEQ ID NO: 157102 - DNA, 152 bp, Arabidopsis thaliana landsberg
catatggctataatatgggacattgatttctcgttgtcatgattaatcgagaaaatctgccatatcaagatgactatcatcatcttggccattaaggttccgactcatcacagatgagattagtttcaacatcccttttttttgccttttat

SEQ ID NO: 157103 - DNA, 387 bp, Arabidopsis thaliana landsberg
gagagaggagaagtacttttatctcttaagatagtgtgcgtataagcactgtccgccagacatatattttcatcctcaatctcgaattttgacataggctatccatatgtcataacatattttctggaataaaatatttattcatgaaactttgacataggctatccatatgtcataatatataacattattccagaattacaaaagcatctataatgcttgtcatgcatagcataattatacatatggctataatatattacattgatttctcgttttcatgatcaatcgagaaaatctgccataccaagatgattggcctttaaaggaaggtcccggcttatcatgatgagattagtttcaacatccctttcttttgtcttttgt

SEQ ID NO: 157104 - DNA, 182 bp, Arabidopsis thaliana landsberg; identical to SEQ ID NO: 12758

SEQ ID NO: 157105 - DNA, 359 bp, Arabidopsis thaliana landsberg
gtaactcatcccccttatcaggtaagaaagagagacagtttgatttatagtcttgttcgaatttggtaaacaagtgaaagtcctttcagaatttgatcgttaagatgattcaaggagcaatcagaaatgatatcaagacaagtggaaagccactttaagtggctgtgaagaagaagaggttttgttgtgagcaaattacaaggagaagaagagttacgtttttatattgttctttctttcttttgttagattttatctgcaacaactttcttgtttccggctttatctttgtctgaaatttttggagatttgttcaaagaaaagtagcttccttcccaccaatataatggctataaaca

SEQ ID NO: 157106 - DNA, 96 bp, Arabidopsis thaliana landsberg
tagaaagataaagagatcaaaaactccatcagcaaacactattgcgattggagaagactagtttcagaacttgggttggtggctatagaatatgtg

SEQ ID NO: 157107 - DNA, 106 bp, Arabidopsis thaliana landsberg
tttgataaacaagatagattgatccacttaggtttaacttaggacacccccaacacagaatatcagagtaaaacaagtaattcagaagtcaagaattgcccaaact

SEQ ID NO: 157108 - DNA, 292 bp, Arabidopsis thaliana landsberg
tcgagtatataaagagagaagataatgaggtcgagtggtgatggattggtgatgatggcgttcaagtcgagtggtgcggagaagaagagcttgatggtgttaagcttccggcgttgaagtcgagtgcttgtgaggaagagagatggtgaggtcgagtgaatgagagtatgtagaaatgaaagtatggttgagtttggacgaggatgaggtcgagtgaagaggggttatggaggagaaaacgatgaggtcgagcggtggagttataagcgtgggggagtgatggggatttctt

SEQ ID NO: 157109 - DNA, 313 bp, Arabidopsis thaliana landsberg
gcctattagatgcaaggaacggatgtgaccttttggaaggatgcaaggaacggatgtgatctttcggaagggtgcaaggaacggatgtgatgcttcgggaagcatccattcgccccttatataagggaggacgcccaaggcctttggaataatctcacatcatctcacaacatccaaaacaccataaaacattcttaaaggagtcccaacacatcctagagttgttggtcggaaagggggtgcggctttgcgtttctaactcgaccgaactgatgcgcatgctacctcccgatccaacggttcgatggaatgt

SEQ ID NO: 157110 - DNA, 222 bp, Arabidopsis thaliana landsberg
ttcagggctcgcttttcacctatttaaaccatcattttcctttctccattttgccgtcatcacccaacaacaaaaccctagttttggtttctctggatctgaagaatcttcatgactttttctatagatcggccctctgatcagaaccggtcgggatcctttggactcgttttactttgggaccttttttttctatgctctggtttgaaatgatcttatttt

SEQ ID NO: 157111 - DNA, 537 bp, Arabidopsis thaliana landsberg
ttaagctttgctctgtttctgttgtttgaaagctcaagtcgtcgactgagctatagctaatgaagagttgtttgagctctttctctgatcttcgttcaactagctaaccgatttggttgctaaacaagctcaaaagatgaatcaaaatggtctcgtctcaagttataagaagatgttatatatggaaaagttattattagaacattacaatgtttaaacgactaaccaaatctgatacagtacaaacgatcccgtgggattaatacttacgctaagatcaacactgaaccgtcgtcttagacgttgtcgtttaacaacatacactagtcatggcaagctacattacttcggtgaaagaaaaaaaaaccttcaaaatctctagattgtgaacctactgtatgtacagaaaccaaaatgcatatcaatcagcagaatcggtccactcttccggctgcggagagagaaaaaaaactcgccggaagattggattacgacgaaggtgagataggattaggtttgaatgatttggcaacggat

SEQ ID NO: 157112 - DNA, 553 bp, Arabidopsis thaliana landsberg
gactttgtagagtaaagacagataagttttgaacagactgaagcaatttttagattcctcaagtcaatttctctccccaaacagcttctgtgaatgacaaattgctaaatctaagggtaatactctgttacagtttctctcttcgctttcagtttttcgtgtttctgcaattccaattacttctaagctctctctgtccttccttactatggagatttgataaacaaccaatcagatttgctgacgaaccccatttatcatctagggtttgcttcagaatgcttttgaaatattaaagttcaacactttagcacttgggatcttaatgctgtttcttgtttactctgatctaggagtgtagcttttaccatttacttgtgtctgtttttggtgctgttgtttgatctgtaatgcatacttcaattttcttttcttgtagattgatttcaagaacaagtcatgctaactctttccaagtttcatgtgatactaatcccaatactcttcttcattacgcttcttttgccattgttctccattgctctacctatca

SEQ ID NO: 157113 - DNA, 220 bp, Arabidopsis thaliana landsberg
ttgatgcgttcttcaattgctttagtattagcttgttcttagtgttagggttattagaatggcttcatcagatagtcgatgtggatttgtccgttcccatatgattcgttcccttgaagcaatagtaatcgtgttgctctcgttctctaaattgctctctaatcatcaaagtaatcttacggttaattctagtatgataccgattagtgagcataacttg

SEQ ID NO: 157114 - DNA, 654 bp, Arabidopsis thaliana landsberg
aaaaaatgaaactccgttatatataatatatgttgaaacggtgattaactagttaataaattttgtgggactagttcgtaaattacatttttattatgtaacatgaattacaattatccattaatgtagtatattcaaccgaatgagtcaacgaccccaactttcatcctcggagtttcccaaccgctaccagcctaacatcatcgatcaccggaccacatagcgagccagagtgatcgcttttcatgtggtaaaacgtgctcaagaaagtgacacgtgtcctggccgacactgccttgaacacaagcctcccacgtctaaacccgccttttcctttagaagcgtagtccaccatgaccttgccctgtccagcgaacgcttccacaatcattggtccctcacaaccgtctctggcgtctcccacgttgaacgtgagggcgtagaatttgttcagtgacgtcctcactatctgagaaatggcgctctctttgcctccaacaagctcgatggctcggtgtccttcggggacagcgaagtgtgctttgtctacgtacttaacggctttgagagactcgatcatccaaccgggcaatgggctgttatcgtcgtcgatgaacggtgggatcagtctcccattttccgtgggaacacgta

SEQ ID NO: 157115 - DNA, 314 bp, Arabidopsis thaliana landsberg
atttaatcgtggacgattttctgagtcattacaactatacaaggtaagcttttccgtataacctactatatttctgtataccacttcttcattttggctgtaaatctcatggctttgattgttcaagtgaatcatctagtctatttatggaacaaattggtagtatcttgatttgtctatgtgttgaattcttttagagggccttgcaagtatttcccggttgtcctgcagctgtgagactgggaactggtctctgtcgttataagttggggcaactagataaagcacggcaagcgtttgatcgcgttttgcag

SEQ ID NO: 157116 - DNA, 495 bp, Arabidopsis thaliana landsberg
tttataaacgtatatataaaataaatttacggcctcaactcaaaagattatacaaatctctgatccatccaagcaaaacgtggacgacttaacttagaaagaaaagaagaagaagccgacggcggcgattgtgccgacaacagagaacttagcagttgtcacggcaccactcttgggtgactctgcagtgggtccatcgcttggtccatcagcggcggaagtgctgtcgggggtgggagccggtggggaggagacggtaggtgcctcagcagagtcgctgggactagaggcagagtagtcatcctcggggacgggtccttcggcagccggagaagatgcttttggagaagaggccgaagatgatttaggtgcggcggctggagccttggttggagctgaaggagccttggatgtggcagtcggagccttggttggtgcggcagtgggtgatggacattttttgggagaagctgagggagcgtcggcggcaaaagc

SEQ ID NO: 157117 - DNA, 303 bp, Arabidopsis thaliana landsberg
ttctgattctccccacttgaccaaccccgtgaggataaactgttgccgacgcttctcgccgataacaccggttttgttgtgacggaaaggtttgcattcgtggttcgatttctagggtttcttcaagttcctgatcgattgtttgagcttattcggtaatctttgtttcggttgcaggaaaaatgggtttgatttctgggattctgttcgggattatcttcggcgtagctctaatggctggctggagtcgtatgatgactcaccgatcgtccaagcgagtcgccaaggttcgattaaatcaat

SEQ ID NO: 157118 - DNA, 276 bp, Arabidopsis thaliana landsberg
gcccatcaataaagaaaatacaaaccatggcaattccaaaagctcactactctttagctgttcttgtccttctctttgtcgtcgtttcgagtagccaaaaagtctgcaatccagaatgcaaggccaaagaacccttccactgcgataatactcatgcattcaaccgtactggatttcccaaaaatttcacttttggtgcagctacttcggcttatcaagtatatatatcttggcttctggggattgatttttagctatatatatataggatttttc

SEQ ID NO: 157119 - DNA, 906 bp, Arabidopsis thaliana landsberg
agttatggtcagggtggtaaattttcaaatgacgggtactcagcttggatttaccgcccttttagaaaccccccttttatggagggaaagaaaaccgcaaaaaaacacaaaggaagagtttcgagaccttgtttctctgttagagggtcttgtaagaatgcttatgtggataaatcttttgagttatatcgtcttttgttttacatccattacacttacacatgtcgtatcattattggtcaggatggttttgctaggattgtcgtagtgtgtgtgatgcactaagatcaaacggtcgtcaaggctctccttaaaagcttatgccgagaggttttttgctattttgtgtggtaattaactggtgagagagttcaacatccaatctttctctctctctctatcttttatctctcacactcttaaaatgcttcttctatctccgatctctgcctctcttccaccgtcgtttcaccggggtaatttgatccggcgatcaattaagccgttaggtagggttgttgcaaaggccaaggacaacaccgacactggtggatttctggagacggcagctatagccggtggtttagtgtcgacgccggttattggatggtcactctacactttgaagaccacgggatgtggcttacctcccggaccggccggtttaatcggagcgttggaaggtgtgagctacttggtggtggttggcatcgtgggctggtctttgtacactaaaacaaaaactgggtcaggtctgccaaatgggccatttggtttgttgggtgcggtcgagggtttatcgtatctgtcggttctagccattcttgtggtgtttggtattcagttcttggataatgggtcggttccaggtccacttcctagtgaccagtgttttggttaaccacg

SEQ ID NO: 157120 - DNA, 405 bp, Arabidopsis thaliana landsberg; identical to SEQ ID NO: 75813

SEQ ID NO: 157121 - DNA, 511 bp, Arabidopsis thaliana landsberg
  unsure (1)..(511): unsure at all n locations
cactatgatgcatcaagtgagacattgctcgagtctgcacgctcatcccaccatgagtgcgctatcaaggaagctgccatggctacctatgacaagcccattcacatgtagaagccctcaagtacatcatggtttggtgttgattctgtttcggtggatgactttcttggttcttcgggttttaatttttcttttgtgtgtgttgatgcgtatactaggagatgtggattgagaggtagaaggaagtaaagccgcctacgacaagccaaatcaagatgactttggtttaaacttttgatttttaatttctggtggatatgagatgagctgaaagaaaatactttaacggttataccactcttttttattcgttaaatcttctnnnnnnnnnnnnnnnnnnnntaggcccaactatagtaataatttgatatgctcaatgaaccaaatgtgattaatcaggtatgatcggtggttttggtgaaagaggataaccaaattcgatatgattttt

SEQ ID NO: 157122 - DNA, 184 bp, Arabidopsis thaliana landsberg
tcttccgggttttgaattttctcactaaagatttgtcttttccatagaaaggtcttgaattttctctcttcgtgttcaaagggtttttcagaatttatagtaacccaccaatctactgattgtctccgttcatcgtaatctctcaagatttgatttttatttgttttttgaaattttgaatttt

SEQ ID NO: 157123 - DNA, 807 bp, Arabidopsis thaliana landsberg
attggtggaggagattgcttcgatctaatcacttcttcttccatcctccaggtatagattggtttttaaaaatctgttcttggagttattactagtaactagcttgtgggttcctttttactagattggctttggtacatgaagtgattcagatagagaattttagtttctaggtcactcctgagtaaaattcctacctttctactttttctctgttagcttgagttaggtgcttattcttcaaatgtttctttcgagcttggaaacttcatcaaagttttagctttttctgtgattcaattaatggctacatctaaaaattcaagcttttctttgattgtcaatattgtgtagggttcttcgtttttagctttttgttgcttttaggtaagagattaggtaatatttaaagaccttgacttttccgcaaattagttttgttagcattaagagtctcaaattcagcttctatttgaaacagtagatttctgtatagtacattttgggattctgcacaattttgatttttgacaatattacaaaatacaaaggttgttgaagatgtcttgtgtccaaaatagttaaaatcttgttcacttttgacttaatatgctcacttgttctgttcatgtttgtctttcagattacttggaacttggaagtggtctttcttcaatctgtataagaagatgggaagttgaaatttgctcggctttgatttgagtatagcgagcggaacgatgggaagtgtttctcctgatgctcagaaggatgatcttgagcttgaagattcattgaacattgatg

SEQ ID NO: 157124 - DNA, 116 bp, Arabidopsis thaliana landsberg; identical to SEQ ID NO: 67540

SEQ ID NO: 157125 - DNA, 172 bp, Arabidopsis thaliana landsberg
agaggtgaactataataattattaaaaaattaatatgataatttagatatcaaatttaatttgttgattttaattggttacttttttgggaattaataatgtatttcgtttttctaattaaattaaattaattaaaatttagatatcaaatcttatatgtgattttgattgg

SEQ ID NO: 157126 - DNA, 178 bp, Arabidopsis thaliana landsberg
ttggtttagagaacaacgttgtcaaccaaggcttgtgtgatcttcctctacagttctttttgctcgatccatagtgaactctgttcacgcagtagcttctctctctctatgatcttctattacctctattggcccatcatcttccacatctctagctatactgctctttctttgatct

SEQ ID NO: 157127 - DNA, 120 bp, Arabidopsis thaliana landsberg
accatatatacctttggagatttcttgaacggtagctggaacaaccataccggaataagaatcaccggcgacatagaatgggttggaggaaaactcttgatgcttgcttagccactgcac

SEQ ID NO: 157128 - DNA, 545 bp, Arabidopsis thaliana landsberg
atgcaaaagctaaactgctaaagttattaataaatctgaagaaaagagtttgataaatctacgaaaatccaaagcctctagagcgttgaccagatagttagagactaaagtcaacgatcaggttcaaaaacacaaaagcaaaaaaaaaaaaagagagacataaatcgaagggatgagttatgtaagtctagaatttctggatgacgacggcattagctataccagcttgctcgatggtttggtccaattctgtcaattgtttaggagggaaccccatggttagcaactggtactctttggagccaccgggtctagaagcgtcgataaacccacgtacatctctgacagtgtggtggttgttgaacctggagacaaggcgtgttccgtctgctaatctgagctggatagaggttgtcggtgctgctggatctacaactagccctcttgatggtgctggtgctacgttcattggggcagatgaagcttgtggtgctgaacttgaaccagatccgctggctcctagggttcttcctacaccttggaat

SEQ ID NO: 157129 - DNA, 313 bp, Arabidopsis thaliana landsberg
aaatgtctcctggtactaagaatttgaagcttgccatagtaaagcataatcaggaagatcgtcaattcagaacaatcagatgatcctcaaaagcttatataagagaaaaatttgagattcataaagttttgttaaattctcacattttatgatgatgggatccagaagtgctggttttgtaaaatcttattaaactctgcagtgtaatctcatgaaggtagcagcaaagcaggaatgatggcaatatgatttttcttcagggtagaggaccagggaatgttccattttctctttgctcgttccccccctcagc

SEQ ID NO: 157130 - DNA, 583 bp, Arabidopsis thaliana landsberg
ctctcaaagtcaccccccaaagtttttttttttttttttaactttgaatgtgactcaggatagagagagggcgagacagataaagagagcttgaggaagggtttaagcagatctgcaagaaacactctctcaggtaaggtgagaactctaaaatatgaatttactcatttgacttctgaattgtgaaagtttgtttgtttggttttaaatttccaaagcttttcttttgatcaattacatgttcattgcatgtgatgtgagcatgatctcttatctggatataagatcttctccttcttctgcttatggaaagaaaaaaacatcagttttatcgaaagtgcaacttatgatttgatcacaattctttttctctctgggtatatatctctctcaatttccctaaattctagggatttgcctttctccttcattagttgtcataagcctatgttttagtatgggtaaaaggtcattagtctgtgttgttaagttaactaatcactgcatgcacgagttaaacaacattctactaataatatgttcactcttaaatgattcaaaagcttttttagatttcatggca

SEQ ID NO: 157131 - DNA, 282 bp, Arabidopsis thaliana landsberg
ggaaagctaagtggatatcatattactacatccgcaaagatattaactctttacaaaccgattttttcctgtgatcaattaagatattatatatctctaagaacattatcatcatcagagtgataaattaagtataaacggagaatgtaacggtatgtttaaggttcgacccttttcgaccttcctcgaccatgcgagctccggctccaatgtactgtacaatgctgaagattttctctgttatggtccacaaggagactgatctgatcttttaccaccatt

SEQ ID NO: 157132 - DNA, 125 bp, Arabidopsis thaliana landsberg
tcggtacctttgggagggcattgccaagttctttggcgtgagaagcgttattgagtccaacgccgacgatctttgtgccttgtttgaacaatatctgattgatcgacagcgccatttttatgtca

SEQ ID NO: 157133 - DNA, 537 bp, Arabidopsis thaliana landsberg
aaaaggaatcatattctgggaaagcagccaaaggaaagctcgccagataaacctgcgtttcattcccctacaaagctctaatctttcaatctctatacctctttctctatctctgagaatctatggcggtggctgcagcggcgatgatcgggttgccacaggcgtatctggaagggaaggaggtgaaggagacgagttcgttggttactgaactctgccgtcacttttatactcaaggttgggtgtctggcactggcggtagcataacgatgaaagttcatgatgcttcgattcctaaaccggagcaacttatcgtcatgtctccttcaggttctctacatcttaaagtcactttctttctccttgattctcattttgatgcatctttgaactgatgtatgtgtcgttgctctgttgagttgatgtgtttgttctcgtggacctttaatttgctatatgagctatgcgtaatgcgtttatcagttaaagtttctgtttctagagatcatctttgtgtatttaaaatcactggtaaca

SEQ ID NO: 157134 - DNA, 356 bp, Arabidopsis thaliana landsberg
ctcttatcacatagatggtacttaccgtaaacttgacgccgacaaaaaacagaaaacaataaaaatgaattccagatatataaacatcccaactctctcaccatcctcacaatttagatgagattaattacctatgaatgtcgtccaggagcgttaccgatcagtctgcattgttcaggtagcattgtcgatatcacttctccatgcaatgcaaacagttccccgtctatcccgcaactgtcatgcgtatttttccccgcctttatcttcactgatttcacctgcaattgtcatgcatttgatcaactacattctattctagacttataatatttgcattgagtttgaccgtttga

SEQ ID NO: 157135 - DNA, 122 bp, Arabidopsis thaliana landsberg
atacacaaagttagagaaaaggagttatatatggattgtattttacttattctgaccactcttgttgccattttcatcggcaagattgctctcctagtcactaaacctaacaaaaaccttca

SEQ ID NO: 157136 - DNA, 622 bp, Arabidopsis thaliana landsberg
attgagaagcaagagttcgggctcaaacctatgaattgtcctggtcactgcttgatattccagcatagggttcgctcatatagaggtgtgactctgttcctgttgtgctgttcgatatcatcaaaaacagatctatgaatgatattagttgtagaaattaaagttcactccataacagactatcaaaactctcttgtgaaatactaggtgctgattttttcaatgacaggagacttgctccaaagtgtaacttgtgatttgtaacctatcaccgtggacaagatgactactgtttctcctttatgaatcttactaaagaaattgtctatcatgtatcttgactgacaccatctttttgcttatataatctgatctgtagagttacctatgagactggccgactttggagtgttacaccgcaatgaggcaagtggagcacttagtggattgactcgtgtccgacggttccagcaggtatattttgtatcctagtattacttaattatcatttttccctttccatgatgcatatttgttacttaatataatgttcgcatactttttcaggatgatgcacacatattctgtacaacagaacaggtttgtgatttatgtttcttat

SEQ ID NO: 157137 - DNA, 188 bp, Arabidopsis thaliana landsberg
tggcaagggatcttcagttgaagactgctgaattttgttttgcaataattgtcttgtgtactttattatcttgcaacaatgtcgctttccaattatgtttcttgtctattaagcacttggcttgtttctagattcctcccggcctcaaatattgtgtctttaccgtttatgttattcactcttttttt

SEQ ID NO: 157138 - DNA, 56 bp, Arabidopsis thaliana landsberg
caaaccttgcttccagaaggtgcactcttcttaggtcggaaagtcttctgatttct

SEQ ID NO: 157139 - DNA, 341 bp, Arabidopsis thaliana landsberg
catgtaattatgtgtgtgtttacaaggtgcctttgaacaacatgtttggctactccacttctctccggtccatgacacaaggcaaaggagaattcacgatggaatacaaagaacattctgctgtgtccaatgaagtccaggctcagctcgtcaatgcttacagcgccagcaaagctactgaataaacaagccattgaatcaaaatattatggtttgttttctcataatgttcatttacaacatttatttatacggttcacaaccaacaaaatcactcaacataaaaatgcgtgatgggctatgtcagaaaatcacttatgtttactgggccattatggtca

SEQ ID NO: 157140 - DNA, 180 bp, Arabidopsis thaliana landsberg
gcttaggtactgcagattcaaatcaatctgactaatggaaaatccataaagtcaaccgacaaacttaaggacatccattcccaatataatccacagaggctggagctaaatctcactgctcttccttttacctcatcaaaacggttagtgtttgtgggatttgactccttgttcatacct

SEQ ID NO: 157141 - DNA, 147 bp, Arabidopsis thaliana landsberg
gaaatggaaacacacaaatcgttgtagaaaacacgtacacagtacatatataattcaaaacacacacaaaccaggccaaaagaatatacaaagggttttagaaaaataagaagttatggcacaaaaggatgtacttggtatactctc

SEQ ID NO: 157142 - DNA, 216 bp, Arabidopsis thaliana landsberg
gcaggtcgactctagaggatcccaaccgttacgcggttcttgattttcttcccggtttagtgtttctttgcacaaaattaaattagttacgaatgtcggatcaatgaatctttatctatggagaactctccgagctgtttctctgaatggacacgtggagctcacaaacccgtctaccaaatgtagatacgttttcagctcatgacacgtggccac

SEQ ID NO: 157143 - DNA, 143 bp, Arabidopsis thaliana landsberg
tacacaccctcaattgtcccggaaaagggagttgaaatcgcatgcagcctttccggcagtagatttcaaaaatctatggcgcagaattggcttatcgaaggagaagaagtagtttgtcggacaagaaaggaactctcggcgac

SEQ ID NO: 157144 - DNA, 254 bp, Arabidopsis thaliana landsberg
gaccacaagaaaaaaaaattgagaagttcgtatcaaaagtgttaatgtgtatataccctaaaccactttcgtcaaatttagattgaaaagatttgaactttcgaaccaattaaatttgattagaaacatttgatggtaagcttagtttgaagtgcttgtagcttggccattgctgcttctatttttaacctcttccctgcatgaaaggacgacgtcttaatcatcatcttctcgaccacagtcccttgcctaat

SEQ ID NO: 157145 - DNA, 412 bp, Arabidopsis thaliana landsberg
ttttggagtaggacaaattctctataaatgattttcaaaattcaggctcgtgacaagccacttatcaaatcctaaatgtttatgagtatacaacattgtagtttacaaattatgaatgaatttgtaagtgtacaacatgccatacgtgttggcgatagctcaaaccgcagaacaagaagccaactcggtatctagattttgttcgataagcagatcgctggaaatcgctgatgctattctgtgtcgtttcaaaatcaaagaagtggcaatttttgcggattggtagttcaagacgattaccctactctcatcgtctaagtctatcctcagcttttcggtgttgcagttctctatgagctgacatagatgtctcagattattcacttctactccgttcactttattcacctgt

SEQ ID NO: 157146 - DNA, 775 bp, Arabidopsis thaliana landsberg
gtggtttcaggttctcaacgagagtcttttgacagcaacatgaacaaagagactttaagtcaactcgaaaaccctctggttagaagacggttaggagatacttctagtctctctatccctgcaaagaagcagaaatcaagtggaccaagctctagacagtggcctatgtttcaacgagctggtggcgtcaatatccaaactgaaaataatgatggcgcgatacaggagtttcatttcagatctagtcaacctcattgtagtacagttgcctgcccttttacttcagtgagtgagcagttggaagagaaatggtatgcgagccctgaggagctcaagggtgacatgcgttcagcctcttcaaacatctatagtttgggtattcttctttatgaggtatgccatcttaattgtagcttttgacctgcaattgtaagtatgtacatccatgagttgaaatgtgaatctgcaagcccttaatgttgacacacatatatatgttttcccgtgggattatgtctttaactgggacatatcgtgtgtgggtcatgtttgggtccagatagatttagatagtgtagcatgtttgttaatgagatggtaacagtgaagtttctcgttgaaagtacagttggctgcatggctcataggtttatgtatatattgattcgactgtttcttggtcaaaacataacattttcattgatatactaatttgtttttttccgtcagttgctgagccaatttcagtgtgaaagagctcgtgaggctgcaatgt

SEQ ID NO: 157147 - DNA, 300 bp, Arabidopsis thaliana landsberg
tatgttcaaaacaataaccacttaataaatcatataatggagcatgtactgttcttaaagctttgtacaacaaacaactggatttttaacttttcaacatataaccatcactctaaaacttcttataacaaaacaaatgaaaaatctgaggtcaaaaataataaatgaaagaatagttgagaattacagctccacaacaaagatgaatttacactttttcccatcttctttccttttggttcaggaaggcccctactcttccacctcaaaactaaaacaatcacagaggaagagagcttt

SEQ ID NO: 157148 - DNA, 464 bp, Arabidopsis thaliana landsberg
ttcccgctcccacgctctctcctcttcctcggatcttccatcttctctctaacagcaaatgactcagtcgtaaccttctacactttctctctctccaatttttcacattttatttttggcttccgagctatgaccccagtgcgtctgcttcgtctcgaccgctgatcggaataaaaccaccgccgagtttcctaggtctatgtgtattgtaatatcctccggaaatggcagctttcctcgtcatgtttatcttcacgatcgctctgttcgtcgcactcctttgggttttcttcaagtatgtctccatttttttgcctcttcatcggcgttgaaatcgtgtttcgttgttttcaccgttttgccagtttctgatttgaaatccattctactcaaaaattgtttcgggaatggattgcgtttcaaattgctggaggaatttagataattgttgttgatttagacaa

SEQ ID NO: 157149 - DNA, 377 bp, Arabidopsis thaliana landsberg
tgtgtgcgcttattaacttctctcacactgactctgcgaccctaatttgtgagctctcttctctttgcgcagtcaatttgctacaacttagaaaatggcggcggctacttcatccatcgctccttctctttcatgcccatctccttcttcttcatccaaaaccctttggtcttccaaagccagaaccttggctctacccaatatcggtttcctctcgtcttcttccaagtctctgaggtcgcttactgccaccgtcgctggaaatggcgccactggatcctcccttgccgctcgcatggtttcttcgtctgcggtcaaagcccctgtttctctcgattttgagacatctgtcttcaaaaaggagaaagtttctcttg

SEQ ID NO: 157150 - DNA, 161 bp, Arabidopsis thaliana landsberg
attcgatcacacaagaaaaattacaattcttcttaatcctcattattatatatataaataaacttcaatctaagcttcttcgaaatttctcttttggtcaatggtattctttttagatctcgaacaagacaaaatcttcagaagaaaaaaccaaatttcat

SEQ ID NO: 157151 - DNA, 73 bp, Arabidopsis thaliana landsberg
aataacaaaaatatttaggtaaaaaagattttcaaatatttttcaaatatatatatatatcaaatataaaaat

SEQ ID NO: 157152 - DNA, 358 bp, Arabidopsis thaliana landsberg
gctcttctgtggctgcctggatcgagtgaaatggtcgagtagaatgctctactacttccctcctggttggatagagtagagggttgagtagaatccttgtaagctccttctacacttgaaaacacaccaaaacatgcaatatgtatgcaagacgatcctaaatgtctaagtgtgcaaaataagctaaatgtgatgcaaaatgatatgaaacaatgagtgatcactaagctaaatgatgataaatacatgtctaaaatgaataaaatacagtgttatcaactcccccaaacttatctcttgcttgccctcaagcaaacaaaaaatcttaagttgaaggagaggtttgaagatggggatt

SEQ ID NO: 157153 - DNA, 527 bp, Arabidopsis thaliana landsberg
gagtgtccccaaatgcttgtcatattgaaccctaggtcaggacatggacgatctatcaaagttttccataatgtcgtggaaccaattttcaaggtaccgttcccatctttttgttctttttggatgttgtagtactacatcatcacattatttccacttttaggtaccctagagaaccatttccatttctccaatcccattatgcattttttttaatcttgtttatgattttgtgaactgtcacagctggccggaattaagatggaggttgtcaaaacaactaaagcaggtcatgcgagagaattggcttccactgtcgacattaacttatgctctgacggtacctctacttgttccaacacttaatgatatgtttaacatatctagcttctaatatgcatatattttatcttacatatctactattacttacgagttcttaataattcttccaggaattatttgtgttggaggggatggaatcatcaatgaggtgtgataattacctttcctaaactatactcatt

SEQ ID NO: 157154 - DNA, 412 bp, Arabidopsis thaliana landsberg
  unsure (1)..(412): unsure at all n locations
gtgatgtcgttatttaaggtttagtgcgtttacaaagaccctgggacgagggagacggttaatttgaataattccggcgaagtaaagattctcaggccaatagtgatgacagaaagaagacctgtagtgtcagttgaagttgacagacnnnnnnnnnnnnnnnnnnnnnnnnnnnnnnnctctgaagctagggttttagccgagcgcggtgatttgactgaagctgtgtcggttctcgagacttgccgtgggttactgaccgagtccgtgtcgggtcgagccggagatcaattgtgtgtcacactgtgtgcagagctgaaggagatgcaagagagaatggcgagccgtcaagtatatgaggcttcgggtagggcttacgtgctcgccggtctgagctcgcactcctggcagc

SEQ ID NO: 157155 - DNA, 138 bp, Arabidopsis thaliana landsberg
agttgatccataatgctattctcctttttccttatccttattataaaggagttagaagtttatcttattatgcttgatgtttctgtgtgcttgtgttacatatttgttaaatctttttatccgatcgagaactcgttt

SEQ ID NO: 157156 - DNA, 296 bp, Arabidopsis thaliana landsberg
ttttctttgcacaacgtgcaacatcaaaagtgagattggcatatgttgtgtttgtttcttctagcacttctagttttcactttcagtgttcatcctgagcatctcttaaaacacttttcaggtgcctaatgtaactgacgttggattgaaaccaaggccgataaaaaaagttgcagttattggtggcggtctgatgggttcaggcatcgctacggctctacttctaagcaatataagagttgtgctcaaagaaataaactcagaattccttatgaagggaataaaatcagttgaag

SEQ ID NO: 157157 - DNA, 493 bp, Arabidopsis thaliana landsberg
acgcatcatcttgattatcagcgaaattaatggctttgatcatcccattccaacacgtgtcaccatcgtacatcttgttatgatcaccactacaaggttgacatcccgtaaaatgcgtcacgaacggtctccgtttgcttcctttcccgcctctttctccttttaaaaaccgttcctcacgaaacgcagcgtatcgttcgctcactttctctgcgtgtcgtctacgcaacgtggcgtcttctctttccatctccagataccgttccgttacgttggataaacccggtacgatctctaaccaatatccttcgaaataaaagtctccttcgaggtatatctttggataatacacttctctgtgtttgtagagtaagtaaagcagagccgtttgatcatctgactctgggaagagtttgtctttgaatattgaccgttggatttgtccccattttgcgtactctggactcactggtcccatacctgcatgagataa

SEQ ID NO: 157158 - DNA, 376 bp, Arabidopsis thaliana landsberg
agtatacaagaaagagaaaaggcgataggtaacctgagaaaagagaggaagaatcgtgatgccagcatgaccaccaacaactggaacattaacctctgcatatgcaagcattcgaatctaaacatcagaagctataacaacacataccattaatatcttgtttgaagcagatagataactaagtggtaagtattcagccaaagatcctaggaaaaggccaagaaaagacaataagaggaacctgcaacattgacatccgattttccagcatagaaagtcctagccctgacaacatcaagagtggtgacaccgaataatttcttctcatcataggtaccagccttcttaaaaatctcagctgcaattggaacagtgg

SEQ ID NO: 157159 - DNA, 315 bp, Arabidopsis thaliana landsberg
aagcttcgccgctccgcctagggtttccagttccggtggctttttcagcaccaaaaccggaatttctttgttgtaatctctctagtttcgttttcttgtgggtttaatgtgatctgaatcctattttcttccaacggtctctgttctaaattcacagatctagatctgtgaagtctaaatcctttgctcttccagttttgctgcttgtttgtctccttcgtctgcagcttcagttctggccgttccaaccatggcagaggcaggttcatttcgatctttcatcgcctcagatgcagatctctctccattgaagat

SEQ ID NO: 157160 - DNA, 356 bp, Arabidopsis thaliana landsberg
gactaggttaacttgagggtctctgttgcggtggcacttagatttggttaatgaacttattgtctagggttaatttattgagcatgtcaatcacttgtaaactgaggaaacgaaactactcaattaccccatcctcgagaattctctatctgattgaattctttgtttactctactgttgtttactgcatcttgtcatctgttgtttaatttctgcaattctttcttgttactcgacctcatactcgaccacccagttgtttggcaacagactgtgcagtcgagtatctgagttttattttctgtctgttactcgacctgtcacgcgacctcacccagtgctctgcaaagagctgt

SEQ ID NO: 157161 - DNA, 332 bp, Arabidopsis thaliana landsberg
caagattccagaacagatcaagaagttgaataagcttcaaagtttagacctttcttccaacgaattcaccgggtcgattccagagtttctgttttcgattccttctcttcaaattctcagtttggatcagaatctgttaagcgggtcacttccaaattcttcttgcagctcctcaaagattataactttagacgtgtctcacaatcttctaaccggaaagcttccttcttgctactcttcaaagagttttagtaatcagacagtgcttttctcattcaactgcttgtgtttgattggcactcctaacgcgaagtatcagcgtccgctttctt

SEQ ID NO: 157162 - DNA, 389 bp, Arabidopsis thaliana landsberg
aatttttgcttctgtttgattttgtttttgcccctttgcacacatatcatccaaattcgtaatcatttttcacctttgaaagaatctatctccttgctctgttatctccagttctagggcatacgccgatcacatccctagctccttttggctctaataatacagtaatcttaggttttcggggagtgaatcgtgtattggtattctagttttagctcaagaacatgtttttctccggcgatccttcgactcggaagcgagttgatttaggtggccggagcaccaaggagagagatgctcggaagcttctcgagcagactagaatggagcgtaatcgtcggttactacagaagcagcagaactctgctgctctcaaaattcaggtttgc

SEQ ID NO: 157163 - DNA, 225 bp, Arabidopsis thaliana landsberg
aaaaaaaactcttcttttttctatctttcacgcgttgaagattcttgattttctttcttctccttccttacacgaccactgatatgtgtcggtgactgaaaccatctgttctcttttgcctctgatttatcgatatgttttaaagaaaaacggcgtttgaaactttagtaattaaggtactactctgctcttgctctgcatattgatctgctctcgtactactct

SEQ ID NO: 157164 - DNA, 502 bp, Arabidopsis thaliana landsberg
cggcggcgacaacggaggcgaagatggcgacagagccaccgaagatagtgtggaacgaaggcaaaaggcgattcgagacggaggatcacgaagctttcatagaatacaagatgagaaacaacggtaaagtgatggatctggttcatacttacgttccttcattcaaacgaggattaggtttagcttctcatctctgcgtcgccgctttcgaacacgcctcttctcactccatctccatcatcccttcttgctcctacgtttcggtacgaatttcttttaaaaaactactagaaattctggatcttgaaattgaattcgtcagctttgtgtgtattttgcaggatacgtttcttcctcgaaacccatcatggaagcctctgattcattcagaggtattcaagtctagcatttgaataacacttgtttctcattgtgctctgtaataaataaagtctctaaaatgtttcgtttgatgattgtaatcaaaatgagagtaaatgaa

SEQ ID NO: 157165 - DNA, 142 bp, Arabidopsis thaliana landsberg
  unsure (1)..(142): unsure at all n locations
cgtatatgtatttacgcagacctttgctacacatcaactcacacatacgtcccccctccggtttattcgacgtctccggtacaatctcctgcgagaggctacagtacggtggtttcgacagatacantgttccgcggaggcg

SEQ ID NO: 157166 - DNA, 71 bp, Arabidopsis thaliana landsberg
atcttagcatcttgaagattttttttttgatactttattgtgccttataaattataaagagattatttaaa

SEQ ID NO: 157167 - DNA, 72 bp, Arabidopsis thaliana landsberg
ttttttttttttttttttttttttttttctttttttttctttttttttttttttatatttttttattttttt

SEQ ID NO: 157168 - DNA, 283 bp, Arabidopsis thaliana landsberg
  unsure (1)..(283): unsure at all n locations
gtttctctgttctttgtattctaatatgtagatatccagccaatattacacttttgcgcggaaatcatgaaagtaggcagctaacgcaggtatgtgttattctgttccacttatatctattattctgcttttcacgctgttcctaggaggtaagcaatgttgattatcttctcgttgttacagcagggttttgaaagttctgattttgtactacatgtggcaatgtcatgtcagatgtagacatcgatgttagctaagatgcattntatgtgaatcaagtatt

SEQ ID NO: 157169 - DNA, 359 bp, Arabidopsis thaliana landsberg
ttgatccatgactttggagattattcattacatagaaacataagagcgagccctatatattcaaagacatgtatatacattgggcacgttttgcttttcggaccaaaaaacctacttcagcaatctcccatacgacactgaccacttaacactctcactcgcatttcttcttattcacgccataaaaaaagaagaaaggggccaaaaatatatttaagcgaccctcatattcttctgaaaaatagatactacaaaattcacacaggactttcttcctgggtaataagtaatggaactttgtattcatcttcatcgtgatgatgaatagttttgatggattttggttcttcatttggact

SEQ ID NO: 157170 - DNA, 583 bp, Arabidopsis thaliana landsberg
agcaatgtaaccactgtagcattaccggcatggcttcagcagtataagaaggagaatcaaaatagtcacactgtgagttgtataaacatcaaatcagtttacattatgtcatttgcctcttcttataagtgcgtctatgttgtggtttttggacttggcaggattcagattctattaaggaacttgtggtgaagtggaactcaatctgtgattcaatccacaaaagaccatctctaaaaacactcacactctcttctcctacttcttccttttctggttccactcaaccttcaatcagtactcttcatcatcttcaaaccaacggtgattggcccgtgatcgagacaaacacgcatcgtcatcattctgttgtccatgagacatctcacttaagactgttcattccagaacatgacagcgagcaaaagactgagctagtctgttcgaatcctaattctacaatgaactctgaagcctcttcaagcgatgcaatggagttggaacatgcctcttcaaggtttaaagagatgaatgcagaaaacctagcaactttatgtgctgccttggaacgcttggtcccgtg

SEQ ID NO: 157171 - DNA, 221 bp, Arabidopsis thaliana landsberg
aggtgggaagagcagagggagtggtgcgtccatggttcgaacgcggtttggttctgcatttggatacgataagactgacgaaagagacagtggctatggataagtctgttcttggagttggtttatacgtcggagctgtagcgattcgccatggctacgactgtggttgccgtactgctcagcttcttgctatctacgactccgatctctaccattccaag

SEQ ID NO: 157172 - DNA, 129 bp, Arabidopsis thaliana landsberg
cctcaaaactcctatgaattatcttattgctaaagctgcatttttcgaaattgaaatcttatccaagaaaaacccagtaagcttatatgcagtatagtttcacagagaatgaagtaaacttgagctgct

SEQ ID NO: 157173 - DNA, 849 bp, Arabidopsis thaliana landsberg
tccaagacccgaattggatggattgggatcgggataatgggatcagcgatggtttctcatatcctcgccgcaggctattcagtcaccgtttatgctcgcgatcttcgtaaaacaaaggatctgcaaaccaaaggaggtcgtaccgccaatagccccaaagagttagcggagatgagcgacgttgtgttcacgatcgttggaaactctaacgatgttagatcgttgcttcttggggatgatggtgtactctctggtcttaaacccggtggagtaacagtggacatgactagtagcaagccaggattggcgcgtgagatatacgcggaggcgaggcggagggattgctgggcggtggatgcgcctgtatcgggtggagacgctggagcacgagaggggacgttagggatattcgccggcggagattcagagattgtggagtggttgtccccggtgatgaagaatatagggactgttacttatatgggaggagctgggagtgggcaaagctgcaagatagggaatcagattgctggtgcgagcaacctggttggacttgctgaagggatagtgttcgctgagaaagcgggtttagatacagtgaaatggctcgaggcggtgaaggatggtgcagctggatcggcggttatgcggctgtttggggagatgatggtgaagagggattatagggcgacggggtttgcggagtatatggtgaaagatttgggaatggcagcggaagcggcaacggcgatgcctggaactgctttgaacaagcagttgttcactggaatggtagcaaatggagatgggaagttaggatttcaaggcgtcgtcgatgttattaggaga

SEQ ID NO: 157174 - DNA, 101 bp, Arabidopsis thaliana landsberg
gtatgaactatgaagctgtgtgttgtgtttcattttcctctgtaatttgtaattaagcaatcgaaattttcattaaagaagataacgaataacatcatgtt

SEQ ID NO: 157175 - DNA, 171 bp, Arabidopsis thaliana landsberg
tgcatcctgtcatctgttgtttagtttctgcaattctttactgttactcgacttggtactcgaccacacagttgtctggcaacagactgtgccgtcgagtatccctgttacattttctgtctgttactcgacctgtcactcgaccacacccaatgctctacaacgagctgt

SEQ ID NO: 157176 - DNA, 314 bp, Arabidopsis thaliana landsberg
agaatgttcagctcaaggcatctcaaatatttcttgggcattatccaaaattggaggtgaattgctatatttgacagagatggatagggttgcagaagttgccacatcaaaggtgggtgagttcaattctcagaatgttgctaatattgctggggcgtttgcttccatgcggcattctgctccagaactctttgctgagttgtcaaagagggcgatctagagtgatcaattcctttaagggtcaaaacatccctcaccccctgtggtcagttgcctccctcatagagccaaatgctcctccgcttgaatttttg

SEQ ID NO: 157177 - DNA, 248 bp, Arabidopsis thaliana landsberg
taacttaaacaaaaccaacaattatcaatcttcaatgacgcatctcaacaaaaaacagaggttagagaataaccataacaatactgtgaacaaccatttcgaagacttacatgacgatctcatcatctctatcctccgcaaactcgctacctccgcttcttctccttccgatttcctcaccgttctctccacgtaagtctccgctccggcgaatgcatcttctcgtttttcagcaaactatttttttt

SEQ ID NO: 157178 - DNA, 232 bp, Arabidopsis thaliana landsberg
gacaaacacattttatgcagcttcgctttaacagtctcaacttgactgacatttgatatatgagagttatagtgcagagtttactttgagttgaatggttattataaaatttaatcagtggcaactggcccactggccagtgtgtaacaacaagcaaagatccagaaagattgacacattaaaagctaattaaattattcgaacctaaattttctgttcagttttgtttcac

SEQ ID NO: 157179 - DNA, 544 bp, Arabidopsis thaliana landsberg
ttgcaacaattacgaatctgatcaaaagtgttgtcgtttttatgattaaataaggatactcttgtattgtatcaacaacaattttttgttttgtaaaaagatttgggatttttcagaaaccatatatattttgtagcctctggatttttctttcttctatgatttagtaactggtacccttttttacctattattgtacataattatataagtttgaatcacaccgagatcaattgtgcaaggagtgttcttattagaacatttatagaagctaagggacaaatagaaaatacaacagtgggataagctggtgaagcttaagcttatcaactcgtgcttggtaaagctatggctgccaatggaggatcaagtacttggaaaagtcctgaagacagccttcttgtgaggtcctctgcttcaactttcgcgacgtcagctctcattccgatatcagtagcgtatctactcgcacaatacacaccaatcgctgtagcagccatcccatacacgtttgtagtcagaagccgcattggcgtggacaaaa

SEQ ID NO: 157180 - DNA, 139 bp, Arabidopsis thaliana landsberg
  unsure (1)..(139): unsure at all n locations
gctgttgttgcccgnacgtcgacgccaccgtgaaggatcaaatgagatctcgccggagacagtaattggtagctaaattctgttaagtttccgatttgatcccttcctcgtgcttttgagagggtcttcttcgtgcagt

SEQ ID NO: 157181 - DNA, 232 bp, Arabidopsis thaliana landsberg
accgcatggacaagtgcttcatcatcaatcaagaagcatcatttattttttttttgtcacgactctctttgttcctgcaattgagtctgttggactattggtctctcgcttcttgttatcgagtatatagagtagttcactttggtttgatttggcttgtgtttgctgagtcttggctctgaaggagagagtgttactgctttgtctctgtaatataactcggttctgaagg

SEQ ID NO: 157182 - DNA, 58 bp, Arabidopsis thaliana landsberg
acccttctcacggccacggtgaaattttcataatatacacaaaaagggcaacaaataa

SEQ ID NO: 157183 - DNA, 486 bp, Arabidopsis thaliana landsberg
tgatgagaaagtatgcaaaaatcctccacctgaggattaaatttgtgtaactattacaatcttttcacatatcacaatcaatcattccatacatggccaatacataaccaatacaattctgtaatagtaacttacatatgataatctattttagctactaagctttactatctggatctcttacaccttctacaagattcggttactaggtaaccagcctctccatctccatgtatcatgaagacactaatcatcaacatgtaatgcacacatctaacttatgctacaaaacattaaacagatacaataaatgcttacttggaaccatcattggtaattcagatagcggagagcaagagtatcattaggctttgagtctgactatcagatacccatatacttgacctgaacctggcatatatagcagcttgaaactatagaaattggagtgatatcaagagcaactgtaatttcctttccagtttc

SEQ ID NO: 157184 - DNA, 492 bp, Arabidopsis thaliana landsberg
  unsure (1)..(492): unsure at all n locations
acctcactgattaagaaaaaggtaaaacgatggaagaagaattggtggtaatctcgaagagcatagttaatcccagaagccttaagaaaccgacttctgtgaagaagattcagctgactccatgggatctctctcgccttcgttttggttatcttcaaagaggtcttctctttcacaaaattgaagtcaaacaattacaagcttcactctctgttgcacttgatcgtttctatcctttagctggtcgtcttgtgaagctaaagaacgacgacgatactgtctcgtttttcatcagctgcgatggttcaggtgtggagtttgttcacgcagtggctaaaaacatcgagctcagtgatgtccttgagttatccggttctgtccccgggtttttcgcttcctttttccctgcaacggggatcaagaactaccacggtgtcnaagatctctcttatgttcagtgacaagagaagcgggttttatcgtttggtacac

SEQ ID NO: 157185 - DNA, 224 bp, Arabidopsis thaliana landsberg
tgatataagaagtccaataaaaagacggctctattcaaaagtctgatccatcagttatcaaaaagcacacaaaacaagtctttctttttttttaattttaaatagacatttcaagatcggagatttagtaactatgaccattctgtctctgcagcactaagtttccttattcctgtaagaaaatgaaattaatattagtgagcaaaaacgatcataacgttcaa

SEQ ID NO: 157186 - DNA, 432 bp, Arabidopsis thaliana landsberg
actagtagtcgattcgtaattaatatattacaattatagcgccgaacctccagacttcttcaactacgtgccgttttttatataacgaaccgacacacatcactgtcgttttgaacaccacgtcatcatctccaatcgaggcggacttcacggggcccggcgacgagttcactgggtttccggaacgaaacgatgtgacttccggccataaacgccgtgactcgctccgagactcgtatatcttccatctttagctcttgaagacgacgcacgtactccggcacgtgtaagagatcccaaaccacacacaaacctcctggcttcacaactctcacaatctctccgagcactctcattctctccgccgcagcttccaccgacttctgaccatgctctttccccaccgtgtgaacgaacaccgacgagaccacc

SEQ ID NO: 157187 - DNA, 358 bp, Arabidopsis thaliana landsberg
ttctataactttatctctttgtagttttgctgtatttggtagactcatttgctcatattaacagtgaaaaaaaataacaaataattggaactaagcatagaacaaaataagcttacactagatttaatttggtaacagtaccaaattagcaattaatgcgtttttcttttctgagaacttgttcctacagaaccttctctatggaatcacaggaacaaaaataaacctcctgcaatctcataatcccaatttcctacacagaacagtcccaccggaatcaatgtgacaagatgagaagatgagaagacattttttgtttgttggcccttcaactcaaatctggatagtgtctgttttg

SEQ ID NO: 157188 - DNA, 465 bp, Arabidopsis thaliana landsberg
gcattctattacttatcggaagccatcagaaagaaaaggtaggtttctaatgaattttcgcagcattgagtatgttgtaactaaacagaattaactgatcttagtttttaaacctcagggtctcaagcctgagcaattcaagattttgatacacaaaatccctgcttattttacggtatgtacttcatcattttcagaagtttaaatataataccaatcatatggtttccactattcttgcagggaacaggagatctcatgactgctcttctacttggttggagtaatgtaatacattttttatttccatatgaaagcaaaatatttatctatcagtttcgtaatatgctaagacgttgcttattcataactgttatatgcagaaataccctgacaaccttgacaaagcagccgagcttgcagtttcaacgttgcaggtaatagtctaaacttgtaaagctacaa

SEQ ID NO: 157189 - DNA, 134 bp, Arabidopsis thaliana landsberg
aacaaaaagaagattcgaaatctgaccaacgagatagggaaacatagaagagcgagatagatagaaatctgaccagcgatgaggattcagcggcgaaggagaggtcgtcggactagggtttctttctaaagtgc

SEQ ID NO: 157190 - DNA, 300 bp, Arabidopsis thaliana landsberg
acccaacaccggacaaaagccgggacataagccatccgaatctctttaagtctaatcgatggagacgaagccagccacggttggggaagaagccaatcgatgctggaagtttgccggccaacggtgcataacagagccactgatgccagaagaaaaagttttgactgcttaataagccagtgaaacgcccaatgaaattgcaacaaaagtttttataaaaattcttgccgacgaaatcatatcgaaaacttttctttctctctgaaaggagagagaagatagagagaaaagttccttata

SEQ ID NO: 157191 - DNA, 314 bp, Arabidopsis thaliana landsberg
ccatgacttcttagatctctagtctctactacttaattaggttcgcatctccaaataatcagtaataagtactcctagaattaggaaaaaaccatcaaacaagattccatatatctatttgatgtcgtcgcgtaaaatcaactgaataaaaagtccgttttgttgtaaaattgagtaaactctcacaacggtggcggtgaacgtatataagtcatgtgacacggcacctgagaagatggaacggcgaataaacggccgtagaaaaaggagcgggcagccactttgaaaagcggagagagagcttcatcaagagt

SEQ ID NO: 157192 - DNA, 130 bp, Arabidopsis thaliana landsberg
ccgcccgaacccgaagaagaactctctcttgtaaacctgcgatctgaatcttcccggcggtgaaaaatggttgcggagaagaaggcgaagaagtcccatgaaggaatcaacagcagattagctcttgtga

SEQ ID NO: 157193 - DNA, 80 bp, Arabidopsis thaliana landsberg
gaagccaagacgaaccagttgatggccattaagagaatctccttttaacggaaggcgaaggtgaagctggagtttgcagt

SEQ ID NO: 157194 - DNA, 423 bp, Arabidopsis thaliana landsberg
tattgacttgtcaagattctcttcttcttcttcttcttcctcctcctccaaactcagttccctccgtccatggcagcaaccttacctctatctccgatcaatcatcagttgtgtcggttcgggaacaactctttgacgactcaccggttctgttctcctggcttcttgatttcttctccttgtttcattggtttgaccggaatgggctctgctactcagttacgtgctcgtcgttctctgatctcttcagcagttgcgacgaattcgctgttgcatgacgtcggagccaccgtggcagtgcttggtggagcatacgcgcttgtcttaagcttcgagagtctcaccaagcgaaacgtcattcaacaggtctcttaataatcgttttagttatccacacaatttctccgtttacaattccagttt

SEQ ID NO: 157195 - DNA, 229 bp, Arabidopsis thaliana landsberg
gcatgatatataatttatataccatgtaaagaaatgaaaaagaatgtgacaaaaagcaaaagcaacaacaggttctgtgaaagtatcttcataagttcttctctataaactcccaaatcctctgttccatatatatccggtctttcttcttccgaggcatatgccgttcatcgggaaatatcaacaactcgtaccgctttcccgcttcaacaagcgcgttcacaagcct

SEQ ID NO: 157196 - DNA, 244 bp, Arabidopsis thaliana landsberg
atagtgggtagaaacattcaggaagcagattcatgtcgcgtaaaagagaagacttgattcttggtgtagcatataggatggccaaaaaattaccagtctaacatataccctgggtgaatgctaagttcgtatggtgatacttgaacattagcgtttcctctttgccctttgtatagtttcttcttagagtcgtcttttccttttggcttctttatcttaagtgggttagatagcatctagctag

SEQ ID NO: 157197 - DNA, 61 bp, Arabidopsis thaliana landsberg
tctttggttatgtgtattacattaattaaagtgttatgaagattgaagagttgtttttata

SEQ ID NO: 157198 - DNA, 441 bp, Arabidopsis thaliana landsberg
aaaaaattccatttctcgagaagaagaagaatctgctctgctctcgtttctatttttcgctctccggccaatctactaaatagttcggacgtgattctcgagataaaggtaagctttagctcctaaatctttggattactcaatctgactgcagatactccgaaatttggtttcgaattgcaaaagcacttccgtagactttgacatcctcgcattttgggaccttttcaggagagaaagaagaagatggagatcgataaagcgatcggagaaagtgacgataagaggttgaagactaagtacaataacgccatcttcgtcattaaaagagctcttgctctttactcgtgagctctctctctctctcattcttcagattcattttcaaaacttacttggtgtgtggttgtttgatatgctgctcgagatttaaattcttga

SEQ ID NO: 157199 - DNA, 220 bp, Arabidopsis thaliana landsberg
ctccccttttttccttataactttaaattacgcagcagcaacagttccagtgcggaaagcatagtcacgagatctagttggcagaagaagaagagcttcgcttttcattgcttctcatagctttcacagatgtccacagactctgattcttctcttttgcttcggctctcactatctgaacttctctacactcttcactacagaacggagtgtctcctct

SEQ ID NO: 157200 - DNA, 231 bp, Arabidopsis thaliana landsberg
taaatctttattttattattttttaagaccactaatattaaacatatcaaatcatcctaatttagaaaagtattatataaaaccaaaaatgttatgtggtatgtataatattactatatataaaattaaactatagatataaatgtattagagaatgatacaatttgcaaagcttttctatataaaaaattattcttaaatgttaaaattactatttttaaaaaaaatcac

SEQ ID NO: 157201 - DNA, 403 bp, Arabidopsis thaliana landsberg
agaaaaatgattatattcttacaagttataataatatatttacaaaattcgtaattaattgtataatttttttgtcagagaaatatatatttattttctaaaatcactcttttgcacttttatttcacttattcaacaactcatcacggcgcaattatacacgaaattaaccgactgtttcttgcctagtaaatgccattccggtgttgtaacacttggtacccatgggttaagctcaatgaatccctcacatgattttctttggtccaccaattactataacctgatccccacaagctctaaacgctaaacctaaaccgttcatcgaacccgcttgctaagacaagttcccaactttactccaaacccgtttttctttgtaaaccttctcaccgctatacaa

SEQ ID NO: 157202 - DNA, 226 bp, Arabidopsis thaliana landsberg
gtcgactctttttctctctgcaagtctagggtttttctgatccaccagaggtttttcccctgcttcgagcgccgtcttggagaagctttttctcgataggctttgcagtgacagggacacagggtttggattgaagcgaaaaaccctagcgtttacgcgtcttctcaagcgaaaaaatccttaatttccatgtaagtctattgcttgtagtgtgtattgagttcgg

SEQ ID NO: 157203 - DNA, 214 bp, Arabidopsis thaliana landsberg
gccgtaataaagagagttttattaccttttttgcacgtatttcaccgaaatacatttagtaggaacttgcatacgagaccccaacatgaattactttggttggcgagaacttttattcatgaatgacatatattcaacaacttcaaagaatattataatcagcgaatgaaaccgatctaattggggttaggagtgaccattcacccttagaatg

SEQ ID NO: 157204 - DNA, 656 bp, Arabidopsis thaliana landsberg
gatatttggaagctctaaaacgataaatcttgtttttccctcctaattgtaaaacactcgagggaagtacgacgacgaagaagagctaacaacgataatgaatcgggttactactgaaagcattgcgtctacggcgatactggtggtgatggtgtttctcttctcgtggagatctatcgaggcggcgaatgtatcctacgaccaccgttctctcaccatcggcaatcgccgtcagctcattatctccgccgccattcactatcccagaagcgtccctgctgttagtgacttcttctttttcttcctttgtctttgattttatcacttggtgaatgctaaagttgaaagctttttggatttgtgctttatgctcacattgaatcgaacaaagtttcgagcttgtgagggtttagttgagggagattctagaatcagtctctaagagacatttaaaatcatgggtttgatgggaaatttctaaatttcttgcattttccatcctcttctcaaaatgattaagaaaatgcaatttcagttctttagttatgagtttggatgatttaggcctctgttcttaaattgtgctttattctcaatttcatcctcaattgattttttgttgtagatgtggccatctcttgttcaaacagcaaaag

SEQ ID NO: 157205 - DNA, 194 bp, Arabidopsis thaliana landsberg
agtaaccagattgagcaataccgtcaaaggtacagaaatcaacgagaggtctttggctctgatcaaagcagggatggatgtagttgttgctttcggattgcttcaattggctccaaagaaagtcactccccgagtcacaggtgctttcggattcgcctcatcacttatctcttgttatcaggtatatttaccag

SEQ ID NO: 157206 - DNA, 338 bp, Arabidopsis thaliana landsberg
  unsure (1)..(338): unsure at all n locations
atgcatattcaccatgtccctcccacttaatgacatgtcaccattttgggaggacaattggtttgtcttctcctgccttgagaagctagctgccatgttgttgctgggcaatggatgcgggcgtaaaataactggctgaggcttagatggctggttccaaaactgatgttnnnnnnnnnnnnnnnnnnnnnnnnnnnnngacatcataccagaagaggaactctgctgaggcgagctggatgccaccagaggctgagaagcagacagcatacgttgatcaaagtcactactttcatctctttctttcacttgaggggtagacaactcagaagatgaat

SEQ ID NO: 157207 - DNA, 275 bp, Arabidopsis thaliana landsberg
acacataaattcaaagttatcatcaaatgttttactcataaccatatttttcacattgagaagtagacttatatatgaaatttactggtctctgaagactcttgtcatggagagacatccaccaggaagcattgattgcatattaagtgcgatgttagggctatgaatactctgcctcatatgcacccaaccatactcttgcccactctcttcatcactcactcttaccctgaattattgactgttaattcgcattggagcatgtactatcatat

SEQ ID NO: 157208 - DNA, 326 bp, Arabidopsis thaliana landsberg
caagaaacagaggaaaagaaaagttccggtaagaagcaacgaaatggcaattcgcgttgagggtcacgacttggtttgcacttcctattgctttattgattcactcactgcaacagaagtgtcgctccggcttggtattataaatttctcggaaccgggcattgcttgcttggagagacgacatcactttgttcgcaagcatttactgtgaaatttcgaatacaatttctgtgttcacaagaaaccatggagatcaacgtgttctaacaatcagatattcaagcataaatcttcctgaataaatgtgttcaagattttacccgacg

SEQ ID NO: 157209 - DNA, 712 bp, Arabidopsis thaliana landsberg; identical to SEQ ID NO: 43454

SEQ ID NO: 157210 - DNA, 194 bp, Arabidopsis thaliana landsberg
gattaataactagtaattttttttatttctgtttatgtttaaaaaaatttttcgaaaaatctcttcgtttttaaaatgatgacgtatcaaaaaatccagtaagactttaccatactcatcttacttagtattagatagattgaattttggttgaatttaattagatttctttttttatttttaaacaaggccgt

SEQ ID NO: 157211 - DNA, 132 bp, Arabidopsis thaliana landsberg
gagggggggacaaaatgagattacttcctctgagtgactataagggttatcggtttcactgcttgagaatgagatagttgatgaagctggtttaggtgcaaatatgggattattgaatgaagaagaaaatgt

SEQ ID NO: 157212 - DNA, 263 bp, Arabidopsis thaliana landsberg
cttggttggtttttgatcatctccctcttgttactttctcaatccctcataatttcatgcggacgccatacgatcactcctttgggtcgggaactagttgaacatgaagagaacaaggagggtcatccggtcatcaccacgaccatcttcgagtcttcgtgaggaaaagcaaaagcaagagcaagaagaagaaggacaaatcagcagccactcgaacccttctctctaacccatctacctatgtatctactgttgtgagttcc

SEQ ID NO: 157213 - DNA, 560 bp, Arabidopsis thaliana landsberg
caaataggtaaccatttttttttttttttttttttttctcaacatcaactttcatttaccaaatgattacatccaattgaaggtacataacattcccctctatcaaattggacccaaatgcaatggtttgatctagtatcaccctgaaacactatcggatccagcgccacctgatcgaggaaccattgcatttttaaaccacaatgagatagataatactccacaaatcagaatattatcatctctttgaccacctacacagactctaagcgacatgagaacaactactaaaacggaagagaccaaaacctagtctgaagtacaaagtaaatccatactattagtccctattgatcagaatgtaatccatgtcccaatagcattaccgcccggaggcgcatcatcagaaaggctcaaaatccccggctttcgttgtttcggtcttaaaccaaaagcggaccatatatccgactgacccgaccaatgatacaaggcaaaccagcaaggctagagcttttcccgagctaaccaatgaacatcaggctactaatcgattaaag

SEQ ID NO: 157214 - DNA, 339 bp, Arabidopsis thaliana landsberg
gcattcaactccgtcgtctacgctcagttccaggccgctgcaacagatcaccaaacatggagagattcaagttccttaatctgatgatcatagcttgatgtttagcatccttcgttcacagtctcgaggttcttcttcttatacacacttctcttctaatcttttatgaatcttttaaaagtaacagagaagtacttttattttactcacagatgggagaaacatgtagttcgaccagcgaatgcgacgccggattgagctgtcaaagttgtccggcgaatggaaataccggctctacttgtacccggatccaacctcttaacccgacttcaaaggttt

SEQ ID NO: 157215 - DNA, 199 bp, Arabidopsis thaliana landsberg
ttcgtataaacattgtttagacaaactatgtctcaacttaaaattggatcttcacaatgcttatgatcaagtctttgcactgtgttatttgaattgttgatggctcgtggagctgtctctacaaattatggagacgctctcacaaagagtcttttgtatttcgaagctcaacgttctggaaaattgccttcgaaacaaa

SEQ ID NO: 157216 - DNA, 194 bp, Arabidopsis thaliana landsberg
gctgatatgttgctgttctgtttcttcttgtatctctgcgatcttaattcctcctgacccatcaccaccagattcggagaatttagtgatcttctgtaactcatcgctcacacctgactggccatcactagcagctgcttcttggtctatcttagcttgtggcttaggacggcgaatggcctcggctgcttctg

SEQ ID NO: 157217 - DNA, 160 bp, Arabidopsis thaliana landsberg
tacaataagcaataaatctcacctcccttttttttttttttgtctcgctacttttgattatcatttaaaaccaaaaaacctaccatgaatgagaatcacattcaaagtgatcacatgaacaacaccattcatgtaacaaacaaaaaacttccaaactttt

SEQ ID NO: 157218 - DNA, 210 bp, Arabidopsis thaliana landsberg
ccttttacctacttacaatggcctactatttaagctagtcattagtttctttttcttattattttatttcgtataatggaactatgtaagtattttaacaaggccttgttcttttggagatcgccaactaccagtatgagaaattttagatgttttcttcagttagataaattgtttagctagcaaaatgttaactaactcaatcttttt

SEQ ID NO: 157219 - DNA, 228 bp, Arabidopsis thaliana landsberg
attgaactttgttgggactccatgtaatattattttatggttgcttttcgggattgccaaattgtatttaaggaaatgtattattttcttggttgcagaataattaacggttttgcaactcttttattcgatgcaaaagcatgtcacttaaaggaaatatagttgaatctctatgtgtaacataatggacaaaagaatactagtaagaataaattaaatatttatcag

SEQ ID NO: 157220 - DNA, 406 bp, Arabidopsis thaliana landsberg
gataattaaatcagagaatagggttgggcatatgagtaacccattcgagttcgggtagaacccgttcgggtttgggattaatggatatatgatttactacccaatagaataattctaaatattcggttctggttagggtcggatccagttgggtttgggtcagtttggataaaaagtttcagaccctaaaaatacccaaaaaaatagaaacgagaaatttgtatgtagatagcgggtctccaaacaaaaaaaacttttaaatttgttaagttttaataaatttaattatatttgaatatattttactaaattttgacaaacataacaaataatttttgaatagtttagttgttttgtatatttaggtccaaaattaattgacatatttagatttataattataatc

SEQ ID NO: 157221 - DNA, 165 bp, Arabidopsis thaliana landsberg
tctgttaaaacgatttagatccagtaatatttataaaccttaaaaattgtctcatagattatccaaaatccaaagggaaataaaatcctaactgtgtaaatatatgaccaaaacaacataagatcacctggtccagaaagaaagtcctccattaccactatatat

SEQ ID NO: 157222 - DNA, 97 bp, Arabidopsis thaliana landsberg
cctttggaaaatagtcgttttgggaatcgaagcaaaaagaagagcttaaaaacgtaggagtttttgaggtcaaacaaacaaaaaaaatggtgactat

SEQ ID NO: 157223 - DNA, 290 bp, Arabidopsis thaliana landsberg
aggagcatcaatgacagtgcagtagtacttggtggtctcgaacttccagagagcaatgtcaatggtgataccacgctcacgctcagccttaagtttgtccaaaacccatgcgtacttgaaggacctcttgttcatctcagcagcctccttctcgaacctctcaatgacacgcttgtcaataccacccaacttgtagatcaagtgcccagtggtggtcgactttccagaatcgacgtggccaatgaccacaatgttgatgtgaaacttctctttacccatggttagagact

SEQ ID NO: 157224 - DNA, 360 bp, Arabidopsis thaliana landsberg
aattatgacctgttactcagtagaaagttttcttaaatctatttttcacccgttataatattttttcatgtattgaacaatttatattcgtttttaaaaattcaaattatggcatatgcgaaaaatctaattctttttttataatgatgattttattttttcgaaaaaatagaatcatataaagatgacaagtgaactataataattaataaaaaattaatatgataatttagatatcaaatctaatttgttgattttaattggttactttttcggaaattaataatgtatttcgtttttctaattaaattaaattaattgaaatttatatatcaaatcttatatgttaattttgattgg

SEQ ID NO: 157225 - DNA, 818 bp, Arabidopsis thaliana landsberg
cggataacactagctcctactgagatctatggcaggagtgatgaagaacagagcggaccaagaatctggcgtcggaaaacagaagaaccaccagggaaatgtctagtctatttattaacaataatcgtcatcatcttcgcactttgtctcatcctctcttcaatctttctccggatttcaaaaccagagatcgaaacaagatcaatatcgactcgagatcttcgatcccgaggtaattcaacaaacccttacttcaacgccacgctagtaagtgatatctcgatcagaaactcgaattttggcgcgtttgagtttgaagatagtacgttccgtgttgtttacgctgatcatggtgttgtgggagagaccaagattgaagggagaagagtggaagctcataagacggttaggataaccggtgttgaagttgagatcggttcgtttcggttattggatactaaggatttggataaggatttgagattagggtttttggagttgagaagtgttgctgaggttagaggaaggattaaggttttgggaagaaagagatggaaagttagtgtgatgagttgtaccatgagactaaatttaaccggtcggtttattcaaaatttgttatgtgaatagtagtgagtgattgatcggtttcatgatccggtttaagaagatttatttgtttgttgttgtttttctgggtgttttgtgtttttgcggtattgtaattgcaatggtctttgtatatgaaaggaacatcaatattgtagaaaagaaaattagtcactacaaaattgattagtaaaacatataaataaatt

SEQ ID NO: 157226 - DNA, 147 bp, Arabidopsis thaliana landsberg
ctgattcttcgacgaaaggggaagaggttgttgaattcaaaatctctctcttctttctggctctctcgcgtgagctaggtgcagattttttccagatctcaacattgaaattcaaactcaaagcttgagagggagagattttgagag

SEQ ID NO: 157227 - DNA, 144 bp, Arabidopsis thaliana landsberg
agaagaaggatgcttattactactgatgaaaattgtgcagtattattacaaccaaaccttccaataaccacaaagtaacatacagcaattcgtctgctacaaaactggtaaaaccggaggaacctatgctcactatgatcttta

SEQ ID NO: 157228 - DNA, 192 bp, Arabidopsis thaliana landsberg
tctggatagcaggaggtgcaatttccttcctctgacggtgatcacgtggtgcatctccatcaccaatgttggcaaggccattttgttgattctgttcgtcagtcttttcgagtagttgctgaggtacaaggttaactgtggttctcctttttctgagttcgcgagctgtgcggttgatgttgtcgttgaaaa

SEQ ID NO: 157229 - DNA, 363 bp, Arabidopsis thaliana landsberg
atcacaatgcctaacttggttgaattccaaaccctttactagactaacattttttgtatcccccttaagaactttaaactcttactctctttttttttttcttttcttttcattctcattctcattcccattcaatccatacacaatctcaatcctaaatacaagtctccacctagtcctagataacccaaaaagcgtgggctaggtctacatgaaagactgctcttgtcggctcatacctaacacgttataccaagctcaattgaaaaagacctcataatcacacacaaatgatctttggcttgaaataaggctaggctaagggtatgagaaactgctctaaaaatgagagtcagctacttg

SEQ ID NO: 157230 - DNA, 300 bp, Arabidopsis thaliana landsberg
tttggatcttttgaccatctattttttctttgagtttttttttctgtgttcatcctctgttctattttttttttcttctcattcttgggttgatttttgacttctgtttgggttgatttagtctgcagggtttaagcagaggttggtttgtggattcttcgatttcttcttcagatttagtctacaatgaagtgagaatttctaaagataaacaaagaaaaacttgagactttagcaaggtacgacctttgactttattagtttgtttgaaaacttgctcctaaaatttgaaatctcata

SEQ ID NO: 157231 - DNA, 188 bp, Arabidopsis thaliana landsberg
cttgcagagaaaaaccctataagaaaagatcaagaacttaagtcatttgacaaacaaaacgcaatttgatgttcaaagacgatgactttctaggatgtggttgagttgaacaaaactaaagaaaccaattagatgagattagaggagaaaagaggacacgtgaagattcaacaacccctttgacattt

SEQ ID NO: 157232 - DNA, 255 bp, Arabidopsis thaliana landsberg
tttttctatttatcttaagaaatgacaaagatagtttggtgccgtagctaaatggtcagacccatacagaataggacatgccattttcaggctcaaaagaacagaaaggacaacttatcagtttctaaaaccatggcgacgatcgagttgaccaaagaagaaagaaagaatgttaagttatgataaatctaattaattagcactgaagctgatatttttatttatcccatgaagccagctccaggcatgttaggc

SEQ ID NO: 157233 - DNA, 83 bp, Arabidopsis thaliana landsberg
accatggtggctcatcttcaacctcctaagatcatcgagacctgtcacatctctcccccaaagggcaccgttccatcaaccac

SEQ ID NO: 157234 - DNA, 63 bp, Arabidopsis thaliana landsberg
gaaagggtcttgccagtttagggcatccttgtgggtgagagagcgattgagagatttcaaaag

SEQ ID NO: 157235 - DNA, 109 bp, Arabidopsis thaliana landsberg
ctcttgtatgtgctcctggtacaggccttctctcgcccttggtgtagtgttggagaaagcctgaattgaaaatatttcaatttagcgagtcttcaccggcctcacagcg

SEQ ID NO: 157236 - DNA, 130 bp, Arabidopsis thaliana landsberg
gagagctcataagctttcttcaacaaaccatttcttctttttgagaaagtcacttgtctactcgttgcgttttctattttcttcatctctatctttcctctaaccatttttcttgctttgacttgatttt

SEQ ID NO: 157237 - DNA, 429 bp, Arabidopsis thaliana landsberg
aatttaacccacggtttaccgcgggcaatcggtatatttggtttttatactaaatatttgaataaacttgatattttaaatttataaatataaatatctagtgattagtgaagaatcgtaatatataatttggatattatcgattattgattttgtgattgaatatagtgttttagggatgaaatgtgatcatattttgatttcaaaaacgacatagattctttatttttttaaacggtttagattgaaaggaattaattttattgaacggtttagattgaatcggatcatataaagtttaggagattgttaataccaaattactcttaatgattttgaatagcaaagaacaaaatccaaaattgaaatcaaaattgaagccaaatttagacaaaatttcaatttgtacttcccttttaataatgtagg

SEQ ID NO: 157238 - DNA, 283 bp, Arabidopsis thaliana landsberg
aaaattaaggaaactgttttattaatagggctatcaaatacaacaaaactctaaaacattattttaacaagaatcaggtaaaatatgaacgtaaagaacgtcttttatagtatggtattgctctttaattagatgaatttgataatcgtaaaggcgaaagcaaatagaagatacgaaagcttgagagagtgcgaagaggaaggcgacgacgagggtgcaggtggagcaaaccccattggatctcctccgttgcccgatccgctgagatccttgtctacttgtc

SEQ ID NO: 157239 - DNA, 349 bp, Arabidopsis thaliana landsberg
acttgtaacaagttaccaaaaagtagtaaaatatgtaatatagcaacctttcaatactgaacaatcacatgaaactataaagataaaaaagcaaggggcaaagtcaaaaatatggatcaaagtattcaagttagtgttctcggttgaaacttgaaacaaagacaacttcagactcggggattcccttttacagacacagtccacatactattacagaccaaaaacaagaattggtttacttgcaagggaacactagaatttcaaaaacgttttaataaatatccatgacgagagcgatttaatttgctcatttgcacttctttatgataaacagcagacacatgtatat

SEQ ID NO: 157240 - DNA, 303 bp, Arabidopsis thaliana landsberg
aaataagagtcaataatataaagaaacatgtatacacaaaccattaatggcgaaactgaaaacactcataaagaaaagaaagaaatttcgatgttgagaaaagaaagaaagatttttttttatgattatttagcaggaggaggaattgaatgaaaagagacaaattgaggaagcaatttttgtttttggtttaaggttgagcaagtcttttgactattgcagccatgtaggttccttgatgttcagcaagagccaattctgtttctgttgctttttttgacccatcaccagcgaacacacctg

SEQ ID NO: 157241 - DNA, 155 bp, Arabidopsis thaliana landsberg
gaaggttaagggaccaccaatccctcctcccctatcccctccacattacaataaaccgactccggtgacttccccatcactttcgcctcaaacaaatcctcaccactcagatccaaaaacgtcaatttcgctccataaacaacaaaatccaaatt

SEQ ID NO: 157242 - DNA, 317 bp, Arabidopsis thaliana landsberg
gttcactttttattttgggttttgtcgtttaggcatagtgaagaataaagaagaaacaaacaagagagaaagctccaaaattctcgggcagacaatatattcttaatatccataatttcatccaatgtgaatagtgatgatgatgatctgtcttttcttttgtacaaaacgcagagaaacacctttacacggtcaatcaaattcagcaactaagcgctttgtatttaaccggaatcggttggtaaaccccggtcgcggcatccaaaatctcccacaccgtcaaatctctacaaaacactcctttcaccacattcgta

SEQ ID NO: 157243 - DNA, 914 bp, Arabidopsis thaliana landsberg
agaacacggtgaagagaagaggcaagagagagagagagagggaaaaggaagacgatgatgatttctcggagacccgtttcaagtccgggtcgggtagagaaatatccaccgccttttatggggtttttgagaagtaagagcaacggcggaagtacaagcaggagtagaagtcgaagcagaggaaggtcacgcgctagtcctcttttcgttcgccggaataaatccgcggcggcggtgactcaagaaccgtcgtctccgaaggttacttgcatgggtcaagtccgggtcaaccgatcgaagcccaaaattaaacccgaatctcgagataacccgacccgacgacgatgtgagtggctccgaaacgcgtcgttttataacaaattcgccgggaaaatcaaaacgatgacgttttggcctaaatggagactgtgttcgttttcgtgtgcttgtcggaatttgaaggagaaagattctccgagaagtcaattagatcatccgacaacggaatcagtcagagaaatcaaagaagaaatcgaaggagaagaaaatttcgaaatccctaaattatttgtgtctccggctactacgccgcctataaacgctctgttgttgacgagaagcagatctgcaccgtatagatcgtcgtcgttggctttcagattctgggaagaaaataaccaacgagaagttgaatcacagcaaaatgtgagatcggagaaaactgaatcggaagttcccatcgagaaaatcaatggttttcacgagccggagtatgttgacagagatgaagaagaattcacgaagttaagatttgtacggcagccggtgttgacaaggagcaaatcggagccggcgaggatcggcgagaagatgatggtgttgcttcccgatgaagaagaaggttaggtagggtt

SEQ ID NO: 157244 - DNA, 59 bp, Arabidopsis thaliana landsberg
aaaaagagaaaaaaaaaaaaaaaaaaaaagaaaaaaaaaaaaaggaaaaaaaagaaaaa

SEQ ID NO: 157245 - DNA, 110 bp, Arabidopsis thaliana landsberg
gagttcgaatttcccctagaaaaaaagaaacacatcatttttttctgttgttgaggtgattgctataaaaaagtttgtaggagaggcttctatatctataaaattgagcg

SEQ ID NO: 157246 - DNA, 137 bp, Arabidopsis thaliana landsberg
attagaaaatgttacgttcatagtttcttaaattaggtagaatcacaaattatgaaacttaaatgggaaagtaacaatttcctcccattattacatgacacatcaaccaacttgaaaaccaccacacaaaaaaaacc

SEQ ID NO: 157247 - DNA, 330 bp, Arabidopsis thaliana landsberg
atttaaacaggctttaaagaagggaaagcaacggttgatgtattggacatgcgtttatttgttggccattcacatgctaattagaagatcgtactagaagcaaaaacaaattgagagagcttctaagtgtaaatagagagtccactaatgcggtccaatttttcaacgagaagaattaaattattctcgaaagtgtctcagatgattctttaaaaggggaaaaaaacactcagaaaaattgagaagggaatgcagtactgcaaagcgaatcctatgtataaaaaactgacgattcatattatagaactttatttgtatttgtcttactaa

SEQ ID NO: 157248 - DNA, 211 bp, Arabidopsis thaliana landsberg
  unsure (1)..(211): unsure at all n locations
gaaatcacaactatcgacaatgactaattgatgagaagaaaagaaacaaaagaaaacaaatttcttcagactttgtattctaccaaacaagaaatctaagccaaaacattcaaagcgatttctcaagcaaaactagaagatgaaggtaagtattatatggttaagtnatgtgttttatggcttctttattgacgttccacatatatttttt

SEQ ID NO: 157249 - DNA, 667 bp, Arabidopsis thaliana landsberg
  unsure (1)..(667): unsure at all n locations
ttttgaaaacaaatctaatactggtactggttcggtccaaaatcaatcaaaaagcagattgatgatacacgagtgtttagtacattagattactctatacaacagacaaaaacatagaggttctagctcaacaaagagcaaatgtgtactatgagacccatctgttctcgtagcggttgagagagaacgatgaagattgaacctcgcttaactggaaaggatccggttcgattccatagtccgttaatggtctatgctcgagcacattgtcatggttcttcacaaagtcgggaatttccacctcgcctttctttatgtcctcccaaaggtnnnnnnnnnnnnnnnnnnnnnnnnnnnnnnnntacagtctgcaatgttgaaagagatattgttttgacaaaacagttaagtccacagttgttgattctaaagtaatctagatcccataaccgtttcaagttacaagctcaaaagaagatcaatactcctagacgccagagtttattagatcatgaaagcttcaaactttagggttcaatattcgattatgcaagtttgaaataacttgtatataaatcaactgatacatatgaaaagaaatgattaccctccacttaaaagaaggcggccaagagtggcaatgacaagtcttgaacgaagaccaggg

SEQ ID NO: 157250 - DNA, 162 bp, Arabidopsis thaliana landsberg
agagagagagagagagagagagagagagagagagagagagagagagagagagagagagagaggttggatagcatgacaaaatttataaatcaatgataatagcatgttttgtccttgaaatacatgcgtttataaaatcatatctaatcttatatgtcacac

SEQ ID NO: 157251 - DNA, 124 bp, Arabidopsis thaliana landsberg
aaatttgagtgggtgagaattttttacgatagaggaagagacagcatcatctacttgtgttgtctgtgtacatatattacagtaagcgttgcaatataccttcttgaggatcttctcacattaa

SEQ ID NO: 157252 - DNA, 374 bp, Arabidopsis thaliana landsberg
tagaacttaaaagtcaacgagataagaagagaagtccggaaccggagaagaagaaggacgaggtaaggagaaaccaccaatgtaaataacactccgatcatggggacgccggggaaggattccggagacaattttggcgagagcagccgtgtactggccaagtagctcagcaaatatcactattgcaaacattgtttagaaaaactaatcagaggaataatgtagagtatcaaaaagttcttgtggaaaaagtattcagggatcgctgaatattcggatgggtgattttttttgggtaatggatattgaagaaggtaagtagtagttataggatggatagggattataggcgatgtggccggtcatgtgggtgt

SEQ ID NO: 157253 - DNA, 454 bp, Arabidopsis thaliana landsberg
ggcttggggtacaatggctcgaggtcagtcttttctctctgaagttggtttgcagtctagaatctagatggatatttggaattgtagaaattgcaaataagctggtagactattgactatcagtaatgaatgtaacttatgttagcgttcaaatcttacatcgttcatcatcttgattgatacacattttgttaaaaagttggtaccttaagtctttttgttttttgactgcagctggtcccagcttttggagacccttccccttccaaatgtgagttataagctttaagtgatatccattgtattttaacagcactcggttaatctacctttacggatactaaaccattgtatttgacatgtagatcaaatggatttgcccgactgctccttctcaaccaataagtttatttggtggttttccctccacagcttgtaagtatatttgctacat

SEQ ID NO: 157254 - DNA, 830 bp, Arabidopsis thaliana landsberg
  unsure (1)..(830): unsure at all n locations
cattcttctgatctgtaatctgtttcatgtcccaataacatgaaagtttgtgtttttgtgaattttttcatatataatgtttgctaaactatctatgatttttgcacttgttatccaggttcgttaaaatgatgggtattggtcaaagaagctcttttcaatctgggaaggttactgggtaaatgttggtacattggctcaggttttataaagtttggtgatcattctcagtttcaagtttgatcaaaatgtggggctttgcgtcgaatgtcattggaagtatggggttaaagaagtcccctaaagattcagctcaagcatcctctcaatgctcagatgatgaggtttcaaatattagcagggatgaagagggattagaatgtcccatatgttgggaatctttcaacattgttgagaatgttccttatgtgttatggtgtggtcatactctttgccagaattgtgtctttggtctccaatctgctgtcttgagactctcaagccaagatattcggattccgtttttcgtctcgtgcccgtggtgtcagttgctttcgttcaggattgtttacaagggtaatctaaagttccctcggaagaatttcttccttctctggatggttgagagtctgaatggtgacaggacaagtcatggtgacaggacaagtcatggttccttggtcactgataaccagcaatcggctccgacnnnnnnnnnnnnnnnnnnnntgggaaaccacagcagcaacaacaatctggttgcgaggcctttattgcgtaaccagtctacagaccttttgccacatcatgaccacagtaaccaaccaagc

SEQ ID NO: 157255 - DNA, 203 bp, Arabidopsis thaliana landsberg
agaaattgtttaaaatctaaactaaatgataatttgttattaaattagattaaagtttccgaattatctaataacatattaccaaaataaataagtttacatatatataattaaaattaaaatagtctgatatgttatggaaacgtttttaaatgatttccgaaaatattgtgtagatattaatttattgatttaattcgttt

SEQ ID NO: 157256 - DNA, 130 bp, Arabidopsis thaliana landsberg
  unsure (1)..(130): unsure at all n locations
actaaaagactttttatagggtttatcnccaaatttggtttggttaaagccttagaagcacacatacatacaaattacaagagactagctacaacgtgatgatgataatgggactgaacacacaatgagt

SEQ ID NO: 157257 - DNA, 506 bp, Arabidopsis thaliana landsberg
acagaactagcatttactaaggtatgtttatcatagtccctaatactgaactcttttagtttatatgataagaattcatactttacatggggaaattgtttgttggctatgtttatattcgaataaagtttttgacttatcatatatgaaactttaaggtagaatcttttcattggttgtgtgctcaggatcaagaacaactattcgaatctggtgaagagacatgtttccccgccatacgtgttggattgcagaagacttcgtctgtggtgagtgaaaatgttgtcaacgctattaaaagttcttaactattcatatcagtaatcttcatgacatgccaattggtgcttttttgcatatgcagtcattttggatcgacaaccaaactggtcataagccgttggaagattttgttctagtggaaagtagcaccactcctctttatgaccgtaaatttgctataggtttaaattcagcagatggctcaatcaacgggaaagggatat

SEQ ID NO: 157258 - DNA, 375 bp, Arabidopsis thaliana landsberg
  unsure (1)..(375): unsure at all n locations
aggaagaacccattgtccagggaagagctgcatcagagtctttcccagaatccagtccatctcagaacttgacaaggatgcttcttttgcaatgatagtcacagcttctttagcttctttatatccacattcaagaacaacaaatgggaagnnnnnnnnnnnnnnnnnnnnnnnnnaatccgtatatgatcatgtattgttagtagatatagaaggttttttgtggtttttagtcgggaaagcgaggtaaataagtatgtttacctgccccacatgacacgatttgccccaaaatgggacacaagttgagataggagaggcgataggtcctgatacgggaagccggttcttgagatcctgaatagagcactgaat

SEQ ID NO: 157259 - DNA, 262 bp, Arabidopsis thaliana landsberg
gtcatgtaggagttacatagagttgaggccttgtaagctaataccatttcggaaaagttctttccgtttacacgctctggctgatctttctgagtagatttgatgatattcaaccgagtcttagataaggtcccctggtttgtgtttgtgtcttgagagtttgtgacatttgtaattcattatcgttgttacatagtataaaccatatgttatgagccacacgcgtttctctgtcggttataaaaattatttacaacgtgcg

SEQ ID NO: 157260 - DNA, 526 bp, Arabidopsis thaliana landsberg
  unsure (1)..(526): unsure at all n locations
gaattattaaaaaaaaaaaaaataacacattttctttgctctggtcccatatgtgatatgtcaccgtccttctccatcgccaccaccgtctcaccggcttctctagccgggactctggccttgaactcaaaggtagcnnnnnnnnnnnnnnnnnnnnntgattagtgaagaacgtgtgagattacgtctttgattagtggtgtatctgttttttttttgctgtaataattctgaaattagaaagactcaaatcacacacatatcagctttaacgtttctagattttgaaaattgatcaattaactgttatgtgttctttaaattcagtatacatttgttttttttgtagaatgttttgtgtagtttacattcaaagaacaatgatattaccaagacaaataggaatcttgagtttaaagcttgttctgtttctggagggtttaacaaccatacatctgtggacaatgtacctttttcctcgtgattacgtcgagctcaattaatcaggtaagctatcttagttttg

SEQ ID NO: 157261 - DNA, 164 bp, Arabidopsis thaliana landsberg
tttgtttagtacaaagtaaagaagggtaattacatcaattcgattaccaactttatgcttgcaaattgcaactttataaatctataatgttcaaagaccgttatgttctaaatgcatataaactcacaaaattgaaaaggacaagagttcatatttcatacccc

SEQ ID NO: 157262 - DNA, 122 bp, Arabidopsis thaliana landsberg
caggagaagaagcagacgactccttcaatgagtttttctcctttccttcagctgatgatggcccatcaactttggcagcatttgatgatgcaccagtactaacctttaaaggcagaaggaga

SEQ ID NO: 157263 - DNA, 121 bp, Arabidopsis thaliana landsberg
cacgtggcctgccgcttctgatcctctcttctcttccacaccaactctgtttcatcacctgttctctatgttccggttagttctacgccctcttagaaacgtatgatttcaaacattaaac

SEQ ID NO: 157264 - DNA, 861 bp, Arabidopsis thaliana landsberg
aacacccgcccttccatataggccaagacgacatgttatttatctgatcttgccaaaacattttctttaaactccacacacgaacaaaatattgcacataactctccacacttactatcatgaggaaaaaaggaaaaagggggtgagtaaagaatactcagtgaggggaatcaactctgcccactgaaacatagaacaatttctaaagctatacaaccatcatcataacatataaacttagacacaagcaatcaacctaaaatgttttaacttcgaataacacattcataatgagcatcttatccataatagcacatacatacgtatcgctaggtccagtcattctcgtgataacaagagcctcatgagtggaggttggccctcgtggctcagacactcccatgcatcccaggctcgtcagcgtttcttgacctgcatgtaacccgtcagcctatcactatccacattactagggagaccacgacccatagctcgattctccccagtcatatattcatcatacatacatactcataatcatagttaacatacacatacttataatatcatacataacatcacattatcaaacatcatactcaacaatcataaagtcatatcatcatgtaatcttatcctatacaatcagatctaagcctacatatcatgcgtcaagaagcataacaaaataaaatgatgccatgcttcgcaaatacctctctcaccttggtctattgaagatgaagactcaattctcctttcttttcacttaggcaatctttactgtaaccacatgctcatcagctttaacttggttctccatcaaccaggatctgaatccatgagtcataatagctccgc

SEQ ID NO: 157265 - DNA, 468 bp, Arabidopsis thaliana landsberg
attttcccgatagggttagaagattttttatatattaacaaaattagatttaatacatgtcgatatctcatcaatcatatgagttaacaactttgaaaactctactttatatattatatatgtttgtattaaaattataacaatttcttcttcttctttttttattacaaataagaccaaaccaaaataaaaaggaaaaaaagaggaattgtgagctttaaaacaaggcatacttctgggtccagcttcgagccatggcttcatatttggtcttgtcagttttgtatatgtgagctatctctggcaccagagggtcgtcagggtttggatctgttagaagagagcatatagagagaagcacctataataccaaaatgttagtaatttgtgttacctattggagcttcttggttatataccaaatctgaaatatgaaattatagaaaatattgacaaataactaaatac

SEQ ID NO: 157266 - DNA, 362 bp, Arabidopsis thaliana landsberg
gagagtaagagcccttgatttctttcagattgtgatttattttgcaatttaaatctaagttttgacataaatttgagattcaattctctaagaaacttcttcttcttcaacaatggtggattgatttgatttttgctctctctcatgggtaaaactcgtttcacctacgtagcatcgagatttctgttaatcaaatctcctgttattatggacatagattagtaaaaaggtttccgaatggatatatttaaatggacataatatggataccaaaaaattgtttgttgatttttttttcagtttgcagagacctccaccttcaaaaccttattaatatggaactttggtttccttacaaaaca

SEQ ID NO: 157267 - DNA, 232 bp, Arabidopsis thaliana landsberg
gtcaagcactcaagaatagaacttaatatctcactagctaagtggagtatttccacttttgctctgccccttctatttatttgacactttgttcactttaaattacagctgttgcagatggaacgtaaagtccaatcagcgaaacatcatgagttagtgtactggcatttagccttttcacggtatttcctaaaaagccttcaattggccttttccccttaggatttaaact

SEQ ID NO: 157268 - DNA, 91 bp, Arabidopsis thaliana landsberg
agtacaagttgggaatcagattctgaaaacaaagttatgtcctaacaagacgacgaatccgatgtggaacgaagatcttgtttttgtagct

SEQ ID NO: 157269 - DNA, 424 bp, Arabidopsis thaliana landsberg
  unsure (1)..(424): unsure at all n locations
atgccaatgtatacatttgtacagatatataacaattgcatacgccaatacaatgtcttatgtctatggtcattgttgttcttccataatggaaccaattgatccaaatctaaggacatgacaatttattaacattgctaagcttaatagaaggtaccttgtgttcataacccgaatcagacagccttctcagaccaagtatacagttctggttagggtggtggttatgatgacggttattattgacatccttagcccacagtggataaagtttgaacctttttactgataagtccacannnnnnnnnnnnnnnnngtagatcaaaaatctcgaacctaaggttcgagttcttgtagacgtttgagcaatgctcataaactgggttcccatcttctggttctttgtgcgggtggaatccagtct

SEQ ID NO: 157270 - DNA, 325 bp, Arabidopsis thaliana landsberg
gttaaaagtaaaaaaaacgagttagttcgtctcatatctatgaataaacccgaatcttacttaaaatgggggaaaagaacaacaaaaatactaatatcaaaagaatttgtctagaacgagagacaatgcgtgtgagacagaattgaaatgtgtcatttcttcttcttcttgctatcctcggctctaatgagctgaacaggagccgctggtaccctaaaccaccattctcttatccgcctctctagccggtcactactcgctttcctccacccaacttccctcgtgaaccactctacaaacgcaatcgttattaagtacttaacag

SEQ ID NO: 157271 - DNA, 109 bp, Arabidopsis thaliana landsberg
cgcgaaccagcgatttaagcactcccaactctcactttctcccttctcccttctcgctggacgcattcactgaaatcaccaaatttggggcttggaacgaggtagatac

SEQ ID NO: 157272 - DNA, 705 bp, Arabidopsis thaliana landsberg
  unsure (1)..(705): unsure at all n locations
actgcccttcttccgctgtcatattctcgtcaggcgacttctcattgacctctcctagcgactctctctgttctttggccatggtgttggtttaataatcaaggctctcttgctcgcattcttcgcattgcttgaattccagaactttcctttactcaccgaagcaggttttgtctctcgccacatcagtcttttgagaatcttccttgacaatcttcttccatgggtttgattcgtacctagataaagaagagaaagcgagctgttgttaatcttgctttttctgaaaggtttaagctttgtgcgaatttcgatgtgcattaaagtgttttgtgtgttcctttgttctaatttgtggtgaattcgttgcttaaagtcgtagtctttgatgagattttcattgagagaaagaaactattgcaaaattgaagcaaagttatgtgatatattgtgtttacaggttgtccattggactttacttcatctaacttcactctagtggcttccgtatgctcgaacaacaccgagagagctaaatgctgccgctacatgaatgctttcgttgcaatatctgtcgcccgctatgcaaactacacagctgatcttggagttacnnnnnnnnnnnnnnnnnnnnnnnnnnnnnctatctctagaaccatggagctttatggaatcccaagaaatgctaccatcttctgtggatta

SEQ ID NO: 157273 - DNA, 376 bp, Arabidopsis thaliana landsberg
ccgtatagatagacaaaagtctagcatatataggttgctttatacactggtccggaaagttgtcctctggtatatgcaaactaagtttctttctttgcatgattggttacaattctctatgaaaaatagactactccctcagaatactatgatgagtgagtagcaactcattgtaaaatccgtcttcgcgcttatttgtcctggtagtaagtaaaacaaatatgttcatgatcgaatggtagatggccagtaggtgcaattaaacaaatgttgtaacaaacaacaccaacgtacccgagataaacaagtttaagcagattctgggaagcaagctcattaaggtataacatgcacttgttagatactagaactgcct

SEQ ID NO: 157274 - DNA, 514 bp, Arabidopsis thaliana landsberg
taaagtttggtttctctgacttgactatgattctgacttcaaccattcacaatgatcatagtcggatgatgaggatctgagaactgcacagatgagaaaaatctcgcttctgattgataaggtaaagcattttcttgatttagaacaacaacttgtggttttttatctcttcttgaataaccgaagagggacatttcaggcgagaatagagaaggaccacgaggttttagagataggatgtggatggggaactttggccatagaagttgtgagaagaactggatgcaaatacaccgggattacgctatctattgaacagcttaaatatgctgaagaaaaagtgaaagaagctggacttcaggtttacataatccatttcttgatctgctttcttatctccaaggctacgtatgactaactatataacttctgaatgataggactggattacttttgagctccgcgattatcgccaactatctgatgctcagaaatatgacagaatcatatcttg

SEQ ID NO: 157275 - DNA, 394 bp, Arabidopsis thaliana landsberg
gtctgtacaagtttggtctgaagatctgttttttgttctcaaagctttacctgtgacttgatgatggcaggtacttgaatgcacaaagtggatgcatcagttatcttgaagcagttggagacttgagaaaaggggtgtaccaagaagaactcattggttgttttgtgttccattaggaaccaaaaactatatacattattatcgatcttccttcgcttttgtcaatttccagttttagaatatcactggatttctcttcatatttcttgttgtttagcccaatggttttaaatacttgagggtagattcagcaaattcttgaagaaccattgtttcatcgttgtatttataatgttatgaactcccttcgggtttcctgaaaggaatttaaaga

SEQ ID NO: 157276 - DNA, 144 bp, Arabidopsis thaliana landsberg
ttttttctttactttaaataaagaatttatacactgaaagtgaaactactatacaaatatttcaatgtaaaagctccaaatcaatttgagagagggtcgaaggagaagagtcgtctttgttcatcagtgggaattctcagcaat

SEQ ID NO: 157277 - DNA, 438 bp, Arabidopsis thaliana landsberg
taatgtacaatataatcttgacactgaatttgtatttggtgaagtttcacaaaccgaaagatctgtggaagtcatgaaactggttccttcattattttcattgtaatttttacaagaacatgttgtgtcttaggttgattatcaagactactacaatgcaaagaaaactaggaaaacaacatgttgtgtcctaggttttaacatctttaggatcttgcttatgatcatcatccttgaggtttctgtatctgtatagccaagagcagacaagaaaatagccaagattcaagactcctcctatgactaaaatccagtaaacattgtcaactcttccatggtttatgtcatctggtaaccacgccgtggtcctttgaatcagatctatcaaagcagtgcttgtgtagaaacatatcccaatcaccaccgaggttatcgatg

SEQ ID NO: 157278 - DNA, 284 bp, Arabidopsis thaliana landsberg
ttgtaacccatgtggggacattaagatggtggaacactgactcggtccacgggtcagatctgttgtggcattgttcttttctgtccagtccaagctgtgagtgatctgtgtgtgttgagcgaaggcttggctcaggcggttcttacattggtgggcaatgcgtgaggctggtttcatagagcagcgatcacctcccgctctcggcagtggacggataacagctcgacgccactcagattcaccatggcctgctcgctcgttcccagctggaccaccaattttag

SEQ ID NO: 157279 - DNA, 309 bp, Arabidopsis thaliana landsberg
ccagagctacggtgccctaacctaatcaaagaccaaaaattttcgataccactttcaaattaaaaacttcgtagccttatacgatctgtttttacatttctcaaaaatcgacgatcaggaaaatagaaatacgtaaaggatctgaccggataaggcggtcggatgaatgatgggaagaggagctgagcttggagaacctcggagatggaggagagtagacaaaagcgagaaaattccggtgagacgtcacggaagggagaagattgcgttttccaaaaaacggtgacgttccaagcagccgacgctgag

SEQ ID NO: 157280 - DNA, 117 bp, Arabidopsis thaliana landsberg
ataaatcttaagtgaaccggaactatatgttcttggaataaatcttaagtgaaccggaactcggttaagatgttggttcgtaaaatataataagaacctaattttgccaaaattata

SEQ ID NO: 157281 - DNA, 461 bp, Arabidopsis thaliana landsberg
  unsure (1)..(461): unsure at all n locations
ctagctccttacgcaaagtttacaagaaggttaactcttttcttcagaaccaattcaagggtttagcaaagctttttgttttgtttcatttatgaaagattatgcaatgtttgaaaactttcatacaacgtttaagtttacaatttgcaatgttcacctgtcaaactagttaagttgcttcttactctttccagattctttaatgtgatgtgtttctgagacgtaaagattactaaagtcaattgcttcttcttaaggtatgactagttgtgcctcaaaacactcttctcattttcagtatttgatcgattttgttaaatcaataatatgttcttggaagacttttaaagacgcggcttgttgataaaacagagagaaaactcacgcatacctcttatatcaaacgncattgtacaaaatgagaaaagagctcactgaacctcacttatcaagtcaggatc

SEQ ID NO: 157282 - DNA, 221 bp, Arabidopsis thaliana landsberg
tgtaagccgttcgctgccatagaaagacggaaccaaaggcagtgatccagagaaatgtgaagagtgttttgtgagaagcatggagagaagtaagacgacgcttcgggtcaagtctctgaagatgaaattgaaatcgagaaggaaacaaattctccaccatgattcgatttacgaggaactagaaacattgaggttctggttttgccacagatctagccgag

SEQ ID NO: 157283 - DNA, 142 bp, Arabidopsis thaliana landsberg
tgtgatgctaacaatcaggatgtgatcagaagtcactaagtcaagccaagcaataacaggttttggtgtgttctagcagtcctaagtgaacatgcagaaaacagaaaatcaaacagaaacagtaaaacactcgactaacaca

SEQ ID NO: 157284 - DNA, 335 bp, Arabidopsis thaliana landsberg
cgtgaatttagaagaacaaagggagtgagctgctattgagctcttacaaacgttctagacgattgagtaaagaaagagagaggctcctttgtcctaatgagagagtagagagcatatacaatgatactggcttattcccaacaagagagcgacacatatagtaaatggctcataaaacgctccgtctgactcattaccaattgctcgaaggtaacacaagtgaaatgcttgcaatgcagaatcatatcttccgcgtaaacatttgatcccaaggaaagagtagagagcatatacattaatactgagagcttcttaggcaaggagcttacattgct

SEQ ID NO: 157285 - DNA, 639 bp, Arabidopsis thaliana landsberg
  unsure (1)..(639): unsure at all n locations
accttttggtttaactttcttctttttgcgactaatacgatttgcatgttctgcatctctagctgaagcttcattatctgcttctgtgcggttgtttagaaactccggtggccctgaaatctgcaaaattcaatagaagcaaagaatcattcactataagcttttcgagtaagaagtaaccaagccaacgaacactgaaaagttttcactatcagaagatctctttattattcaaaccccaaacctaacctagtctcaggattcctaaccctaaattccgatcacatcaaatctacagatccaagtaacttattttcatctataataaagaaaccattcaatctcacagcgaatctcctcaaggaaaacgacaattcgatgaattgaggtgtataaaatcaaaatcaaagagaaggaagacnnnnnnnnnnnnnnnnnnnnntgaaggaaggggggngnttttagcggaggaggcagatgcagagaaatcaaacacagaagacgattcatatctccgaacatcattatccccatcttcgtcggagttgtcgtaatccccaaaagctctctcctctgcttcttcttcttcagcagaagaatagccttgaagcagcgtcaagctcatgtatgttcgctgct

SEQ ID NO: 157286 - DNA, 243 bp, Arabidopsis thaliana landsberg
aagcctactacggaaaacaaataatgtatattcttagcaagtatcaaggttatatgagctaacaaacatcgatcccctaatttctcttacaacttatataatcgtataactgacttagcttacgccttgcaactaaattattcttgagttttacttttgtaatttgatatatctctttcagcatctgcttcatatctatcttctccgttgtaaggctcactggagattcatcatgatttccat

SEQ ID NO: 157287 - DNA, 452 bp, Arabidopsis thaliana landsberg
gatgatgagaccgcgttgactttgtggcatcccaacttgaaagctgttgttagtcactcttggtgaaaagggctgtcggtattaccccaaggtaccaaacacacttgaatatttttatgcatttaccgtcatcattcatcattattatcagtatcatcagcatagttgtctcttggttatgctttgtttgttgtgtccattaggtgataccagaaggcaaaactagtgtgttatagaatatagtttcaggattgcttttatgttaacatctttttaaaataggattctcgagatacacaaggtatttgaatactgctgctggaatcaattcttcaactttgattaaattattagtgggttttttagtaggtttggtagatctcaccaactgatgaataagaaatttaatattagccgtggaccctccaaaagattaatactattctaatcaa

SEQ ID NO: 157288 - DNA, 436 bp, Arabidopsis thaliana landsberg
tggacataaagcacgtagcttttcattttaccttaagcttcaacaaaacaaaatctatggttcttcgaaattagctactatcaaacacaaacagacaagggacaaccaaaactaaagagatcccacaacaaaaagaagaaacaaacaaaaggaagaagaagccttttttatttcgtggatacaggagagaaaaggcgagcaattcgatctttctgctcttggaatcgtctttccaagaaagtctcaatgatctccatcaccgaaacgaatctcttcatatgctccaacctccggcttagctcagcttctctcgcccttgctcttctcagccgcgcctcggtttccgccagccggtctcgaagatcgtctaccactgaatcatcttctccgtcatgcgatcggcgacggagactgcttcgcgacgacaacgattgat

SEQ ID NO: 157289 - DNA, 382 bp, Arabidopsis thaliana landsberg
ccataatgtgttcttcttttcataaaaaaaagtcgagtttaaaaacaattaaacaactaatctgataaaccttaagaaacaaacacaccataatagataattttatagatatgatgatatttcattcccacgtagcagacatcatggaattggcaacaccagactgctccaaggttaagttagattcatactccaatgtctttgattcacctggaatcgcttgtgttagcttcaatggcttcttcctctctgattcctcaagctgggaatagcagaatgaccagagaagctacagtggagacagcaataacatcagaaaatatcagacaaaaatatagaacaagaaccattgttgtttcttaaggatttgcagacctgaatt

SEQ ID NO: 157290 - DNA, 437 bp, Arabidopsis thaliana landsberg
tctcaccagacaacaacaacaacaaaacttaagggaaagataatcgtttgtctgtgcagagagagagagagagagaaaatgaggttgttcgatccatggccagtgttcttcaagagagaatggaaacgttgttggccattcctcaccggtttcgccgtcaccggcgttctcatcaccaagctaaccgccggactcactggtaaactcgccgtcggatctcaccgattttaaacatctaacttctcccatttcagctgtatttatttgattcagatcggatgtttatttctgtaatcatttctcaattttgattttgattttggaaaacctaatttccgtaaaatggtgattgatatacagaggaagatgcgaagaactccaagttcgtccagcaacacagaaggtacaccaatcttaaaaattctcacttgaaattg

SEQ ID NO: 157291 - DNA, 296 bp, Arabidopsis thaliana landsberg
taacggtgcgatactttaagcaatctaaggtgaagaagaagttcacatggtcgattgggatataaaccaagggaaccaatacatgactctgatacgaagcattgctgagttgcctggtaaacgtcctcgcctgaggttaacaggaattgatgaccctgaatcaatccaacgctccattggagggttaagaatcatcggtctaagactcgagcaactcgcagaggataatggagtatccttcaaattcaaagcaatgccttcaaagacttcgattgtctctccatcaacacttggtt

SEQ ID NO: 157292 - DNA, 125 bp, Arabidopsis thaliana landsberg
aaccacgtaagccccctaccggatcaaccactactgcacacccaaagcctcccactgtgaaggctccgactccatacattccatgccctcctccgccctatactccaaaagctccaagcgtgaag

SEQ ID NO: 157293 - DNA, 75 bp, Arabidopsis thaliana landsberg
cgcccggacgcgtgggcggacgaatgggcgcacgcgtgggcggacgcgtgggcggacacgatggcggacgcgtgg

SEQ ID NO: 157294 - DNA, 111 bp, Arabidopsis thaliana landsberg
agagaaaacttcgtctctcttctctgcttcgccctctcatttcctgtgagataaaggcggagtctctttccagttattttgctcatccatcgattcttaggtatgactcgt

SEQ ID NO: 157295 - DNA, 491 bp, Arabidopsis thaliana landsberg
cgagaacgatttttaggtcggatctttgaattaatttcaccttgttattggtaattcgttacgattgagagagggaccgtgaaagcgacggacgagcatcagttgacgatgtagaagatgcagaaaaaactcatcgagtttcttcgtcgacaaacgggagcagagaacggctgacgactcgcattaatgggccttgtcaatgggctttactgtgagattgaagaagatccaaaactcatcgagtttcttcgtgttcaaacggggcagagaacggctcaaggctagtgccaatgggcttgtcaggttaattttcatcccattttcttgttaaattaagtaattaatatttttataattttattaatgggatattttctcacggatattttaagtttttttgcaatttttattcttagtttttgtttatagttaatgtttaatattttttagataaaaattacctttcaaatatatatatatatatataatat

SEQ ID NO: 157296 - DNA, 209 bp, Arabidopsis thaliana landsberg
gtttgcagattgagcttttatggtagacaaattcgtagcagataattctgttgtggaattgtgttggagaatatctctctctgtctccttctctgttatttgatattcgattcaattaaggataaggttaaaatgttttattaacttgggtacccttcaattggccaatcggctctgttgcttattagcttgtgtgaaaagttaatcac

SEQ ID NO: 157297 - DNA, 372 bp, Arabidopsis thaliana landsberg
cttagaagcttcatccatttccatattagatataactattaagttagtgtcctatgtattttcaaaaacctcatcaaatctatttgtctctctctctcaagcctcaactcaccacacaccaaaccaaaacaccagaaacaaaaagaaaagcaaactacaaattcctcatttcttcgatcgacaattggtagaatggtcgtaaccactcaaccaatttgagacgaaaccgaagacattttttgtataaataagaaacacataccactgaagaataaatactcatggagaattccaaagctgtttagttcacaggatcatgagctccatttgttgtgtctttctcagtttcttgtgcggctgaggacgaaccgt

SEQ ID NO: 157298 - DNA, 92 bp, Arabidopsis thaliana landsberg
tgatataggcactttaattcttccttcttcaatccgttggaattcggtttcttgaagggattaccagagaatctgttcatcctcgatatcgc

SEQ ID NO: 157299 - DNA, 501 bp, Arabidopsis thaliana landsberg
cagaatgagatctacgatctgttgtataggagccaacgcggtggttgagccatatttatgatgtttggtggagaacaaagaacaccaagatctccttacgattggctcaaatttacggcgcaggagctagagttaagagatcggtgccggcgtgtgaagtcacgtatcaaggttacgtgtcgtaacaacaattgtgcttataataattgtgttcatcatcatcatcatagccagagttatcctggagatttcagttacgatccgttgagttacgcgctcaatttcgaggataatgtgagagctgatgacgatggttcttttcctaatttcacggcgaggttgcctcagtcgccggtgaccaagacgagatcggcgacggttgatttgatctctttctgaccgaataattaattacaaaaagattctttaaaaaaatatcttttcgttttcttgtgtgtgacggtggaatgtaactgttcgccggagaaatgacgtaagaat

SEQ ID NO: 157300 - DNA, 306 bp, Arabidopsis thaliana landsberg
aagtgacatcaaattgtggcccttcacgctcaaatctggacctgctgaaaaaccaatgatcgtcgttaactacaagggagaagataaagagttttctgctgaagaaatctcttctatgattctcatcaagatgcgtgagattgctgaagcttaccttggtacaacgatcaagaacgctgttgttactgttccagcttacttcaatgactctcagcgtcaggctactaaggatgctggtgttattgctggtttgaatgttatgcgtatcatcaacgagcctactgcagctgctattgcttacggtct

SEQ ID NO: 157301 - DNA, 391 bp, Arabidopsis thaliana landsberg
atttctctctgttgacaggtttaggttcatgccactttccatctacaaggtaaaaaatctctccaaaactaattgatatgttataaaagttgataaatacacgtgtatttgaatttatgagatgacaaggttttgatcgagtgtgacaattgcagcacgagtgaatcgatattgaacgtaacaagtgaagatggattagggcttttcgggagaataccatctcatccaactcccaagcctgaagcttcaacctcctcctcaagaactttgatctcatttctctacttcctttgcttttgtgttttatatccacttggtataaccttaacatagtcatgtaatatataataggcaactttttctaggctaattcaagacgatagttttttca

SEQ ID NO: 157302 - DNA, 341 bp, Arabidopsis thaliana landsberg
  unsure (1)..(341): unsure at all n locations
agaatttgggtccgtccagtttacggttacaagcagactccggaaaatcttgggaagcgatacattggcctttccatttaatgggaacaggaccaagaccacggtcatcaaagctaggtctttcgggccaaacaccagtatcgataactccgataactagatccgacccgaaattagactcttcgagtagacccgctttgtcggtggacctaagaccaaaaaactcaggggaacgagtggtgtgcaagtgacggacttnnnnnnnnnnnnnnnnnnnnncatgaggatggtctaagagttgactagcgtcttgtgaagtgagtctagcggagaagccatgg

SEQ ID NO: 157303 - DNA, 395 bp, Arabidopsis thaliana landsberg
ccttaagggccaacttcccaagtttacgaatctcttcagggtttttagcaaatctcttgacttcctgccgcaagctagtcaacaaaggttgagattgcatatcaatttgctgccaaatctgctccgcatcaaacccatcagaagagagctgatcaaatggacatttagggttatgcggcttcaacttcatgaatagatactgagatgcagagcgagcatcctcagatattgaacttggcgctagaaaaactggtggctctgttgccttaagcttctcaagggcttcaaaccccgaatcctttaccgtagccattgattgagcttcctcagtgccctcgaaattagggttccttcgatttgacgaaaacagtagagtatatcaatggcggtgccga

SEQ ID NO: 157304 - DNA, 1056 bp, Arabidopsis thaliana landsberg
ctcctacaccatttgaaccctctgcaagtctcacagtgtttctaggtctcgcaacgacaaatggacgaagaaagattggaaaattgatcggattttttcgggtaagttctctgaatcgtttgtattctacttcaccttccacatggttgagaactcagatgtagcgtaagtgaatctaatatctacagaaacaaacaaaagcaaaacaaaaaaaaatgattcctttgaaattcagcatttgcaattgaaactgtgtgaatgattcaatcgatgtattcatcagaatctgtgaaagctaaaacattttcgttcttcaagttttactctcttggctgaagatatatctattttggaagagaagtctatgtttgttcttatgtagaaactgttaggtgatgaatcaattttcatctgtcagctttccaaatctaggtggttgttacttgttagcttgtgataacttgatttcactacaaagcaatcatttgcaaaatacaatctttcaactctgtaatatctacattttgtctacaattcgacgtttcttcgttgttgctactacatgcgcctatctgatcttgcttatatactaataatgccaataagttagctaataattccattttcaaggtgaaaatgacttgctttatggcttcattaatgtatgaggagctcgtaactctccaagagtgatgatgaatgttcatcttctgttccctgtttatgctgttgttgttgttgttggttatcgttttcttctaacccgagttcgctttccaggtgcttaaaccatttatcaacttcatcttcttcagactcttgaagagctctgttctctggttgttggaatgagtctgaaccatctatgaaactccaaatgtcaggatctaaatcaaaaggcatctccagcagctctggtttgtctacctcttgtaacatccccgtaaactcgctataagttagaatgtgctcaaacatttgacttatctgtgcatcatcgtctttgcttgaaatgttggaaccagcaaaagacattgaagcatttggagatgactc

SEQ ID NO: 157305 - DNA, 442 bp, Arabidopsis thaliana landsberg
aaagcttttaccttcgccactctctaagagcgaaaccttcctctttctccatggccgatggtggcggcaagatcgaaccgtttgtatcatcgaaactatttatcgacggcggagattgagtttcgggtcgaggagatgaatcgccgcctggtaagtctgactctttctccggttgggagtcaaaattagagaaggaagagtcaaaccgctgcgactggaatcgagactcgtaagccgtgaagtttcctccgtcgccgctatctacttccgtcgaacgatttgaatcaccgagtcctgactcttcgttgctcaaggttgacgacatctctttagttgtgtgtttattttcttacaaaagtcttctttgctctgctttgtgtccacactggttttcgtaacgacgaattcttcttctcttaggatctacgcggcgttttataat

SEQ ID NO: 157306 - DNA, 272 bp, Arabidopsis thaliana landsberg
atgaaaaaaatatttatttttatacataagtttaatctaatgtttggtatgcagttactaaactcaaagagtctgatcagaattggtattccggagagcaaaattaataatatatagccgaactataaatttatatcacaattctctacccatgacgtataggtgtgttgtatgtacagtgtataccgaaaaataagcatatttattttgacaacaagaattatagttgaattttgatagtataaagtgcccattcaacagtaccatacttg

SEQ ID NO: 157307 - DNA, 105 bp, Arabidopsis thaliana landsberg
accttgtagagaagaagagcggtgaaggagaagaaggagagagcaagaacacagagaaggagatacgaaggtgtacgaggagagcttttgtgagggagacgaaga

SEQ ID NO: 157308 - DNA, 357 bp, Arabidopsis thaliana landsberg
cttcatcttctctctagtctctgtctctctcttcaccgcgtacacagtaacacagaccctttttccctcttactcaaggttcttctttgacatcttgttgccgaatccacaaagaggtacgctttcttctctgaaatctccctgctttgtaatttttactctcttctcttctcatcttcttcagtgctctgcttttttggttttggtgattgatcaggagaataaagattcgacctttattagatattaacgactctggatttttgggtttttggagcaggatccacatgggtatctgatcccgatggattccctggctccatggactgcatgaattcctattaaggctgtaactgg

SEQ ID NO: 157309 - DNA, 805 bp, Arabidopsis thaliana landsberg
ataattgtaaagatttttttcatacaagactgattcatcatccttcagggtcaaaggcttagacactcatacacaaaatctattctctacttccaaaagtcaagcaacaagactcactaatgaatctaaacctaacagaaaacaaaaaacaatccttaacgttgctcattgttctaggcgtgccttctgatcggtgagtgaaacacgatttccggtgaagattgccatcagctcagccacaagctgcttgtcatcatgtttgctaacagacaaatttaaaaacgactcactagtacttgtcaaaacagaagacattggagggagttcactttcaagcaatccttttgacatgagaactttgataacatgacaccttgggacagtcctcttctctaggctgtatccaagtacctgagggatcatgaccacagcctttactggccaattcatctccttgaccaaaaactcagtcttcttcttcaccgcctctgtagaatatccaatacacggagggggccgcttaaccatcatcataaacacatctctgctgaatcctaagcctaagaacatttcaatagagtctaatatcttctgctcagaagatcgtatgcattgtggacgactcttcaacgccgaaatgatctcttcctctgccaaaccacacttgttcagtgtttcaaacatcaggattatcttcttctcagagaattttaaaaagtaaggccacttcttgaaaatcgcccatatctcggcttcactaaagcctagcctgttatacacattcactttctcttctatcgttttc

SEQ ID NO: 157310 - DNA, 113 bp, Arabidopsis thaliana landsberg
aagaaaaaagaagaagcattgaaaaagcaggaatgaataatacaatttgccaatgccaactgtctcacaacaagaacaagatgtctctgatttaccacaacaaacacaggatg

SEQ ID NO: 157311 - DNA, 538 bp, Arabidopsis thaliana landsberg
ataatcaaaggttagctataccatactaaaaaggtaaaaacagataatgaagatgagtactctatgttgtttaacagtttaagtaacaattaactcacattttagcatttatatatgtagaattagaagccgtatagtcatacaatgggactaagaaaacactcatcgtcttccatattacaaatcacacttaaacaatcaaaataaataggccataatactaattattgcggtcgtaaaaaataattatttgctgagttgagtaattcccattaagtggtcacccaaaattgctgctgcttccaattaagcatagttttaggctcacacccattttcattgcatctcctttttggcctgttgctaacctttttatttccacttttaccctcaaagttctcattattccccacaatgccctcctcgtcctcttcttcttcttcttcttcttcctctgcatcgtattgatcatcttcatcttcgtcatgagcctcgaattgatcagattcattttcttcaaactcttcttctgcgtctt

SEQ ID NO: 157312 - DNA, 305 bp, Arabidopsis thaliana landsberg
ccttattcaacttaaatactacacggccaaaaacatttaacaaacgccactcagatcctgagtctttggatcaatggctatttcaaatgttatttctgtcttattattattgcttgtactaatcaatttaagcaatcaaaatatcaaaggaattgatgcatttcatcagatttacgaagaattgcaatctgaatcagtcgagtcagtgaatcatcttcacagacctagttttcactttcaacctccaaagcattggattaacggtacatttgatctctccctctcttcaaaatttagtggaaata

SEQ ID NO: 157313 - DNA, 375 bp, Arabidopsis thaliana landsberg
catctgttaaggttatgcatttgtatgagaatctgaagatcatttgctttgctaatggtttaaaacagaaaagaagaagaagaagaagcctaaaggtgatctgaaacagaacaaatgtgtctgtttatgttttggagctcgttgttaacaattgtgcaagacaagtagagagagttaaaaaagcttgggagattcacattctgttcttgagccttcttcaataccttttgctcttgttccttgtaattcttttttctgacatgacatgacatgattggctttttgatcgcttgaggtttggtttctattgtatttcggattcgcaacaccgtggaaattattaggtaacaaacaaatttgcacggaataaagtga

SEQ ID NO: 157314 - DNA, 1412 bp, Arabidopsis thaliana landsberg
ttgtatcattggtcgggtcagtcggatatatggtccgcttttggtttaagaccggaacaacgaaagccggagatattgagcctttttgatgatgcgcctccgggcggtaatgctattgggacatggattacattctgatcaatagggactaatagtatggatttactttgtacttcagactaggtttttttttttttattttttataaatattattaatcctcatcccaaatgggcttgggccgcaacaaaaacaacatcaaatccaattacaaaattagcaaatcggaaaacatgtcggcaaagaaggaagatcgccgcttgttgatggaagctagcagagagaccggagcattagatccggcgggctcaagccctacagtttcgaggccgcaaccgatgcccgagaacttcggacgaaagagaacgggtttcggcctcgaattaaacccaacgggggaacaaaccaacaccaggctcccagaaagctagtcgctccgacgcaacacatcgacggagccgaatcctgaagtagcaacccgactcactggacggaaacccttctcctccaatccggatcaaaccaagatccttgagcttcaacgaatcgatccggttcggtggaatctaaattgtggcagatctaaggaatggagctcacccgaaacctcaagacccaaaacccacaaccgccctcgaagatccaaaagaatctgcagctaaccaccgagcaaacaacgaacccaccgaaaaccctccaacttccgccgtggacacagcgcgagaccggcggttgagcgtgaagacctaaagcacccacgccgtccataaccgtgagacaaccactttagtatcctcctccgcctaaactcgagccacaaccacatcggagggaaatcgccacaccaccgttgacggagagaacgcaaagactcactcctggaccgacgttgaacaactacgaccggagagtgaagagcaactgaacctaaagatctagatctgagaagaagaaatcgccttcaagtgagagagaaaagcgtggaaaccaatgcaacgattgtgccttccacttttcttcaatggttaattgtttggttgtctccagactaggttttggtcttttccgttttagtagttgttctcgtgtcgcttagagtctatgtaggtggtcaaagagatgataatattctgatttgtagagtattatctatctcattgtggttaaaaatgcaatggttcctcgatcaggtagcgctggatccgatagtgttttaggggatactagatcaaaccattgcatttgggtccaatttgatagaggagaatgttatgtacctttaattggatgtaatcatttggtaaatgaaagttgatgttaagcaaaaaaaaaaaaagaatctgatacaaggg

SEQ ID NO: 157315 - DNA, 618 bp, Arabidopsis thaliana landsberg
aagaataatcctcttccttctctcttaaaaacaaaagcaccgcttcaattccgccggcgttgtgagccaccacggtcatgacgtcggtttggctttttggtttatgttcagttatgtctctttaagttgtggttaaggagatttctgggttggtttcgatttcgtttcctcctcaatttctcttattagatctatagtttcgattggtgattttgcaaattagcgtggttttcttctctgactaaatactccctggcctaatcacgatcgctctatgccactcactgtcggtgttgtggtgattcgggttgggtgacctaattttgggtttcctcacacagcttcaacaatacggatctagggcgaaatccgcccagattttgggttctttctaccggttcaagtcgcatagtcgatatctccggccacggcgttctcgacggtctctgcatgtttagctgagtttccaccgtctgccatccaaagtatcccaaggtttttcttctgaagatttttaattatcaagtgaggcaagaagatcaaattttcttaaagtgggtgtctcaatctccgacgaaatctccgatgccagttaattttcgatcttggtttatttgg

SEQ ID NO: 157316 - DNA, 572 bp, Arabidopsis thaliana landsberg
gcgaatgtcgctggttccagtgtggaagcagaattctttccttcagatgtgtgagttgaacatttcccttcagaagtggcacacatagttttaatggaagagtctttgactcagatgtcttctatttatagttacatatcatatcttcctttggcgcacatatatgaacgtgcaaatcagattatgggggtgtatggtggtgttgctgtcggtttctatcagggggtatgtaagctcatgtcttgtgacatatgagattagcttgttttacgaaatcagactaatgtatatatatacttctttgacaggatgtcttgaagctgatggatgattttgctgtgttaagaccaacaatattctgtagtgtccctcgcttgtataatcgaatatatgatgggtaaaatcactttatacttcccatgtcaagtacgtattgtggaactatgtggtttctatgtgctgactttaatctccacagcattacaagtgccgtaaaatcatctggggttgtgaaaaaaaggctcttcgaaattgcctataactcaaagaagcaagcgatcattaatggtact

SEQ ID NO: 157317 - DNA, 692 bp, Arabidopsis thaliana landsberg
tctttttcactcccacacgttcagctccagcgatactgtgagagaatctctgtgtggtactctttcatttttcctttcccattttcaaatattccgttacgattttgaatatttcccccattgattatttcctttaattctcacgcttattagcttaatattggaatttttaggttgtgaattcttaggctggaattgaattctgaaatggcggaggagtacaaggaagcgttgttggagaagcagaactatcacgacggatgtcccggctgtaaggtggagcagatgaagcagctccggcgaggatatccttacctcgagctttccttcgtttggattatcgtcctctccacttgtaacaccttcttcgccttctcataacagttactattgtgtcaattttccttgagatttttggtgtcaatcggattcggctatagtgttgtttttgactattcgtcattgtcaactactttgacgagattccggaaattgatttgcttaatggttttactgctaaatgttttgaaattggcttcttgtgttgaaagtaatgattcgttatgcgattcctcatacgttcttatttgatatcatgtgtttgcagctctaccaatttcctcactctatcccttcctctactatatggtgagtttttgatcgagtactgtactgttcttttgtcacaggct

SEQ ID NO: 157318 - DNA, 393 bp, Arabidopsis thaliana landsberg
ttgtgtgtctcttattgacgcttacaattacatcttctctagcccgcaaccctgtttccgtttcaggttcgaatctcatcttcttgtttccttccttcgattcgttcatgtttttctctatgtctgaatgatttcgtttggattaggtgggtttgagaattctggattccaaaggagtttgttgatggtgaacgttgaggactacggtgacccatctgcaaatcctaagcacgaccccggcgttcctccgtcagcaaccggccaacgtgtcgtcggcagaggctgacgtaatgttttagttaacgcagaaggaaagaactcttcttgtttacattttcagtttgtctgagattaaatctcagttcatatagctttctctaatctgtctatata

SEQ ID NO: 157319 - DNA, 112 bp, Arabidopsis thaliana landsberg
cttacattccagcaaaagctatgcgaacacaagcacgaaacatcataactttcggtcccaccagcaaaatcaattgcatgttcacatcctggggcaggacaccacttcatct

SEQ ID NO: 157320 - DNA, 208 bp, Arabidopsis thaliana landsberg
cccttttgtcttttttcaggcagtgtttgaatcgacatttaagtctttaaagaaagatttaactccttcatagagtggagcaacagattgctgctgcaggagcatggaagagcattctcgggagccatccccttagaagtcctctgtatccatcttttttcactatcgttctaagtacatggctaatagaactactagtgaagcggtc

SEQ ID NO: 157321 - DNA, 259 bp, Arabidopsis thaliana landsberg
  unsure (1)..(259): unsure at all n locations
gttacgagatttctcatgagttcttacgaggaaatcgtcatgagaaggnnnnnnnnnnnnnnnnnnnnnccagttattagggttttccattttgacaacgactggtgttcctttacgagtgttgttgttgtttcctttagcccaccattcaaactttggtgccattttttttttcttcaaaaaaaaaaaaacagagaagaaagaagctaaagaatggatctcattgccagctagaagattgatggagacgcgtgttact

SEQ ID NO: 157322 - DNA, 322 bp, Arabidopsis thaliana landsberg
tactaattaaacaaaaacaaattttttttgctaattactatggtttcatttaaaaagtacgtacacatggaaaatgaaaacaaacaatacccaaaattaccaatcttttatttcacaaagagataccaaagaaacaattgatagaagaccccaaaaaatgaagatttgaacgcaaacaataacaaatactctataacaaagatgaatacagacatcacataacaactaaacagaagcagacaagcttgggacaaaagagaaccaacgaaacccacaactccatttctccggcaacgaaggacatttaggaacccaatgccat

SEQ ID NO: 157323 - DNA, 759 bp, Arabidopsis thaliana landsberg
tgaattcattaaaactttgatttaattttaattctttgtaggaggaatttacattcaagtttcgatctactgatgaaattgcgaggcaaaaagctctaaattatgtatatcttcttcaaggtacattatcagaatctaatggttatgttgagccaaactaaactatttgttattgagaaaaaatttaaacaatcgtgtatatattttttttttgttaggagttagttctgtgacatttagtgaacgaagcaacttactaaccgtcaagggagaaagaatcgacaaggctaaaataatgaggaagatagataagatttttcaaccgaaaaattcgttcttttcgtgttttagtcccaaatactagtatggtgtttatttatgtttttatacttataagagtatttggattttaggaataattttctgaccaactgtcccttttaggaatattttctatagaagtgtttggattgttattaagcttaagttatatgagtctactcgtacatatatagtcttatcaaacgaaatctagttcagattcagataattaggaaaagaacacatgtaataaccgacagaaaaacatattatagcctcataactaaaattctatacctccccaaaacaaacaccatacgagtttaagataatagacatagatagatacacggtttaatgtggaaacgttgaaaaccatagattttcgatagccggaaaaggaggtttcacactctccatctaattggtcaggtctgg

SEQ ID NO: 157324 - DNA, 589 bp, Arabidopsis thaliana landsberg
ttttttagaattttacattttttaaaagataatatataataacaattttaacttcttaatacactttgaaaataataataaatatatacataattatttaataagggtaaaacaagtaaaaagttttaaaatttacattggagatataaaacttctatctttgtgagaaaaatgttttttctaaaaatttatctttgtaagactaaaggagtatattttttttattttagctaagggttcgttgcaaatgatacattgaagaaaatcagtaaaagatttaaaatagatttccttcatgaatcaagcttcttctcttgaaatgttgttgattgctttgttcatcgacggagaaggaacatctcttataagaagactcagaaaaaatccgatcatctgtgcatgttaacaaatgttagtcatgcataattacacatacaacaatgaacatagtgagatggttgcaagtgtgaagaataccaaagagaatgtcacacatagaaggctgaatccaggaaaataaaacggggctttttcggagagaaacaacgctaaatcaaacaaaatttagttatttgttaaaagggtatac

SEQ ID NO: 157325 - DNA, 491 bp, Arabidopsis thaliana landsberg
tgtgacttcatctccattggaggaatctagttccggggaaaagggagagactgaaggggacagtacttgtttaaaaccagagcaacacttggcttcttcgccgcactcatatcctgagtcaactgaagttcacagcaatagtggctcccctggggtaactagtagagaacacaaaccagttcaaagtgctaatggaggacatgatgttcagagtcctcaaccaaataaggagcttgagaagcagcaaagcagcagagtacatgtagatccagagattacagaaaattcacatgtggaaacagaacctgaggtagtaagttctgtttcaccaacagagtctagaagtaatcctgcggcattaccacctgctcgtccagcaggtcttggtcgtgcttctcctcttttggaacctgcatcacgtgctcctcaacagtctcgcgtcaatgggaatgggtctcacaatcagtttcagcaagctgagactctaccac

SEQ ID NO: 157326 - DNA, 148 bp, Arabidopsis thaliana landsberg
cttctcttctctctatcacactactactactcacatcatggctttctccggtagaggctccctcttattcctcaacactaacgctgttcttctctccaccaaaatccatgcaagagacagttacttctttggaaaattccccagagct

SEQ ID NO: 157327 - DNA, 398 bp, Arabidopsis thaliana landsberg
atgttcacacaatatacttatgatgtttttaaataagctagacaaagtaaatgaatgtcacagataaataagctagacaaaggaaatgaatgtaaaagacaaataagcaagtaaacgagctgtagattcaagtgattaaagtgtcgggtctaaggaattgtctcaggagatagaaaaattgtagatctagctaatattaggattgttatcgcaccgttctcaaactcaaactatgattttagagtaaccgatggtgttccgcgtaactctctatacttagagctaagataaccggagaagccgagaaatcctatactaaaacatgtattattatcaagcttgattagttcacctagtatctaaaccagagcccttctatgagccaacctgttctttct

SEQ ID NO: 157328 - DNA, 414 bp, Arabidopsis thaliana landsberg
ttttacagtaatatgacattctatataaatgctaaaacaacaggagacttttcttatttacataaaaaattatgattttgcatttcattaagcggtttgcaaactaggtgcaccagtgcctgaacctatgctagctgtctcggcctcaacctcagcctctgaggcttgatcgtctgaggacaactcgaattggctcaggttccggacaaagactgtgaaagcatggaaatgctctggagagaagaaaagtgctcccattctctggtaagtgaacagatcaattcctacattctcatccttcagattctcaacgatcctctcaaacccaccaggaaccggggtggatgagttttgccctgagacaacgactccttgtttcttgcaggaagttttgatgtggccaagtaatgactc

SEQ ID NO: 157329 - DNA, 498 bp, Arabidopsis thaliana landsberg
gtcatatacaaataggtacaccaatgacgcaacacaaggatacacatatagtggaatacttacatgcttatattggtggtgtgctcaaatccataaggtaagtaaagtttcttattgcatcttttcttctcctatcttgttcgtgtaattgagaaaaaggacattgctacgtgtaggaatggatcagacactagaggctattttgtatggtcatttatggatttattcgagcttatagggcggtacgattatggttatggattgtactctgtaaatttcagtgatccacatcgcaagagatctcctagactctctgctcattggtactctgattttctcaagggcaaaacctcttttcttgattccaaaggcatcaaggaatcgcagagcaacttctcttcttcctcttagtactgtgatgaaataactcttatgttctactgaatttagactacttgtcatgagagccacttctttttttctataaattctaaacaa

SEQ ID NO: 157330 - DNA, 223 bp, Arabidopsis thaliana landsberg
gttaatgaacacttctcataaccgtgaaacgcattaataaataaatcagaacattaaaattaaagattatactcctactaaagaaaaaaaaaattcgaagaaaaaaatgttgagtctctttcctcatatatcaaagctaaaatccatgttataaaaaaggaaataaaagatttgaaaaaaaaaaacgtttttttttgtttttaggaatcgaagaaagaagagc

SEQ ID NO: 157331 - DNA, 273 bp, Arabidopsis thaliana landsberg
gtggatcctccattggcaaaccatggagtttggttccctgaatcatcgagatgagaccactcttaatctcgaagttgttgttctggatagcaggaggtgcaattcccttcctatgacggtgatcacgtggtgcatctgcagcaccaatgttggtagggccattatgttgattctggtcgtcagccatttcgagtggttgctgaggtacaggtttgactgtggtactcctttttctgagttcgcgagatgtgcggatgatgttgtcgttgaaaa

SEQ ID NO: 157332 - DNA, 159 bp, Arabidopsis thaliana landsberg
ctctgtaatttgtcttcgtctctaccttccatctctctcacccgctctcctcggaaaccacagcgacggacggacggacgataaaacttttgcctcttatttgctcctacaaatctggaatcagccggagcgaatctcgaagcttatgatctcgacttg

SEQ ID NO: 157333 - DNA, 481 bp, Arabidopsis thaliana landsberg
tcacaaccctcttcctcctcacactacagtaagaaaaacacgcgcgaaagctatggtaggagcttcaagaacaatcctatccctatctctatcttcttccctcttcaccttctccaaaatccctcacgtttttccatttctccgcctccacaaacccagattccaccacgcgtttcgtcctctttactccgccgccgcaacaacttcttctccgacgacggagactaatgttacagatccggatcaattgaaacatacgatcttactagagaggcttaggcttcgacatttgaaagaatcagcgaaaccaccacaacagagaccaagtagtgttgttggtgtagaggaagagagtagtattaggaagaagagtaagaagttagttgagaattttcaggaattgggtttaagtgaagaagttatgggagctttacaagagttgaatattgaggttcctactgagattcagtgtcagaactcc

SEQ ID NO: 157334 - DNA, 330 bp, Arabidopsis thaliana landsberg
tatgaagagaggaggaaacaacaccgataagtaagtaatgacgaatcttttggccttgtgtcttgtcttgagcactttactagcggcggaggtatggtctccgagtccagccatgaccacccacaacacggcggtggcgtcagagggagaagtcatcgtcaaagacggacaccacgttgtggtggctgagtaccaacgcgacgggaaaaccaataccagagtctcgatctcgccaccatcggcagattaaggaagagaaaaagagactgaagtatagatgggaacttctatgtttagaaatgttaaagagaaagcttaagaaacggcgtc

SEQ ID NO: 157335 - DNA, 341 bp, Arabidopsis thaliana landsberg
gactaggttagtttgagaatctctgttgcggtggcacttagatttggttaatgaacttgttgtctagggttaatttattgagcatgtcaatcacctgtaaactgaggaaacgaaactactcaattaccccatcattaggaattctttgtctgattgattttattgtttactgcatcctgtcatctgttgcttagtttatgcaattctttactgttactcgaccttgtactcgaccacccagttgtctggcaacagactgtgcagtcgagtatccctgtttcattttctgtctgttactcgacctgtcactcgacctcacccagtgctctgcaaagagctgt

SEQ ID NO: 157336 - DNA, 284 bp, Arabidopsis thaliana landsberg
aagaaccccccccaaaaaacccccctcccaaaaaaacccccccggggaaaaaaaaaaaaaccccaaggggggggtttccaaaaaaactccccttacgggtttgaaaaaaggttggtttgttaattttcaaaaacaaaaaagatagatgctcttcttcatcaattctctagagagagagagagagagagagttgccgtcaaatgaaccggaaacgctgatttaagatcggacggtcacaaaggcggctgtgttaaagagagaatgttatttggaaacaaattgaa

SEQ ID NO: 157337 - DNA, 236 bp, Arabidopsis thaliana landsberg
gaataaactttaaatttattattttttaagaccactaatattaaacatatcaaatcatcctaatttagaaaagattatataaaaccaaaaatgttacgtggtatgtataatgttactatatataaaattaaactataaaatataaatttattaaagaatgatacaatttgcaaaacttttatatataataaatcattcttaaaattttaaaattactactttaattaaaaaatcac

SEQ ID NO: 157338 - DNA, 319 bp, Arabidopsis thaliana landsberg
aggaaccttttacatatttgcgatggtggggggattgtcattgctttttatatggatgctcgtgccggaaaccaaaggacagtcgcttgaagaattgcaagcatcccttaccgggacaacctaaatacacatttacatctattggcagtgtctttgcaaacattatttacataataaagtacacaacctgctcttcatagtgattgatgtgtaaaccttttccttgggaacattgtcgtatatatcctagctatattttttccataatgaatgttacataaatttaaataaaacaaaacacgacatacgctttgtcata

SEQ ID NO: 157339 - DNA, 444 bp, Arabidopsis thaliana landsberg
tttactcaaagctcatacctcttataatcgtgtgtaataaacaacttgcaaagtttcttcaaaaaccaaactacttgctaattgcaaaaaaaaaaaatcaaataaatacatccatttgtcacaccattttgtccctctctctcaatcaattcgtcaccgcaacttaaaaacatcggcccaatttgtctttctcgacacaacaacttaggaaataatgggtcacgtttgggccttaattttgggtcacttacggaaaacggtttcggttagctggagatcaacatccaatccgaattcattggtaaataacttttatccttacggaaaacggatcggttagctggagatcaacatcctcctagagactgaatgatctgacaatttcctcagcgtgtccatgttcatggagctcaacaagtattttctttaacctgcgggcgagac

SEQ ID NO: 157340 - DNA, 496 bp, Arabidopsis thaliana landsberg
ttcaaatggcgatcctcgacacaaagtccagccgttggatcccacacaaccttctctttcttctcctcttgctcttgctccagtcagtaccgtatggattcggtcagactcagaccacaccacccggaacaacaaaaacgaaacctaacgatccagttgttgttgtaatcacggttttgtttttagtgatctttttcatggtcttcggttccatcttctgtcgtcgaagcaacgcacagttttcacgttcttccattttccgatccaccgacgcagacgccgagtctcaggtcgtcaggatcaggaggttgacggcgcgtgggctcgacgcggaggctatagaaactttcccgacgtttctttactcggaggtgaaggcggtgaggatcgggaaaggtggtgtggagtgtgcggtttgtctctgtgaattcgaagacgacgaaacgctgcgtttgatgcctccttgttgccacgtgtttcacgccgattgtgttga

SEQ ID NO: 157341 - DNA, 226 bp, Arabidopsis thaliana landsberg
gtaccttttactcgattactaaacagtctctgggatattctatctttagccgttgttttcttacgccttgtggaaaaggtttgcttcttgtttttcttttcagcaaaaactctatcaaactcatcatccatagcattcgatctagaagttgaggctattgccgcaccacgcagaacttcatgattgtgttccttaaccttaaccttaacaagctttgctcttttcc

SEQ ID NO: 157342 - DNA, 84 bp, Arabidopsis thaliana landsberg
gcaaagcttgttgatttgaggctctctctctactagggtttgttgatttgagttttctattcctcctatacgtgttcttcgatt

SEQ ID NO: 157343 - DNA, 70 bp, Arabidopsis thaliana landsberg
cgttgctctttccgctaacgatctccattgctactacacggaagctgtaaacatcagccttttctgttag

SEQ ID NO: 157344 - DNA, 498 bp, Arabidopsis thaliana landsberg
aaaaccaccacaaaatctttatttaagcttgtagatacattagacacatcatcacaaaattttcgtacatgtttgagtctatgtgatttatttaataggcattaaatagaaataaagcttttaataatttcaatcacgtgtgaagcggcgattgaattgcgaacggtgatgagatgcatttctattttctgatctattttttctatgaacaagtcaaaagtctttctaatagaaaaagggaaaaagaaaaataattttaagtaatttagtccaaaaaaaagaaaaatctattatgagaattatgctaaaaatagttttttcttatctaaagctcctatatttgactatcaaccaaggattcaaagttttactaattaggacaaagtctttgaaaacatttcgtaagattagagtgctttttcttagaaaaaaaaattctttcggtgagattttttcagttacaataagattgggtcaaatattaaatttaatataaat

SEQ ID NO: 157345 - DNA, 584 bp, Arabidopsis thaliana landsberg
gctgaagtcgaagaggaccccttgcctaatgaagtaaccgatccaaagtctgagttcctggagaaaattgaccttcttttggctgaacataaagtggatgaagcactggaggcaatggatgctgaggaaagaagcagtccagatcttaaaggatcagtcgagatgtcttcttacaagtctgcctttatggaaagaaaggcggttcttgaggatcagctccttaggatcgctaaacaaccctcgatttgtgtagctgaattgaagcatgcattgattgggttaatcagacttggaaaaggaccttcagctcaccaattgcttctaaagttttacgccacaagcctccgcagaagaatcgaggcctttctcccttcatgtttgacttgcccaaacacgtttcctgctactctctctaagcttgttttctctaacatctcagtggctacaaaagaatccgcagccatgtttggtgacgatgataatcccgcatattccaacaaagttgttcaatgggcagagagggaagttgaatatttggtgcggttggttaaagaaaacgcttctccttccgaaacagcttctgc

SEQ ID NO: 157346 - DNA, 779 bp, Arabidopsis thaliana landsberg
aaaccaaacacaaatcaataacatactaaatggcttcaagaaaaccaaaggccaaaccggttaatcgccaatctgtgaggcacccaagtcacaaccatccgctgcgtgtctttaaagccaaagaagaggatgagaccgcatgctctggctgcgagctagagctgaccgggcaagctttcaaatgtataaagtcagagtgcgattacttcttacacaagtcatgtttcgaccttcctagtgagaccaataacaagtctcaccaggaccaccctctgaccttgcttcattccccaccagatgatcggtctgtctacacgtgtgacgcgtgtgaccaatacggatctggattttattaccattgctcaaactggaactacagtcttcatgtgggatgtgcgtttatccctggaaccgtatatcgtgaagatcatgaacatccactcactcttctttattgcacaccgtgtaaaggacgtgaagacacgtacttcacttgcagcgtttgtgatgaaactatttcagaagatctatggatgtattactgtaaggattgtgactatggaacacatctacactcatgtgcggcatatgaagaccaagggaaagaagaagaagatgaagacgaagaaggagaagcgagttctccagcttctaggataaagtcgttgatgaaggcgcaagacgagatggcggctatgcagctagaggcacgtattgagaatgatgcgaggaatgctgcacttgatctgtgggatgaaccaaaacgtagatactattgg

SEQ ID NO: 157347 - DNA, 262 bp, Arabidopsis thaliana landsberg
aatccatttcttgtaataatatacaccaaaaaacaactcaggtgtactgaggcagatataataagctcagtctcaagtagatagatcatcattctggtttctcacttatttacatacaacctttgaaggaggatcttcaccagtcaccaacacgaccatatccactcaaaaccaaaaccgagagccccaagaaacccaaacaggatctttagattacatgtttttgtccctaattatatccctcaaataaactttttttctt

SEQ ID NO: 157348 - DNA, 219 bp, Arabidopsis thaliana landsberg
gaagaaagatatagatttttttgttgctgatgactttgagctcattggccatgatcctcacaagaagggagaggtgaaaatggctgtttagcccctaatcaatttcttttgttattcagtcagaacttcatagttaattgaatgtggatgattctagttttccttttaccaagtggagaatcaaatcgtttggaataaaaaaattttatcatgaacaaa

SEQ ID NO: 157349 - DNA, 701 bp, Arabidopsis thaliana landsberg
tgcgtcttcttcttctaccttgggtaactccgtctctccgttactttcttcctccgatcggtggttcagttctccatagtatctaatctactcctgttgtttcaggtgcattgttgtgctctcttcacttggtttactttaaaaggcttcttcacttattttgcaaagttttgatttttagtggtttctctgttgtctcattaattctctcgatcttctcctttcaagtgttgacagttctgagagaagatataagttgaatcgcgtgaccggagacatggagactcaaaacaaattgatgaatgaaactaaaagacatgttaaatccagattgtgcagagtttctgggtattgttacattaatcttttacgaaattttctaatttctttgactatagttacactttttgttttgttttttgtatttgtgatcaaagttcgatgacggagatgatggaaattcaagctgagaatcccacattccatgtattgtttattccgggaaatccaggtttcattattatgctcaagactcttatgcatgcacgtgtatatactagtgtgcttcatacattggcttgtaatttttcaggagttgtgtcattttacaaggactttttggaatctttatacgagtttcttggtggaaatgcttctgtaattggtatggctgctctacttttcgagtttgatttctttga

SEQ ID NO: 157350 - DNA, 410 bp, Arabidopsis thaliana landsberg
ctatcaaggactttgtttgttaatgactctgctgctaccctttccagagttgacgactcagattcttcattgattgaatgagggtgtgaatgtcttgacatttcacccttctcttggtcagacatctgcagttgctgagcgaaatggttgaaatatacgtctcccattacgaattatctgtctgtgatattggcagatactgctagttgatggaaagcttatgaaacctgcaagtaagaaaatatttagaaaatctattcctcatttcgcaaacattatcagtcacctgaaaatccagcaaaaaaactcgatgaactgtttgcttcatctacattgcaccacaccaaaacaatccattgttgaggcagcaacaatcagcgttcagtgagaggagcaatcaccattacaaa

SEQ ID NO: 157351 - DNA, 356 bp, Arabidopsis thaliana landsberg
gactagtttaacttaagggtctctgttgcggtggcacttagatttggttaatgaacttgttgtctagggataatttattgagcatgtcaatcacctgtaaacttaggaatcgaaactactcaattatcccatcctcgagaattctttatctgattgattttattgtttactctactgctgtttactgcatcctgtcatctgttgcttagtttctgcagttctttactgttactcgacctggtactcgaccacccagttgtctggcaacagactttgttgtcgagtatccttgttacattatctgtcttctactcgacctgtcactcgaccacacccagtgctctgcaacgagctgt

SEQ ID NO: 157352 - DNA, 344 bp, Arabidopsis thaliana landsberg
aaattttttgactcaaatgagttgatggtcaaatgaattattgggtaaattggtttgatgagtcaaatgagttgggttgtaacggttaatagtttcaattgtttatccaattaacccatcaaattttgtaaaattgaattaaaccaactaaaatatctaaaccaataccaatttaagcttaaccaacacatctaaaccaatttaataaaatcaatatttctccaaatttcttaaatatacaagggatgaaattgagaaaaagtaaactcgtaatttttccacaaaaaacataaacccgtgattttcccgccaaaaacgtaaacccgtgattttaacgccaaaaa

SEQ ID NO: 157353 - DNA, 208 bp, Arabidopsis thaliana landsberg
gaggaaccacataagctcaaaaccggttacacatatccggtttcagagacacatcaaacaaaaacttaaaaaacgatgattatgcaagttctaaaattctaacaacttttcccaatcaatacttttcaaagatttgaaactgaaatcaccatgtggaatcttcaatatcttcaaatccttttgtcctcgcttggtaataattagactt

SEQ ID NO: 157354 - DNA, 81 bp, Arabidopsis thaliana landsberg
ttttttttaaagtttttatttttttttttgtattattttttttttttttttttttttttattatttttttttttatttttt

SEQ ID NO: 157355 - DNA, 572 bp, Arabidopsis thaliana landsberg; identical to SEQ ID NO: 73790

SEQ ID NO: 157356 - DNA, 137 bp, Arabidopsis thaliana landsberg
tgtatgataaataatcaaatctctgtgtgttattcatgttgagtttcgtaacttttcagattttttttttatggggactggatgatccttgactctacagtgaacatgttgttgaagaatcaatattttttgatgat

SEQ ID NO: 157357 - DNA, 356 bp, Arabidopsis thaliana landsberg
gactaggttaacttgagggtctctattgcggtggcacttagatttggttaatgaacttgttgtctagggttaatttattgagcatgtcaatcacctgtaaactgaggaaacgaaactacacaattaccccatcctcgggaattttttatcttattgaattctttgtttactctactgttgtttactgcatcttgttatctgtggcttaatttctgcagttctttcttgttactcgacctcatactcgaccacctagttgtctgacaacagactatgcagtcgagtatctgtgttttattttctgtctgttactcgacctgtcactcgacctcacccagtgctctgccaagagctgt

SEQ ID NO: 157358 - DNA, 265 bp, Arabidopsis thaliana landsberg
gttatggtctgatgtgttactgaacttatttgatgatgttgaatctttggagaatgtaattacatgaatgtgtagtaaacttcttggatgatgttaaatatcatagttaagattttctatcttaattaagtgtctattctgtgcactaagagtaccaccatcgatgacacatgcacttcagagtctagccaataaaaatattagtttttaatacagtttcatcatttaattaatcgtttagttattgaaaaaacatcaaccaatc

SEQ ID NO: 157359 - DNA, 443 bp, Arabidopsis thaliana landsberg
tccaagagaatcatttacttactagcttagagattaatgaactatatacaccatttatgtcttgtatgtatcccaccaccttaaaatgaatatatttataccagcataccacaaacaacaaatgaatgtatttaaaacttatgtcccaaaattcaatccggaattatgaaaaaagggcgactgggagaactgagaagctattgcaactacacgtaggacgatttagctactaagatttgatttgaagatggaagtggaaaagagagcttcaaggttgattacacctagcaaatgtcttggaccttagcttccgttggttcaatgttagtctcttttgcctctgttgatgattgcttctcgtcattaacatgctccggagatttttcaggtgaacagttctgcaaattgcgggtccgttcgtctatgtagctacaaaagcgcgc

SEQ ID NO: 157360 - DNA, 246 bp, Arabidopsis thaliana landsberg
ccaaggataaattgaagctaggaaacacacaatcaacacagaccaaaggtgcttattaacccaagcaaaaactccacgctcctcaactgagatcaatctcaatcatcacctcttttaaccaagcaggcattcttctaaacagagaagacaaaacacaatctatttttcgtcaaccacttgagaaacagcctcttcttttttttgaacatgaatttaaaccaaataagcttaagagtagacacaaaa

SEQ ID NO: 157361 - DNA, 184 bp, Arabidopsis thaliana landsberg
agaaagaacaggtaggctcatagaagggctctggtttagatactaggtgaactaatcaaacttgataataatgcatgctttagtataggatttctcggcttctccggttatcttagctctaagtatagagaattttgcggaacaccaccggttactctaaaatcatagtttgagttcgagaacc

SEQ ID NO: 157362 - DNA, 328 bp, Arabidopsis thaliana landsberg
tccaggtgaaagtgagtgaaggtagaaaagcatgggttaaaaatccggagagattgaagaattgctcaaccggatttcattttccgcagcaggctgaggagacggaacagattccggttcaggtaaatattattgcacctcgtatccattttttattgtcgtgttacaaacttggtggtaaatagagagatcaaaatgtggatggtgcaggaggagagagtgcagatgatgaaactggttcgcttctaccgagtggagttgtaatgtaggaaacatactcatttcctcttgtgtaaataagggcttcgtctctcattttacagttcac

SEQ ID NO: 157363 - DNA, 84 bp, Arabidopsis thaliana landsberg
tttttttttttttttttttttttttttttttttttttttttttattttttttttttattttttttttttttttttttttttttt

SEQ ID NO: 157364 - DNA, 610 bp, Arabidopsis thaliana landsberg
gggccaaaacggttatattactttttagttaaatttaaaaagaaaactaaaagggtaacattagtagaattcttgacaaaacaaaaagaggcaacattagtcattagaatttggatttctcaaaattgtaacggttcacataaccaataactttgggttattaatcaccaaaacaaaaaaacccaaatttgttagcttaaagaaaagccctaatttttaaaaagcccaaattgtctaaagtcaagacgatgaccttctccggcgagtcgacggcgtcgatttatcaccgacggtagtaactgagccaggactttcagatgtatctgagctactaacatctccaacgccatctttatctttacctgtccaaagcttcgagaaaatccgagacattacaactccttttgctttcgtcttctcagaactactcgtcttgtctctcgtcgtagttgtcgtctcctccgtggctgtgactgactcacactcttcttctgttgtcgttcttgagctcccgtgcgagccgctcggtggaagagaaggtttcgttgtggcacgaacttgctcgaagaagaggatttgtacaacgactcgtaatggtaacctctcgttt

SEQ ID NO: 157365 - DNA, 452 bp, Arabidopsis thaliana landsberg
catatttcgcggcaactttcttctgcaatggtatcttctgtacctaaactccatgctttgtttgtctccaagtctcaaccagttctccgagccgccaaagttaccaatgaagaaaggtccaccaaatcaaaactcgccaggtccttggcccgtgccgtgaactctaacccgtggtcggacgaactcgagtcttcactatcatctcttcatccgtcccaaaccatctccagaaccaccgttctccaaaccctgcgtctcatcaaggtccctgcggatggtctccggttctttgactgggtttccaacaaggggttttctcacaaagagcagtctttcttcctcatgttagagttcctcggtcgagctcgcaatctcaatgtggctcgcaatttcttgttctccatcgagagaaggtctaatggctgcgtcaagctccaggatcgctacttcaa

SEQ ID NO: 157366 - DNA, 330 bp, Arabidopsis thaliana landsberg
tgggaagttttatattttattgatcactgtttgggtgtgggaaacatcttacttttcgccaagcctccaaattaaacttctttaactcaaacattacaacatgagaacgtgttaaagcttttaaaaacatttttcaggtggtatatacataaaaatcaaaaacaaatacagagagcatggttttggtatacagtaccggtttttctcatagtagaggttcagcgagttccatctcgttcgcactttcttgtcccgactcaattcttcgacctcccacaaaatcaatcccgagaagttgccatggccaacacgcatatctagctctgtttg

SEQ ID NO: 157367 - DNA, 205 bp, Arabidopsis thaliana landsberg
ctgattcttctcaagcaaacaatgatccggtaagcactaatttgaattctgaaataggtcaaatagtcagaaatcaatcttgacatcaaaactgaaacccaccggttccattattgcaggaatgtcgcatatgttaggcgaagtacacagagacagaagaagcgagaaagctcccatgttcgcataggtttcacctcacatgcgt

SEQ ID NO: 157368 - DNA, 557 bp, Arabidopsis thaliana landsberg
gatctcttcgcttccaaaaagcttcccggactttcctccggcgatctcggatttgccgattcttccgaacatctcgtcttcatcctccgcaaatcttcttcctccttgaaatctctccttgattcctccggagttcctctcttctccatctctcgtctccacgtaagcctccttcgtcccaaatttcatcgattttggcaattctcatcgctacttgtttaaatctcattattcattacatagtccacacgatgtttatactttttgattgtttgggttttgttagttagtcactggcttgagatatatcatatgaacacacttaaagatatttgtacatatgttgtaatgtagaatggagtgtgggaattacataaaggagatgtggaaaagcgtaaggatttggttctaacggtgaagcggacatcgaaaagattcagtaagacagagtcagaggtctcttttgttggagaatcgtccgaaaatcttgttatcaaaggtgttccctttcagaaatcatgtaccatttatagtcaagattccattgttgcacaggt

SEQ ID NO: 157369 - DNA, 131 bp, Arabidopsis thaliana landsberg
atctgtaatcttttgattctcttcgtcaaattaaaccacaaaaacctctccatcgattctgataattcacaacactctgcgatgaaacccctacccgtccagactcacgaacagttgccttatcttctttt

SEQ ID NO: 157370 - DNA, 1764 bp, Arabidopsis thaliana landsberg
  unsure (1)..(1764): unsure at all n locations
atggccaccaagctcgacaccagtagcttacttttggccctcttgtccaaatgtagcctccttactcaaaccaatcttgctctctctctcctcgtagcctccctagcttctctcgctctttctctcttcttctggtctcatcccggaggacccgcatggggaaagtacttcctccaccgccgccgtcaaaccaccgtgatacccgggccaagaggcttaccttttgtcggaagcatgtctctcatgtcaaacactctggctcaccgttgcatagccgcaaccgcagagaaatttagagccgaacggttaatggcgtttagtttgggagaaactcgcgtgatcgtcacgtgcaatcctgatgtagctaaagagattctaaacagtccggttttcgctgaccgcccggttaaggaatcagcttattccctcatgtttaaccgtgctatcggtttcgctccttacggcgtttactggcgaaccttgagaaaaatcgcgtctaatcatcttttcagcccgaaacagattaaacgttccgaaacgcagagaagcgtgatcgcgaatcaaatcgtgaagtgtctcacaaaacagagtaacaccaaaggtctctgtttcgcacgtgacttgatcaaaacggcatcgcttaataacatgatgtgctctgttttcggaaaagaatacgagcttgaggaagagcatgaagaagtgagtgagctacgtgaattggtggaagaaggttatgatttactcggtacactgaattggaccgatcatctcccatggctctctgaatttgatcctcaaagaatccggtctagatgctctaatctcgtcccaaaagtaaaccggtttgtgaaccggattatctctgaccaccgtgaacaaactcgtgactcaccgagtgacttcgttgacgtattgctctctctcgatggtcctgataaattatccgaccctgatatcatcgccgttctatgggtatgtacacgtggcttgtatttttacttttgtactgaagaaaaaacttacaaaaattcatatttattgtactgtatgcgtttaattacatttatactatgatttttggataattaaatatgccattttaagtaactaaagtattggcaattttgggttttaataacaacaggaaatgatattcagaggaactgacacggtggctgttttgatcgagtggattcttgctaggatggtccttcatccagatattcnnnnnnnnnnnnnnnnnnnnnnnnnnnnnnnngtgggacgatcaagggctgtcgaagagtctgacgtggtgtctctagtatatctaacggctgtggtgaaagaagtcttgaggcttcacccgccaggcccactactctcatgggcccgtttagcaatcacagacacgatcatcgacggtcgtcgtgttccggcggggaccaccgcaatggtgaacatgtgggctattgcacacgatccacacgtgtaagagaatcagatggagtttaaacccgaacgttttgtagccaaggaaggtgaggttgagttctcggttcttgggtctgatttgaggcttgcaccgttcgggtccggtcgtcgggtttgccccgggaagaatcttggtttgaccaccgtgacgttttggactgcgacgcttttgcatgagtttgaatcgtgacgccgtccgatgagaagaccgttgacttgtccgagaaactgaggctctcgtgtgagatggctaatcctcttgctgctaaattacgccccaggcgcagt

SEQ ID NO: 157371 - DNA, 455 bp, Arabidopsis thaliana landsberg
  unsure (1)..(455): unsure at all n locations
ttcaattaatttgttgaggattttagcatactattatggtaaggcaaatagtcaaagaaattcatatgctattccagctaatgcagattcagcaaatacatatcattgtttcagcttggttgcaacagaatttataaggaatcttaagatactatattttagaaaagacatatagtttggttgaagttggcaccttcatgccacagcaggcatatccttgagccatgaatcaagcggtttaccaatggagtagacgnnnnnnnnnnnnnnnnnnnnnnnnactgcatcaacaacattcctaccatcgaacacaaaagctggtttctgcatattgtcaaagattttcttgaagtccaaggatttaaactcatcccattcggttaagacacataggccgtgcgcatctttagttgcctcgtaagcatctgagacgacattcacttgctctgagatac

SEQ ID NO: 157372 - DNA, 398 bp, Arabidopsis thaliana landsberg
caagcaattaccagtcaaaagaatttagaataccggtagaaatggaaatcaaaccttggcagtgttgaaggccacatgtcgacagtctggcaatatactcactgaccaaggtggtaaagtatatgactggccattaaatttcacatgtgcagatttatgctcatcaatgtttgcgagaaatgcagcgcacacctttcctccagtctcaccatctccatgataaatgtgtgcctgaaatttgcgttatttacaaataagaatctggaatcttaagcatgtataatataaaacctcatcttcattctgaaaggtaatcaaataacaggcccgtattttgttcagtagataaatcacatttatacgtacatttaaaagaagcacccaatagatggcaatga

SEQ ID NO: 157373 - DNA, 336 bp, Arabidopsis thaliana landsberg
gttttttgtgtcggtgttaatggcagattaggggtagtttcgacattttagactttttgtggtttatgcttaagcgttaattgatgattgtcgttacttgtaataaaaagttaagtcatgaaagttagtgaataagtatgttttgggataattttaacaataattatgaagtctttcggtgattttgaaaatgcgtacgaaatgggtaaccgactcgtgagggtacaatcgtctatttccacgtgttaaacatgttgaccatgattttctaatcatcggacggctataaatcgtatggagattttaacgatcgattaaaaatttaaaataaataaa

SEQ ID NO: 157374 - DNA, 195 bp, Arabidopsis thaliana landsberg
  unsure (1)..(195): unsure at all n locations
aaagaaggaaaaagaaaaaagaaaagaaagaaaaaatagaaaaaaagaaaaaaaaaaaaagaaaaaaaaaaaaaaagaggaagagagaaccgatacggaaanncaagaggaaaaaggaaaaaagaaaaaaaaaaaaaaaaaaaaaaaaaaaaaaaaaaagaaaaaaaagaaataaaaaaaataagaaaaaaataa

SEQ ID NO: 157375 - DNA, 462 bp, Arabidopsis thaliana landsberg
ctcagatcattcacagagatgtgaagacgagtaacgttatgttggattctgagtttaacgctaaactcggagattttggtttagctcggtggttagaacacaagattgatgaaacagagcatgattcgagttacgactctgtttcttccttccgtaaccaccagttccgagtcgcggattcgactcggatcggtgggactatcgggtacttaccaccggagagtttccggaaaaaaaccgttgccaccgctaaaacagatgttttcagctttggtgttgtggttttagaggttgtctccggtagacgagccgttgatctttcgttctcggaagataaaatcattttacttgattgggttcggagattatccgataaccggaaattactcgacgccggggattctcggttagcaaaaggatcttatgatctctctgatatgaagagaatgattcatcttgctc

SEQ ID NO: 157376 - DNA, 574 bp, Arabidopsis thaliana landsberg
actttcttcactctttcaactgctaagaagaaatagagaaaactatgacggtacgtaaattttgttgttaattattttgctttaatccttttttcatatagctcgtaattataaatctataattgttttccgggattttccgaagatctttaactgggtgcagaaaaagctgcaccaaaatgtcatcaaaggttagttttttttttttatagataatcaatatcagctttattttataaaaaaataacaaatttgctttattttccctttgtttattagaatatcgtaagcttcactaaaatagtagtttactttttgtagtagtatcatataggatcatgtggttccctgtttaataaatagttttatattaacgtataccacgttttcgctaaagcataaattttgtccaacctatatttattttcatatggtgaaagaaatagatggtgtgaggaaaaacgagaagaagaagaggaatgaaggaataagtgagattgagaagaacacgaaagctatattggatcaagttggtttagtggatgctcttgataattggttcgatggagttctc

SEQ ID NO: 157377 - DNA, 308 bp, Arabidopsis thaliana landsberg
  unsure (1)..(308): unsure at all n locations
gactgttaatggctcatcgaatgtgacactcccaagcaaggcgaaaaaacntgagattcttctggcatcaaagtgagtgtgtagtagtgtttctgttaatctgatattgttttggtttgtgtaggttatgatgtatagttgagtttgaaacatgtgagaaaaatttgcagattgatgtagaatctttgttgtggttttacattgttgtgatgcttgaggattaacttggtttgggttagagaagtttgtgagnnnnnnnnnnnnnnnnnntttgtgttgtactatcttaatttgcggttgtggcaata

SEQ ID NO: 157378 - DNA, 180 bp, Arabidopsis thaliana landsberg
tcatcctatctagaaaatattatataaaccaaaaatataatgtggtatgtataatgctaccatatataaaattaaactatacaatataaatgtattagagaatgatccaatttgtaaaacttttatatataataaataattcttaaattttaaaaattactactttaaaaaataaattac

SEQ ID NO: 157379 - DNA, 212 bp, Arabidopsis thaliana landsberg
  unsure (1)..(212): unsure at all n locations
ttttttttttttatattttttttttatttttttttttttttttttatttttttttatttttttttattttttttatattttttcaaatttttttttttatcttttttttttttactatttttcttttttttttttttttattttttttaattattaaatttttttttttttttatttttattttttnttttttttttttgtttttcctttat

SEQ ID NO: 157380 - DNA, 220 bp, Arabidopsis thaliana landsberg
agcttcaggttctaagtctctcggatcattcagaattgctttcaacgtctaaacacaccaaaccagagttctgggaataaatgaagttgtaatctctctgtacaaaatctaaatcagtcactttgcagctttcatttccctttcttatatttgcgttggccacttgctcttttgtgaattttccttcggtgtaattgttttttctttcgcttttaatcga

SEQ ID NO: 157381 - DNA, 521 bp, Arabidopsis thaliana landsberg
ttaaaagaaaacataatatatcacaatcccacataaatcaccgagttagtctgaaaacaataaaagaaaaacaaacaaactcgaagcacttcttgtaacctcgagtccaaaagaaagaaaaaaaagtagtgttaagctcaaaactaataactaaagaccagagacaatgtgaaaggtcaaaaacacaagcaagtaatgcatctgtacaaacaaagccgaatctactaccgagctgttggctgcaatactgattcatcaatggatacataactctgtgatccagccaggtcaagcattcccatgttgagcgacgacgaatgagccgagctcctggaaaactcatctgatataccgcctcttgcagccaacgcttccttctcgatcctaatcgcgtcttggatatctttttgcacctcggacattgacggtctcatgttcccgtgcggtttcacacagagcaacgctttctccgcaatcttccacattgattggagactgtaatcatcttccgctagtgctgg

SEQ ID NO: 157382 - DNA, 205 bp, Arabidopsis thaliana landsberg
atgtttctgttcagattcctatttcctttgttttttttttaaatcgtattgaccattttattttaataaaagaagacttagtcttcttctcagaagtttgaactttcacaattccatgtgtttgtaactttgtaggaatccatgattccatatttgcttccatgttgttgtatctcctgtgtaatttaaggataaaaaagaaata

SEQ ID NO: 157383 - DNA, 208 bp, Arabidopsis thaliana landsberg
ctcttgcttagtatcataatcaagaattgagaaactactgttcttgataaagaaaagaagaagaagagttaaactgttgttgattacaaagaaaataaacagtaaaagaattgagaggaagatagagaaagaggaaaggaagaagaagaaggcaaaggtaataggaaagaaagaatctgatagaagaagaagaaggagatggagaaag

SEQ ID NO: 157384 - DNA, 394 bp, Arabidopsis thaliana landsberg
  unsure (1)..(394): unsure at all n locations
ggactgagccacatggacctgatttccaaagtgatgatgaaggaaatgatggtggcttcttagtgttggttccttgttatagagctgttgttgaaggctctagtaataataataaccagctcttgagtgctgtcaagaatctccccaatggtttgcctcctggtatgaatcacccntaatttgtggtcttggtttggtgtagtgaattaccatagccttctctcttgggattgatgatctattggatataatgcttgtggttttggtttagtgaactaccaaagttgctctctttagaggtttcttttcacatttgatcccatgtgcaaattgtccacagtctttgctatttgatgtttcaacagtttttgtcctaaaccaaagtgaaaacttt

SEQ ID NO: 157385 - DNA, 228 bp, Arabidopsis thaliana landsberg
caacaaacagcgccttcgaatcctttgttcctgttaatacagttaaattctctaaacacgataaagaagagcacaatagtctcatgtaatcacacagagaggacattcttggtctgataaagcatcttgagagtttgtggttttgcagtatggctttggctttggcttcttgcgtatttgagatacagacgtatttctaagtaaacgggacttttaactatcattttc

SEQ ID NO: 157386 - DNA, 442 bp, Arabidopsis thaliana landsberg
ttgcttattttgttaaactttcttcatttttcaaattacaattcattacataatttttttaaaacatacaaagtacaaacatatatataaatggaggaactgcaaactggagataaattatttcaaaaaaaaattgaaccaaagaggtaagaacttgctcagaagtttttagaatgtggaagaacacaaattagacccgccggtagttctcagctccgaacacggccaaggactgaccttcagtgaagttccactgacatccgaacatttccacgtcttatacgaattcaagcttccatgtagattaatctcactcaaacatatacccgtaaatggtgagcccttaagaccttgaatagagccagcgtttcgaacgttaactccccaaacgttcttgatatgtattcccttaacaactggaagagcgttcgggttataattc

SEQ ID NO: 157387 - DNA, 309 bp, Arabidopsis thaliana landsberg
cccaatagatgcaaggaacggatgtgaccgtttggaaggatgcaaggaacggatgtgacctttcggaagggtgcaaggaacggatgtgatgcttcgggaagcatccattcgccccctatataagggaggacgcccaaggcctttgggaatctcacatcatctcacaacatccaaaacaccataaaacattcttaaaggagtaccaacacatcctagagttgttggacggaaaggggtgcggctgggcgagtataactcgaccgaattgatgcgcatactacctcccggtccaacggtttgatggagtgt

SEQ ID NO: 157388 - DNA, 258 bp, Arabidopsis thaliana landsberg
gattcttccgtttcaagtcaacgttcccttcgtttcctcccaccttcttcttcacagaaatctgagatttcatatgaatttgcccatatttttagatctccatttgatctgagtacgcattatcacaaagttatatctttttatttttcactcttaagtctagatctctcgattattgcccaccaagtgatcgatcttttgtctaactgaactgggttatgcttgagatttgatctaacagctgaaagtttctgactt

SEQ ID NO: 157389 - DNA, 107 bp, Arabidopsis thaliana landsberg
ttcttgaagtgaagatagacacatcccaaacaagctacgaccatcattgggaacatatacatgaaaagcgtcgtccctgccgtgcaaaccaagaaaaatgaatttta

SEQ ID NO: 157390 - DNA, 257 bp, Arabidopsis thaliana landsberg
gattaaacagtctctgccttctctaaaataaaagtttaaggttttttttctttgtgattgcaacactaatgccctgtggcagttaaagaaggaaaaaaaaaagacttcgagagccaaaagaaaaaaccaattcatgaagaaaataattcattacaaaaccataataaacatccattttctccatcttttttccagatttaatgatgaaaaaccccacagaagacaaagttgcaatcagactctgtgacactattaca

SEQ ID NO: 157391 - DNA, 548 bp, Arabidopsis thaliana landsberg
tcccaccaccatccacaatcaggtaagtgttttggtgtttcgattgggcgactgttttagtctcatccacatgaatcaatatccagatttgggcgaattctgggttgcttgactccttccaaccgttatagttgaaacggtccggcgtttttgacggcttcaatcacctcatttgaggtccgtcttgccattccaggaagtcaagatatcaatttccgaagtctattcttattagcaagtgatgacaagagatcagaagcttcacctcgtggttgattgtttgctgacaacttatttcatgcttttgttctcggaaaagatccagtgatgagaagagaaagaatttgaagattaaattgaatcttttatcttttttcggtttaatagttgtttgtttttataattcggaaatgtttccggttgttcactcgccggaaattgtgccggcttctgtctgcatattttgctgaaggggttgtgggtaccggtttactaggttatccggttcacccggtttgtaagattggtttaatgaataaaaatccctt

SEQ ID NO: 157392 - DNA, 468 bp, Arabidopsis thaliana landsberg
taatatatgtatattacttttttatctattaaccgatttgctttttgatttgtttggtgaaacacatacgtaaaagctgagaaagagacgtttacaagcactgaatcatcatcaaaacgagtaaatagaacagttaaaacataataagtttagtttaacaaaaccatatttgataatatgtagaaaaaaaactaaaataaaaacatgtatatagggttggatcaagtcaagggacccagaagacagtccggtttgcttgccggctcgatttagaagacaatagtttaaccaacacatgctattaatattacaagacacatgacccaaaagacgacttttaactcaagagagcttattacgaaattaaatataacatagtctattggcgttgattgatgattgatttgactcaatgcagcctagtgagttcttaactctcttacacaactcgtcacttgaacattcatg

SEQ ID NO: 157393 - DNA, 123 bp, Arabidopsis thaliana landsberg
gaacatacccaacatagttttgacagagattctcatgggaagtggcttgattgattagtttttgaacctgaactttcacagacaaaccatgttcgacttcatgagaatctcctccgagcaagt

SEQ ID NO: 157394 - DNA, 219 bp, Arabidopsis thaliana landsberg
tgattaacttctatgtattccaccaatcaggtagccaatacagagtgtgagtgagaacaatttgacttcaaaaaatcctctctttttgatacataacaaaaaaaaaacaggtaaatctatttatgggcacattgtttgtgaaaaaggagaagaaaactaagaacgaggcgtccaagctgaagcagtgagtaacgaaagatctttccatccaagcttaag

SEQ ID NO: 157395 - DNA, 324 bp, Arabidopsis thaliana landsberg
aagtcgaactgtggtaaaggatagatcgatggttttgaattgaaattttgttgaaacggattcgaaattggtggaatcggtggaatcggtgaagcttgaacacaatctggagttttctcagctgaagttttgctcgatcttctagtacgacgccgcaatttctctacggaaaccatcgcaagatcaatgaagctctaaacaattgaaattttccagaaaacgtagaaaattgaagaaacaaagaatcaacgagtttaaaagatccaagagctcgaagatactcagagtttaggttgaatcggatgaatcttcgaaatccatcct

SEQ ID NO: 157396 - DNA, 85 bp, Arabidopsis thaliana landsberg
tttttttcttttttttttttttttttttttttttttttttttttttttttttttttttttttttttttttttttttttttttttt

SEQ ID NO: 157397 - DNA, 381 bp, Arabidopsis thaliana landsberg
tgtgagaccaaacaacagtttcctattataacaaggaaaaagtggattttcaaatatttcacaagtcccttgcgagcaaaaaaaacgagtgtctatgagggcttacatgcaaacccaaaatgctcactactattcaaaattagctttgcaatatcagtttcttagctgacgcatgtaaagagtaaaggttttatgtggacaccaagtttttcgtcattggtcttcagtggctctttctaggtctgctcacgttagagctctgatcggtaaggaacttgaggacatcgattagggatcttagccggtcccaaatgttgagtccataaagagtttcgactagggcctcctggaattcaaatgcgttttctgctaccggatact

SEQ ID NO: 157398 - DNA, 158 bp, Arabidopsis thaliana landsberg
ttaatgtgaacttcctatgaaataaatatcaaagattcgactcaagagatcgaaattacaaagcacaatacatatgtaaagaatatataatctggaatgaatcctgtatcttctttatggtgagtatcaatccactcactcactatacactaaagaat

SEQ ID NO: 157399 - DNA, 610 bp, Arabidopsis thaliana landsberg; identical to SEQ ID NO: 33969

SEQ ID NO: 157400 - DNA, 99 bp, Arabidopsis thaliana landsberg
tttaccagaaaaaaaatgtttataaaaaatgcatgtaatgggacatagggtacaaattcgttttatggtaaccaaatgttcaagatctttaaagaagac

SEQ ID NO: 157401 - DNA, 329 bp, Arabidopsis thaliana landsberg
  unsure (1)..(329): unsure at all n locations
agcctcgaggcttcgtcttccgctaataattccttcgccgagggttccggcgagatgtctccgggaccatcaatccccgtccgccgagctgctctatttctagctgccatctccatctcctgcttcgtcctttacagagccgctgattccttgtctttctcccctcccattttcgatctctcttcttatctggttagtcttctcttctcttcaccacaagttcttcgcnnnnnnnnnnnnnnnnnnnnnnnnnnnnnnnnnnnnnngattttaggttcgattgaaattgctgtgaaatttgaaataacatagctagttctggtgcttag

SEQ ID NO: 157402 - DNA, 288 bp, Arabidopsis thaliana landsberg
catgtttttatacatatgtgggggaagaagaaacgtttcttcatactaaaagagagagaaggcagacagaaagtgtaaaaatgctaacggcaaaggataagttgaatgtagacagcttaatagatttcaaatagagacactgtggctccagaaaagcagccaacgccactctcctttgaatggtctgcaaggaagatgccattataagaggtcaaataaacccattacatagaccagatgcacgagacaaacccgttgcatttcaccctccaaatgtttgcacacaaa

SEQ ID NO: 157403 - DNA, 823 bp, Arabidopsis thaliana landsberg
tgtttctcaacaattttctggtctcttagagtgagaggagagagatagagagttgtgttgggcgtggaacttggactagttccacatatcaggttatatagatcttctctttcaacttctgattcgtccagaagctttcctaatctggtcagtagtactctttttatacgggtttttggttttataagatgtggctatatttggaaataactattttgcaagctttcctagattgccagaatataaaaaaagatgtttaacaagagaacggactcatggacttgctttaaattttaattattttaaaatcattctataatgattagagtaaataaactattaggactctgaattataaaattcgattttatatatgctcctccttgtatctcttaatcataagttatcattagctctgttcactagtgctataaaatatattctgaggttaataaaacttttttttctttttattatgaaatggctacacatatctgacatggaacaccaaggttggagttttgaggagaattatagaatgtccactgatccaatatctatcatggattatttaatcatgtttgatctaaaggtttcattcattaaaaaaaaaactttatgatatacaactgtgtgtgtgtgtatcgagtgcctaggccacaaggagacctagagcgtgatattatagcgagatggaacaagtggttttgcacagccaacctcattgggaacaaacccacttcctaaacaagatcatcttgaacaagccttaggatccaccaccttttttgaagatcaagaaactgttttttggatccaatac

SEQ ID NO: 157404 - DNA, 341 bp, Arabidopsis thaliana landsberg
tctccggttccatcttcgccatcttcctcttggtcatttgagtcgtcaatggcggcactgaattcactgagtcgggactcgcgagtaaagtggaaatatcgattgaatgatgaaatgggcctagggatttcgacattttggaatggggtttgttcgtcgtagcttcttagatgacgatcagagtgagaaatggtggatgtaatggcggagaagtttctgcagaaagttggggtttttgaagataatagtgaaatacggtggatcgcttgtctagagaggaggaaagatttcatctttctccgaagagtttaacagaaggacgataaatctcggcaaaaccc

SEQ ID NO: 157405 - DNA, 445 bp, Arabidopsis thaliana landsberg
tgtgactaaagatttttaattgcgttcatttcattgtgtaaaaagaacaaaatgccccctgtgtttcatttgctttaccctctatatcttcaatccgataagtagctctctgttttcgcatcacggcatctaatgacgtaatgacaaaaacttaaaaaccttaaccaagaataaaaatcataagtgtttatttgtataatagatattaggttttgaagtgattaacgtaaaagtgaagaaacggaaggggaaactggagaagggcaaggcctggtttttaggctaattgatctgtatgtcaaaactccgattatgggctccgatcaccggagctgtcatgtaaatccataagtcttcaaaatcccatgccaccaccgccggtccaagtgatcgagctgggttcatcgatcctcctgaaatcggtctaacccataccatattccac

SEQ ID NO: 157406 - DNA, 391 bp, Arabidopsis thaliana landsberg
  unsure (1)..(391): unsure at all n locations
ggcaaccatgtgatttctcctgttcttattccgcaattgttactannnnnnnnnnnnnnnnnnnnnnnnnnnnnnnnnttatgcagaaggctcttgtttgcttgttatatacatacatgataatgtgtagatgaacaaatgtagtttctaaaacaaatcctattatagaagagaggacacaacttcttttgaattggaacgtgtcattgttttatacttcaatgctgggtttctccatattgatacacttgttaagccatccatctcgcagcttcgtaaaaaagaatctctggtcgaaccttcttttctccacagaacctgaccacactcttccagttaccaatatcctatggcatcacaacacatagatcaacaatgtcaggcctatcta

SEQ ID NO: 157407 - DNA, 94 bp, Arabidopsis thaliana landsberg
tattacaaggtttttggtgttgacaacactcatgctgaggttgcttcggttggtaaaaccgaagaacagctgaagaaagaaggtgtaagttacc

SEQ ID NO: 157408 - DNA, 145 bp, Arabidopsis thaliana landsberg
gctcaagaggttgggggtaatttacagactgtggacgaccctctcaagaagcagccatgaaaggctcaagagtttgaggaagaagacagtctctaactgggttttccgggtttcatggaccgatcgtgtacctgatgaacgatga

SEQ ID NO: 157409 - DNA, 288 bp, Arabidopsis thaliana landsberg
  unsure (1)..(288): unsure at all n locations
ggatttattatcctcctttaactgcttatcaaagttacatccatggaatcttcctccgtttcttctttcctgaatctgttgctcttctaagctctcgtggtcacgaatcttatcttgggtaaatgatctgattcttcaattggttgcttgttgtgtaatnnnnnnnnnnnnnnnnnnnnnnnnnnnnnnnnnnnnnnnnnnnnnnnnnnnnnnnnnnnatcgtctgatgctttcatatttttcccagctgctctgtttttcgtgttggtgtaccataggaatcgaact

SEQ ID NO: 157410 - DNA, 397 bp, Arabidopsis thaliana landsberg; identical to SEQ ID NO: 65067

SEQ ID NO: 157411 - DNA, 102 bp, Arabidopsis thaliana landsberg
ctctatgatggatcgattatatgacttataatagcttatatgcaaactcattagttgtatcgaatcctttgcttaattaataaagtttctgattgtttgttt

SEQ ID NO: 157412 - DNA, 72 bp, Arabidopsis thaliana landsberg
aggctgaatatgcactatcgagaggcggaagtacaagaacaaagttaagcatggaggccaagtatgatctaa

SEQ ID NO: 157413 - DNA, 521 bp, Arabidopsis thaliana landsberg
gtgtcaaaaagcttcagattcttactatatacaaagagattcatgtggtgaatacacaaaggtacaaaaacagaaaaagctacaacctttaacatatctataaactactcaacagtgaggcgcagttcgtccgagtcgggataaactgtcttgttgttattatcacattcgcaagagttaatcttgtagaatgctctccattcgtcgatgttcttcatctgatcacatctcaatttaggtaaccttcttctctctaagatctctagaatcttctctgttcttcccagatgcagagctgctcctcttactgattcttcccttacttctacagctgacaccaaacacttgacggatatcacttgtgctacgttgcaaaagcaacctgacactatgtctgatattgtgctttccagctttctcaacagagcttcccctgttccatagtctcttgattcgtaagttagtagaattgtttgacagattcggtacatggagttggctgctagagtcttgatgggcca

SEQ ID NO: 157414 - DNA, 112 bp, Arabidopsis thaliana landsberg
atacaaacattgcacattttattagaaccgtgctaacgatgacctaactttacgaaaaaactacaactttagaacaagctgtgattaaagcagagttcagaccatgagaaat

SEQ ID NO: 157415 - DNA, 432 bp, Arabidopsis thaliana landsberg
atgttaatgtacatgtatctacagtttgttgtctctttttttttttttctttttttaattttattcttgtaacatttacagccttctgtctttaaaaagttactgattcagctaactttgagaggacgagtaaactcagttgggtgaaagtaatattgttgcaaaaccatgaatcccaatctcgcattgtttatcattttacagatgggcttggccaccctagcgatgctgccatgagcatttgtccaacatgcaggggggttggacgagtaagtaccatttagaggatataagttttattttctttggagggttaataaatcatacaatttctatttacagtactatgctgtctgtctctttaacaggtaactattcctccttttacagcatcatgccagacgtgcaaggggacggagacacattattaag

SEQ ID NO: 157416 - DNA, 452 bp, Arabidopsis thaliana landsberg
agccttacaccttcaacatcgttgttagctgcaagctcaagcaagctcgcaaacgtatcctctgtttcgactgttaagtgattcatgtctgtgttggtaacaagattgttatcttcctcgaaagaaattggcaacgaagatcttgatgacacgatctggtttaatcggtctgatccacagcacatagttccatctgtggaatcggattctgtaaacatcatcaaaagaatcaaaaattcaatcaaaaagatcacttacataaaagaactaataaatcgatcataaaaaaccaaaagagaatctttctaattctcttatccattgattttacagaaactagatccgaatagtactcccagttaaaataaatctcagctaaagtcacttttaaaccaagaagggaggggttttttgtctgaaaaaccagaccatgtcctaaacgatttcccaaa

SEQ ID NO: 157417 - DNA, 222 bp, Arabidopsis thaliana landsberg
gttgatgagactagtggatgtgagggatcacacttcctccaataattgttcctttgatgagtgtgtcaagctcttcatctcctctgatcgccaactgcaaatgccttggagttatcctcttcacttttaaatctttgctagtgttttcggccaactgaagaacctctgtacttaggtatttaaggatctaagtcactcatacctcaacagtctctcctacac

SEQ ID NO: 157418 - DNA, 372 bp, Arabidopsis thaliana landsberg
agaaagaataggtaggctcatagaagggctctggtttagatactaggtgaaataatcaagcttgataataatgcatgctttagtataggatttctcggcttctccggttatcttagctctaagtatagagagtctcgcggaacaccaccggttactctaaaatcatagtttgggtttgagagcggtgcgataacaatcctaatattagctagatctacaatttatctatctctcgagacaatgaagccttactcttagacctgacgccttaatcacttgaatctacaactcatttacttgcttatttgcctttaatattcaattacttcatgtagcttattaaacaacatcataagtctattgtgtgaacat

SEQ ID NO: 157419 - DNA, 445 bp, Arabidopsis thaliana landsberg
tttaagcatctctctcccttcaaagaaaatatcacaaaaatggcaaacgtctccgctttgctcaccatagctcttctcctttgctccacgctaatgtgcactgcccgccccgaaccggccatctccatctctatcacgactgctgccgatccatgtaacatggttagtctgattcacatgccatgcatgaatcaatttccatatataaacacaaaataaccaatatcagagcttctaaattttttaaaatatttaacacatcgaataggtttaataaattttttgtaatgtatgatgattactttggcaggagaagaagatagaaggaaaattagatgacatgcatatggtagaagaaaactgtggtgcagacgacgaagattgcttaatgaggaggactttggtcgctcatactgattacatctatacccagaagaagaagcat

SEQ ID NO: 157420 - DNA, 352 bp, Arabidopsis thaliana landsberg
aattgttgtgtgttgattgattatacataggcttcatgtgcaactgtgtgcttcctgcgactataaacgcgaccaggtttggaaacaacagagtcaatcaagacaaatcatgtgaagcagaaaatgagaagaagaaactgacgagtgtatcgagcagagagaggtctaccattgctactccttcgtcgtcttcttcgtctccttcagttcaagttcgcggtcgaagcaggaaaaggcgtcctcgtgctctgcaaccttcatcgccattgactctcggatcttcctccgtttgactataagtaaaatgaaatttggctttgtttggtaaatccatttttgatctctcaactag

SEQ ID NO: 157421 - DNA, 130 bp, Arabidopsis thaliana landsberg
gggcataagagaagtgtacttgatattcggaaaaaaaaaaaccaaaaactaggtataatttgaggttaatacaaaaactaggcctaaggtgaggtgaaaaaaaacttaagcaggactagtattaagttat

SEQ ID NO: 157422 - DNA, 620 bp, Arabidopsis thaliana landsberg
ccaacagatttcgtaacggacaaagttcccaattctttttttttgcataataagatctgaaatcggagatagaaaaaaaaatcacatttttatttccgccggaacaaaaagcgatggttcagtgtagcaacaatctcctcggaatcctcaatttcttcacattcctcctctcaatcccaattctctccgccgggatctggctcggcaaaaatgcagcaaccgaatgcgaacgtttcctcgacaaaccaatggtcgtactcggaatcttcctcatgttcgtctcaatcgccggactcgtcggtgcttgttgccgtgtctcttgcctcctctggctttacctcttcgctatgttcctcctcattctcctcggcttctgtttcacaatcttcgctttcgcagtcacaaaccgcggcgccggtgaggttatatcggatcgagggtataaagagtatcatgtcgccgattactctaattggttgcagaaacgtgtcaacaatgctaagaattgggaacggatcaggagttgtttgatgtactctgacgtttgctccacttatcgtactcgttatgccagcattaacgttgaagatttctacaaatctaatcttaatgctcttcag

SEQ ID NO: 157423 - DNA, 82 bp, Arabidopsis thaliana landsberg
gcttgtgaattgtataatcaatcaatacattgtattccaactccaggtttgaattgtttaaaaaataatcaaatttctcttg

SEQ ID NO: 157424 - DNA, 634 bp, Arabidopsis thaliana landsberg
agaactctaacctagagaaccaatgcacccacaggtttaacttaagccacactttttgtacttaggaaatatttgcaaagattcgattttaaatgtgtgataatgatggaataggtacaagatttatatagaaggatgggcatggtcagtgagtgagaaatatataatggcatgtgattcaatgacattgtacgtgagacctatgttctatgatttttacgtacgaggaatgatgccattacaacattactggccaatcagagacacctctaagtgtacttccctcaaattcgccgtacattgggggaatactcatttggaccaggtttgtatttttttttttacattaagacccaaaaagttttgttttgtaacaaattaacacattgagtgtggtttttttttttatataggcgagtaagataggagaagaagggagtaggtttatttgagagtaagtgaaaatggaatatgtgtatgactacatgttccatttgatgaacgagtatgcaaaacttttgaagtttaaaccagagattccgtggggagccacggagattacgccggatattatgggctgctcggcgacgggacggtggagagatttcatggaggagtctatggttatgtttcc

SEQ ID NO: 157425 - DNA, 92 bp, Arabidopsis thaliana landsberg
gatcgattagtcaattcgatgcgacacgtgcgtatgctctctcgaagcttgccaacgttttgcataccaaggagctctcttctagactccag

SEQ ID NO: 157426 - DNA, 289 bp, Arabidopsis thaliana landsberg
cacaaagaaataaccctttttatttggtcttttttttttgttcttacacaagtttttgggaaccaatcaagatatcaacaaagcaaaaatcaaacaaaaacagatagacacaatctcaaatcaaaatcaaaaaggaaggaaataaataatcaaaaggatgagggttctttcttcttctagtgctctgtttcttcatctcgtgaaattcgttaatttgtcatttttttgatctttttaacttaagtatctttcttgaaaagatcaagaactccacaacaattcttccacc

SEQ ID NO: 157427 - DNA, 230 bp, Arabidopsis thaliana landsberg
tgaccaatagaataaagagaaagatagttacttataaaaattagaaatgcgtgaaaattaagctgtccacaaatatcactattacgacgccgagaaaaagcaactttccagtttgatatactattttgttttaaagcaaaaatttgcaatatgacgaaaacgtcatcgaatcatgttgcgttcaaactcacccacactttgttcggtctcatacttctataaaatcccca

SEQ ID NO: 157428 - DNA, 384 bp, Arabidopsis thaliana landsberg
aatccgcaacggtctcattacaaacataacagaagggtgaaaacggaacaacacttttgatgatgatgtgtggtttttgtttcgagaagacatgccacaaggaacaaaaccactgtgtctctctactaacctgacaaacaatataagaagatcccggctctatgaagagaccggtgaaaaggggaagaaagaatcatgcggacttcaagaaccacactcttttctcattcggctctggactgaccagctcgggaggacaaaatgatcccgacgatgagaccgtatagagcaagagcttcagcgaaaatgaggataagaatcataccaacgaaaagctttggctgttgagcattggccctgtcatcaaaccacaaatttgcgtat

SEQ ID NO: 157429 - DNA, 83 bp, Arabidopsis thaliana landsberg
tgaaaatgtttaactcctatcctaaccttttagtcttggctattgctcttgcactatctttttctgttcctctgaaagcccaa

SEQ ID NO: 157430 - DNA, 402 bp, Arabidopsis thaliana landsberg
tttgttgcttttttagagtaaaataatatcctatgaaaaaatgtcaaaagtagctactgccttcaatgtgaaaacaaaataagccacacaatctgcgaagctgtgcttaaaaaaagacttatgataaaaccgtacgaaatccgaaatcttaagaaatggtgccttgcttttccttttcttacgtataaacacgctgtctgaatccaaggcttcgatatcgtaagactaaggcatgctatatgtacacgcatccatatctaaagtttcaagaccttaaaaaccaaaataaaaccgtttgaaatgaaatgaaatgaaatgaattacggccacgtgtaattacatcacacgccttttcttttctcaggtgttgcgtgtacttgagctttgattccataccttctc

SEQ ID NO: 157431 - DNA, 284 bp, Arabidopsis thaliana landsberg
gataagactcagtactcatcattagctttaagcacttgaaggaagctttcgctccttagtaatgtaaacaaatagatacaatagtgatgtttgtgtgatcactgttcttagtacattggtgagtttttgtacctatgcgtgggagagagagaactatgaaatgcaaaagtctgacccaagttctttccttttcaaccctaaagataaccttagaccaagatcaatatacttgccatcaaaaaattctgacccggaaaaaaagaatcatgggattgtatctcaat

SEQ ID NO: 157432 - DNA, 120 bp, Arabidopsis thaliana landsberg
cagtttagtcgtcttttttttcagcatttcttcctgttaactttatcgttttggtagctgaaactgtgctaaacctttgtttgtgtttagtggtatggatattaagtctttttatagact

SEQ ID NO: 157433 - DNA, 70 bp, Arabidopsis thaliana landsberg
tatatctctgtctatatctacagctcaaatcaaaacagaggacaagctccaatccaccaatggtgatttt

SEQ ID NO: 157434 - DNA, 85 bp, Arabidopsis thaliana landsberg
aatcttccggagcttctaactttttttctgcatggcgtttcctcttcgtgtctaagagcgcttcatttctgtttccttttctggt

SEQ ID NO: 157435 - DNA, 369 bp, Arabidopsis thaliana landsberg
aaacattttccttactctgttttcgcaatttgtgagattagggttagcaattgtatctgcttgagctttagagaagtcgagcaatggcgtcagagttgtttgagtggtgaggagtagaagcaacgaggatttactaagattccgtcgcgataatttgcagtttcgttccaatgacggaggtgctcctacggtggttctacggttgtgttgcggtggctctataggtgacggtagaaatttagcggatggggacaaaagttttgcattgggttgcatcattttgtctacctgataaaactgtgtgtcatcattggtggagggagatagataattaactagatttcgtggataaggaatcgaaagttagcc

SEQ ID NO: 157436 - DNA, 79 bp, Arabidopsis thaliana landsberg
taattttcggaataataaatgatataattctgtgttctgtacaattaactaatttacatttaattttccagtttatatt

SEQ ID NO: 157437 - DNA, 213 bp, Arabidopsis thaliana landsberg
  unsure (1)..(213): unsure at all n locations
ttatatttttttaattgtttttttttttttttttttttttttttttattttttttttttatttttttatttattttttattttttttttttttttattaattttttaatttttttttatattatttttttttttttttttttttattttttggggtgtttttgttttttttttttaaaaaaatttctttttttnttttttttttttttttttt

SEQ ID NO: 157438 - DNA, 202 bp, Arabidopsis thaliana landsberg
cttggcctgtatggtgagtcctgcatgtttttattaatagttttacttcttttttatacctagggcttacaggggaagtttagttaaagagtcgattcattacaagtggtttctggccttgtagctgaggatgatcaaatgcgggttgtaaatgagacggtacacattctattacatcttcgtctgggctctacagtttcac

SEQ ID NO: 157439 - DNA, 396 bp, Arabidopsis thaliana landsberg
actcacactccttttttaaggtctggaaaacaatatggttttccaccctaaggggtttaaacctggctacattaagtgtccaggtactctattttaattttaagtgtcctggtaatcccttgtccctattaaggtctgatggcactatgatgttacagcttcatatcaattcttcattttccttacagtatgggcaaaagagttatcccttaaggccggaattaattaagagtacatactggttgtacaaagctaccagagatcccaggtcaccaatttaattagttatatttttttcaattcttcatccaaagatgatcacactactgaattgcacaatgcaaattactcgtcgacaggtatcttgatgcaggacgtgactttgtggctagtttg

SEQ ID NO: 157440 - DNA, 1353 bp, Arabidopsis thaliana landsberg
accattaagtaaacaaatctgaactagattcccaaaacgcttttgtatcttaacgtggctatggccaacatacacttgaatacatacggtcaacaatttctttatcatttattccaacgtatagaatgtacataactttcgcacaaaaaaagaatgtacataactaaaaattagctagttccgtagttgacaccacgtctccaccaaaccaagtgcacgcattttgaatattaaaccgaagaaaagaagtaactagtgacttctcctaggaacagcaatagccttaagcggatgtttcatgattacggtaaactcgaccttctcagtcaagtcaacttcatgaccttcgacctctttccattggaattccctcaccatattcgccacataatactcgaggtgcagcatcgctagcccaatcccgggacatatccttctacccgctccgaacggcatcatctttatccctctgcttccggttatgtccaccgcttcttcttctcccataaacctctctggcttaaacgccattggtatttgccacacctttggatccctccctatctccggcaccatgaagttgatcgtcccgttcttcggtactttgtatcctcctaacacagtgtcctccgtgacactgtgtgggagtaaaaagtgtcctggagggtgtctccggagtccctctaacaccactgcctttagatacggcatcttctccacatcttcttcctccacctcctttgcttcttccccaaccacgctcttgatctcctcgtgtaatctctcctggatttctggatatttcactaggttggccatgatccattgcagcgccgtggccgtcgtgtcagtcccggccgtgagaaactccgagcacaagttcataatatcttcctcgttcaacttcctattttcctctggaagctctagatcgagtagagtatcaacatatgattgcacatagtctttcttgtcttcttcctccgatctctttctctcttcaatgatcttcctccgggcacgaatcaggggaagcaaaatgtcccgctgctgtctccgaatctggagaaattcttgccacctctttcgtagaatcagtttggtgaacttaggccagatgttgaagatgttaaatttggtcaagctaaggagctgtagtctttgaatgaactccacttctttgatttgcttctcatcaagcttatctccaaaacacataaggacaagaagcgcaaacattgcatagtggagatggtggatgaggacgatcggttcttcgcctccatggttaccgaaccgttcaagaggatctcaagacccagtgacgagcgtgggagtagatctcacgcgcga

SEQ ID NO: 157441 - DNA, 536 bp, Arabidopsis thaliana landsberg
  unsure (1)..(536): unsure at all n locations
atctgttagacaagcttggtcttcagacattcatcatcctatccgccaatttctataccaggtattgtgttcgctctggagtctgggtatatattatagctctcacttgctaagctccatttttcgattaaaatctggtgtagactagcagattttggttnnnnnnnnnnnnnnnnnnnnnnnnnnnnnnatcgattccagtctctctgcttgttcaaatgaggaattgagataacttttcctatgataatggcttggaattgcagatatgaaagtgttataagatatactagtttctgatttgacaagtctcttaagtccttcttacctagacaagttttaagattttgggtaatgcttctacttatggacattgtgttcttaatgaatttcttgtttttgaaatgggtattagggtatatgatgacgaagaagaatggttcaatcaatatttctaactctacaaagaagatgcctccaaaccagatgagtctttgtcagcgtatggaggccctctttgattctagagaaaaggt

SEQ ID NO: 157442 - DNA, 345 bp, Arabidopsis thaliana landsberg
cttatcgcctattcgcgcacaatcttctagacccggatccgaataccattactcggatactagatgtatcccgggtcgggcgacacacccgaactcttctctctgattatttcttggagacggcaaacgctttcttgctttgcacgctattactaaaaaacattcatcatcttcgttctaaatacaagtctttgaaacctaaatttcaatcggagaatcataattcattggctttagtagaccaattcgcggagatatcaaaatggttcgacccgtttatctcgtcgggttctaggatccagctaatcagatctggctgtttagacttgctaaaacacttggagt

SEQ ID NO: 157443 - DNA, 235 bp, Arabidopsis thaliana landsberg
ctggtgatagggagcacagaagacactcacaagttaataacctttcataagagaggcaatgattgggggaactggggctctttgtattccatctaaatggtctttttaaaagacctttggcacttcgatgcccaaccatgtgaacttgactgctacatgggtcggatcagtcgttggaaccatgctctctgtattttatgttgattatatatctattcgtggcatatttgcacaa

SEQ ID NO: 157444 - DNA, 356 bp, Arabidopsis thaliana landsberg
gactaggttaacttgagggtctctgttgcggtggcacttagatttggttaatgaacttgttgtctaaggaaaatttattgagcatgtcaatcacctgtaaactgaggaaacgaaactactcaattaccccatcctcgggaattctttatctgattgaatttattgtttactctactgttgtttactgcatcttgtcatctgttgcttagaatctgcaattctttactgttactcgacctgatactcgaccacccagttgtctggcaacagactgtgcagtcgaatatccctgtaacattttctatctgttactcgacctgtcactcgaccacacctagtgcttggcacaaaactgt

SEQ ID NO: 157445 - DNA, 391 bp, Arabidopsis thaliana landsberg
atcagagagttatggaagaggagagaaacaatccgcatcattccaccgccgatcttctttcttggtctgagatccgccgtcctgactattccaccgccgctaatcgctctaaccaggttcgttttgccggccagaactcatcactcgtctgatttcggtttcgattagtgaaatttcgttctgattatccatttttctcagccgtctgatggaatgaacgatgtacttggcggcggcggtcagatcactaacgcggaaactaaatcacttaatacgaagtaaccgatttcatctcttttcatgcgaattgatttctatgttgattctaggttttgttaaattatcggataatattgatctggagaagaattttactggtgaattagcaatg

SEQ ID NO: 157446 - DNA, 355 bp, Arabidopsis thaliana landsberg
gaaaaaaaacacagaagctacgtattgaatctgctttgaagtcagcgacagagaaaggactgtgtaaccatggtgatgctgtggtggctctgcaccgtattggagctgcttcggttatcaagatctgtgtggtgaagtgatttttctactaaatatcttgaattttattcttggttaatgtttcttgatgaaataatccaataaagaaccagggaataggttcctgaaagtgttttgtgtggggcatttcttctctttcttttgctgttttagcttataagattatgaatgcactaatgactcttgctcatattattatagtttaattagccaataataacaatttttaaggctc

SEQ ID NO: 157447 - DNA, 162 bp, Arabidopsis thaliana landsberg; identical to SEQ ID NO: 76163

SEQ ID NO: 157448 - DNA, 84 bp, Arabidopsis thaliana landsberg
aaaaaagaaaaacaaaagaaaaaacaaaaaacaaaaaaaaaaaaaaaataaaaaaaaacaaaaaaaaaaaaaaaaaaaaaaaaa

SEQ ID NO: 157449 - DNA, 353 bp, Arabidopsis thaliana landsberg
gactaggttaacttgagggtctctgttgcggtggtacttagatttggttaaagaacttgttgtctagggataatttattgagcatgtcaatcacttgtaaactgagaaaacgaaactactcaattaccatccttgggaattctttatctgatcgaatttattgtttactctactgttgttactgcatcttgtcatctgttgcttagtttctgcaattctttcttgttactcgacctgatactcgaccacccagttgtctggcaacagactgtgcagtcgagtatctttgttatactttttgtctgttactcgacctgccactcgacctcacccagaactttgcaaaaagctgt

SEQ ID NO: 157450 - DNA, 432 bp, Arabidopsis thaliana landsberg
gaaacgtgcgtaaaggactggataagagtttagggtttagggtttacggttgcggattagtgatttagggttcaggagatacaatttagggggtatattttaagcttgacgaagtaattattaaactatattatttaactaatgatggaaaataaaacagggaagttgctggaagtagcatgtagtatgcttggagctattgggaaggactcatatctaagcagatgctgatgaattcacaaacctgaagagattattgaaggaaaatctctcaagtgttatctgtaaacacacacaaaaggttaggatttgtggtattagtttcacgatctttagttactttgaatgattgttaaccataagtgtattcatagttttcatgatgttgcttgcaggttctttggagcagaatgaaagatttagaagaagagc

SEQ ID NO: 157451 - DNA, 1034 bp, Arabidopsis thaliana landsberg
cagagaagatccaaccatacttcagttctactgtcacaatttgagaagaagaagcgtgagatctgatcactagaactaggaagaaagagcttagactacagaaagaggacttacagagatggataaaatgaatcaggctattgagaagatgaagatgttggttggtatggaggttgaagacgagcaacaagctgctgatgaagaaagctcgctctcattcatggaagatcttaatcgcaattgcgctttaactaccaaacaggttcttaacttccccagattcttcgatcaagtcctctgaatttggtaatttttgtaatttcacatgcggactaggtattcgtccaattagagaagttaggctcgtaagctcactgaggtagaaatgtaaatgagttcctattgaatgcatatgatgtgatcaataacatacaagagattttgagataagtgtttagcagttctatgattttttggaggagaaggattataaaattccatgtggtatgataacagtttgattaataggactaagttttggcttgctactacaaaaaaattaggacgctacttggatttagctcctctatgaacctgtagtgttgtctcgtttacaagaatctgttaaattatcttgaattgggtttgtctttggctaatatctcgttttttttgtttatgaaaacagagattttatggctttgcaatttgcttgtcagcaggtttgacctgtacacttttggtaagtataactctcaagtcttagcaatgttagaaagcactatccttatttctgcattgaaaggaatcatttgattggtttagctgtattcttcttctgtactttgggttgtcttagctcttttactggtgatataactctttatctcttatttgtttgacgatgcagtcgatgcttgttttctttaatccggtcaagtttggcatcacattcactctggcaaatttgacggcactcgggaggttcgtattgaaattttgataaagcttcttgttatattgcatcggtgtcg

SEQ ID NO: 157452 - DNA, 144 bp, Arabidopsis thaliana landsberg; identical to SEQ ID NO: 157227

SEQ ID NO: 157453 - DNA, 429 bp, Arabidopsis thaliana landsberg
atagagccattaagttaataacaatatgattaaaattatgtaatgcgtaatggttacaaaaagtttttgtgaatagaaacaattgtttctctttaattagtttccaaaattgaggtgtaacctataactaacccaaaaataaaacattacatttttaacattctgttgcaatttgcaacctggacgaagattcatctacttcacctgaaacatagacacacagcttcaaattgtacgttcttttccttcctattttctttctcctatggttttagttttctacaggatcacgaaacttcttcttccaaaaactttaatcgcctgttcagctgcatctagctcagtgaatcgtctctctactcgggatggaagactagaccggcactcgcttgccccggtacttgtcaaagaactacacatcacataaat

SEQ ID NO: 157454 - DNA, 209 bp, Arabidopsis thaliana landsberg
  unsure (1)..(209): unsure at all n locations
gttttcctctgtctggagtctggccattgggattaaactaacttctcattctcattccaccttcttcttctttggtcttgggtgctactaaaaatcaagaaagcacaaggagacanataaacctatccatttcattaccaaacaagccgtacattctttagntatgggctcttcttcttcttcttcttcattttcttcttcaactactt

SEQ ID NO: 157455 - DNA, 165 bp, Arabidopsis thaliana landsberg
tgacgatcttgcttcttcttcttcttcttcttcttcttcttcttcttcaactcgttaccatcaacgctcaaatcctgtatacaatctcttctcagctgtaatttctataatctcgtcaattatcatctattcaggggtaagctatgggatgtgcttcttctcttc

SEQ ID NO: 157456 - DNA, 394 bp, Arabidopsis thaliana landsberg
tcattacctaaaaggcaaaaaatattaattttttaattattattatttatatatttaaaattcataaaacattattaatatttaaacttataaaaagtttgatatatcaaaaaaacttaacatcattatataatatatagagtttaaaaaatctcaaaaaaaaattcgtcatattttatgattcaaaattttaaaaatgaacatatattaaccaattggcaaaaaatgtgtgggttcaacgtcccgcatcgacaaaaatatatacacaatgatttataaacatattataaataagatcaacattaatataaataaatgtttttttttgcaggatgggttttgcgggacgggtttggcaggacgttacttaataacaattgtaaactataaaata

SEQ ID NO: 157457 - DNA, 121 bp, Arabidopsis thaliana landsberg
ttgattgttcgatcatattcatcattgtttcatctgatttcaaacttaactcaagagagaatacaagtctaaggttgaaataagttcatacacgatgagtcatgatccaaaaacaaccgat

SEQ ID NO: 157458 - DNA, 220 bp, Arabidopsis thaliana landsberg
catctttaagggtctccatatagagctctccaatagtatctccttcagccgtgaaatatccttcaccggcacaaccactgagaacgctgaccaatctagcacatcgctgaacggtaacatgaagttatcagcgatcactacagggacgcattcatagtatatagcttcaacgatacgtggactgttcacttcgtaacccattggacaaagacagtacttg

SEQ ID NO: 157459 - DNA, 253 bp, Arabidopsis thaliana landsberg
ttgattgataagaacatttgaaatcacttgagcactttaagaaaaggagaagtgaagaaatatgcggatgagatccaaacgtggtttgcatcgagcaacattaaggatagaaaatctttgtaatttgttttttaaaaagtttgcattttgcattcacatgtataaatgtttcttttttctttgaatataatctagattcaaaaaagttataatatatatatatatatatattgtaactacatattatgagtat

SEQ ID NO: 157460 - DNA, 126 bp, Arabidopsis thaliana landsberg
gtttcccttagacttttgttcgcctgaatccatggcagagtctcgccggtaaaagattcggaaacgagggaaaaaaaaaaaattggggatttaggaaaaagatggcttcgacaccccacacctctg

SEQ ID NO: 157461 - DNA, 209 bp, Arabidopsis thaliana landsberg
caagctctgaaggttcatccataaatccattgttggagctcttctagaaagcgtctcaagtccattccctcgttttttggtctgcaaatttctcctcattccttcaaaacttatggaccctttttgtccaaatactgatttttcttccaatctaggtgccttaaagaagatgcattttctaagtgggtattccaagttgtctttgattg

SEQ ID NO: 157462 - DNA, 339 bp, Arabidopsis thaliana landsberg
  unsure (1)..(339): unsure at all n locations
tctttgactgtntcattacgtggctctgaatgataataagatatttttcgtgcttttgcctctttactccatcgatttagaatgtagttagatgggattcttctaacattcttcttgtccaacattttcaatgcatgaagacataaaatcccggcaaaactaaacttcatgcaactgcaacatatcgtctcgtttgcaacatcataattaaccaaatgctcttgtgctacaccacgataagatactttatgttcatataccatctcagacttactaaccttgttggcaacataatcaccaataactatgtattgtttttggaacaagctaaaaatttca

SEQ ID NO: 157463 - DNA, 514 bp, Arabidopsis thaliana landsberg
agatcagaagaaacaaatcaaattaatcaatcaaatccaagtctcctaaattactgtatgatttccaccaaaattcgatgtccacaagatgataaaccctaaactcaagtagagacaagaagccaaccacttttgccttgtacctcctaacatcacctaacctgagtgagtttttgttgtcctatagatagatgctcagattaagcttttagtttcctcagctaacttgttgctgatgaccaccgtaaattggataccctccgtaaggtgaagcgggatacattctcgggtcaggttgcggtaccatgtatccatacccattgtaatactgtcctccatagtaaggatcaacccattggttcccatacttctctctaggctgcaagacaacacaaaacttgaaagaatcagagatgtgtcaatcagagccattcaaaccttatcacatcaatgagggaaaccacagcaaaccaaactttctttcaaagagaaaccataatagtagccttatacc

SEQ ID NO: 157464 - DNA, 387 bp, Arabidopsis thaliana landsberg
aaaaaaaaattagtgaaacaattttaatttattttcggaaaaagagaaaatatagaacctgatgctgcataggtttaaatagagtcgaagggttatgggccgtagtagaattataggcttgggcccattcttgaaacatgtcaccgttatgatttgacacattggattcacccataatgttgttttggttcgagcttgagctacttccttgcaataaagtttcatacattgctgaatgtgccgatgcgtcgaataaatgggcttcgttaggcccattttcagtcagccatcctccaacgacgtcgtttccaaaaggcccacccatgctttgctgttgttgtaaagcagatgcttcatatgaagataattggtcttgactcaatatat

SEQ ID NO: 157465 - DNA, 253 bp, Arabidopsis thaliana landsberg
gttttatctgctgactggtggaaaggagagagtgtagtcagcggaggagcagactctaacttgcgaatttcttccggaatcgcaatttcttaaaaggtatgaaatccgaaatcttttgaccatttcttttcttacatgaaatgtggagcaatgaaacatttactcagttccgtacgatgtctgagaaaattcgattcttttcttactcagaaacacaaacgattcatgatcctggaatgagactgttgtaagt

SEQ ID NO: 157466 - DNA, 465 bp, Arabidopsis thaliana landsberg
aatttagtccgctttctctcacttatccgctcggccgcttccacatcgcttggccgcagccgccgccgtccgccgtcgctatccaccaccagattttaaatccccgccggaagttcaccttcaatacccaatatctgttataaggtacaacgcgccaattcgcataatagactctccttggttcaaaagagcttctcggtggttacgtgtatgtatctcaatgtgtttgcttttgcttgtttgatatattgtgttttggacaattcgaatatctgtattatctccaaacgtatacggctgtttctgctttttttttttttttttttgctgcttcattggatcagttttaagatacctcttttgttttgcgtttccattttattccatgtcaaatgctcaaaatttgtcataaagaaagaagaattttagtatttctttgaattgagagtgtatattgcttaatgc

SEQ ID NO: 157467 - DNA, 56 bp, Arabidopsis thaliana landsberg
ggaaattatccatatacctgaaaagccttcattgtcacctgaccatcagcccactg

SEQ ID NO: 157468 - DNA, 328 bp, Arabidopsis thaliana landsberg
aaagaaagtaatatattagagagaaactttactctattttaaaataaataaaaatagaaaaatacattgaagatgatttaatggttatttagactacaattgaaaaatagactatttataataacttgaagcaacaaaatcttacagatttataatttgttctagagatcctatagaatcagggatttgaccactaagaccacatcccacaaggatcctggagagtgaaagatagttagtttaagatatgcaatagaaaaaggatgttacaaatgggtcatgcatgataatgtttgcttacaaattctttaacttcttaaggtcacca

SEQ ID NO: 157469 - DNA, 311 bp, Arabidopsis thaliana landsberg
  unsure (1)..(311): unsure at all n locations
tatgaataagatcaagaagaagaagagacaacggacatgaattcttgatctgattccaaagcttccataaactctggaagaagacatacttccaaatctatgggtcctcctccttgtcttcctggataagctgataccttcccgtcatacttaccgccataaccgcttctaaccgccaccgctttccccatcccaaactcgcttccgtacttgttaaaccttggagaacttcncatgtgaactatgttcaaattggaaagtcgatatgcttgcaacggtaaaggagacttcaacatttgatctatttcgta

SEQ ID NO: 157470 - DNA, 70 bp, Arabidopsis thaliana landsberg
tttgtgactcttggagcactctcttatcttcgcctctgtgactcacattcatccaatccaggagggaatc

SEQ ID NO: 157471 - DNA, 302 bp, Arabidopsis thaliana landsberg
gttaaaacatctttaaaacgaaatcaaaacagctgataaccaaaaaaataaaaaaaatatggaaaaatctaatgttttcctcctctccatacttctcatggcttcactcttctacatatcccacgcctttaaactctggtcctacacaatcgaccgagtcagcattcgtggtgtcgtgtattgtagccttgacggagatccaagcgcaccacctgtctccaatgccacagtctatattgaatgtccaggctcaaactcaaccctcgctcaagcagtgaccaatcaggttggtgtatttaccc

SEQ ID NO: 157472 - DNA, 244 bp, Arabidopsis thaliana landsberg
ttgatttgggtcgatgaaattgaataccaagggctccatcactgagataccttggtttctaaaaaaaaaagatattagtattttaataaatattagttatataattaaattttaacaataaaataatatttgatcaataaatgatatacaagtgtttttatgggtttcttagagtttctcacttgggagactaattctactctctctcatactttttaattatattttatttttatattgaaca

SEQ ID NO: 157473 - DNA, 226 bp, Arabidopsis thaliana landsberg
catctccatcagtgagataccttcttggtttctcaaaaaaaaaagatattagtattttaataaatattagttatataattaaattttaacaataaaataatatttgaccaatagatgatatacaagtgttcttatgagtttctcacttgagagactaattctactctctctcatactttttgattatattttatttttatattaaacagtttctcaatgagaaacc

SEQ ID NO: 157474 - DNA, 415 bp, Arabidopsis thaliana landsberg
tgataattgtgtactagaactttagaaatctcaatctgtgttcgatttggatgtttttcaactttcaattgcgtttgtttatgctttgtgttaacctgcttgatctaagagagaatcttgagtgttgcaaaaggaaacttcatcgcctattgatacaaatctccggttgtggatgttgtttgacaaacagggatcaatacttctgattcatataccaaagaatggtatcagcaacaagcagttcttcgtgtgagctttgggaatttcctcttctttgcaatatatgctttgatcatgattggtgtcaaggaccagaatgacaggcgtgactcgtggcaccatggtgggtggggtttgaagatgattgtctggtttttgcttgttgtcctcatgttttttgttccaatatgttatc

SEQ ID NO: 157475 - DNA, 353 bp, Arabidopsis thaliana landsberg
caatttctcactagacgcgagaaacccaccagtgactgtcatcattcattgtcccgtgaatcaactcgtcgccgcaagctcacggcctccgagcactgagaagcttaacgtcgtcgatcaccggtccacataagctcgagaaatcgtcgtttctcatcgcgtaaaacgtactgtagaacataactctagtccgactcgagacagcgacgaatctcagtgacgatcgcttgaatcctcctttccctttcgattcatacgggaccttgatcgtgtcttttccggcgaaagcttcgacgatcattgatccggcgcaagcgttgctagcatctccgacagagaaggataggacgtag

SEQ ID NO: 157476 - DNA, 334 bp, Arabidopsis thaliana landsberg
cgaggatgattcaaattcaaaaggaaagaaaatgggggcagcaaaggcgaggatgttcgattttaggaagaaagtgggagagaagtttgaagagaataaacgtcacgttgaggaaaaagttgacagattgttgaaaagatgataggaccttgacacaataacaaggagaagaagcttctttctttctttttcatgtttcagacgaacacaaaactgatagacagaagagagtcaatagattagagtataggtattggtacttgtattcatgtttggtaaaaagatatcgagcattgcgaaatcgttctttattttttattattacaacataaga

SEQ ID NO: 157477 - DNA, 209 bp, Arabidopsis thaliana landsberg
ataaaatcaaaactaacaaaaaggaaaaaaaaaaaaaaaaaaagtatctcaccggaaacgatttctttgcagataccaagacttttgttactaagctttttaacagatccggagaaaatttcaaaatccgaagaatgttctaaagctagggctttttaattgacgagacggaggtgatataattccgccccgctggagctatgatgatt

SEQ ID NO: 157478 - DNA, 953 bp, Arabidopsis thaliana landsberg
aagacctatcacacgattagagccttacgatacgagatcaatcgatcaccataattcaatggaggaatcggtggcttcatcttcctcgcactatatctcaattttcacaaattaccctctgatttccgccgttttagctttcaccatcgcacaattcatcaaattcttcacctcctggtacgttttcatatctgtctaggttaaagaaacagactagtttgtagaattttgattttacaactacttggtgtaggtataaagaaaggagatgggatttgaaacggcttgttgggtctggaggtatgccttcatcacattcagcaacggttacagctttagctttagctgttggtttacaagaaggttttggtggttcacatttcgctatcgctttggttctcactaccattgtatgttttatagctaatcacttaatcacctgttcttgattatcacttcaggggatgattaagattgtttggtttggtaggttatgtatgatgcaactggtgtaaggttacatgctggacgccaagctgaggttctaaatcagattgtgtatgagcttcctgcagagcatcctctggctgaaaccagacctttgcgtgaacttctaggtcatactcctccgcaggtaagtctcattgtgtcagatcacaccaagtaagagaatgattgtggttagtacctgagactatctatcgttttattgtcatcaggttattgctggtggaatgcttggaatatctacagcagttgttgggtacttagtcatcttgttagccaagtagcttaagctgggaacagcaaaatctcgccttttctgctccattgtgtgtcaaggcgctgctaggtagtttaaagatagccatgacatgcaaatagaatctggaaattgagcttaatttctctgttttttttgctgctctgttcttgtcattgacaatatattt

SEQ ID NO: 157479 - DNA, 656 bp, Arabidopsis thaliana landsberg
ccttcttcctcctcctcctctcgcttcttcttcttcctctcgaatctgcttttcgcagtctatttagtcatcgtaaattcgaaagctttcgtatttaattaagcaaatggcttcgtataactctggttttttgggttgtgaagagccacactttttggaatcgtgttctctttgccggaaacaccatggtcttaactccgatatcttcatgtacaggtattgattcgattcaaactaaagcattaaactttcaattgagtttctagatctggtttttttctataattcatttatttggtctgattgtccacggtttttttgatttacagaggagacaaggctttttgtagcagcgagtgtagagaagaacagattgaatctgatgaagctaaggagagaaagtggaaaaaatcttcaagatctccccggaaaaattcccctgaaactaaagaataagccgccggaaacaaagtacggacaggaactctcgtcgtggcttagtagaagcttcagttacataatcaagcaaatagtctttttttcttctatataaatacctttttgtctaaaatctataaaccctcctaaaaccacttatatctccaaagcctctaaaagatttgctctgtttctattgatctttctatggatcggag

SEQ ID NO: 157480 - DNA, 1212 bp, Arabidopsis thaliana landsberg
tgtttatttctgtcatgtgtgatttggtcgcgcgtacgggtcgtctccagcagcggtacgaggatggctctcgtctcgtcgccgggtaccgtttttttatccatccttgttcctttttctttttattatgtctgcgtttgtatcgcctctttgaagctgacgttttggtttatgtaatgtgaatctttctcctttattcgaaaattgtggatgcgattgattataatgggtgtaactgttgggaatttgttttcatggatctctacgtatccctgtattgaagtgattgctttgatttattttgttttgtgcttcgtgattaattgggcatttttttgtgttgaggtgttatgtctgtaattgcaaaacaagagtcacgtcaccttatcgaatcatgtttgaagatttttttgttttagagtcatgttttgaaaagaggattttgacatgtttagacatgttttgattgtatctgatcttggttgatgaccatgtctctttaattttgttttttggagatgatggaccgtgcttaacaagttcaatgtcgggcatttataggtgtattccgtttaggtatgtaaattctgacaaagatggtaattctgaatctgggaaagtgattcaagtgttgatgatcagctcgtctagtggaccgggacttttgtttcccaaggtacaaagcaaacgctgtttcttcttgcttttgcctttgtttggaaacaaagtaacatatccgatgattcatgtagggaggatgggagaatgatgagacagtcagggaggctgcagcgagggaagcagtggaagaagcaggagtccgtgggattcttatggtaaaacccttcacgcacaccgtgtaagtgcagccctttgttatttgtttaagcctggtgctgagaatgtcgaaaattttggaactttgcaggattttttggggaattatgagttcaagagcaaatcacaccaagatgagtttagcccagaaggtttatgtaaagcggcaatgtacgcgttgtatgtgaaagaagagctagcgacgtggccggaacatgagacgagaacacggaaatggctgacaattgaagaagcggtagagagttgcaggcacccttggatgaaggacgcattggtggaaggattctgtaaatggcataaggagaagatggttaaaggagaggagataactggtgaacattgaagcaaatgtgc

SEQ ID NO: 157481 - DNA, 480 bp, Arabidopsis thaliana landsberg
  unsure (1)..(480): unsure at all n locations
atgggaaactgtttggtcggaagaaacaatgaaaatattgctgaagaagaagaagaaaaatttgaagaagtgatgaagaaagattacaaaagaaaagatcgaaagttgaagattgttctaaggagagatgagttagagaaaatcattcttttccagcttaatgcagacggtgcatacaaaggaggagacgccaagagggcttcttttggagattctcttacagaactagaggcagaaagattggccggagaagctgctgctgcggtggcaaaagaagagaagtctagccggagattatgtcgaaggnnnnnnnnnnnnnnnnnnnnnnnnnnnnaatggcctgaagaagtatagtcctctgtattggattatattttattctctcattattcgaggttttcaaacattctatattacaagaataaaaaaagggaattgctttttgggattatgctattgcctgtgtttattttaccaacc

SEQ ID NO: 157482 - DNA, 941 bp, Arabidopsis thaliana landsberg
aatacgtaggcggatccagaggttgctgcggctgaaatcgtaaaaaagagaacgttcaaaaagttttccttcagaggagtcgatcttgatgctcttctcgacatgtctactgatgatcttgtcaagcttttccctacccgtatccgtagaaggttagaggactctttgaaccagagagctttgtctcaatttcgtagatcgtctcttgttttttagactgatcagttttgttatgtaaataggttctctagaggattgacgaggaagcctatggctttgatcaagaaactgcggaaagcggtacaaaactcaaacttctccatcaataattctttgttctaactagatctttgccctggaacgtgtcttcttagattgtgtcttctcagattcatgcctctctatatatgatttttgcaagcaaatggctttaaaacgctaaaggttgtgactctctctgtatgagcagaaaattgaagcaccagctggagagaagccagcagcagtgagaacccacctaaggaacatgatcattgtgcctgaaatgattggaagcgtcatcggtgtttacaatggaaagacttttaaccaggtcgagatcaaaccagagatgattggacattacttggctgagttttcaatctcatataagcctgttaagcacggtaggcctggtgttggtgctacccactcttccaggtttatccctctcaagtgaagaccatacagagtctgtgttgtgctcttgttttgttagatctcattatgcaattatagggtcctccttctttgtctgttttgggaccattttgtctgtctgtacttctctgtttggctactctgctgcgattctctcttctttagatgagtctaaactcttgttccattcgtttaaagaagactcaaaactttttggaaaatctactatcagcaatggctag

SEQ ID NO: 157483 - DNA, 829 bp, Arabidopsis thaliana landsberg
gcatgattttcagttctttaacattcagaggctgactgagctgtatgaaaaagaagtgcgataccttatggtgggaataacaagtttatcaacatgttatgtaatttatgcagcttttgtgtctgattagttctgaatagcaatttgtttcactctggtttcagcaagcacatcagaaaactcaaatgaaagacacaattgaggttgatgaacctgaaggtctttctcagtctttgccctcttttcttacattattttactgaatctattacttaagaaataattttgcagaagttggagatcccttaactgctgaagaagtggaagaaaaggagctattgctggaagaggcaagccaaaccattcgaccttactgtgggttgacatttgtttttgatggtttttttataatttaatggagttgatattttttagggtttctcaacatggagcagaagagacttcaatgccttcattagggcttgtgagaagtatggccggaacgacataaagagtattgcctctgagatggaagggaaaactgaggaagaggttgaacgatatgctcaagttttccaagtgcgatataaagagctgaatggttagtaactttagattgttaagtaaagttaatgagtgtttgcagtgcgacaaagttggatatttatcctaagtaagctctgcctcttgttttcctttgtaaaaattgtagattacgacagaatcatcaagaatattgagagaggggaagcaagaatctctaggaaagatgaaatcatgaaagctattgggaagaaactggatcgctacagaaacccgtggctggaac

SEQ ID NO: 157484 - DNA, 3771 bp, Arabidopsis thaliana landsberg; identical to SEQ ID NO: 33483

SEQ ID NO: 157485 - DNA, 3171 bp, Arabidopsis thaliana landsberg
ttaatggatgaaaatcgttgtgttgttcaactcgctgatcagtttcttgtggttcaggaccgcgtttcgaggatggtgattggtgcggtaggagagaggctggaacctacactacaagaaaacagtcaatttgcgaggaagggatgcgagggaaggcattcctcgcagcttttgcgagggtattgcgagaaaggtgctacgtaccgcacgcgcgtagcaattccgtcgcaaaacttgcgagggaagacttcctcgcaaatttgcgagggaagtacgatggtttcgcaagaaagatattatccgtcgcaaatcccaagcagatacgtcgcaaatctttaccctaaaccctaaaatacataaaagtgttttgcaatctttgattctcatttataaatatgaatctaagtgaccatataatcattcaagttgattatatggtttgaacaaaaaaatattgtattggtttcaatattgacatttcattttgaaaatgttaaacattcatgattcatacttaaagaaaaccataagatcatcattgatgtatttggggaaaaaacacattcgaattatatgatgataaaataggttcaaatgtagataattaacgttctaatgattcaaaaaaatgaatccaaatgattttgagtagtgattgttgtatttttcgaaattgattatacattgcgaggaaattgcgaggtgtttgctagtacgcgtagcacttccctcgcaatatttacactaaaccctaaaatatttagaatttttagtcatgttcttattttgctgagggtcttactagaaataggagagactgaatcaaatataattattgaaacactgcgagggatttgctaggcgctctcgcagttccctcgcaatgtaagctgcattttgattggtttaaaagacggttcctcgcaatttcctagtaaggtttgcgagtgatttgcgaggaaatatattcttatatatactcgataacctagtttgagcggagctcaaacctgccgcatcaaaccctaaacctaatttttttcttcgattctcttcttctccgatctgttttcctcgtcgccggcttctcttcttctccgatctattttcttcgccgccgcctctcttcttcttcgatctgattacgtcaccgcctctcttcttcttctccgccgcgtctcatattctccagcagccgccgtaactcttcttctccagcttcagccgcgagtcgatctgtttcttctccaaggtaacgtcttcttctccgatataacttcttctttccaatccaacttccaccgtccgatctaacttcttcttcttctccgtcgcgtctcttcttctccagcagccgtcgcgactcttcttctccaacagcagccgcgactcgatctcttttgcctccaaggtaacgtcttcttctccgatctaacttcttctctccgatctaacttcttcttcatctccgatcttacattgttttcccgatctaatcttttctagtttacggatctaaactctgggttttgttttttttgcaagatgccgacgtcagagaatacttatgcacggtataggtcacagcagcaagacccgttgcatgtcaattctcctgtcagtgctgggaatacttcaggggttcacggttcaggttcacgttcaggttcaaccgttccaccatcgcctccaacgccaacgactcagccttctgtcaatcattctgatgttcaagctgaccgtctcaacaatctgacactggaagagctcctcgatagtcttggttgtgctggcttgacaaggctagacccaaagcatcctccgggaactctctggtaaggttaagcttatagtctctggaattaggtcttgtaagttggttagttctgccttagaagtttggtcctgccttagaagtctctggatttaggttggttgtacttagcattgtagtttcttagaagtataaagacatagagatccttatgtgttttgttgctgttgttgtaggtttgacaatgactctacagttgcagcaacaatccgcagcatatttgaaagagatttcaaagaacctcatgccaattggtcacagacatcaaagactacaatcgatcgatggtatgaaacgtttgcggtaagttctgtgttcttttgatgtttatgcttgttttgttgtttggtttcatagtctgatgtttgctttgtctgttttgtagcaagtatataactgggactctgcaataaaccagagagttagattggagtttgaggcagagctgaaggataggatgtctgatcaagttggtcgttggaagggaaagtggaaggagaagggagatgaggcaaaaccgcggtggatagatccagaagtttggaaagttctggttagcttttggagggattcgaagtcggaaagaaagagtatcaacagtaggaatgcaaggtatcatgatccggacggcctcgggatacataaacaccggtctgggcagacctcatacaaagccagagcccgcaaatgtgtaagttaatcaaattttttcctttaaaaaacttgtatttcaaaaaactgacctatatgtttatgtgtttcactgtgagatgacaggagaaagtactacagactttctcctcctcttagatgaaacacacaggaaacatgatgggagtttcatcgatagaaagtcggaggaaatctataaggaagtgtcctcgaatattcaagaggaagagtcacttctgtgttcaggcgacactacagagagcacgggttcaggcgggttatttgttcaggcaaagaacaagatctatgcacaggtatcttatctctttcaacccaatatagaagacagctttttttgttgctttggattggtctattttagcttgaattggattggtctgttttagcttgaattcgattggtctattttagcttgaattggattggtctgttgtggcttgaattggattggtctgttttagcttgaattggattggtctgttgtggcttgaattggatttgtctgttttatcttgaattggattggtctgttgtggcttgaattggattggtctgttttagcttgaattggattggtctgttatagcttgaattggattggtctgttgtggcttgaattgaatttgtatgttgtggcttgcatt

SEQ ID NO: 157486 - DNA, 597 bp, Arabidopsis thaliana landsberg
tctcttgtaacttccacctagatttttgaattcctgcccttatccaagaagccaggaaagggtaaaagattttctcggcctcgtggagccctcaccattatctttctttcctccacacgcaacactacaactttaaaagagatggatccgacagagctaaaacgcgtgttccaaatgttcgacaagaacggggacgggacgatcacggggaaagagctgagcgagacactacgaagcctagggatttacatcccggacaaggagttgactcaaatgatcgagaagatcgacgtgaatggtgatgggtgcgtggacatagacgagtttggtgagctatacaagacgataatggacgaggaagacgaagaagaagaggacatgaaagaagctttcaatgtgtttgatcagaatggagatgggtttataacggtggatgaattgaaggcggttttgtcttccttggggctcaaacaaggtaagaccttggacgattgtaagaagatgataaagaaagtggatgttgatggtgatggtagggttaactacaaagagtttagacaaatgatgaaaggcggtggttttaattctttgtagcta

SEQ ID NO: 157487 - DNA, 913 bp, Arabidopsis thaliana landsberg
ctgctcctaccaagaaagctgattcagctgcaaagagagctcgccaagctgagaagaggcgtgtttacagcaaatctaagaaatctgaagcccgtacccggatgaagaaggtaatgttgtaaacttcatactttctgtgaaaatatgttggagtgcttttgaaaatttgagcttctgtttgaagataggatacaagattgttgataagcttgtaatgctgttcctctgaagtcttagtgataagttaggtggaaatatatcagggaatgtttctccttgtgaattcttgtagcaacctatgaacaacactgaacattggaatccaagtaggtggattagttatcattgtttgcaaccgatttatcgaaaaatggaactcaagtggaagctgttgagacggtttcatgttgttattagaacttgggagaactttaaaagtcttgatagtttagaacatctcattatcctcgacaactaagacttataaatgttgtaagtaacttttttacatacatgcaagatgagagtaaaattcatttgagtaaacaggtcttggaagcacttgaggggctcaagaagaaaactgatgcgcatgctgatgagattgtgacggtggagaaactgataggagaggcttattctgcaattgacaaagcagtgaaggttaaagcactacacaagaacactggtgcccgtaggaagtctcgattggctaggaggaaaaaagccgttgaaattcaccatggttggtacgtcccaaaagcatgtgatgcagcaccatcagaatctgtgcccatggctgcataagaacatggggatagcggaaatttgtttttgttactagatctatcaaaatcaaaatctgtttctttataatgtacatttagtcgctttcaaactcttcgcttgttaa

SEQ ID NO: 157488 - DNA, 1071 bp, Arabidopsis thaliana landsberg
tctttctatgacaattacgctacatgcatgggtttcgttatgcgagtggatgctttcaggaggtcaatgcgagatgggactgtggtgtggcgcagactcgtgtgtaataaagaaggatttcgtaggtcgagacctcggagaagcgagagtagaaagcctcgggctataacaagagaagggtgtaaagctctgattgttgtgaaaagagagaaatccggaacatggcttgttactaaatttgagaaagagcataatcatcctctcttgcctctctcccctaatgttcgccggaattttcagctccctcaaacaccggtacgtctacgcacttttccttggggtaaaagtaaaacagtgattattggcattgatctaagagttaccaagaacataaagctcaaaaaatgatatcgaaatcttgtacaaatgaacttttcaggacgagaaagacgcaaagattagggagctgagtgcagagctgagccgagagagaaggcgttgtactgctttgcaacagcagcttgatatggtccttaaggagatggaagaacattccaaccatctcaccattaacatcaatagtgttatccaaagtgttagagacattgagtccaatactttcaccaaacaacaaacataatgcttcatttctgttcataaaagcttaacatcaaattctcataatccaatgttctgtatcttgtgattgattcttcattctccgaaacaaaaaaacaaaaaactagattggaaggcattgatgatgaaattacacattggctaatcaaaacaaagccatggacattatccaattttgacatagcatcaatgccagaaagcgtaaatggcggtagagatgtaaatcagcagagcagaggaaaccagagtgacgagcgttgcaacagcttgagccgccgatttgctgccgcaagagagcaaaccaagacggatctgaatcacattaaccatagagagcatcaagaagagacagcccattacagatccgacagcagaagccatcattccccatctcaaaaccttgatattgatgtgagctctgaaaatctcgtt

SEQ ID NO: 157489 - DNA, 817 bp, Arabidopsis thaliana landsberg
gggtcgtgtcactactccatccgaggaggattcaaacaacggtttaccggttcagcaacccggtacaccgaaccagcgaaccagagttcccgtgagtcaattcgcgccgccgaattatcagcaagctaatgttaacctatctgttgggaggccatggagcactggtttgtttgattgtcaagcagaccaagccaatggtattgtatcccaaatacacttttaaacgagattatagatatttatatttcttgcaagaaattcagaattaattgactcactaatctttaaaaactttgttgtgcagccgttttgaccacaattgtaccttgtgtaacatttggacaaatagcagaagtgatggatgaaggagagatgagtatgttctgctttacacaatttgaaaccgaaatcagattcttcattaaatatgatgtttttaatagctaatattccgttgtttatgcagcttgtcctcttggaactttcatgtacttattgatgatgccggctttatgctcacactgggtgatgggatcaaagtatagggaaaaaatgaggagaaaatttaatcttgtggaagctccatattcagattgtgccagtcatgtcctatgcccttgttgctctctttgtcaagaatacagagagctcaagattaggaatcttgatccttctctaggtactaactcaaaacgtcagatacatatttatggtccaggaattttatttgatataacccttcccgtgtagttagtttaatcgattagaaaaaaacaatttggttatatcatatatgattttcatagtataaacatgc

SEQ ID NO: 157490 - DNA, 589 bp, Arabidopsis thaliana landsberg
gttaacgttatctctgatgacaagttcaaaaatggaacaaagatcactcctttgcttcctttatctgctccttctattcaatttcactctcagagtcgctggaaacgctgaaggttcttcttttttgtgctactctcatgaaaagtcccttcctttttggtggttgttagatttcgaaagttcataactttttttgtttgtttgtttgttgttttggattatgaatacgtgtacaggtgatgctttgactcagctgaaaaacagtttgtcatcaggtgaccctgcaaacaatgtactccaaagctgggatgctactcttgttactccatgtacttggtttcatgttacttgcaatcctgagaataaagttactcgtgtgtatgtttctctctctctgtctctgctgcttgttttatctgaatgaatgattcaacaattcctttgggaatctactgtttgatgtttgtttagtgaccttgggaatgcaaaactatctggaaagttggtgccagagcttggtcagctttcatacttgcagtatttgtaagccatctcttcctcaatgtctattaactctacagggtttctg

SEQ ID NO: 157491 - DNA, 3159 bp, Arabidopsis thaliana landsberg
tattctgaagtgaatataagatcttacatagctagtcaaattacatttaatatcgtttatattagaatataaaatttaaattattgtctcgtttattgctttattaacatatgattgattattaaaatacatggaagtaattttgattataagatctcattaagagagtaactgataagcaatgaaaagtaaatccgaagttaaaaaaaaaaaaaaaaaaaaaaaccttgaaatttcaagagtatatttggcttaaccggattggtcatcctggtttaatgatgatgcgaaagtattgagaattatgtggacattaggtgaaaaaccagaagattctccctaatgattgatcaattgttacttgctcagaaagcaatatgataatgtgatttttaccagtcaaaataatttggattttatctattcgtaagtatatacaaggagatgattatgggttgatcacccactgtatgacatttagatacctaatggctataaaagatgcatcgattcaatggacgcattgactcgattgttgcatcgactagaaggtcatatttatccttgttataaacccgcaacatagagtttgcgaggttactttcttgattaaagtacaagagtatttcagtgtttatttattataaccattattggatatccgttgggataagtgtttaacattttgaaattcatgttcatacacaaaatggtttagtaatatcgatacgcatcaatccaatgaataattaatagttttcccattcattattggttttgggtcagaaagcaaatagtgttcatctaaaatctttgaatgtgaaaagtgctccaccacagcacgcagagatgaacccttaaaggaggataataatacatgttggatatgaatgataactaagccatcctagaaggatttatataccgctcgttttgaagactatcatattatatagtcagctattccaacataagggggagaatgtatacagctggtgaaaaagataaatagaaatgaattatcaatgatcctcggagtaaagaatgtatattaagagtccaaaagataattcaattacagaatttagcgttgtaattgccagacgcatttgctgacccaaataaagtgatgaagtcacttataccagttgtaaattaaatgctcaagaatataatgaatgtcctgtaaggaccaatttcaaactgctattgagtcttaagatcgcatgaagtgtaatagactttggttccaaatataaatatcctcgtaaaagtgaaggagcacaaaattaaaaatgaccaaattgaggaaataaatattttgatgatctcttgaagagagtgaatgatctctaaaagagacataaacatgacaaatgaaacattcaagtacttgacaatgaagagatctagctagctatgtcatgtcaaaatataatggaatcaaaagcaaatcgacgtcgtaatatatttgcatgctatgagcagttgatattatggacaaaaaggaggatcatgaaagaaagtctattgaaaagtgtacacaaagtaatgattagccaaaaatggaaaagaagaaatagacatataattataatctctagtagagatatttggattagtagtctatgcacatgatgtgtaaaaccagtggaaaataaatgagtctttatgtgaaagaatagtgaaattaatgagattttcacaaagataagaaatgtattatgaagagatatattctcttgtggtggatgtaatatttttttaagtatctaaagtctggcaataagagacggaacactggatatgacatttatatgaaattcttgaaagatataatctctgaaggattaattatatgagaattatgttctctagaactctactcgatcgaataaaaagaaatatgtaacatgacatataatcatataaatgtatatttacgttgagtttgtcaaaatatattgatcaaactaatatttgttttgaaaatcattaaaactcctacagagttatcataagtaatacgatgacaataatctatgataaaatatcactagataatgatatttataagtctatatgaaaaccatataattttgatcattaagattatggttattaattccaacgagatattgtatttgattgaaaatcatctcctgaagaagatgtttctgagggggagattgaatgatatgcgtggatgtaccctttttccttatcatagtttttatcccacataatttttctatgacaaggtttttaacgagacattaaagaacacgcaaataatacacttgatgaatattaagaaattctatcaatcatccaaatgaatattatacactaatgatatttagagaaataaataagatggtcaagatgaatcatctaaaagattcatgagcagcagaagaatggcgttgtactttatccagaaatttgttcaagagaagatttggcagacttattctcaaatactgtttattctctgccacatcttctaatcatgcagagattttactaattcatgaagctagccgcgagtgtgtatggctaagatccatagttcaccatatacaagaagactgtggtatgtatgcagggaaaaagactccaacaattatgtacgaagacaatgcagcatgcatcgcacaactcaaagacggatacatcaaaggcgatagaacaaagcacatcctaccaaaattcttctacacacacgatctacaaaagagcggcgatgtacgagttctacagatccgttcgaatgataatctggctgacttattcaccaaggcgctacctactgctactttcaagaagttaatctatcgtatcggattacgccgtctcaaagatctcgacgaatatactcataagggggagtaattgtatgttgcactctttttcccttaaccatggtttttcccattgggttttcttggtaaggtttttaatgaggcagcatttcaaatactttacgagttatggtactataatggtcatcagggggagtgttatgaataaagatggatgcccattataaggcccatcatctaagcccatcatctaaatgtttctagggttttaccctttccttgtactcctatataaagaaccttttatttcaatggaataacacactcatttcct

SEQ ID NO: 157492 - DNA, 458 bp, Arabidopsis thaliana landsberg
  unsure (1)..(458): unsure at all n locations
aaatttttctccatattacaaaagaactaaagaagatggatcagtcatcatcaacgttgctcataaaccagagaaagtcatcatcgtctccgactaggatcccacctaagcagaagaggaagtcaacgactacgcacaaacccatcaaagtccgttacatatcaaatccgatgagagtcgagacttgtccttctaagttcannnnnnnnnnnnnnnnnnnnnnnnnnnnnnnnnnnnnngatctaccaccgtcgcccaccacttttaccgcagtagatctccaccgtccgtgtgagtcggagatgaacttagagccgttggatggagaggtccgtggagagtattattcaccgttggatgaggaagtgtttaatgctcctcagatgtcggcaggtctttctggttttttctcgtctggattttacaatgttaacgctttaggaagcattggttctctc

SEQ ID NO: 157493 - DNA, 3683 bp, Arabidopsis thaliana landsberg
gctttgggacctcctgagtcaagaatctgagcgattgcagggaattgatgagcaagttgatagactaaagcgtcagttgagaaggttacaatcgttgttgaaagatgcagatgccaagaaacatggaagtgaaagagtgaggaacttcttagaagatgtcaaagacattgtttatgacgctgatgatataattgaatcctttcttctgaaaatacttagaggaaaggaaaaaggggtcaagaagcatgtgagaaaacttgcttgtttcttgattgatcgccacaaagttgcttcagatattgaaggcatcactaagaggatctctgaggtgattgggggaatgcagagtttaggtatacatcagatcattgatggtactcattcgctgtctcttcaggacagacaaagggagcaacgggaaatccgccatacgtttgctaacagtcgtgaaagcgatcttgttggggtggagcagagtgttaaagaattggttggtcatttggtggaaaatgataacattcaagtggtgtctatatctgggatgggaggtattggtaaaaccactttggccagacaagtttttcatcatgacactgtccgacgtcattttgatggattcgcatgggtttgtgtttcgcaacagtttacacagaagcgtatttggcaaaggatctggcaagaacttcggccacatgatgcggagattttactgatggacgaatatgcagtccaaggtaaactctataaattattggaaaccgctagatatttggttgtcctcgatgacgtatggaaagaagaagactgggtgtaataaaagcagtgtttccacggaaaagaggtgagctcttatggtacatacatgaagcactttttcttcttaattcataaaagtgattgttaaaaaagaaatatatagaataattgccttttttattccctagcatgagaaacacaaatatttttgcaggttggaagatgctgcttacttctcgaaatgaaggtgttgggatacatgctgatccaacatgtttaacttttagagcaagcatccttaaccctgaagaaagttggaagctctgtgagagaatagtattccctaggagagatgaaactggtacatatcttattatataatgtttagtttctctaacttttaagaaaaatacatttacatatactaatttacatgtatatatttatatgattttataaatttttattttccttaaccaaaaagtaatatttgtatacatattgctattttttccttactattagaacaactaactaaaaacgtatggtaatccatatgctaatttaggcatgtataaaaaaaaatgtcaatggtaatcttgattttgaccaaaaaataattaatttaattagcatgaacaatgagtgttgttaaggttcaaaaggacaatataattattaaacattaatttaattggataacaattaaaaaaattaactattaatcctagtacagtaagtcagtaattacgaatcttgaaaattggttttggtttttttcttcctattttttataggtttattcaaattagaaatatcgaattatctacttttatggtttattcatgattggtttgattaaaatttaacgtaataaaatcaactaaatttgaaagaaacatgtattgattaacccgagattacacgattccttgttataaagttcaaatataatactaagaccaagaatctagtgtattattttaatttggcagctcacatgttgaaatgtattagcttgtgatattgtgcagaagtaaggcttgatgaagaaatggaagccatgggaaaggaaatggtcacacattgtggaggactaccattagctgttaaagcgttgggaggcttgttagctaataaacatactgttcctgagtggaaaagagtttttgacaatattggatctcaaatagtaggaggatcgggcttagatgacaacagtctcaattcggtttaccgaatattgtctctgagttatgaagatttgccaacgcgtttaaagcattgtttcctttacctagcccattttcctgaagattacaagatatatacacggacattgttcaattactgggctgcagaaggaatttacgatggatcaaccatccgagatagtggagaagactacctagaagagctagtgaggagaaatctggttattgctgataaaaactatttgaggtcgagatttgaattttttcaaatgcatgacatgatgagagaagtatgtttatctaaagccaaagaagagaacttcctccaaattatcaaagtccctacttccacctcgactaccatcaatgctcaatctcctagtagatctcgcagactcaccgtacatagtggtaatgcccttcatatattgggacacaaaaacaataaaaaagtcagatctcttttacttgtaggactcgaaaaagattggaaacagtcagctccaggcttccaaagtttaccattgcttagggtgttggatctttcttgggtaaagtttgaaggaggaaagttaccttctagcattggagggctcattcactagagatttttgtgtttatacgaggctgtggtatctcatctaccttctactatgcggaacttaaagcttctgctctatttgaacttaagtgttcataacgaggatttgattcacgtgccaaatgttttgaaagagatgctagagttgaggtacctttccatacctgttaaaatggatgataaaaccaagttggaattgggtgatctagtgaacctggagtacttgtatggtttctcaacgcaacacactagtgtgacagacctcctccatatgactaagctccggtatctcgctgtatctttgagcgaaaggtgcaattttgaaactctatcgtcatctctccgtgaattgcgaaacctcgaaacgctttatgtccttttttcgcccgaaatctttatggttgattatatgggagagtttgttctggatcattttattcatctaaaagagttgggattggcagtacgtatgtcaaagattcctgatcaacatcaattacctccccaccttgcacaaatatatatatgtaattgccgcatggaagaggatccaatgccaattctagaaaagttgcttcatttgaagtcggttaaattaacatttaaggctttcgttggaaggagaatggtgtgctcaaaaggcggatttactcaattatgtgctctagacatatctgaacaatcagaattggaagattggatagtagaagaagggtcgatgccatgtcttcgtactttgactatacatgattgcgaaaagttgaaggaacttcctgatggactcaagtacataacatccttaaaggaactgaagattagcggaatgaagagggagtggaaggagaaactggtaccaggtggagaagattactacaaaatccaacacattcccgatgttcaatttatcaactgtgaccagtagcaggtaaaagataaactgtatagtgtttttttgttgttgttggattcgtgtgaaagtcatttggacagtctcaactattatacattgttttaacatcgatcatctttgaaatagatgcaggaaagaacaacaaggtatccaaattctcttatattggtagagatagaggttacttcacaaaagtcatctg

SEQ ID NO: 157494 - DNA, 6383 bp, Arabidopsis thaliana landsberg
  unsure (1)..(6383): unsure at all n locations
cttctaacaaggatacatttcttaggcttataagatcgggttgcgatttaagttgttatactcaatcatacatatgacatgaagtcatattcgactccaaaacactaaccaaccttcttcttgcttctcaaagctttcatggtgtagccaaagtccatatgagtctttggcttcgtgtcttctaacaaggatacactacttaggcttacaagatcaggttgcggtttaagttcttatactcaatggtacacatgacatcaagtcatattcgactttaaaacactaaccaacctcttcttgcttctcaaagctttcatggtgtagccaaagtccatatgagtctttggctttgtgtcttctaacaaggaaacactactgataacactagattttaacctttttaagcccttgtttttcatgcatttagcttagtttcattcccctttttatgcattcttagtctcttttccttcttttgcacattttgcattgcattgcatagcatacttgcatttggagtgttttacaggtgaatcaggtacttttggactcaacttggaggtttctagcacaagggatggacagactcgagttcgggggatctaaggaaggacttaaactatacacggcttatatactcggctggaggccgaacggagcacacttgaagaacaaggagtatactcgaccaaggcactcggctggaggccgagtggagcacttaaggaagaacaaggagcctactcgaccaaggcactcggccaagacccgagtgatgtgaccaagaggaagtcactcgacttttctactcggccaagacccgagtggtgcagcgccgactttcccattttgtttttttcccaattagggcatcctagtattgcctataaatagacctcttatgtttctgtccaaaatatctttgctttgttcgctggatattagggttcttagatttcttttgcattttctggttgttgtgttgagaatctgaatttcatttcttctgcaaaactaatttatcttattgagatctatcatttgctaagtttataatgatttctgggttttatgattttttctgaattttgttctatgatgttcttcattgatcttaagtagtcttcttcagagttcttgaggatgggttaggtttaggtggattcctctgttctttagctagctaagtgtttatatgcatgattcccttctgttttaggagttcttaatgctattttctttctgatcaattgaaaattgatttcagactttctccacctaataagtgtttgatgaaatgtctgaaccaactaatttcagacattggatgtttagactgcttattgattttaatagattggtgtttaaagcctgctttattatgtttcatcaatggaaattgagattaggaagttctaaagttatgagaatcattcgcacggaagtggattgatttggttttgaatctattgtgtagggatagcttgattgagtttgttagttagctaaatggattgaggagtccactagaaccaattaccccattcttaagagctctgttgcgcttagatttattgagtttcgtgttatttactcttctgctcgttcagtttagtttatctgctcgttctgctttgttattctgctcgactttgttactcgacatgtttactcgacctgcatgttcatactcggtcgagcatctttactttcctctacttagttcattgtttaagtttatgcattgagagttcctggtctgtagtttacttcttgcttttatcactcatgttctttatcttctgcttagtatagttctgtttctgaatttgatttgcatgttaacctgttgcttaggtttagtagaaacacaccaaacctattcacacttggcttgacttaatattctctgataatatcttgattgatagcaaatacacccatttggattgacaccttaaatgctgcaatgacataagatgcatatagggaattgacgcagaaaacccttgtatcaatttggcgctgttgccatttggtgcttgctcaacagagaaatgtccactacattacagaagaagagcttacacaactccaagatggggagaaccttactattgaggaggttagctacctacagaatcaaggtggctacaacaagggattcaacaactacaaaccccctcatcataatctctcttacaaaagtaacaatgtggcaactttggacctccaggcttcacccagcaacaacagcacacttcagcacaagactcagagatgaagactctacttcaacaacttgtgcaaggataggcttcatgttccatgaccatggataagaagctagctgagcttaccactaggattgattactcttataacgacttgaatataaagattgatgcacttaacaatagagtcaagagcatggagggctacattgcttctacttcagctcctaagcaccctggacaacttcctggaaaagctgttcaaaatccaaaggagtatgtccatgctatctccacagttagtaattctgccactgaggacagtgggattcaagaaagggaggttttgcgaccaagatcaagacaggaaattaaactcgacttctttgctcggcttgtcgaacgagcacatgacccgagcaacccaatccctattccacctccctatgaacctaaatcggcatttccagaaagtattgcacagattaatgaaaagatcttncagaaacataagatgatgttcatcaagtgtatcaaagagttagaagagaagataccctttgtgatactcccaaggaagtgatcatgtaaagaccccaagtagctcagcaaatagttgaattgagttttgagtgcagtgctatcattcaaaggaaggtgatatcaaagaagctaggtgatttaggttcctgcactctaccttgttcgctaggacccttagtgttcaacaatagtctttgtgatttgagagcctcggttagtttgatgcctttgtctgttgcaaagagattgagatttgataagttcaagcctagtagcattcatcttatcctagttgatagatcagtgagagtgcctcatgggatgctagaagactaaccggtgaagattggatcagtcgagattccaagcgactttgtggttctagagatggatgaggagccgaaagaccctctcattctcggaagaccatttatagcgactgtgggcgctcttatctacgtgcaaacgggcaagatggacttgaaccttagtaagaatctccatatgagctttgatattgctaagaagatgaagaagcccactatagaagggcagcttttcttcattgaagaaggaaatttagatgctgagttgttgagtgggttggaaaatcctattccgtactccattccgactcgccacctaggagagcccgagaagcttcttatgatagaaggaggactagcttagaggttgagactaaggggaaccatttggatgttggtcctattgctagagagcttatggagctcaggaaacagtatggagctcaaggagagaccatgaaaaagttggacctcaagatggaggagctgaactacgctatcctggagcttaaggagatgattaaaggttatccaggtcctgagatcgatgaatactttgaggaacccgatcttggagaagaggactatagtactgatgagaaagaggcttacttcgaggaaagatcaaatgagtactccacactccagctatcaagagaaaatgcggagtatgattcagactttgaggattcaacaagtgaggatgaggacttctcagttgctctcctaaatctcttctctacctaaacgttgtgagagtcaagcttagtgactttaaacaagctcacttgggaggaagtcccatgtctatccttgtatatattgctttcttgttatttttgatgtttttgtttaagtgtttcagggaaaaagacttctagagaatttcaggccacactcgaccgtactactcggctacaggccgagtgtgggcttcaattgaccaaatgcccaagattgaatagtactcggcccacaccactcggcccaaggtcgagtatggacctcactgttcaaaggcccaacaagatgcagcactcggcccgaagccgagtcagaaaaagaagcccatcaggcccaacaccgtactcgacacgcgcgtcgagtatgtcggccgagttcacacgtgcgaggtcaacacaattcaaattcgaatttgctgggccccaccaatcaaatcctgctccccaaagcccttcaaagagtctgctgcaaaaagtgagacatgtccccttgaccaaatgaagggtgatgatccaaggtgtttggagggctaggatcaaatcttcttgtctataaaaccacactcaacaagctaagtcactcacactctctctttgctcaaaaatttcgagttttacttcttctctccaaacatttcaagtttttactctcacttctctagatttctcagaaactttgccaaaatctcttgttacaaaccttttcaaaacttctcttgcaacctttgttcattcttaaacataaatttctcttctactttgacctacctttggcaattttgtggtgactacctgcagtaaatcatcccaagatcatgaatcccgaggaatcaagaaggagagcctctgctcgagccgtggcaagagggtttgagatgattaatgagaagaatcagtcaaagaatcaggaagctgcgagtcctggttttactcggatgacaggccgagtacaatggccgagtatggccccggagtcctctgtgggtcgttctgccgctgctcaagaggaaatagcaagaggcaagagggtctgggagtccgagccagttgcagaagaagaagtgcctgagatagagaaggaagcatctgaggaagatgtgcaagttgatgaagaggtcccgatagttcctacaagtagaagaaggaacaccatgaggagaaagaaagaacctaccatagaagagcactaccaatatctcatggagctgagttttgaggggacaagatatccccatagacctaccatgcaagctttggggatatgtagagatgttgactacctcatggagatggccaagctggagaccttcttctcctaccagtatgaaggatacaaaactgagagctgccaattcctagccactttgaagctccatttctatgctgaagaaagggagagagagctgcataagggagttggctacatcacattcatggtgtttggaattcaatactcggttcccattaggcagttggatgctattttcaagttccccaccaagtatggaatccgccaaaatttcagcaaggacgagctccttgatctatggttgacaatcgccggtccactcccctacaagtcatctagggccaagagttcgttgataaggagcccggtgcttaggtatctccacctttgcattgcaagtgccttcttcccgaagaagacaaccggccatgttaatgagggagagctgaagttgcttgatctcaccttatgcttcattttggggcacacgaggaatgggatagagatgaaaggggatagggctgatatatccctttcggtggtgttgattgatcacttgattggttttagggagtatgcagccggaatccaccaatccggctatggaggaagcttatgtgctggaggagtgatcacgcccatcctaatagccgctggagttcctcttcatacccccactcacacagcaacctacatcgatatggagtatttgaagaggaagtgctacttggataggtctgctccagcggatcaactctacttcaagttcaagcactccacgctaggtctctctaggctagcactcccttgcaagaagttcaccaccattaggattgggaacaacattgactttgatcctcctcaatcgatcttagtcaatgtccttgcgcctctacaagcagagccgagcttaggaagtgagtctcaagaagaaggagcagagtggaatgaagaagaagccgagcaggaagcttatactcggccgagtaactttcagcaggccgagtatggccaggacgagtttgagcaagctgagttcagtcaagctgaacagtttgatgaacaagaagattcgtgcgaagctgcagcggagcagtttttctttgaggattatgctgagtccgatccagagagagatcccggtcaagttcacaagaagttgggaatgctcaaaggtctgggcaagtttcagaggaagttgttcagtgggttgaagaagaaggtgagaaagatgaagagagcaatggatggcatggcggttcagattcaggagctgcaacgaagacag

SEQ ID NO: 157495 - DNA, 5654 bp, Arabidopsis thaliana landsberg
ctttttcccccacactaactctttccgaataatttttgttttaactgtatgatgttcttacctctggaacgggtttgattttgtcttctgcagatctctagcttcacttcttgtagcaacttgacagttgtcctactttggattgtaatgatcttcttgatttatcatactaagaacatgagccgtgaggtaataactaataattatctcttcaagcttagtccaagattgcttcatttgcttattcattatcttgggtaaatattatagagtcaactctttgagccattcggtatactcggtttggaacctggtgcttcagattcagaaatcaagaaagcatatagaagactctctattcaataccatcctgataaaaatcctgatccaggtcgaaatgcttcctggtcctcttccttgataatcgtttatttcctcccttttgatacattgttatgtgttcttagtattgcttatttgtgtattgtaatggtacagaggccaataaatattttgtggagtccatagctaaagcttaccaagctttgactgatccgttatcccgcgaaaactttgagaagtacggtcatccggatggtagacaggtaatgactatataacctccattgtttgtttgtttttacacttacatgttagaatagtgttttttcctcaaatgaaaattgaaacttctttgtaaattgtgctcgcaatttcaaatgcaaatctaaaggagtgtttgaaacaattgaggccatattctcatgtttttgtagcatattatgggctttgccgtctccaaatgataattgaaatatttgtaaatgtgattgatgcagggttatacaatgggaattgctcttcctcaatttattttaaacatgaatggagaatctggtgggatattattgttgtgtacagttggtttatgtattcttttgccactagtgatcgcttcaatctatctctggagatcatcaaagtatactgggaatcacgttaagcttcaaactcgtcaagcatatttcgagttattgcaaccctctttaactccaagcaaagttatggatattttcatcagagcagctgaatacgcagagattccagttcgtaaatccgatgatgaatctctgcagaaactctttatgtctgtcaaaagcgagctaaatttggatcctaagaagttgaagcaagagcaagctaagttttggaaaaagcatcctgccatagtgaaggtgaattttaaaattatgcaactgtaatgctaaatattggataaactgaaatactcacttcctcaatttctgtacagaccgagctgttgatacaggcccagttaactcgtgaatcaggagtcctgtctccagcccttcagggtgatttcaggcgtgtgctagagcttgcacctcgcctccttgaggagttattgaaggtctagtctctatttaaataacacaatttctgataaaataaccatcaaaaagcgatgaccgcaaagtgctaacctagaagatatgtattttccttagaggaactcgaaacagactcttaaaagacttagaaatttaggttaatagtgatgcttttggttacacagttaaattgtggttttcttaaccattctttcattataacattgtgagtttcttgcagatggcggttataccacgcactgcccaagggcatggatggctgaggcctgcagttggagtagttgagctatctcagtgcattgttcaggtcttaaattactctcatcgcctatcttctagtttttatttgtttgtgagctttcagttctttatgtctcttttctccacaagatttacttcttcctgaaagtttaagaagtgcttagtgttgttgtctaggaacataaactaaaaatccaaaatcgcaggctgttcctcttagtgcaaggaagtcttctggagtatcatcagaaggcatttcccctttcttacagctccctcatttcagtgatgccgttgtcaaaaagatagcacggaaggtatactaactatcaaatgtgtcaagtgcagtactaatatctagttccatatcatgagcatttttctctcactttttgattcctgagaatcttgttggattctgttctccaaataagtagtagtggttctttaggttggtttacttaaaggtctagtctaaagacatatataaacctccattttatgttaacatgtcattgtttctcctattttcagaaggttaaatcattccaagatcttcaagaaatgaggttggaagaccgttctgaactacttactcaggtagcgggtttatcagcaactgatgttgaggacattgagaaggtgctagaaatgatgccgtctattacagtcgacatcacatgtgaaacagaaggggaagaggggatccaagagggagacattgtgacccttcaagcttgggtcaccctgaaacgacccaatgggcttgtaggcgctcttcctcatgcaccctacttccccttccacaaggaggaaaactattgggttcttctggctgattcggtgtcgaacaacgtttggttctctcagaaggttagcttcctggatgaaggtggagcgataacggctgcatcaaaagccatcagtgagtcaatggaaggttcgggtgcaggggtgaaggaaacaaacgatgcagtgagagaagcgattgagaaggttaaaggagggtcaaggctggtaatgggtaaactccaagcaccggcagagggaacatacaacttgacttgcttctgcctgtgtgacacatggatcgggtgtgacaaaaagcaagcactgaaagtgaaagtcctgaaaagaaccagggcagggacacgtgggttggttcagatgagggtgcgattgcagaagaaggtatggaggaggaagatgagattgaggaggaggattacgatgatgattacgaaagtgagtacagtgaagatgaggatgagaagaaagatatggatgagaagagagggtcgaagaaggccaatgggagtgtgaaacagaagaaagagtcgagttctgaagagtcgggatcggaggaagagtgaaagagaaatgagattttacattgataaactgaacaaaaaattcaatacttttgtcctggaatcttgacggaaacttctttttcacagttttgatattctctcattggctcccttctctttctttctctctgtatcacttttcttcagagacacacatacaagcaaaacgcgactaaggagaaaatcgtactaactcggacaaattttggtacacagcattacaaaacaaaacaaaactttttaactcccccaaatagtttagggtttagggtttattgggggccccaatacagaccatcaggtatcaggtaatgggccttgttaataaagtagtgggttataatgggctttacggttgtttcaagaagtggaagccctacaaggcgggaaaatcagaagaggcgcgtctgcttccgtcttcttcttcgtcttctccggagaggttttgtggtgttatcggcggaatccgacccgaaaatgccaaattacagcatcagaggaatcaatgttgaattcccattcgaggcgtaccagtctcagatcatatacatggacagagtcatcgagtctcttcaaaacgtgggtttccctctccctctctctctctctcttttttacacaccaactctcttcaactgttttgttgatgatgatattcgcgtgatgatactctctctctctctctctctctctctctctctctctattctgttgtttattttgctttccccaattctatatcgctttttagggttcttccccgttcacactgaccatttgggttcttaatttaacgctgaattagttgttaactaatcttgtttataacttgtgatgatgatgcagaaatgtcatgcgcttttggagagtcctacgggaactgggaaaactctttgtcttctctgtgccaccttagcctggcgaaagagtctgggctctttctcaacccgtaaggatcggaagaacagtgccattccttggtccgattcagacgagcctctgtcacaatccggaggaggaggaggagcttttcccaccatagtttatgcgtcccggactcatagtcagctccgccaagtgatcaaagaattaaaaagaagtagctacaggtcggacacaccacaaattctgtttctgccttatagctacctgctcatcatctcttctcaatcaattttgtaggcctaagatggtggtgcttggatcacgggagcagttatgcgttaatgaggaagtcaactccctccgtggcaaagcactcactaatgcctgtcagtacctttgcaaaaagcgcggtaaacgccaatgcaaccatttcaatcgccttccaggtacacagccatcatcaaacgaccatttataaatccttcttctttatgaattatggttactatttttccctttcctttaatcttttgtagattatttgacgcataaccctcatattggcgacgaacctgttgacattgaggatttggtttatattggaaaagattctggaccgtaggttcctctattttttttgctacttcaacaaatattttcgtttcttacgttcctggctttttccatctgtgtactatatttgtatttttcagatgcccttattatatcacaagagagcttcacaaggacgtggacatcatatttgcaccttacaactacttgatcagcaatgggtatagaaagtttttgaaagtcaactggactaatagtgtccttatttttgatgaagcgcacaatctggtaagggactaatgttgtttcacatataatttccttatgtattctctgttcatcatgaactcttcgtttcttggggttttgttctatttttccgggttaccaaacgattatactgcttccaacttctcgaaacactcagttcatctttaaaacatgcgcaggaaagtttatgcgcagactctgcttcatttgaccttccttctgttcttttatcggcttgcatttctgaagcgcaagaatgtgtacaacttgcggcagcaagaagggattcattaaatgacgtttccataaaccctgagaattttgctatacttaaaggtcaaactttaggccttgactgagattacaacgttctgttatacatgaatgcctgttctcatctatcgttgtttttctcttgcaggactgcttcttaagctgcaggaactgatttctaaagtgccaattcccaaaagggacgagggatttaccaagcctgggccttacatatatgaaatgcttaaaactcttaacatcactcacgaaactgctcctaaactcattggtacagttgaggaggctgcagtgttcctggaggaggaaaaacaacgaacagcgaccaacgctggaagcaaactagaaatcattgctgacatgcttaagctgatctttagagaaaatggaagtaaccatgcagatgtttatcgtgtaagttttaagaagagtgttgttctttatattctgtgtcgaatttttataattaagttgaaaagaaaattatctttctctctcaccatctcattcgtcctttgttaggttcatgtacaggagctggagcaaaattctactgatgtgatgaaag

SEQ ID NO: 157496 - DNA, 1370 bp, Arabidopsis thaliana landsberg
tacgtacaaaggaatattatctaaaagacgagagtacaagtgagaaatggcgttaaaggtgatcaagatctcccgagtcagccctgcaaccgcctccgtcgacccgctcattgtcccactctcgttctttgatttacagtggcttaaactcaaccctaccgagcaagtcttcttttacaaactcaccgaatcatcatcatctcgcgacgttttctactcctccatcctccccaagctcgagcgatctctttcactcatcctcactcactttcgcctattcacgggtcaccttaagtgggattcacaagatccaaagccgcatttagttgttctctcaggagacacactctctctcacagtggctgagactgatgcggatttctcacgtatctctggcagagggcttcgtccagagctagagttacgctctctaatacccgagctaccgatttattctgactcgggggctgttgtatctctgcaagtcactttgttcccgaaacaaggcttctgcattggaaccacagcccaccatgtcgtcttggacggcaaaacggctgaaaaatttaacaaagcatgggctcacacttgtaaacatggcaccataccgaaaattctaccaacggttttagatcgttctgtcgtcaatgttccagccggacttgaacaaaagatgctcgaacttctgccgtatcttacggaggacgacaaagagaacgcaagaaccctaaagctacctccagtcaaagagattaacgctaaagacaacgtcctccgaatcaccatcgagataagtcctgaaaacattgagaaactcaaggagagagccaagaaagagtcaacacgcgctgagcttcacttgtcaacgttcgtagtcacgttcgcccatgtgtggacatgcatggtgaaggcacgtagtggtgacccaaaccgaccggttcgtttcatgtacgctgctgattttaggaaccggttagaaccaccagtccctgtgacatacttcgggacttgtgtcttagccatggatttctataaatacaaagctaaggagtttatgggagaagatggatttgtcaacaccgtcgagattctcagtgattcggtcaaacgtttggcttcacaaggggtagagtcaacttggaaagtgtatgaggaaggaacaaagacaatgaaatggggtacacagttgttggtcgtaaacgggtcgaaccagattgggatgtacgaaacggacttcgggtggggaagacccattcacactgagacaatgtctatctacaagaacggtgagttctatatgtccaaaaggagatatggtatcggtggcgtcgagattggcatctgctttgaagaaacttgagatggaactt

SEQ ID NO: 157497 - DNA, 1577 bp, Arabidopsis thaliana landsberg
  unsure (1)..(1577): unsure at all n locations
gcgagaagatggatctagtgagcagtttaccagacgatgttcgttgtcatatactgtccttccttaccacaaaggagtctgctttgacatctgttctgtctaagaagtggcggaatctgttcacgcttgtccctaatctcgacttggatgactctgagtatcttcatccggaagagactaagtgggaaagagaagaaattctggatagcttcttggattttgtggaaagagtattgtctttgcagggaaatggtcccattcgtaggttctccctcaggtgtgaaagcggtgttcctccagctcgtctgaatcgttggttatgtaaagtgctgcagcgtggtgttgcggaccttgaacttatcatcgacttcgaagatggttatcttctgcctcgagagttgttcgtcagtgagacactcgtcaatctcaggttaaaatctgaatttggttgtattcattggtggcctggagctgaaggcactttcttaccaaggcttcaaagtcttgatataagctctgcgatggttttttgtgatgataagcttcagaagcttcttccttgtttccctgtgattgaggaattacggttggtaggtatggagtggattgattctcatgtaaccgtgtcgtgtgcaaccctcactaatcagctacttcttagctccaccggttccagaacctctaaaaatccaaagagcgtttcttttgatactccaaatctgctttccctagcctactctgatttagttgctgaggactatccgttggttaatatgaaaagtttattcaaggctcgaatcatccttggagtagatgacgatcaaatcgcccgaatgcgagccccaactaactatttgtcagaggatgatgttgctcgccgatttggcaatgtggtgaagctcatgaagggcatacaaaatgttcagcaacttcacttgcattctgatacactcgaggttagttttccattttcttctttctggtctacttgtaatgtattgattgcaagatgattttagctgcgttgtgcttcttgtttcaggtgctttctaggtgctgtgaagggatgccggtgttcaacaacctcaaagtgttaagtatttggagtgacatgaataggggatggcaagctatgccagttcttctaaggaactgtccacatttagaaactctcatcattgaggtagaactactgtataatccatgaaattttgtggacaaaacattcgttaaagttgcagttcatactcgcaattactttactgtctcctttatgtgcgttttcagggactcttacactatgtgacggataaatgcggggatgtttgtgactgcatttctcgggattacaaagaccattcgctcacatcttgtccagtgaggaagttacagatatatgagtttcgaggaacaattagagagttagagatgatcaagcatttcttgaagatttttccatgtttgaaggnnnnnnnnnnnnnnnnnnnnnnnnnnagtcatacaaacctaacccccctacaatttttgaacgtgtaaggaaagtgatgaacttctacaatatgttatcgagttgcagt

SEQ ID NO: 157498 - DNA, 505 bp, Arabidopsis thaliana landsberg
cctagaagtcactaagtcgattcaaaatggttgcgagaagtgaggaagttgagatagtggaagatacggcggcgaaatgtttgatgttgttatcaagagttggagaaggcggcggaggaggagagaaacgagttttccgatgcaagacttgtcttaaagagttttcgtcgtttcaagctttgggaggtcatcgtgcaagccacaacaaactcattaacagtagcgatccatcacttcttggatccttgtctaacaagaaaactaaaacggcgacgtctcatccttgtccgatatgtggcgtggagtttccgatggggcaagctcttggtggtcacatgaggagacataggagtgagaaagcctcaccaggcacgttggttacacgttcttttttaccggagacgacgacggtgacgactttgaaaaaatcgagtagtgggaagagagtggcttgtttggacttagattcgatggagagtttagtcaattggaagttggagttggg

SEQ ID NO: 157499 - DNA, 2450 bp, Arabidopsis thaliana landsberg; identical to SEQ ID NO: 973

SEQ ID NO: 157500 - DNA, 666 bp, Arabidopsis thaliana landsberg; identical to SEQ ID NO: 48647

SEQ ID NO: 157501 - DNA, 4008 bp, Arabidopsis thaliana landsberg
atgaaacagatggtccaacagctgctacagggacaagcatctagctcaatggaaattgctaagaaattatctgaattgcaccataagctagactgcattgaataccaaagtcagatacttggaaggccaatcagcatctacctctgcaccaaaagttacaggacttccagggaagtccatacagaatccaaaagagtatgcaaccgctcacgccatcaccatctgtcatctcgccatctcactcaatccacctcggaagagaaggccgccataatcgagagaatggtaaaacgattcaaacctactccactaccctcacgtgctcttccgtggacattcaggaaagcatggatggagagatacaagtctgttgcagcgaacgagttggacgagattgaagctgtgatgccactaatggaaaggctataacctgattcctgatcctccaaagatgtgagaatttaatactggaaaaaatcaagatgtatcacgattcggatgatgaaagtgatgccactccatctcgagctgctgataagaggattgttcaagagaagttagaagatcctggatctttcactctaccatgttccattggggaatttgctttcagcgattgtctgtgcgatctcggagcctctgttagcttgatgccactctctgtggcaagaaggttagagttcattcaatataaaccttgtgacctgactttgatccttggggataggtcttctagaaaaccgttcggcatgctgatagacctaccagtcatgattaatggcgtagaagtgcctacagacttcgtggtgctggatatggaagtagagcataaggatcccttaatactgggaagaccctttttagcgtcagtgggagcagtgatagatgtcaaggaagggaaaataagtctcaaccttggaaagcatatcaagttgcagtttggcatcaacaaaactccacaagggtcaaccgaagatggaagaacctctggaaatgataaagcgatctcaggagaaggatatgagactgaacgagtgaaagaacttaaaaagaggtctgataagcaagatgaaactatagagaagctagcccacactattgaggaacttaggagtaagctgaatcagatgcaaaagaaagctcaacctaaaggcgggattaacactatcccgagaaaataattcacttcaagatggtctcaagagacagattaccctccagaaacttccaggaagcctattttgaagaaaggggaattgagtattctgctacaaacttctccagggaggacgctgggtatgatgatgatactagagaggactatgcagaccctctctatcattcattttcttcttgatgagtgtgaggagtcaagctagagactttaaacaagatcacttgggaggaagtcccatgattatccttgtaaataatttttactttcttgttatttttgatttgttttagttgtgtttatggttctcaggaaaaaaaaaaaaaaaagaagtaacgtgaaggtagagtaaaaattcaaaacttttactctactgatggtctagagatcgagtacattggtcgagtgtgagtgatgtttaaaacccaaaaacttttaaatcattattttactcgacccacagaagctacagagacttgtagggatttcctgcagtttacagtaggttttctgcaaattttcccagtcaacagagtgtggaccacgcgctgaggataagatggatagagaatctcaaactcaatctcagccattcctttttacatttcactcgaccttgctatcttctgttttccaccactcgatcaaaaaaatttactcgacttaataatccttagctgcactcgacctccgccgcctcagcagaattcaaagattcactcgacccatcgatctactcgacccccaggaatcactcgacctccccgccgccgtcaccatttcattccatccgtcacccgaccagaccagatcaatcgattcctttttgctatactcgaccaattcatccacatcaaccgccgtctctttcaaaagaagttactcgacctcgtttcccagtctcatagccgcactcgaccgacaccgcctcagccgatttcaaagaagcactcgaccacagaaaagcactcgacccctacaacagcaactcgacttcttgttcttaaaatttgacagagccttccaacttcggagaagttactcgatccagtttgtctaaggggaactcaggaacagctcagtctactcgagtacagaactgtactcgatcaatagggtctatttcattgcatattgataacaattttggtttcattgctatctttgagctaatgtattgacattttagctttgagttctaaatttctacaggggaatcatgagcaattacagcggctgttcttatgttgatcctgactacaacatggatgagacagagccgtcatcttcaaggccagaaagagaacaaagagaatatgatagcttcagaagaaaggctgagatagcccgagggaagagagcgatgacagagaggtatgagcttatacactaagatctggaagacgagtacatgcctgaacagactcgcagagctaccaaacttctgcacaagactgacgtattgcctgctgaggaatatgttaggcttttcaagctgaatgagttctgtagcacgaggtatccttgctcgacctcacttgcacaactcggattgttggaagatgttcagcacttgtaccaaagttgtcatctggacactctgatagcttattcttatgtagcgtatgaagatgagacaatacaattcctttccacgctacaagtagagctctaccaaggtatgacctctgatgagttggattgtgaaggattgggattcttgtgattttctgtgtatggtcatgagtataggttatcaatcaagcgcttggaaggattgtttggctttcccagtggaacgggatctatgcccaagtatgaaagagaagagttgaaagacttgtggatcaccatcggcagctctgtaccgttgaatgcttccaggtcaaagagcaatcagatacgcagccctgtcatcaggtacttccagcgttctgtagccaacgtactctactcccgagagattacagggactgtcactaactctgatatggagatgatcgcaatggccctcaaaggaactctctgccaaactaaaaatggcatgtccctccaaggtgaagtcaatgacacacctctctctatacttcttctgatccatctgtgtggatacaaaaactgggcggtcagcaataaccgcaagagagcacgaggcgctctgtgcataggtggcgtggtgacacctattctgatagcttgtggagtcccactcatttctgctggactcgagccgcgagcaatggatatcgagcacctacgtcactgcgaattcctggagtttgcaatggttgacgatttccacaggttcaggtttgagcactctatagacaggagagataacatccttctccctagccctgaggtcacacggataatcgagggagataacattgattttaggcctgagattggacgcctctactatgagaacgctccaccattagatgaggacgatcttctaggagaggatgctgaggatgggatggatgaagacagagcagtggagttcgacactagcatgtatcactttggtgaacatgtacccccagcgagggagagcaagagcttgcgtgaagctcataggaataacagtaaactttagaagtggtgcaagaagcaggacaagctgctcgccaagtgtttcaagacgatcaagtttctgacagataagctgagttgttcctcctccgctactgctattccacagggacagcctcctctagagattctatcgaggagatttgatgagcgtgagcacaggcaaccgctcagtgagcagagagtctcacatgtcaaaactaagcattcgtcatttgaatcccaggagcacaaca

SEQ ID NO: 157502 - DNA, 1053 bp, Arabidopsis thaliana landsberg
cttaagattttaatcaagaaagtattcacctttaatagtttaatcattttggtattagttactaatattttcctccaattgtcttgttttcttcttagctagtctctcctctgtccccaaaccaagaaacaatttgcaaagagaaagcaaaaggtttttgaagaagacccaattaaaaaagatggaaattgcaagtcaagaagatcatgatatgcccatcccattaaacactacatttggtggtggtggtagtcatggtcacatgatccatcatcatgatcatcatgctgctaattctgctcctccaactcacaacaacaacaatactactcaaccacctccaatgcctatacatggtaatggtcatggcaacaattatgatcatcatcatcatcaagatcctcatcatgtgtggtgtacaacgctatcatcaagaagcctatgataaagtacaaggagtgtctcaagaaccatgcagcagctatgggaggcaatgctactgatgggtgtggagagtttatgccaagtggtgaagatggctccattgaggctctcacttgctcagcttgcaattgccacaggaacttccatagaaaagaagtggaaggcgaactcgcagccaccgccatgtccccttaccaccaacaccctccacaccgaaaactcatgctcaaccaccaaaagatcagatcagctatgccacaccaaatgatcatgcccattggagtctctaactaccggtacatgcataacaactccgagtccgaggactttatggaggaagatggcgtaaccaccgcatctagatcgctaccaaacctgccatacaaccagaagaagaggttcaggacaaagttcacgccggaacagaaggagaagatgcttagttttgctgagaaagttgggtggaaaatacaaaggcaagaagattgtgttgttcaaaggttttgtgaagagattggagtgaagagaagagtgcttaaggtttggatgcacaacaacaagatccatttctccaagaagaacaacattaacctcgaagacaacgacaac

SEQ ID NO: 157503 - DNA, 1457 bp, Arabidopsis thaliana landsberg
aatagagctgttttacaagctgtggttgcgaagatcttcgctagtacgacttccattaaagctgcttacgcagagcttcagatggcgcaacgtccgtacgataacgacgctatacaagcggcggatacggcggtggtcgaagagcttagagctttatcggagcttaaacggagttttctcaggaaggaattgaatctgtctccgcaagttgcgattatgttagctgagatccaggagcaacagagtttgatgaggacttatgaaatcacgattaagaaactcgagtttgaagttacggagaagcaattgaagatcgatgaattgaagatgagttttgaagagagtttggttgtgaataaatcgttggagaagaaactctcagcgagtggatcggtctctgtgtttgataatattgaaattcgaaatttgaatttgagtagttttgttcaggttttaggttttacgttgagatctgtgagaagcttcgtgaaattgattgtgaaggagatggaatcagcgagctgggatctagacgccgccgcttccgccgctgtttcggtgaacgttaaaaacgcttccaccgttttcgcgaggccgagtcaccgttgtttcgcgtttgaatcgtttgtttgtgggaaaatgtttgagaattttggagctcctgatttctcgagacgtgaggaattcgaaaagttgagatccgttgacccgattcagtacttgacccggaacccgggttcgtcttttgccaggttcgtggttcataagtacttgagcgttgtacatgcgaagatggagtgttctttcttcgggaacttgaaccagaggaagctggttaactcgggtgggtttccggactcgggtttcttcgcgacgttttgtgaaatggcaaaacggatctggcttttacactgcttagcgttttcattaagcggaaacgtcacggtgtttcagctcaaacgaggttgtagattctctcaagtatatatggagagtgtgaaatccggcgatgagtcattattctccggtgataattcagatattcgggtcgggttcacggttgttcccgggtttaaaatcggcgagaatgtgatacaaagccaggtttacttgactccggttaacggttttacttcatgaataggccaatccaaagagaacgcggtgggttgtgttcacgcgccggggaagaaaaaagagaggcggcgcgtgaaaaggaaatggtggggacatgattccttgggggcagcaagactggcaagtgggacatgttttaagaatgtgacggagacagaaaatggcgcgagggacaatcattatgaaaaaacagtttagattagtgatcattttttgtttttaaaatttttagattatacagcttaaagtatgaagggcatagaagaaaaataatattctgtgtttttctataacgtattacgtaaaagtttttgttatat

SEQ ID NO: 157504 - DNA, 2382 bp, Arabidopsis thaliana landsberg
  unsure (1)..(2382): unsure at all n locations
agactattccggggactacaagcctctgtcttctctctcgtttagggttttattccaaaattccgtgcttcgatcccgaagatcagaaaaaatgggtgatgagattgtgcctccggcgaatcagttagccgccgataacttggaaaacgatggatctacggtgcagaaagcgcaattttcagacagggttctgattcgatcgattttgggcggcggagctaaactcgccggtcaaaaggttagaatcggtggttgggttaaaaccggaagacagcaagggaaagggacttttgctttccttgaggttaacgatgggtcttgtccagcgaatctccaggttatggttgattcatctctttatgatctctctaggttggttgcgactggaacttgtgttactgttgatggagttttgaagattcctccggaaggtaaaggtttgaagcagagtattgagcttagcgttgagacggtgattgcggtgggaactgttgatccgactacgtatccgcttcctaagactaagttgactcctgagtttctcagagatgtgcttcatcttcgttctaggactaacttgatctcagcagttgcaagaatccgtaacgcgcttgcttttgcgacgcatagtttttttcaagaacatagtttcctttacattcacactcctatcatcacaacaagtgattgtgaaggtgctggtgaaatgttccaagtgacaaccttgatcaatcacactgagagggttgagcaggatctcattgataaccctccaccaactgaggctgacgttgaagcggccaggcttattgtcaaggagagaggtgaagctgttgcgcaacttaaagttgccaaggcgagcaaggaagagatcactgcttccgttgctcaactaagtgtagcaaaggcgagtttagctcatgttgaagagaggttaaggcttaagcctggactacctaagaatgatggtaaaattgattattccaatgatttctttggccgtcaagctttcttgacagtttctggtcagttacaagtggagacctatgcttgcgctcttagcagcgtgtatacatttggtcccacttttcgggcagagaactctcacacttcaaggcatttagctgagttctggatggttgagcctgaaattgcttttgcagatatacatgtaataaacatagagataatatcctttggtttcttctttatcgtaacatagtgtatcttagaaacattctttgaaatttgtgtaggacgacatgaactgtgcagaggcgtatgtgaaatacatgtgcaaatggttgatggataaatgtggcgatgacatggaacttatggataagaacgtcgacgagggatgcactaaaaggctaaacatggttgccaaagcctcgtttaagcgtgtaacatacactgaagcaatagagcgacttgagaaagctgtagctcaaggaaaggttgtttttgataacaaagtggagtggggaatcgacttggcctcagagcatgaaaggtttgtctattcctcaacttcaaacacttgcaagaaatggttagttggtaaccaaacttgtcttgcaattactacagatacttgacagaggttgagtttgatcaaaagccaataattgtgtataactacccgaaaggaatcaaagctttttacatgagacttaacgatgatgagaagacagttgctgccatggatgtccttgttccaaaggtaataaataaataaaactcatcatcttgttataataacgatgatgggaggaatattttcgttatatttgttttctttgtatatatatattaattaggttggagaactcattggtggaagccaaagggaagaacgatatgatgttatcaaacagaggtatgtgaaagtgaaaccaatattcattttttggcttctgttttgtgatgaagcaatatctgtctggtgttataataataggatcgaggagatgggtctaccaatggagccatatgagtggtacctagacttgcgtcgttatggaacagtgaagcattgtgggtttgaacttggcttcgaacgtatgattctcttcgctactggacttgataacatcagagacgttattcctttccctcgctatcctggaaaagctgatctttgattcctcttctttacaccatttacatacacaatttcgcttttannnnnnnnnnnnnnnnnnnnnnnnnnnnnnnnntagtttactttttaagttggttaaaggaaaattgtattgacttttgattttttatctctatggatgtggttttgttcggttatcccgatttggctattgaatgataggagaaccaatttgagatataccacaaacatataggagaaccaatttgagatat

SEQ ID NO: 157505 - DNA, 1067 bp, Arabidopsis thaliana landsberg
atgggagatcaccaatggttcctatggctgttcttgtttatgtttctctactgttctctgtttcttattcctccacgttcgtcatcacaaataactgtccctttactatatggcctggaactcttgcaggctctggcacccagccactacccaccacagggttcaggcttgatgtgggacagtctgttagaattcccacggctctaggctggtcaggtcgtatttgggctaggactggctgcaactttgatgctaacggcgcgggaaaatgtatgactggagactgcggcggaaagctggagtgtgctggtaatggcgctgctccgccgacatctcttttcgagatcacactcggtcacggttctgatgacaaagatttctatgatgtcagtctcgttgatgggtataaccttcccatagttgctctcccgacgggtggtggactggttggcgcttgtaatgctacaggatgtgttgctgatatcaatattagctgtccaaaggagcttcaagtgatgggagaggaagaggctgaaagaggaggggttgttgcatgcaagagcgcttgtgaggcctttgggttggaccagtactgttgcagcggtcagtttgctaacccgaccacatgccgaccgtctttatactcttccatcttcaagagagcttgtcccagagcttatagctatgccttcgatgatggaaccagtactttcacctgcaaggcttctgaatatgcaattatcttctgccctggcaggtatatatgatatgccctttctcattttaatttgttacaatgctctctgcaacctttcaaaaactgtctgcatattctgattgattatctttccccgtattgaatccagggtaaaaagaccagacagtctgaactcagatcctcccagcccacctcagaatcagttagggcaacctatggctcccccaactcaaaatcagtatggtcaacctatggctcctgcacctcagtatcagtacggtcaacctatggctccaccgactcaaaatcagtatggtcaacctatggctcctccaactcaaagtcaatc

SEQ ID NO: 157506 - DNA, 2310 bp, Arabidopsis thaliana landsberg
  unsure (1)..(2310): unsure at all n locations
atggcggcaccaaagctggaatctttcaggcggggtagcatgttcgacggatctttcaggcgaggtagtatgttcgatggttcgtttcgacaaagcatgagagataggcttatcctacagagcagaggctattccaatgtcaacgacgatgacaaaacttccgtccgttgctgctcctacaggttatatacatacaatctctccttctttccagaaccttctattgaccaaacctttttgaagccattttatcttaatatgatgcctcttggagtccaatgtcaagtaatctcaaatggttaagtcttgaaatgctattggtgttgtttgcagctacttctctgacaagatcacgggggttgtgaagaaattaaaggatgttttggttacggcatgggagatgggaacagctgacccgaggaagatgatattctcggcaaagatgggtttggctctgacacttacctctatcctcatcttctttaagatcccaggattagagctcagcagccactatctctgggcaattcttacagtagtcgttatcttcgagttcagtataggtaaatgcaacagactttacacatcaaatttgagcattctaaaaactttcatacctgacgtgtgatctgctctttatttttgtgtaggagccacctttagcaaaggatgtaaccggggactaggaacattgtccgcaggaggactggcgcttggcatgtcttggatatcggagatgactggaaattgggcagatgtttttaatgctgctagcatctttgtagtaggtatatatacgaaatcatgatgtgtggtctaaactaaagattccacaatctcattctgatttctgacaatatcgcatgcctgctcttgtatcagccttttttgcgacttatgcaaagctatatccaacgatgaagccttacgagtacggattccgggtgttcttgctgacnnnnnnnnnnnnnnnnnnnnnnnnnnncaaaacaggggaattcatggaaacagctgtttcaaggttccttctgatagctcttggtgccagtgttggcctcatagtgaatacttgcatttatcccatatgggctggggaagatctccataacttggtcgccaagaactttgtgaacgtagcgacttctctggaaggtttattattaactctctccctgaatttgagtttctggttgaaaagcttcttagtctgtttccaatccatggaaaatgttcctttgtgcaggttgtgtgaacggatatcttgagtgcgtagcatatgatacaatcccatctaggattatggtctatgaagctgtcgcggaagatccagtgtacagtggttacagatcagccgttcaatctacaagccaagaagacaccctggtaagattcttttaacacataagaacagcaacaacattatcaaaagaccagcttacttgagatcctcacatctttttcttgttgttggtgtgattgtgaagatgagttttgcatcatgggagccaccacacggaccgtacaaatcctttagatacccatgggcactgtatgtgaaagtaggtggtgcattgaggcattgtgctatcatggtcatggcgttacatggctgcattctctcagagatccaggtactttccaatctttaagtcagaaacattctataatcttcagatcttaagagagatttgagacaagagtatgcaaagtaattgcaggctgcagaggatagaagacgagaatttcgtcatgagcttcaaagagttggcaatcgaaggagcaaaagttctgcgtttgattggagaaaaagtggagaagatggagaagctaggccctatagaagagattctaaatgacgttcaacgtgcagcagaggagctacagatgaaaatagacagtaaatcctaccttcttgtgaacgccaagaattgggaaatcgggaaccggcctagggttagggatttgactgatgaacaaaaaatctcgaatctcgattttgatctaagtcggatcttggctcataaatctcagagtgaagccactcttcgtcctccgaagaattgggatgatgttacacctgcaggtaacttgagttcggcgccgatgcttccttacctgcaatcaaggacgatgatacatcaacagccgtcgtggcctagccggatctctattacgccgggaagtatgttacagccaccactgggagagccgggaaaaatgtacgagagcgcgagtaatctttatctagatacgttcgcttcgctactgatcgaattcgtcgccaggcttgagaatctcgtgaatgcgtac

SEQ ID NO: 157507 - DNA, 1385 bp, Arabidopsis thaliana landsberg
atgggggttgattactacaatgtactcaacgtgaatccaagcgcaacggaagacgatctaaagaaatcgtatcgaagacttgcaatgaaatggcaccctgacaaaaaccctacttcaatcaagcaagaagctgaagctaagttcaaacaaatctccgaagcttacgatgttttaagcgatcctaacaaacgtcagatctatgatcaatatggtgaagacggacttacggcgacagaagcaacggcgtcgtctcaacaacataattactcttctggtaacaacaataattacaatgcagggtttaggtattatccacgtgatgctgaagatattttcgctgagtttttcggtgcatctgagaaagtctttgatggtggcgtcggcggtggcgggaggtttaaaagtgcggaggcgggaagtcagacgaataggaaaactccggtgaacaggaaagctccggcgattgagagtaaattggcttgtactcttgaggagttgtataaaggtgggaggagaagatgaagatttcccgcgttgttcctgatggtcttgggttagtatttcataacacatgatctaaatgaaatcgccttttttcattcagtttcgttcgttatattagtagttcgtgattacgtaaattatatttggaaaagtgttgaccaattattttgtggtttcttgtgtgagtcaatggataatcctctgtatatatgctctgtttttgtgatttatcttgatggtaaaattttgtaatcaagacgaaacaattatccaaattgttgtgtttttgacatttttctttgataagttttctttatttttctctgtttaatgttgttgttattattggtttttttttttgtttttgggacggttttcctttgtttaattgcgtttttatctctagtgatgttgatattgtttgatgattgatgtacctaattattttcttgttgctacgtttgatttttctaagcctagttgcttttttggttgtgatcaatatatattcatgttttgatatcagaaagtcaaagccagtggaagagatcttgaagatagatataacaccaggatggaagaaaggaactaagataacttttccagagaaaggaaaccaagaacccggtgttactcccgcagatctcatctttgttatagatgagaaaccgcattcggtttacaaaagagacggtaacgatcttattgtagacaagaaagtttcgcttttggaggctttaacagggatcactcttagcttaacaacactagacgggaggaatctgactatcccggttttggatatcgttaaaccgcgtcaggagatagtgattcctagtgaggaatgcccatctctaaagaagttcaaagagaggagatct

SEQ ID NO: 157508 - DNA, 917 bp, Arabidopsis thaliana landsberg; identical to SEQ ID NO: 190
  unsure (1)..(917): unsure at all n locations

SEQ ID NO: 157509 - DNA, 4369 bp, Arabidopsis thaliana landsberg
agcaaatctcttggtcgagtctacaaatctctggaattcgtagatcagacatccatttgaacgtcttttggacgctggacgtctatgatcgaatctccacattagccagcgaaaaccgcataggggccaagcgaatccagcaaggtactaacctaaacactaaccacctaactaacctagagattaccctaatctaatccatcctcaagaaccctaatcatactcaagcaacattctaaagaacacaaacccaaaaattactaaaatcataccaaaatgtagatctaaacaagctaaacaactttaccgaaatcttccttatttgaaagtagtccctacacgtttttagtcacgaatatacctaaatgtttggtcagtattagacctaagttttgtttttagagattgttacacattttgagagaagaatccaatccttttagagaggattctgaactcctttacttttactcttaattcatcaatgcagactattcagaatatgatttgtgtttcttttatcatgtctgagtaatcaccttgttgggtttagggagtttcaatagggatttagatggattagtagatcgacaaccccttagggttatttttatggttcttcatcacgattaatcttactactagttttagattgatcacctagaacttgatattagataataggtatgcccaccataggtacttgttatttgaactatcatagatgagaataggcatttaagaaagaacatttaggctcattgaagggctctggttaagatactagctgaactaatcaaaattaataataatgcatgctttagtataggatttctcggcttctccggttatcttagctctaagtatagagagttttgcggaacaccactggttactctaaaatcatagtttgagtttgagaacggtgcgataaaaaccctgatattagctacatctataatttatctatctcccgagacaattctttagacccgacgctttaatcacttgaatctacacctcgtttacttgcttatttgtcgcttacatttaattacttcatctagcctattaaataacatcataagtctattgtgtgaacatcgagagctcattggaatttgacccttaagtgctaacgactatctcttattggagggagtaagcttaaggcaatttgagcactatgaaatttggcgccgttgccgaagttctcttttagttcaccattagactaggtgtccttttaagtctagatacttcttttctatcacctactcacgtgtttctttgtctgttggtctcttgtgtttcaggtacctacagattgggaatcacgtttgaatggcagactttcacggctgcgtcgaccaacaccatcagggtgtcgatcgacacctctgcagaaccagacggctacaataggcaattttaacagaactgatctcttctacaccaaccgatcagcattcaagctacctccatttgaaagagaagactttgcaatacaccctgcttattatgatcgtgtatctagaggaaagtttagaggatctcctgatgaaacaccattagatcatttggaagtcttcgaagacatagtttcctctatcaaagtagaaggtgtaccagctgattaccttctttgcaaactcttcccccactctctcgcgagcagaggaacatcatggttgcgtcaactggaaccaggtattaaccaattggactgatacaaagaatccatccatgaaacacttgtttgcaaatctcttcgttaactcaggctctagccgagtcccttagtgcatcttggctacgtttcagttcttatcagcgtgaatgtccccaacatggcttccaagagagacaactcatctacctattctacaaaggaatagacaagccataccggagtcaactcgatgcagcaagctattgtaacttcatgacaagaaccactagtgaagcattactcctcatcacctatgctttaacttgtctttcgacgcaggaagttgacatagaacaaagaatttcagttgagatagccaccgcgagcaaagagactcctgtttcagcaatttctgctcctatccaagccccccctccaccctcatcagagacaataatggaatttatgcttgcgcagcttcttgcaggcctaaccaagcttgatagcaaatatgattctctctccacaaatctcattagcaagtttgacaatctacgctctcaattctccaatctctcacctacatcagcttctatcaatgtagttacactacgcagcagaaagcagctcaacccaatacttcagcgcgaacaatcggctcagcattcatcttctccaattgcagaaaacgaatcagtgtcgatcgatacaccaaggtgtcgatcgacaccaattactcttgacgactctgtttttcctttgtcgagtggaatcgacaatttcgcggaggaggaggaaactattcccgatggtgttgatcgacacccagctcctgtcgatcgacacccagctcgttcagacaatgtgcaaattccagctgcaaccaagtcagcgaatcggcgaattctcttccccaagagtcctaaaaaatcaagacaagccttagatgatgtcaaatgcaaggctatgattgataagctaattgttgagatgcctctagttgaagctattcatctatcgcccacaatcaaaaggtatgttaagacaatggtcactgagaatttgacgaatgaatgcagtgttatgatgatttcaaagcaaggcagcgacatcattcaagaacgaatcccaaggaagctacttgatcttggaacttttgtacttagtgtcaccatcaatcacgattccttcccaagagctttatgtgatgcggttctagtgtgaatctgatgcctcgttcagttgctatgcgtcttgggtattccaatcttgagcctacctttatcactcttgtgttggcagatcattctacccgaattccagatggaattcttattgatgttcccgtgatgattggaaagagcatgattcctacagactttgtagtcttattaccttatgagaaagaacataaggatccattaatctttgggagatccttcttgcacacagctggagcaatcatagatgttcgacaagggaagatagggctgaatgttggcgatcatactatgcagttcgatatgaacactttttcaagaaaccgatcatagaagggaaaaccttcttgatagattcttttacttcatccgaatctgaaagaagtggttaagaaagagattatgaaactgttggaagcagggattatctatccgatttcagatagcagttgggttagtccagttcatgtggttcctaagaagggaggtgttacagtagtcaagaatgagaaagacgagttgattcttactcggacaatcacaggacatcggatgtgcatctattacagaaagctgaatgctgctaccaggaaagaccatttccccttaccatttatcgatcagatgttggagaggttagcaaatcataagtactattgcttccttgatggatactcaggattctttcagatcccgattcatccagatgacaaggagaaaacgactttcacctgcccctatggtacatttgcttatcggagaatgcccttcggtctttgtaatgctcctacaacatttcagagaggtatgatgtctatcttcacagacatgattgaggatatcatggaagttttcatggatgattttttagtttatggatcatcgtttgaggattgcttagagaatctctacaaagtgttggcaagatgtgaggagaaacatctagttttgaattggaagaaatgtcactttatggtgcaggatgagataattctcggacacagaatttctgagcatgttatagaagttgatagagctaatatcgaagttatgacaagtcttcaagcgcctgataatgttaaagcagtgaggagtttccttggacatgctggtttctacaggagattcatcaaagacttcagcaaaatcgcaagaccgatgactgctttactctgtaaagaagttaaattcgaatttacataagagtgtcattgttggacatgggcattgccccttcaatgttaggaggcccaaaacagatatcaacaaagaagagggccttttgccattaaaaaggcccattaggtcgagaagggcaaaatcataatttgcaagggagacagaacggaatttacggttcagattccctataaatagagagaaacactattgggagcaagatccgatccacaggttattagctgagagacaaagagaatcgttgccttgcccgaaatcgatgcctagcccgacctcg

SEQ ID NO: 157510 - DNA, 2899 bp, Arabidopsis thaliana landsberg
tccttgtccttctagcttctttaacttactcctcttctccttctccctaagttcaaaagatgattgcctcagtggtgaaggtgcaacatggtgttctcttggctcatatgaagactgtcttggtggcaaaggcggatcatattgcataggttcatgtcgagtggatccacttctcctaaaaggcatgtccagtggcatcaccgtactagaagaagaacagcggaacttgagttggagagcgttaaacttcatgttgagtgctgctagagccttatcttgaagtttacaccagctttggagaaaaccaagacgcttgcgaatttccttcgagtctttactttgccttggcgcggagtactcttcaaagtaaaactgttgtgttgcgtacgactcgcccatgggttctgcctcatcatctgaatgatggattggagcctcatcatcgttcactccttccatcggcatagcttcatcactctgcagtatagaggttctccactggcgcgcaaaactcaatgttgccaccatctctgatcaaagtggaagcgggatttggaaggagaaaaatagattgtcttgctgcggggtgatcgaacctatatttaaagaggccattcttctgttgcgaccaaaaacaattggaattgataaggtgttgcatatcaatccagctcggaggaatcgttcgaatgcagaggtacaatgcatgctctcaaaattggggtcacaactcctgccacaaccattcttcatggtttcttaagtcccttagcccatcctctataacacagcagatgttcgattatgtataatgagactgaagcgtctgcctgatctccagctagaactgtaccatctgatgctaaatcatatagctcctacaatgctgtctccattaattctagctctccattgtcaaaggtcccattcctctctcttgcaaatagtgcactagctaaagacctatgaaagtacctaaccaccggactccttattcgttgctcttggtcctagaggatgaaaacccatgtttagacccaagcatggccaagaatgactgaagctctctcttgtcaaaacgatgactcgtgtctttttcgcttgggaacccatacataagctctaaatgatcgattggaagccgatactctacgtcatagacacagaactccaagtatcccaaacttccgtctggcctgattccatcgtcctctgactctccatatatgaacaattctacagatgaaagaaaattgaccgtctcttcctcatacccctccattggccgaaacatatgaatattcaggctgcactgcttaaacatgtactctacatcatcatagatgcggagtctctccatggtctcgggatgagggtatcaagttcctaaaaactcattgcacttcagcagcttgtagtacttgtttcgagttgcacacttttctgattccaaatcatcatcgcctcctttctctgtttggtcatcttcctctggtgaagccatttcttcctcgaagtcttcatctaccagctccaacctcctccccacgggcttctttcctcgagtgatatctgccttgttcctcgagaattcccttgtagaggacttactcgaccttcgggatcgagtatttccagatggagagctgaaggtctcttcttcttgcatcacttcctcctcttggctcgattcactatgatcgatcttgaaacttgcttgctctctcctgctcaaccccaagggtgtcaatccagtccactgtattgctagcactcaagatgtgaacaaaaacaactaagtcaagccagattataatgatggtgggtttctagtaacaatcctaggtcaggattcaaacaagtaaagatgagaacttaacagccctactcgatcattgggtcgagtagaaccaacaggtgacaaaattaagaactaaaatgcaatcaaaaggggatgcaaatagaggatacaaataacaggtaaataaaagtgcaatccaaaaggggatacaaataaatctaatagaagttttaatgatggattcattgataagggcaactctagggttcatctgatggctaataggctaaaggtagatacccatgacgatagattcaaaaacctggtcaatccactctcgtgacagagacccccataactccaccacttcctaatctcaactctcgttgatgaaacatagcagagcagggtttaagaaccctaatcactactcatgtaacattctcaagaacacaaacccaaaaattactaaaattataccaaaatgtagatctaaacaggctaaacaacattacttaaacaatctgatatgtctataatttgcatgttttacacatccttttatcaccattttgagtctagtttcatccgtctttcatagcattcaccataatttttgtacattttgcatctttagtcgagtctaggactagtcttgcatacattctgcatttaggaattgttttggagctattggtgctcacaaagagggaaaacataacagaaagtcacacttccaccaaacatactcgatcactagtagcagagagggaagctgttagctcagcagtccatccagacccttctactcgaccgcagaggagaggaggcagtccattctcaattctactctatcgtagaggcgaccaggcagtccactttgccagtccaccagttatactcgatcgcagaggagaagaaccagtccatcctgacagctgacacacttactcgatcacagaggccaagaagcagcccaaaccattctgtcaaccaacctactcgaccaccacctcgaccctctgatcaatccgcactcaaccagacaacctgagcatcgaaaagagaagagaagagaaagcccattcgaagcccatc

SEQ ID NO: 157511 - DNA, 1092 bp, Arabidopsis thaliana landsberg
atggtttcgttgaagctccagaagcgtctcgcatcctcagtactcaagtgcgggaagagaaaagtatggctcgacccgaacgaaggaagtgatatctccatggccaattcgcgtacgttgttcttcatactctcaaatgttgttgatcagatttaactttctcggtctcgtgcttgttttggtctgcgatcgaagcttgttgataatgatagtagaaaaaaaggatactgtagcttacttcgtaggtgacgttgaatgatttgaattcagtctgatgaagttgagcttggaaatggtgttgctatgaatctgatttttgaaattctgtaaaattttgtttagtttggacttgttcagatgttatcgtaggtttagtagctttggattgactatgttcttctcggattcatggtctatggtttctgattgttaccaaatcaacatgccatcatagcactctgttggatcatgattcttgtttgttttctatacgaaatggtgatgcatctatgtgcatttgagatttgagtgtaattctgattaagtattttggattgttatggaacttcagggcagaacattaggaagcttgtgaaggatggtttcattatcaggaagcctactaagatccactcacgttctcgggctagggctttgaacgaggccaagcgaaagggtcgtcactctggatacggtaaaaggccaaatgagcttttcctgcttgaaattccttttgattattgctggtttagtgaacattgtcttttgtatcacttcaatgttttttaggtaagagaaagggtacaagagaggcaaggctaccaaccaagattctttggatgaggagaatgagggtgttgaggcgtttcttgagcaagtaccgtgagtcaaagaagattgataggcacatgtaccatgacatgtacatgaaagtgaagggtaatgttttcaagaacaagcgtgtgcttatggagagcatccacaagatgaaggctgagaaggctagagagaagaccctcgctgaccagtttgaggccaagcgtattaagaacaaggctagcagggagagaaagtttgccagaagagaggaga

SEQ ID NO: 157512 - DNA, 186 bp, Arabidopsis thaliana landsberg
ccggtttttgtcgcggtgacgctttttgtgttgctgactccgggactgctgattcaagttcctgggataggtcgagtggttgagtttggaacgtttcagacaagtggtctctcggttattgttcatactcttatttacttcactcttgtttgtattctcttgcttgctctccaaattcacatgtac

SEQ ID NO: 157513 - DNA, 1666 bp, Arabidopsis thaliana landsberg
atggaaatgacattgatggtttctctgtgcttaacgaccctcttaacccttctcttacttaaaaaattcctcaaacgaaccgccaaaaaagtgaacttaccaccatctccatggcgaattccagtgattggaaacctccaccagctcagcctccaccctcaccgctccctccactccctcagcctcaggtatggccactgatgctgcttcattttggccgtgtcccatactcgtagtctctccagcgaagagctcatgagatattgaaacacacgatcttaagtttgccaaccgcccgaaatcaaaagccgttcatggacttatgaatggtgggcgtgatgtggtttttggtccctatggagaatattggagacagatgaaggtatttcattactaagccctctttcatatatatgtatatttatcttttttataacttgcacccacacatatatatgtaccacaaattctcatatatagtatatatatcctttaatcaactgataatgattttttgttgtggctttggatgaagagtgtatgcattctcaatctactcaccaacaaaatggttgcatcctttgagaaggtaagagaggaagaggtaaatgcaatgatggagaagctggagaaagcaagttcttcttcttcatcagaaaatctgagcgaactctttataactctaccaagtgatgttacgagtagagttgcgttgggaagaaaacatagtgaggacgagaccgcaagggatctcaagaagcgagtgaggcagatcatggagcttttaggcgagttcccaatcggggactatgtcccggctttggcatggatagacaggatcaacggtttcaatgctagaataaaggaagtaagtcaagggtttagcgatcttatggacaaagtggtgcaagaacatttagaggcaggtaatcataaagaggactttgtcgatatactgttatcaatcgaaagcgagaagagtattggattccaagctcaaagagacgacatcaaattcatgatattggtatgatcatttataaaccaattcattaataattctaacaaattaatgcaacatttttattttggactaatgacatgtaaaatgtctacttcatatatatatcaggatatgtttataggagggacgtcaacaagttcaactctactagaatggataatgacggagctgatcagaaatccaaatgttatgaagaaactccaagacgagattcggtcaaccattaggccacatggttcatacataaaagaaaaagatgttgaaaatatgaaatacttgaaagccgtgattaaagaggtgtttcgggtgcatcctcctcttccactaatacttcccagattattaagtgaagatgtcaaagtaaagggatataacatagccgcaggaaccgaggtaaactaatttctatcaaatcaaattcttaaaacatggtgtacgttagctacatcatatattccaatatatagaaaaaatgatttggctaaacttgtatttgaaacatgtgtaggtgataatcaatgcttgggccatccaaagagaccccgcgatatggggaccggatgcagaagaattcaaaccagaaagacatttagattcaactttggattatcatggaaaagaattgaacttcaacccattcgg

SEQ ID NO: 157514 - DNA, 1672 bp, Arabidopsis thaliana landsberg
  unsure (1)..(1672): unsure at all n locations
atggatcctgaagaatcaagacgaagagcctctgctcgtgctgtggctnnnnnnnnnnnnnnnnnnnnnnagaaagatccggtttggaatcaggatgctgtgagtccaggttttactcggatgacaggccgagtacaatggccgagtatggccttggagtcctctatggctcgttctgcggctgctcgagaggaaattgcaagaggcaagagggtttgggagtccgagccggctgcaatagaggaggagtccatgctagagaaggaagcatctgaggaagatgtgcaaattgatgaagaggtcccgatagttcttacaaggagaagaagaaaccacccaaggagaaagaaagagcctaccattgaagagcactaccagtatctcatggagctgagttttgaggggacaagatatccccataaacctaccatgcaagctttggggatatgtagggatgttgactacctcatggagatggccaagtggagaccttcttctcctacaagtgtgaaggataccaaactgagagctgccaattcctagccactttgaagcttcatttctatgctgaagaaagggagagagagatacataagggagttggctatatcacattcatggtgtttgggattcactactccctccctattaggcagttggatgttgtattcaagttccccaccaagtatgggatccgccaaaacttcagcaaggacgagctccatgatctatggttgacaatcgccggtccactcccctacaagtcatctagggccaagagttcattgataaggagcccggtgcttaggtatctccacctttggattgcaagtgccttcttcccaaagaagacaaccgatcatgttaatgagggagagctgaagatgcttgatctcaccttatgtttcattttggggcaaacaaggaagaatatagtgatggaaggggatagggctgatacatccctttcggtggtgttgactgatcacttgataggtttcagagagtatgccactgatatccaccaatccggctatggaggaagcttatgtgctggaggagtgatcacacccatcctaatagctgttggagttcctcttcacactcccactgtcacagcaaactacattgatatggagtacttgaagaggaaatgctacttggatagatctgcctcagctgatcaactccatttcaagttcaagcaccccacgctaggtctctctaggttagcacttccttgcaaggagtacaccacagttagaattgggaacaacattgactttgatcctccaccatcaatcttagtcaatgtccttgcgcctttacaagcagagtggagcatggggagtgagtcacaagaagaaggagcagagttcaaccaagaagaagctgagcaggaagcttatactcggccgagtatggccaggtcgagtatgaacaagctgagttcagtcgagctgaacagtttgatgagcaagaagactcgtgtgaagctgcagtggagcagtatttctttgaagattatgatgagtccgatcaagagagagatccggtcaagtcacaagaagctgggaatgcacaagggcctagggaagtttcagagaaagttgatcagtgggttgaagaagaaggtgagaaagatgaagagggcaatgaacggcatggcggt

SEQ ID NO: 157515 - DNA, 1137 bp, Arabidopsis thaliana landsberg
atgcttctctactttctcatcacttgtctctctttctttttctttaccaaatctctttctcttcctccatgggcatctgaaaccaaaaccttgctctccttctacttcatcaagaatccctttatgaacaccctacatcagaccaaacacgatccagcctctccggtgatcgaccaaatgtcggttcttgacctccctgagctggctcttgactgcattcttgaccttcttccaccctctggactctgcagcatggctagggtttgtagctccttgagggagagatgtgttagtgatcatctatgggagaaacatttgaagaccaaatggggcaaaatccttggccctgctgctcacagagagtggcaatgctatatctcctcttccacatatcatcttgattctcctcatcaacaaactgggaatcttggttttggcaaaatcatctctctgatccgatctctttcatccgttttccgagaggataaacaaaggaggggatatgcatcttctctgccacttgattccagcatgagctgctacctctcccttgaaacaggtcgtttttggttcccagctcaagtttacaaccgtgaggtaatcatttcataaacatagttgctccatttttgctttatggatttgattaaagtactaagaggcttttttttggtgaaagagcagaatggacatgtagggttcatgttgtcatgctatgatgcggagctcagctatgatactcacacggatacgttccaagccaggtataaaatatctaatgtccacatttgacgctaacaaattttcttatttctcatcataagtttacgtttattggggagtttaggtatccaccacatggtagacgagcatctgcgattgaaaagggtgtgacatgggatagaataagagcagctcccattgatgcatcacctcatcttctccatgtatcagattctttaaaagagttgaaacctggagatcacatcgaaatccagtggagaaggaacaaagagttcccatatggtaaataataataatatgatgcttttggtttgaacttgcaatctgattctgaaaaaagcttgggtgatgttgttgtgtaagatggtggtatggtcttgttggccacttgga

SEQ ID NO: 157516 - DNA, 1568 bp, Arabidopsis thaliana landsberg
ttacttcacgatccttaccctcgtatttatctatcttcaaaagtttactttttttttttgaattagtaacccatctaaatcttcttcgttgatttttccttccaggatttttcggagaagtattccgtgggatctggaacgggacagacgttgctatcaaagtgttccttgagcaagaccttacagctgagaacatggaggatttctgcaatgagatatcaattcttaggtatgtctataggctttctctgttttattcaaaattggcaataacgtctttacttgtcttctgactttctttcctgccttctccttctgcgtccaaataaccactagccgacttagacatcccaatggtactaaactactcatctatctctatgaattttcactgtgagattttagtatatgttttcatcaatgcatgcatcttcgacttcttgtagttatactgttccttggagcatgcacaaagcctcaacaattatcactgatcactgagtacatggaaatgggatctttgtattacttgctccacttgagtggacaaaaaaagaggttaagctggcggaggaagctaaagatgctgcgggacatttgcaggtaatttcatcttccatacaaaaccgtgtatccttctttccaacatagtatgtagtattaatatggaaaattttggtttgaggagaaggcaataacacttccaaataggacctggaattgtgtctcgatgagaaagtttcgtaatcatctttaattaacaaacagcgtttaaacttgtaaaatgttgctaggggattgatgtgtatacaccggatggggatagtacaccgtgatataaagagtgcaaactgtcttttgagcaacaaatggacagtcaagatctgtgattttgggctgtcgagaataatgacagggacaacaatgagagacacagtctctgcaggaactccagagtggatggctcctgaacttatccgcaatgagcccttctcagaaaagtgtgatatcttcagtttaggtgtaataatgtgggagctatgcactttaaccagaccttgggaaggagtaccgcctgaacgggtaacttaactgaacaagaagaagactctttagtgacatatgtgtatatataacaagtttcctcatatttcttctcaggttgtttatgctattgcttacgagggagctcggcttgagattcctgaaggaccactgggaaagcttattgcaggtcttgtgacttgtcaaagtgttgttatttcgtttttcctgaagctttgtttggggtttatggagtatccttttctgatgtgttgtctcttgttcgcagattgttggacagaaccggaacaaagaccgagttgcaatgagatactctctcgtttgctggattgtgagtattcgctttgctaactttctctcaatcatattttccttctgtgaatataaaactttgcagcgagagaggtttttgtttttttcgtttcttttttttgaatattgttggctttctccctttgagtttgtacaaaagaactttggcgctttcacatccacaaaaagct

SEQ ID NO: 157517 - DNA, 464 bp, Arabidopsis thaliana landsberg
ctccggttctccgccaatttcaagttccaaaattgggtaatggaggtggattagggatggtgattgagtgttcgtcgaggccacagaagaaatcgacagctcatcacaggaagacgaggccgaagaagactcagccttgggacattaagagaaagcctactgtgtatgctcctcttcctcctcttccggcggaatggagtccgtttactcttgcttccgacgacggtggtgccgccgttgctgcttctcctgccggagatttggtttcaggctctgcctagttatatgagctatctggtggtttggttgtaatctagtttgagagcttttgttggtgtttgtttctgttaatgtttttcagttttctgctgtctgtttcttattatccggtttatgtttggctggtgaatgaatgtcaatggaccaaactgcaatttttttaaaggtttacgcttttctctgtt

SEQ ID NO: 157518 - DNA, 876 bp, Arabidopsis thaliana landsberg
  unsure (1)..(876): unsure at all n locations
atctacagaaagcatttgtctccaatatcctcananaggtgtgagaaatttcnactattatataggctcttcactgcatctactggctcgtgtttgtgattttgaaaccggtgtgtgtgtgtgtgtgtgtgttcaggagcagtttaggtatgatcctcagagatcaataattgctgcctatgagaagacagaccaagccattctgtcacattcttctgacttagcacgtggtggctcaactgctgtaaccgctattctgatgaatggacggcgtttatgggtggcaaatgtgggtgattctcgggcggttctatctcaaggaggtcaggcaatacagatgactattgatcatgagccgcacactgaaaggttgagcatcgagggtaaaggaggctttgtatccaacatgccaggttagagtctttgatgataataccaaaacgtatcaaattcagataaaagttatccaaaacatgtttttttgttctgttttggtttttcaggagatgtccctcgggttaacgggcagctagcggtttctcgtgcttttggagacaaaagcttcaaaacacatctacggtcagatcctgacgttagagattcatcgttcgatgatcacacagatgttctcgttcttgctagtgacggtctatggaaggtccccaatggtgtttgtgatttgtgaaggaactggtatggcgttttcggattaaacggttttgatgtgtatatgtgtaggtgatggctaaccaagaggcgattgatatcgcgagaagaatcaaagatccattaaaagcagcgaaagaactaacaaccgaagcgctgagaagagacagtaaagatgatatttcttgcattgtcgtaagattaaggtga

SEQ ID NO: 157519 - DNA, 4191 bp, Arabidopsis thaliana landsberg
atggatgttaatgaagaaacagaagctggaaccccaccaagagttaactatacttctaaactcagcaagctaaagagaacttttgaccacaagaagagagcaatagaagggttagctcagactgaagatcctaaaaaagataactggtatgagttgagaaaaaatgtaaatggcaaagcagagtcatagagggattatcttcaagggtgatgaagctgaaagatcaactatggatgtttgaaaaaagagaaaataagttttttatgagtattgatccagagaagatagaaactgcactagctatcaaggaggacgaagatttcacaacagaatggtttgcacaagaagatgagaaaggagttcacttagaggaaagaagcctagatagcaagttgttgagtgaggaggaaacccccattccgacttattctccacgagtgcctaaacggcccaccaacccctcttctgaagaagaacacttgattcatgattctgttgctgaagaattcctggagctctggattggatataaagcttaggaggatacaattggaaagttaactcacaagatagaagagttaaacaacagcattctggaacttcaagaaatggttaaaggctaccccaattttgaaattgaggattggtcaaaggagcctggttcagaagaagaagcttaatttgaagaaaaatcaaatgagtactcatcctaccatttgtcaagagaggatgcagaatatgattcagaaactgaaaatttaaccattgaagatgaggacttctctgttcctctcttcaaccttctttttgactaagctctgtaagagtaaagcttagtgacttaaaacaagctcacttgggagggagtcccgtgtctatccatatatataactttctatctttcttgttatttttgatgtttttgtttaagtgtttcaggtttatttcattgaccatgatggagtcaacggttgtgtaaatttaaatcaagtcaagaatcatctcaaccgttgatagagtaaaacaaagaggagtgttctgagttgtgcgattgaatgaccaaatagaggaatcatccccaccctttgatcgagtaaattcatgaggtttaatctggtccgtttgatcgagtgcttaagagtgaagtactttccaccgtccgatcgagtgaagaaaccaaagagactaccttgcggactccgacggctcgtgacccgcctccattgaaatccatgatgtctctttgtcttcctgtcccctcataatcactttggtccccccccccatcgcaattcccgaactcaacaacctcatatctccacctcccataccaaaacattctcaaattcttataactctctctctttccttcacttccccttcttatcaaaaacattgcaatattcatttgttatctccatcattcaatctcctaacctactgaattttggttttgagtctctcccattcttgttctcaatgacaaacaagtgcacgctcttgtcaaggatccggaacagagctctctcaccatcgaagagatatccaacaccttcttcgcatgcagcagctcgaggactctctgaagcaagtttcgagatcgatcacaacgaatcgagccaagaggaggaagtgatgcaagaagaagagactttcagctttctagctggaaatactcgatcccgaaggtcgagtaagtcctctacaagggaattctagagcaacaaggcagatatcactcgaggaaagaagctcgtggggaggaggttggagctggtagatgaagactccgaggaagaaatggcttcaccagaggaagatgatcaaacagagaaaggaggcgatgatgaattggaataagagaagtgtgcaactcgaaacgagtactacaagctgctgaaatgcaatgagtttttaagaactcgataccgtcatcccgagacaatggagagactcgatatctataatgatgtagactatatgtttaagcagtgcagcctgaatattcacatgtttcagccaatggaggggtatgaggaagagaccatccagtttctttcatccgtggaattgttcttatatggagagtcagaggacgatgaaatcagtccagacggaagtttgggatacttggagttctgtgtgtatgacgtagagtatcggcttccaatagagcatctcgagctgatgtatggatttccaagcggaaaagacacaagtcatcgttttgacaagagagagcttcagtcattgtgggccacatttgggtctaagcatggattttcatcctgtaggaccaagagtaacgagataaggagtccggtggttaattactttcatagatctttggctagtgcgctattcgcaagagaaagaaatggaaccttcttcaatggagaattagagctgatggagacagcacttgcaagagctgcttggtttagcatcagacggtacagttctagctggagatcaaatagatacttcggtctcattctacctaatcaagcacctgctaagttatagaagatgggctaagggacttaagaaaccaggaagaatggttgtgggaggagttgtgaccccaattttgagagcatgcaatgtacctctacattcaaagccaattcctccgagatggattgatatgcaacaccttatcaattccaagagtttttggtcgcagcagaagaatggcctatacaagtataggttcgatcaccccacagaaggacaatctatttttctcctcccaaatcccgcttccactttgatcagagatggtggcaacagtgagttttacccaccagtggagaacctctatacttcaagtgatgaagctgtgccgatggaaggagtgaatgatgatgaggccccaatccatcattcagataatgaggcagaacctatggacgtgtcttacgcaacacaacagttttacttcgaggagtactccgcaccgaggcaaaataaagactcaaaggaaattcacaagcgccttggtttcctccaaagctggtgtaagttccatgacaaggctctcgcgacactcaacaagaagtttaacaatctctaactcaagatcagctgttcttcttcaactacggcaatgccacagaacatgccgagggaacaccatgccgcaccttcaccaccaaggcaatcatccttcgaacctagagagaaggaaaataggagcaagttgaaaaagcgaagaagaacaaggaaatcatatgctggagcaagccactctaccgcaccacttgaggagccactctatcaacaacccgagtaaagggtcgagcatccagctaatccaagttcagcacaacccgttccttagagttacacaaaggagagtatggacgatttcgtctcctcctacttcacctgatcaatgaggtaacaccacctcaaccattgtatataccatagcatctttttattattttttgtttgttttgtgttttggtcttgatttctttctcagacttttattacacaagggactctgtaatttaagttgtctgtgtgtgtgtgtgtgtgtggggggggggggttaaaacatgtttaacattgtgttctattttcttatttcgaatattacatcatctacggcatagaaaaaccataaaaatttgaaaaaaattcagaaaatgatttcatcaaaaacgagtgtcatgtagattgcatttcattttaggattgtatatagtgtgcttgcatttaggattgctcatttgcataggggataatgatgatttcaaaccgataagcatgttttgattcaatgaagtaagttcaatgcctaggttgttagttctctgttgcataatcgattgtatctctgaagtaagaccgcaccctactttgaatttgtaacttgactatactactttaattcgaaactcgcttatctgatgtcattccttatctattagaacctgaactgaatttgcaattatcatatctatgcattgtttgtgaactcatggctaccatatacatacttggattatcttattcacttcaccaccctctgttaatataagtagcagtctctcatttttagagcagtttcccatacccttagcctagccttatttcaagccaaagatcatttgtgtgtgattgtgaagtctttttcgattgagcttggtataacgtgttaggaatgagccgacaagagca

SEQ ID NO: 157520 - DNA, 1924 bp, Arabidopsis thaliana landsberg
caaattttaagatattggggctttttaagacgtgaaaaaagcattaaatgagctggttattcttcccatgagaaggccagagctttttgcccgtggaaatctcttgcgggtattgctttctgtttgggacatatcgttgttttcttggtcaggtatttccgttcaacttggctgatattcctgatgacatgacctttttcagccctgtaaaggaatattgctttttggtcctcctggaacgggtaagacgctcctagctaaggcgcttgcaacagaagctggggcaaacttcattagcataactggctcaacacttacatcaaaggtaactggattatgttgtatgacagtgttttgtgtctccttgttgtatgtgtctatttgtatgcatgttttaatcaatcaagaagaatagttaaccttaataaatatgcttcagtcttcactggcctgtattgatacacttgtcttagcgaatatgtaatttcttagcttacacttctataaatgatttatgatactccccattattattctgatctgactctgtcttgtctttattccttgtttggcatagtggttcggagatgcagagaagctcactaaggctctcttttcctttgccaccaagctagcacctgtaattatttttgttgatgaggtgagaattttgtacctaaaactaaaattcatttctttattatgtccatagttctatcttagttattgatgctcttaggaaatatttgatgatgggtaaatgtgactgaacgggatttttgtttgtttggtagatcgacagtctgctaggtgctcgtggtggctcttccgagcacgaagctaccagaagaatgagaaatgagttcatggcagcttgggacgggctcaggtcaaaagacagccaaaggatcctcattcttggtgccaccaaccgtccctttgatcttgatgatgctgtcattcgtcgtctaccaaggcggtaacacctgatttgacttttatttacctttttgaaaattgctagtttgtatttctagtattggtaaactgtgtacctttgaattctaggatatatgtcgacttaccagatgccgaaaaccggttaaagatactgaaaatatttctaactcctgaaaatctggaatctgatttccagttcgagaaacttgcaaaggaaactgaaggttattccggtagcgatctgaaggttggtatttgttttctcatccctagctcatgacggcacttgtaagttctttatttaatcttttttgtttcttttgtgggcttacatttgcagaatctatgcattgctgctgcgtacaggcctgttcaagaactgttacaagaagaacaaaaggtacagaatccagattttgcagtgaaacatagactgctcacttacatagctttttttgcttgatgattttgcgttgtttgaatctttagggtgcaagagcagaagcatctcctggtctacggtcgctaagtttggatgacttcattcagtctaaagctaaggtaatttagttgcatcaatgccaggaaacaagatgtatcttgattttgttgcgttttgcattgtcgatgattgatataaaccacaaagatgtgattattgttatcatatgtatgggtgatgtgattctgcaggtgagcccatctgtggcgtacgatgcgactacgatgaatgagctgagaaaatggaacgagcaatatggtgaaggaggtagcaggacaaagtctccttttggcttctgatgaatttttttttgttttggtagatcaaagtgttttcatctgtcttttactttgtgatcatagtgtaactctcagtaaactatatataatggaacacgaaacactgtacgaccacatacaaaattcttcactataacataatgatttcttgtattcatataaa

SEQ ID NO: 157521 - DNA, 1662 bp, Arabidopsis thaliana landsberg
aaagagattgctgagagaagtgccttttctgtagttaaaggaattttaaagaatgatggtgttcctggtctgcaccaaggttttggtactgtcattacaggtgctgtacctgcaagaatcatatttctaactgctcttgagaccactaagatttctgcttttaagttggttgcacctttggagttaagtgaacctacacaagccgccattgcaaatggaattgctggcatgacagcatctcttttctcacaggctgtgtttgtcccaattgatgttgtatgtattatatacaacactaccgctttgtaagatttgtaaatgctgtgaatgttctatcactatgagttgctgaaaaccatatttctcctattttctgcaggttagccaaaagttgatggtacaaggatactcaggtcatgctacatatactggtggtatcgatgttgccacaaaaatcattaagtcatatggtgtaaggggattatacagagggtttggtctgtctgttatgacctattctccttcaagtgccgcttggtgggctagctatggatcaagccaacgtgttatctggaggttagccatgaatgttctagttaattgatgatagtttccattttagtttgattgcaagaacttgcatttcagtcgttcctggaatttggatttgctaccaaagctacaattccgctgatacaatatctgctactgttgggcagattcttaggttatggtggtgactcggatgcaactgctgctcctagtaagtcaaaaattgttatggtccaggctgctggaggaattattgctggtgcaacagcatcctcaattacaacaccattagacacaatcaaaacgcgactgcaggtataaagtgttcccattcatagtaaaaacttgattttattttgcatttactttttttaactctaatgaatatagaagagcttccgtgcgtgctgtcctggttctcaaatagataacttcgggtattgctacatagaaactatgctaaacaaacggtaaaatctctgtgcaggtcatgggacatcaagaaaatagaccttcagcgaaacaagtggtgaaaaaactgctagcagaagatggctggaaaggattctataggggtttgggcccaagattctttagcatgtcggcttggggaacctcgatgatattgacttacgaatacttaagtaagagttcttttcttttatacccaaaatctcactttgagccactctcaaaaccaaccaagattcttcttttgaaatgctagctgctcctctgacatgtttcactctttcatggtttttttttccagagcgtctgtgtgcaatagaagattagaaagcttcactactgttcgttggtttttctccttctactaactcgagtagacggcatcaccttgattcaaatctcggctattgggagcttccatgttgacaattggaccattctttcaactttgaagtctgagttccgttattgtaatcattctttcaacttaatttgcgtattggagtgtattcttacagcagaagaaattctagcttacgttcttctgctttatgtagcttctgagatttaagaagcttcaaaacaatgcaatcacttcatgaaatcttatagtcgtacggatgtacgtgttatcgtaac

SEQ ID NO: 157522 - DNA, 4947 bp, Arabidopsis thaliana landsberg
gtttttcataagattgggtagctgtttgtttgtttactcgccctgcgatcttcttgtagagatgcaaatactgtgatggatgctgtggagtttgtgctacaaaatttcacagagatgaataagctttgggttcgaatacagcatcaggtgaattttcgatctgtgaagagttgatggtatttagatacgcatagcacctctgcacttgcatgcctctgactgaagcataaatgaacgatgaagagcatgcttttggtcatgcaggttgtgtggtgcttgtgaatcattgatattggtgaacctgagctgaggtgttccttggactgcagggaccaggaacagttcgagaaaagcaggagaaagagaggaacgaacttcgtgatcttgtaacatcgataccactacttgaattagtatcctatttttgctatgtactgcccactaagttgtatttaatgttttcctctcaggttggaaaaaatctgcatgttctaggacagatagaaggtgttgaccttgagatgtacaaagagactgttcttcctagggtcttagagcaggttcggcagctcatttttgcatctattaccatgtcctttcttatagggtttcaattcatgtataatctgctaaatctgaaaaccttgaacaggtcgtcaactgtaaagataagttggctcagtattatctgatggagtgcataattcaagtctttcctgatgagtaccatttgcagactcttgagaccttattggctgcttgtacccaactgatggtgggtaggctagcaatcgatatttttctcttttctactctccaatgcaattctagttatctcaatgctttgtttggtgctttctgattaactcttcttatgctgccattatctcctaaaaggatctatctgaactgtctgtattccctattcttgttgatttttaggatttcgagttttttttttgtttatttcctggtgactagggctttggctcaccaattaaaagtttttgaaagaggtccctgatctcttacagtttgactggaattactaaactctgagcagggaatcctcaacagagcacttttctattgaattcactatcagcacttttctcactcaagagttatttgacatttttccttcctctctgaccttaagaaataatttctcagccaactgttgacacgaagatagtgttaacccaactaatggaccggttatcaaactatgctgcctcaagtccagatgtaagttcccattgagctatcatcgttcctttttatttttgtttgttagctagatgtcttcttattcttaacttctgagcaggtgttacacgaatttttgcaagtggaagcttttgctaaattgagcaatgcaattggaaaggtgggttccaataaaggaaaatcttttatgaatgcaactttcttttggctgtttgatacttgaatcataatggcctttagaatggtcctatgtaggtcccctataccctgagaagtactcagcttgattttttttgtaatgttattttccaatcttcgctcatcttctcttaatcagctcttttgttaggcatcgtcaaatcagctaccttccttgacatatgatggaaaataagccactgtagtttgaacatgtctgtcctctagttgtaagatttgagacttcagtagctagaagaggagcagatgtaaaattatgtagaacttaaaatgaaagaccattaaaaatcaagctatcaaattgctggatgatccaaccaccttagttcatattgtagattctgttcgtcaatagcctcaattctttgagtctttgctttcccagcctcctgcatataatgcaatatttttcttgaaatacatatatttgacttatggacttggtgtgggctacaggtgatagatacacagcttgagatgcctattgtcggagctatgactctgtttgtctctcttttgacttttactctccgagttcatcctgatcggcttgactatgtggatcaagtattggtatggtttcctttcgttgccatatgttttctaaacttttagtcagtattgtctctgtagcttgtatctctgtctacactatatgttcagattcagattttcattgtaaaggtgtaaaatgcatttttaaagttttatgattacttgaatctggtgtagccctggcgttaaactaattattgatccgaaaactttgtagggtgcatgtgtagttaagctttccagtgtgcccaagctggaggacgcccgtgcaatgaaacaagtagtggcacttttgagtgctcctttagaaaagtacagtgacatagttacagctcttacattgtcaaattatccgcgtgtcatggatcatcttgatgatggaacgaacaaagtaatggctatgctaattattcaaagtataatgaaaactgattcgtgtatatcaactgctgataaggtatactactcttactctcttcaattaaagatgtaaatattttgcactaataatatgctaattttgtgttcactaggttgaggtgctgtttgaattgataaaaggacttattaaagatttggatgaaaccaacgcggaggaggtgctgtcatttcccctttgtttttttttccgtgtggtttgcagtgagaaactctgatcagctctactataacacctcggtcctgatggattttatgtgtcttttttagcttgacgaggaggatttccaggaggaacaaaattcagtagcccgtctcatacatatgcttgataatgaagaaccagaggagatgcttaaggttaaacatcataaatttactaaagcgacttgttcactgaaccttaacatgccctttattcgtggaactgtaaatcttagtctgttgctccacttcacccaaaacaccctactgcccccatgctccactaccatgaagcggtctgcatccgtatgttgacctgcagaccggcttaggctcattggcgttcttttacagaaaaaaatcgataaacattgggctatgaggccatggtttcttttaaaacattatccctatcgtatgagcaaccgaatatcttaactgggtattttactgatatgcagattatatgtgttgtgagacgacatcttatgacaggaggacctcgacgcttgccttttactgttcccccacttgttttttctgcagttagggtatatatctcttatttccctataacatgcttgtatttacttaaatgcagattctctgcttgaagacaagcggttgactttacgagttgcataatgtttctttcacagttggtgaggcagctagaatcccagggtggagatatagcaggagaagattcagcaaccccgagaaagatttttcagattctcaaccaggtttatgagcttcttttgtttttcacatatctaagatagagaaatatgtgttgttatttcactgaggctgtggcttctcaggagtttaacgtcattcttgtgaattgtttatctctttgataaactcagattcatttaaaagtaatgcaggagtaccctttctaagtgcactttactgtgtatttgacgtattaagtagatcatttatcaatcaaactgattcattttttgaatatcgggttatttgggataatataatggtcaatatattttgtaatccattgaacatgtgcttttgttttcagacaatcgaggttcttacctcagttccatgtcctgaactggctctaaggctctaccttcagtgcgcagaggtaatttatagggttagggttactattatttcgaactcagaataacgtgacttacaatattaatggaatccagtaatctattgttcattttatctcagtttttttgtagcaaggcagaatctgacatagcattctcaatattttgtcttatcttggattcatgaacaggccgcaagtgactgtgatcttgagcctgttgcttatgaattttttacccaagcatttatgttatacgaggaagaaattgcggtaatttcttcattctttctgagttaactttacacaaagataactaaaagtctcataaaagtttatacttgcattattcttgtggtgcgttgtattataatataggactcgaaggcacaggtaactgcgattcatctgatcgttggaaccttgcaaaggatcaatgtctttggtgttgaaaatagggacaccttgacacataaggcaaccggggtacaaatattttgccaatgatttctcattttacaagctttcttctcaatttctatccaaacgcttatattttctttgtgaccagtactcagcaaggcttcttaagaagcctgaccaatgccgagcggtttacgcatgctctcacctcttttgggtcgatgatccagatggtattaaagatggagaaaggtaagttcttttccgctttcattactatcacatttttctcttattttctgtttcgttgtcattagccgagagaaaacttaaccatgggtaagtcattgatcttcttatctccagaactaatcgattctcaatgttattctgcagagttcttctctgtttaagacgtgcactgaggatagcgaacgcagctcaacaaatggctagtgcaaccagaggtagcagcggaccagtcacgctgtttgttgaaatcttgaacaagtcagtatacttaacaacaaacaaacaaaaacatctgacacacagattcatacacaaagcagcatctcaatactaaaaatgtttttttcatatacaacaggtacatttacttctttgagaaagggaatccacatatcactccatctgatatacagagcctcatagaattgatcaacaatgagatgcaaagcgacaacggtaacacgacaatccactcagatcccttcttacaagtacattgcgttacattaagttcataaaacagaaaggct

SEQ ID NO: 157523 - DNA, 1702 bp, Arabidopsis thaliana landsberg
gtatatatgtctagatcctaatattcatgcaaataaatgaatcatactactacaatcataggatttgaagttgcggattcttattttaacaaaatatgattgatgttaaccacttatgtatgtatatatatagttatgctcggcgacgagggatccatgtcttggctgagattgatgttccaggacatgctctctcatggtaatttcttcatcatcaactatttttttatcttctcttatatatttcgcattttcgacgatagtaactatgataatattcattgttataaataaaggggaaagggatatcctgccttgtggccctccaagaattgtcaagaaccacttgacgtgagcagtgacttcacattcaaagtcattgatggcattctctctggtaaaaagctttaaaacactttgctttatgtatgcatcaccaaatgttgcctaactttttgtggaaatgtttttattcagatttcagcaagatctttaagtttaaatttgtccacttgggaggtgacgaagtaaacacaagtaataatcaaaatctcttttgtttatcagatttcctatatatagtgttggttttgattaccatctacttctttgcagcttgttggtccgcaacgccccgaatagcccaatggtaatgatagttagacacttgtttagttctttaaaacgttttaatctcatgttactccaactttctaactttgaaggcttaaaaaacatcggatgagggaaaaagaagcctaccaatatttcgtgttgcgggcgcaaaaaatcgctaggctcacggaaatgaaattatcaactgggaattaaatgacacgggccttacaaatcgaaaacgataagtaatcaaaattttcatatgacttactacatttttgtctaatgttatactgtagggaagaaaccttcatcaattttggaagcaaattaaacccgaaaaccgtggttcacaactggtaattgcattcgtacatagaaattgtgactcaacgttgaatttaatataacgtttttctttgatgaatcaggcttaacacaggacttgttgagaatgtgactgcgtccggtttaaggtgtatagttagtaaccaagaattttggtatttggatcatatagacgcaccttggcaaggcttttacgcaaacgagccatttcaaaacataacggataaaaagcaacaaagtctagtacttggtggcgaggtttgcatgtggggtgaacatattgatgcttctgacattgaacaaaccatttggcctcgcgctgccgcagctgcaggtacataaacgtttccttataactcttgcaaaaagtttataagtttaaaacatactttacactaattgctaaacattaaaaaatattttgtgtttgggaagagcggttgtggacaccctatgcaaaattggctaaaaatcccaacaaggtaacgacgaggttggctcacttcagatgtctattgaatcaaagaggagttgcagctgcacctttggttggtggcggacgagttgtgccttttgaaccaggttcttgtctcgctcagtgattcgaaagattagcattgtagaatatattacagtcagcaacaccttggtcaattcaggttaaaatgaacccctacaaaaaagggatactttgaatttttttcttggttgattttttagtggtagaaatattcaa

SEQ ID NO: 157524 - DNA, 850 bp, Arabidopsis thaliana landsberg
gggtcagaaactgttacatacatgctacagggaggtatcattcacaaagatcctaattgtcataaaggtacaattcaagccggagatgttgaggtgaaaacaaaaacagaacacaaacaaagaacactcgaatactctctgagttttcttgtttcactcaattttgactttgattgacagtggatgacagcaggaagaggaatcattcattccgaatttccggaagaagaagtaaacaatggtttacagctttggatcaatctcccttccactgaaaaaatgtataagatcaatctttagtatcatctcttctcagaaagagttccagtcttgaatctctctgttccttgattttgacaggactgaaccaaaatataaggaactatcgagtttagacattcctcgagcagaagaaaacggagttgaggtcaaagtcatagccggagattcaatgggaatcaaatctccagtctacacaagaacaccaacaatgttccttgactttaccctcaagccaggatctcaaacccaccaaaccgttccagaatcatggaccgctttcgcttacattatagaaggcgatgaaggtgttttcggttccttgaactcttccgcaatatcggcccaccatgttgttgtgtttgggccaggggatttagttagcgtgtggaacaagtcaacttcgaggtcattgaggtttttgttgattgcaggggaacctatcggcgagcctgtggttcagcatggtccctttgtgatgaactcacaggatgagattgaaatgacaattgatgactatcgtaatggcatgaatggctttgaaatggccaagcattggaggtcagagtga

SEQ ID NO: 157525 - DNA, 853 bp, Arabidopsis thaliana landsberg
  unsure (1)..(853): unsure at all n locations
atttctctttccgccgcgccatggatcacttccccagcagcaaaccaatcatctccggaacaactccagcagagatcctccttgggaatacgaactcggtcgtcgtcgcggtaggcggaacttcgcgaaagtccatttagctcgatcaatcgaatccgacgagctcgtcgccgttaaaatcatcgagaagaagaaaacaatcgaatccggtatggaaccaagaataatcagagagatcgatgcgatgcgtcgtcttcgtcatcatccaaacatactcaagatccatgaagttatggcaaccaaatctaagnnnnnnnnnnnnnnnnnnnnnnnnnncggtggtgaacttttctcaaaagtcctccgtcgtggacgtcttcctgaatcaacggcgcgtcgttactttcaacaactcgcctccgctcttcgtttctctcaccaagacggtgtcgcttcaccgtgatgtgaaacctcagaatctactcttagatgagcaaggtaacctcaaggtctctgactttggtttatcagctttaccggagcatctacaaaacggattgcttcacacggcgtgtggtactccggcttatacagctccggaggttatttcacggaggggatacgacggagcaaaagctgatgcgtggtcttgtggtgtgattttgtttgttttattggttggcgatgttccatttgatgattcgaatatcgctgcgatgnnnnnnnnnnnnnnnnngagagattatcggtttccgagctggatttcgaaacaagctaaatcgataatctatcagatgttagatccgaatccagttacgaggatgagtattgaaacagtgatgaaaacgaattg

SEQ ID NO: 157526 - DNA, 3618 bp, Arabidopsis thaliana landsberg
agtgtggaccacgcgctgaggataagctggagagagaatctataactcaacctagaccactcattttgaagcgtcactcgacttctccaaatacactcgacctacctcttttcatctcaccaccgacactccattctctctacaccacgaatcgccgtccaaagagccactctatccagatcactccactcgacctccgtgagtcactcgacctctacaccgccatcacaagaccatatcttccgtcactcgacctccgcgccgccgtaatcgagcactcctgaaacaccagctactagaccactcgacctctgcgccgccgtcgaagtctccaggaccactcggttacgacgttatctactcgaccgcatactatcactcgacctcgagaaagcactcgaccgctgcaaaatctactcggcttcttgttcgtgaattcaggagagccttccaacttcagagaagttactcgacctctaggtttcacgactcactctacctccacgatttactcgacctactgtagcattccaactcgaccactgagaagatactcgatccagttcatctaagctcaggaacagctcaggttactcgagtacagaattgtactcgaccaattcaatctatttcattgcctattgacaataattttggtttcattgctatctttgagactaacctattgacatttgagctttgagttctaaatctctacaggagaatcatgagcaattacagtggcagttcttctgttgatcctgactacaacatggatgagacagagtcgtcatcttcaaggctagagagagaacagagagaatatgaaagcttcagaaggaaagctgagatagcccgaggaaagagagcgatgacagagaggtttgagcttatagacgaagatctggaagacaagtacatgcttgaacagactcgcagagctaccaaacttctgcacaagcccgacgtattgcctgttgaggaatatgttaggcttttcaagctgaatgagttctatagcacgaggtatccttgctcgacctcacttgcacaactcggattgttggaagatgttcagcacctgtaccaaagttgtcatctggacactctgatggcttatccgtatgtagcatatgaagaagaaacgattcagttcctctccacactgcaagtggagctttacgaaggtatgacctctaatgatttggaatgcgaaggattgggattcttgagattctctgtgtatggtcatgagtataggttatcaatcaagcgcttggaaggatcgtttggtttccccagtggaacgggtactaagcccaagtatgacagagaagagttgaaagacttatggatcaccattggcagctctgtaccgctgaattcttccaggtcaaagagcaatcagatacgcagccctgtcatcaggtacttctagcattctatagccaatgtcctgtactcccaagagatcacagcgactgttaccaattctgatatggagatgatcgctatggctctcaaaggcactctccgccaaactaagaacaaaatgtctctccaaggtgaaatcaatgacacacctctctctgtacttcttctaatccacataaccataagagagcacaaggcgctatttgcataggcggtgttgtaacaccgattcggatcgcttgtggagtcccaatcacatctgatgaactcgagccacgggcactggagatcgagcatctatgtcactgcgagttcctggagttcgcaatggttggcgacatgcaccgtttcatgtttgagtactctacggataagagagccatcatccttctccccatccttgaggttacacgcataataaagggagataacattgattttaggcatgagcttggaaacctctactatgagaaagatcggccattggatgtggatgatcttatagaagaagctgctgaggatgggatggatgaagacagagaagtggagtttgacactaggatgtatcattttagtgaacatgtacctccagcgagggagagcaagagcttgagtgaagctcacaggaacaacaacaagctgcagaagtggtgcaagaaacaagacaagttactcgccaagtgcttcaagaccatcagtttctgacagataagctgagttgttccctcaaacttcaattccttaaggtattgatagtactcgcttggggtaggctctctctttctccttggccgattttgtcttccaactggggctggtgtatcatccccaatgatctcaatctcttcctcaggaatcgcttcttcaaagactgcctcttcatgttgttctttctcaacctcaacaaccctctttccccgagctacctcttctttttgcatggttgaacggcttgaacttcccccttgaatcaagcttgatctttgagcacggcgagcttggcgaatttggcgttcactcatgtcactcatgtcaaaagcctcaacttcttcattatcaatagaggatcttctagcccgagatgaactctttcttcttgaatccatgcaaattggtggggaatttcaacaaagcagtaaaaacaactctccaagaggtatcaaagtggaaaggattcgctttttagtgatggaaattgagcttacaaaccgattgaaaatttgaggatggacttggaagtgatcgagtaactttggtgaggtatggtgaagtgaaaacgaattcgtgaagagtgatagggagagtttggaatagagattttgatgattgatgagagatagaggatttgcaaaaatgagatgatgaaagagagagtttcaaagatggtttggcgatttcaatgggtgaaggcggctggtctttggtttctctttggaaaggatagaaaagcgagttggaaacagtgagggtgtgggtaattgttttgtccatagagtaatggagtgatgggggaacaagtggggtcacgcgacttataccttggtctccaaataattcaagctcgagtaaatggtcgagcatcctcttgaaatgcgcaatactcgatcgaacggttgagagttctttgcttttgatcactcgatcaaacggtgaagatgcttctcccatttggtcattcaatccaatggcttaaaacactcctcctcattttactcgatcaacggttaagatgattcttgacttggtttgaatttactcgatcgttgacaacctaaaggtcaataaaataaatttgaaacacttaaacgaaaacatcaaaaataacaaggaaatagaaagttatatacataggtagacatgtgacttcctcccaagtgagcttggtttaagtcactaagcttgactcttacaaagcttagtcaaaaaaaggttgaaaggaggaactgagaagtcctcatctttagtggttgaatcttcaatgcttgaaccatacactccatcctctcttgacatatgtaatgatgagtactcatttgatttttcttcaaaataaacttctttatgatcagtagagtagtcttcttcttctgaaccaggttcttttgaccaaggctcaatttcaaaaccggggtaagtattaaccatttcttaaagttccaagattgcatggttcagttctttcat

SEQ ID NO: 157527 - DNA, 1597 bp, Arabidopsis thaliana landsberg
ggaaagtagttcacaatcctaaggactatgctactgcaaatgctatcaacatccaccaagaagatgagtctccaccaagtcatcagactcccactactgaggacaatatgattcaagaagggggggattcaactcaaattgatgcacctgtcatccaacaattcatctggactatagagcacacacctttactgaatactcatcactctgaaaaacatttcaaaagagaaaaactcaagaaggatcagaatcaagagatgattagtagagtcatcactcaagaagcttacaagaagaaagtcatccaagaaaagcttggtgatcccggttcattcactctgacatgctctctaggatcattgacattcaataggtgcctttgtgatttgtgagcatttgttagccttatgcctcactctacaactaaaaggctagggatcatggaatacaagttctgcaacttagccttactcttagctgatggttctgttgcacatccacatggtcgaatagaaaatctatctgtcaagattggaaatgttgaaatacctacagattttgtggtattggacatagatgaagagggaaaggagcccctaatcctaggcagaccattcttagcttcagctggagcagtcattagatgttaggaatggaaagattgatctaaaccttggagaaggcatcacgataagatttgacatcagcaaagctttggggaaatcaacaacaggaggtcagaatttggggatgcgggtcatgggggcgtggaaacacacaaaaactctagcctggccatgggatagctatgcttctccacttactatgcagataagaacatctgacgcacacgaggagagcgattgatcggttagctcagactgaatatcctacaaaagataactggtatgagatgagaaaaaaatttaaatggcaaagtagagtcatatagggattatcttcaagggtgatgaagctgaaagatcaattatggatgtttgaaagaagagttaataagttttcaaatagtattgatccagagaagatggaaatagcactagctatcaaggaggacgaagatttcacaacagaatggtttgcacgagaagattagaaaggagttcacttagaggaaagaatcctagagagcaagttgttgagtgaggaggaaatccctattccgacttattctccaggagtacctaaaccaaccaccaacccctctgctgaagaagaacacttgattcttgattttgttgctgaagaactcctggagctctgaattgggtataaagctcaagagaatataattggaaagttaactcataagatggaagagttaaatagcaccattctggaacttaaagaaatggtcaaggactaccccaatttcgaatttgaggattggtcaaaggagtctggttcagaagaagaagactactctgctgattagaaagaagcttattttgaagaaaaatcaaatgagtactcatcctaccatatctcaagagaggatgcagagtatgattcaagcactgaaaattcaaccactgaagatgagaatttctctgttcctctcttcaaccttttttctgac

SEQ ID NO: 157528 - DNA, 759 bp, Arabidopsis thaliana landsberg
aagcttgaattgaaatagtcttgtattgattccatttttgtaggcagtgtgtttaaaaaccaatggcgctagttgtgatttgtgggcaaccttgtagtggtaagtcaatagctgcagtaactttagctgaaacattgaaagagtctgaaacgaaacagagtgttaggatcatcgatgaggcttcgtttcatctagaccgcaaccaaaactatgctaacgtgcctgctgagaagaatctgagaggaaagcttaggtcagatgttgatagatcagtttcgacaggcgagattgttattgtagattccttgaatagtatcaaaggttacagatatgagctatggtgtatcgctcgtgctgctgggattaggtattgtgttgtttattgtgatgtagatgaagctcattgtaggcaatggaataaggaacggagtgatagaggtgaagatggatatgacgatggtatattcgaagatctggttagaagatttgagaaacctgagagaagaaaccgatgggattcacctctctttgagctatacccttctcgtgaagttatagacaaatcctctcctgtgattttagaggctgtgacttatctaaccaagactgttgactccaaaacccaagatgtgagaattctccaaccaagtattgccactcaggctgctagattttcagaagcaaattctctttacgagttggacagagcgacacaagaaatcatcaacgcgattgtggaacaacaatcactgggcgggg

SEQ ID NO: 157529 - DNA, 1777 bp, Arabidopsis thaliana landsberg
attgatacatataaacatggattaatattgttggacaattctcacttgtttttgtttattttcctgatcacagtggtcctgctgcttctttcaaggaccacaggttgttcgacctccctgaaaggggaccatatacttttagatttgacttcgaagatatttttttttttctttcaacatttgacttcaaagatttacttataaatatggaactcgtactctcttgggtcctactacactatctatataattctgcattgcccgtttcttcatttttacctgcatgaccatgaattatccttacgaggacttcttggacctcttcttctctacccacactgacccgcttgccacggctgcaagcacctcttcaaatggttatagtttgaatgatcttgacattgattgggactgtgacttccgtgatgtcattgaatccattatgggtgatgaaggagccatgatggaacctgaatcggaagctgttccaatgcttcatgaccagaacggactttgtaactctgcgtcaacgggtttgtctgtggctgatggggttagcgtagaagagcctaagactgatgaatcaaagggcttgaggttggttcacttactggtggctgctgcggaggcgtcaactggtgcgaacaagtctagagagctaactcgggttatacttgcaaggcttaaagatttggtttctcctggtgaccgaactaacatggagaggttagctgctcacttcaccaacggactttcaaagtagctcgaacgagataatgttctacgtccccaacaacatcgtgatgatgtctatgatcaggcggatgtgatctcgtcgttcgaactgctgcaaaacatgtctccatatgtcaactttggttacctcactgccacacaggctattcttgaagctgtgaagtatgagcgtcgaatccatatagtggattacgatatcaatgaaggcgctcagtgggcttcattgatgcaagccttggtgtctagaaatacaggcccgtcagcccaacatcttaggatcacggctttgtcacgagcaaccaacggtaaaaaatccgtggctgcagtccaagagactgggcggcgtctaactgcgttcgccgattctatcggccagccattttcatatcaccactgtaaacttgacaccaatgcattcagcacatcatctttgaaacttgtaagaggagaagcagtggtaatcaattgtatgttgcatcttcctcggtttagtcaccaaacacccaattccgtcatttcctttttgtcggaagctaaaactctaaacccgaaacttgttacacttgttcacgaagaagttggtctgatggggaaccaaggttttctatattgttttatggacttgctacatcagttctcggccatattcgactctctagaggcaggcctttcaatttccaacccggcccgtggctttgttgagcgtgtttttatcggtccttgggttgctaattggttgacgcgtatcaccgctgatgatgcagaagtcgagagctttgcttcgtggccacagtggttagagactaatgggttcaaacccttggaagtgagctttgccaaccgttgtcaagcaaaactccttttgagtttgtttaatgatagatttagagtggaagaattgggccaaaacgggctcgttttgggatggaaatactcggcgtcttgtgtccgcctccttttgggcctcgtgccagacgaatcagtaaattctcgtttttgcattctcgagtacattacataa

SEQ ID NO: 157530 - DNA, 1038 bp, Arabidopsis thaliana landsberg
aatgcgacatatactctagggcccaaaatcaccaactgggatagtcaacgcaaggtatggctgaatcagaaccctgagtttcctaatattgtcaatggcaaagctcgaatattgcttctcacagggtcttcccccggaccctgtgataaaccaattggaaactattatctattgaaagctgtgaagaacaagattgattactgtagactccacgggatagagattgtgtataacatggcgaatttggatgaggaactctcagggtattggacgaaattacctatgattaggacattaatgctgtctcatccagaagtagaatggatttggtggatggatagtgatgctttgttcactgatatactgtttgagatcccgttgcctcggtacgaaaatcataatctggtgatacacggttatccagacttgctgttcaaccaaaaatcatgggttgcattgaacacgggtatctttctgttgagaaattgtcagtggtcattggatttattagatgcttgggccccaatgggaccaaaagggaagatccgtgacgaagctgggaagatactgacagcttatctgaaaggcaggccagcatttgaggccgatgatcaatcggcgttgatatatctcttgctttcgcagaaggaaaaatggatagagaaggtttatgtggagaatcaatactacttgcacgggttttgggaaggtttggttgacaggtatgaagagatgatagagaagtatcatccaggattgggcgatgagagatggccctttgtgacacattttgtagggtgcaaaccgtgtggcagctatgctgattacgcagtcgatagatgcttcaagagcatggagagggcttttaattttgcagataatcaagtgctgaagctgtatgggtttagccacaggggactgttgagtcccaagattaaaaggatgataaatgagacagtctctcctctggagtcagtagacaagtttgatattcgaagaatgcacatggaaaccaaaccatagagctaggaaaatcaa

SEQ ID NO: 157531 - DNA, 1375 bp, Arabidopsis thaliana landsberg
atgtcatctgagagttctctgagtgctgacatgtcgaagaaggtctcatttttaggtttgaagggtatgaaactgtgggtactgatttgtttagtagttggcacatttgtagttttggttttctgtatattatctctatggattgcattccgccggaaatcccggagatcatctcacaagctgttacccttcagtcaaataccacgcgtggcgaaagatatcagggttgatgatagagttgggtttcaaaatcataatgaaaatttatctatcacaaatgctgataaatctagtgacagaaactctgggaagatgatgtctcacttgggaagaaccaagtctagtgataatgacactttgagtcaatgtagctctgtgaatcaccatgagagagcttgtagttctcattctggtgaagaaggaggctttggaagtgctgggagacagtatggaggaggacctgtaacagcatctcctttggttggtttaccagaaatatcccatcttggttggggacactggtttactcttagggatcttgagctagcaaccaaccgttttgctccagtgaatgtgcttggagagggtggttatggagtagtttataggggtaaacttgttaatggtaccgaggttgctgtaaagaagcttctgaacaatctgtaagttttcaacttgaatatcaaaatgtttgtcaatcttatgtttttgtaacttaataatcctttcccaattttggtctctagagggcaagctgagaaggaatttcgggtagaagttgaggctattggtcatgtacggcacaagaatcttgttaggcttttaggatattgcatagagggagttcatcggtgagtctcacttgtctttaatccatttgagcaattggattgtactgaatctaaatataatgatgaatgcaggatgcttgtttatgagtatgttaatagtggtaacttagaacaatggctacatggagcaatgcggcaacatggaaatctcacttgggaagcacggatgaaaatcattactggtactgcacaagcgtaagtggtttgaaacagtttagcttttgttggatatgttcaatgcttgattattaaaagggtctgcaatttgtacaactttacaggcttgcttacttgcatgaagcaatagaaccaaaagtggtccacagagacataaaagcaagtaatatattgattgatgatgagtttaatgcaaaactctctgactttgggttagccaagctcttggactcgggtgagagtcacatcactaccagagtcatgggtacctttgggtaaagtccaaaactttgaaccctcaacaggccattatggttattattatcttctcagatgatgtccttgaa

SEQ ID NO: 157532 - DNA, 622 bp, Arabidopsis thaliana landsberg
ctgggaatttacagctcccgcccagcaagttaatcctaagaagaaaaaaggtggaaaggttatttctcttgccgaagcagctaaaggatcaatagtgtttcagcaaggaaaaccgtgtgcatgccaagctcgtagacaccacttagtgagcaactgcttgtcgtgtgggaaaatagtgtgcgaacaagaaggagaagggccttgcagtttttgcggagcacttgtgctgaaagaaggaagtacatatgctgggctagaggtagggtatactccagtatctgatgctgatgtggcagctgaagcatatgcgaaaaggcttgtagagtatgatagaaattcggccgcacgtacaacggttattgatgaccaaagcgattactatgaatctgagagcagtacttggctctctgcggaggtatatagaatctccattgctaaactacatttggtttttgttttgccattgacttaatatattggattctgttctcaggaaaaagagctagtgaggaagaagcgagaggagattgaagaagctgaacgagtaaaaaagagcaaagtggttatgacatttgatttaatcggccgtaaggtaactctcaagactcccctgttctcagca

SEQ ID NO: 157533 - DNA, 1424 bp, Arabidopsis thaliana landsberg
atttcgttccatgtgaaatgctcatgctgtcatatttatttggaagccggaattgtgatagaagagaaaaactggccaccgttttttcctctcatccatcatgacatttcaaatgagatacccatccatctgcagagaatccaatatgttgctttcacatcaatgctgggtatgtgttttctcttcaaatgatcaacggatctgcagttgcaacagaggtggatttcttgaattattagtaaacgatcttaatctctgtttggtaggtcttgtggtgtgcctgttatggaacattgtcgcagttactaccgcgtggattaagggagaaggttagtcttggaacagtcaaaagttaccaagtagactgaacctgtattgatgctaatctgctgacttattgactttgggtgtaggtccgacaatatggtttctagctattatctatttcatatcgggggttcctggagcgtatgttatgtggtatcgccctctttatcgtgccatgaggtattcatgccacttaagatcttttcctttaaaatatcttatctgctactgcgtggtgtgttcctttatttagagggaaaacaaaaagagtattccagatagcatcgtaattaagagtcgaaactttcaatgagatgtgggttgatttggttgtgtgcaggactgatagtgctctgaagtttgggtggtttttcttcacgtatctggtgagttttccatttggtttagtgaactttttttaatggctttgacacatcaaaaggtggaagtgagtaaaagcttaaaatatgattgcagtttcacatagcgttttgtgtgtttgcggcggtggctcctccaattatcttcaagggaaaatcgctgacgtaagtaacaaattagtttctactttctaaatcacacaaaaggaaagaggtggaatcatcatatgttgttgtgttatgcagaggaatattgccggcgatcgacgtattgagtgggaatatcttggtcggggtaagttgaaagcttaggtagcgaataacttaaacagttgtggactttgagtaaggctaacttttggtgaggtggtggcagatattttacttcattgggtttgggttcttctgtctggagtcactcgtcagcatctgggttattcaggttccctcctttgctgaatcatttattcatgtagataagttaaaaaggaagaagtggttaacaagttgttgttgttgttgtgtgtgtgtgtgggaacagcaagtgtacatgtacttcagggggagcgggaaagcagcagagatgaagcaggaggccacaagacgagcaatgatggcagctctctgaccaatgaccacatacacacaccttttaacccatctccaattttttcccatttaacatacaaacaaacagtgaacgttagatcctcttga

SEQ ID NO: 157534 - DNA, 407 bp, Arabidopsis thaliana landsberg
ccttgaagtcactaagttgattcaaaatggttgcgagaagtgaggaagttgagatagtggaagatacggcggcgaaatgtttgatgttgttatcaagagttggagaaggcggcggaggaggagagaaacgagttttccgatgcaagacttgtcttaaagagttttcgtcgtttcaagctttgggaggtcatcgtgcaagccacaacaaactcattaacagtagcgatccatcacttcttggatccttgtctaacaagaaaactaaaacggcgacgtctcatccttgtccgatatgtggcgtggagtttccgatggggcaagctcttggtggtcacatgaggagacataggagtgagaaagcctccccaggcacgttggttacacgttcttttttaccggagacgacg

SEQ ID NO: 157535 - DNA, 876 bp, Arabidopsis thaliana landsberg
aacatagtgtaaaccccgagtggaacgacgacttgactctttccgttactgatccgaatctcccgattaaacgtgtaaggaatccttacattatattgtagcatgatagctgaaacagaatgataagcggtgggaattatgatgtagacggtttatgactatgacttgctctccgcggatgacaagatgggagaagccgagttccacattggtccatttattgaagctattaaatttgcccatcagctcggaccaggacttcctaatgggaccataataaagaagatagagccgagcagaaaaaattgtttgtctgaatcaagccacattgtgttgaaccaaggcaagattgtccagaatatgttccttagactccagcacgtggagtgtggagaggttgagctacagctcgagtggatcgatgtcccgggttcaaggggtatttaggtcaaatcatatcgatccgatctttattagtcccttgtgcatatggttagaaactagaactatggtgcagtttaaaactggtcaatgaaagaatctcaaactggcttgtgtaataaactcatttcgtattttttttctcttgtttgattccaaaaagtttgcaatttcatgaggagtaagtgtaaacatttggatatctacataaatatcctgtcttattagcgtgaattgtgtagactcaatgatctttcgcctcttctttgtgaactattagggattctgatagttccaattatgagcttaggaacaattgacacaaatgtctgtttagctattaattataatttttctgcttatggttacatatatcagaaagccttaaaagaagataaacaccaaatcgtaaatcttaatctcaacaagatttag

SEQ ID NO: 157536 - DNA, 2701 bp, Arabidopsis thaliana landsberg
ttatctcagtaagtgcctgttccgtggaaacagggagtaatggtattgacgacgaaaaatgggaggaagaaattgatgtatcagctggcatggtaacagaacaaagaaatggtaagactggtgctgagttcaatagtgttaaaattgtttcaggtgacaaattcttgaatgatagcattgaagtagcagctgggaccttatctccattggaaaaatctagttccgaggagaagggagagactgaaagtcaaaacagtaatggaggacatgatattcaatctaataaggaaattgtaaagcagcaagatagcagtgtaaatataggtccagagattaaggaaagccaacatatggaaagagaatctgaggtattaagttctgtttcaccaacagagtctagaagtgatactgcagcattaccacctgctcgcccagcaggtcttggtcgtgctgctccacttttggaacctgcaccacgcgttacacaacagcctcgtgtcaatggaaatgtgtctcacaatcagcctcagcaagctgaagactctaccactgcagagacagatgagcatgatgagacccgtgagaagctccagtttatcagggtcaaatttttgaggctttcacatagattagggcaaactccacataatgttgttgttgctcaggttttgtacaggcttggattggctgaacagttgaggggcagaaacggaagccgtgttggtgcctttagttttgatcgtgccagtgccatggcagaacagcttgaggcagctgcacaagatccccttgatttttcttgtacgattatggtgcttggtaaaagtggggttggtaaaagtgcaaccatcaattctatttttgatgaactgaaaattagtactgatgcattccaggtggggacaaagaaggttcaggatattgagggttttgttcagggaattaaggtacgggtaattgacactcccggtctcttaccatcctggtcagatcaacacaagaatgagaagatcctgaagtctgttagggcattcatcaagaaaagtccgcctgacattgtgttatatcttgataggttggatatgcaaagcagagattctggtgacatgcctctcttacgcaccatcactgatgtttttggaccatcaatatggtttaatgccattgtgggtttgactcatgccgcttcggctccaccagatggcccaaatggtactgcttctagctatgacatgtttgtgacacaacgttctcatgtcatccagcaggccattcgccaagcagcgggagatatgaggctcatgaaccctgtttctttagttgagaaccactctgcttgcaggacaaatcgggcaggccagagagtattacctaatggccaagtgtggaagcctcatttgttattactctcatttgcatccaagattcttgccgaagcaaatgctcttctgaaattacaagataatattccagggggacaaattgcaactcggtccaaggctccgccactaccattgctccttttatcgcttttgcaatcaagaccacaagctaagctttctgagcaacagttcgaagatgaagacgatgaagatgatttagacgaatcatcagattctgaggaagaatcagagtatgatgagcttcctccctttaagcggttgactaaagcagagatgacgaagcttagcaaatctcagaagaaggaatatctcgatgagatggagtatcgggagaaactatttatgaagagacagatgaaagaggaaagaaagagacgtaagttgttgaagaaatttgctgctgagattaaagatatgcctaacgggtatagtgaaaatgtggaagaggagagaagtgaacctgcatctgttccagttccaatgccagatttatctctacctgcatcttttgactctgacaatcctactcatcggtaccggtaccttgatacctccaatcaatggcttgttaggccagtgctggaaactcatgggtggggatcatgatattggttatgaaggtgtgaatgcggaacggactatttgttgttaaagacaaaataccagtatctttctctggccaagtgacaaaggacaagaaggatgcacatgtgcagctagaattggccagctcggttaaacatggagaaggtagatcaacttccctaggttttgacatgcaaaatgctgggaaggaattagcgtacactattcgaagtgaaacaagatttaacaagtttaggaaaaacaaagcagcagctggtctctctgtaacgctcttaggtgattcagtttccgcgggactaaaagtcgaagataagttgattgctaacaaacggttcaggatggttatgtcaggtggagcaatgactagtcgtggagatgttgcttatggtggtactttagaagctcagtttcgagataaagattatccgcttggtcggtttttatcaactcttggactctctgtgatggattggcatggcgatcttgctatcggagggaatatacagtctcaagtacccattggacgttcctctaatctcattgctcgtgctaatctgaataacagaggagcagggcaagtaagcatccgcgtaaacagctctgagcagcttcaacttgctgtggttgcacttgttcctctgttcaagaagcttcttacttattattcccctgagcaaatgcaatatggacac

SEQ ID NO: 157537 - DNA, 376 bp, Arabidopsis thaliana landsberg
caaaatccgtctcggtggaggaaaaatggctgaagaagctcaagtagatcgttctaatggctctgattcatcatctcctcccataaagttacctcctttcatcaccaacctattcgcctttcttcaacctaagcctcctcctgctactattgatgccaatgctcctaaacctaccggcgagaaggaacctctgaaatcgacctacgagactgtcactttcccttacaatccacccaaaagcgcagagccaatcaagtttgaggctgagcccagctctggcaggacttccaactctgtcatcctttggcaggtgattttgttaagatgtttatattttagaggggttctttgatgaaaaatgatttgaattggctta

SEQ ID NO: 157538 - DNA, 3210 bp, Arabidopsis thaliana landsberg; identical to SEQ ID NO: 2600
  unsure (1)..(3210): unsure at all n locations

SEQ ID NO: 157539 - DNA, 5206 bp, Arabidopsis thaliana landsberg
tcagagaaaggagaaatacagttaactttgtacctaggcaaccactcgaaatggctgacgaacagaatcaacaaaatggccctgccaacattggtggtggagatgcaccacgtgatcaccgtcagaggaaaggaattgcacctcctgctatcctgaacaacaacttcgagattaagagtggtctcatcttcgagattatgcttctggataccgctagcaatggaaatttccagaacaaagatgttgaagaaggctgggaattggttgagaactttgctcaatcagatggtaattacaacgaggactacgataagaccgtcagaggcacatctgactctgatgacaaacacaggaaggagatcaatgtgctgaatgacaagctggacaggattcttcttagccagcagaagcatgtgcacttccttgtcgatgacgagcagtttcaagtccaagatggggagggtaaccagttagaagaagttagctacatcaacaatcaaggtggctacaaagggtacaacaacttcaagatgaacaaccccaacctctcttaccgcagcaccaacggttctaatcctcgggatcaagtgtatcctccacaacaacaacaaggtcagaacaaaccttttgttccctacaatcaaggttttgttcccaaggagcaatttcaaaggaactaccagcagcaaccaccacctgggtttgcacctcagtcaaaccaaggtcctgttgtacctgatgctgaaatgaaacagatagtccaacagctgctacagggacaaccatctagctccatggaaattgctaagaagttatctgaattgcaccagaagatggactgcagctacaatgacctgaatgccaaagtggaggcgttaaattccaaagtcagatacttagaaggacaatccgcatctacctctgctcccaaagttatgggacttccagggaagtcaattaagaatcccaagaagtatgctaatgttcatactatcaacataaggagtggaagtgagttatccactagagagagacccaagtcagtcactgaggacagcgcataccaagatggggaggatttcagtctcaataaagatcaagctgaccagtcactcgagcagccactcgaccagtcacttgagcagccactcgagcagccacttgaccagtcactcgagcagccactcgaccagtcactcgagcagccactcgaccagtcactcgagctgtcactcgaccactttactcgaccgaccttcccaggaacttcacaaactgctctgaaaccagttgctgtcaaaaacaaagaaaaagtcttcattcctcatccttacaagcccccacttccatttcctggtcgacacaagaaagagttagaagataagtacagagctatgtttgccaagaacataaaacaagttgaagccaagatacctcttgttgatactctcacgcgtatcccggattcccaaaaattcctgaaagacttgatcatggagagaattcaagaggttgagaaaacaacagttatgagccattagtgtagtgccataatacaggagaaagatgaaccagagaagctaggagaccctggttcattcactctaccatgctccctaggttcattgacattcaataaatgcctttgtgacctagcagcatcagtaagtctaatgccactctcagtagctaagaggttgggttttaacaaatataaatattgcaatatcttcttgattttggctgatgggtctgttagacaacctcatgggttattagaacatttgcctatcaagattggaaatgtggaggtgcctacagacttcatagtgttgaacatggatgaagaaccaaaagatcccttgatcttaggaaggccctttttggctacagctgaagcaatcatagatgttaagaaaggaaagattgattttaatatggggaaggattttaaaatgaagtttgacatcaatgatgctatgaagaagccgacaatagaaggacaaaccttcttagttgaggaaaaggatctgctagttgatgaacttctagtggagcttaaagaagcaaataattgaaaaactgttttgatcaatagtggtaaaggtgggtttctccttagtgaaactttgagttctgagaagtcattagactcacacaagacagtagttggctcagaggtttacaagggcttgatggggtctgacacaaaggttatgaaagctaatgaagtaagttcaacacatgctcgatcaactaattccaccaacaactcgaaaaagcctccaacttgtcctgaaagctcatgctcgaccaaacaactcaaggcaagcactcagatgtcagatgattggttagaactcaaggagagatctaaatggcaagacaaagccatacaagagctaacacatattgtgtaagagctaaaggatcaaatcaaggagctcaatggaaaagcgaaccaagtaccactcaacatcaaggacgcccctgacgatggagccactatacttgtcagcaaagaaggatgtgaattcacgtcggaatggtctagaggagaagactatcttgataaaaaagaagcttactgtgaggacatggccactgagtacccaattgcagacctgtcaagaaaccctaatgagtatgatgatcactctactaaagaaggagaggagacctcatttcctctctacaacccaccctaagcctaatgagtatgagaagtcaagcttagagacttaaaacaagctcacttgggagcaaatcccatgtctatctttgtacatatctttatttttccttgttgttttttatgcatttggttagtgttttcaggagataagtataaagagctgagtgaagtggattctggctctaagagtacaacactatactcgaccacagagcaatgaaggatactcgaccatgttttagcttatccacgccaggagatcactcgactgcggtgctgactgcagcagaagaatggaggtcgagtatactcatggcagtgctggccgccacaaaggcaatgaggtcgagtacccacatgctggagctgagaccgaacagggcaactcttcaatggtctgggagcaatcacaagcagccattgacgaccaactccgttcattctttgactgaggtaagcgcctcactttaccattgtactataccatgtcttgtttatattttggttatgtgatgtgttatgttctgagtactctcttccaagtttattcacacagtggactgtgtgatttaagtttgggggagggctcaagaagtgtgtgttgcattgcgtatatttatgagtctgcatcatctaaggaatagaaaaaaccataaaatttgaaaaaatttcagaaaatgatttcacaaaaatagagtgtcatgtagattgcatttcattttaggattgtatatagtgtgtttgcatttaggattgctcatttgcatatgggataatgatgatttcaaaccgttaagcatgttttgattcaatgaagtaagttcaatgcgcaggttgttagttctctgttgcataaccgattgtttctctgaagtaagactgcaccctgctttgaatttgtaacttgactatactgctttgattcgaaactcgcttatctgatgccatttcctatctattacaacctgaactgaatttgcaattatcatgtctatgcattgtttgtgaactcatggctaccatatacatacttggattatcttattcacttcaccaccctctgttactccaagtagctgactctcatttttagagcagtttcccatacccttagcctagccttatttcaagccaaagatcatttgtgtgtgattgtgaggtctttttcgattgagcttggtataatgtgttaggtatgagccgacaagaacagtctttcatgtagacctagcccacactttttgggttagctaggactaggtggagacttgtatttgggattgggattgtgtatggaatgaatgggaatgagaaatagaatgaaaaaaataaaaaaatgagagtaagagtttagagtcctaagggggatacaaaagtgttaagtctagtaaagggtttggaattcaaagaagttaggcattgtgatttaaataaaagggtaaattgccccatgtgcgaagattagaagaaaagccttaagtttgtcaaagtttaaaaccaaacccgctagactcttaaatcatttcaagagaaccccttagaacatgaaccaaaaagagagaaagaatgagaaaaagggtagagttaggacatctatgggaatgggatcatcttctgagctatcatactatatcattgggtagatgggagtctgttcttgtatgtgtctgttggcttttacctttaccattctactgaagctcaatcttttctctaagggtcccctgttactcgaccaaaccattagagggaccatttttgtctcttggcctaagcccaaaaccaagtgagttcataaccattgcattgtttgatccactatccgtgcttaatgaatgttaaagggaattggttgatgtgaatgcttgaatagattaaggcaagttgttaggttgcattgtgacgagtatggctaacatttttaagtaagggtctatcatcttgcaacctagaattagctacctggacattgagcttacccattttataggcatgcttcggtttttgaatccccaccttcaaacctctccttcaacttaagattttttgtttacttgagggcaagcaagagataagtttgggcaagcaagagattaggtgtatgtttatcatcatttagctttgcatttgctcattctatcatatcattttgcaccattttagcttattttgcatacttaggcatctaggatcgtcttgcattcgcattgcatgttttggtgtgttttcaggtgcagaaggagctaaaaaggactctactcgatccattcactcgatccaagcagctacagcagaggtatcattctactcgacctctttactcgatccaggatgctacaaaggaggttgcagattgatctgctcgcccctcctactcgatccactactcgatccatttactcgaccaagggtgaccaactctacaagacttgtgaagctatcaaagcgtcttcggatcctcctcattccccactcaaccagacatctgagcatacggataggagaggatga

SEQ ID NO: 157540 - DNA, 1592 bp, Arabidopsis thaliana landsberg
  unsure (1)..(1592): unsure at all n locations
accgaccaatccgccatgaatatatctcagattattttcttcgcgtcccttcttctacggcttcacttatcaacggcggaacatcaaaattcaaacgctggtgatggagacaccatcatattcaccactctaggacgatcgcactacgaatttgacatattcgccctctccacgactcaaccgccgtcagtttccggagagctccgaatcaccgatggggaatcggtaaatttcaacggctatttcccgtctccttctccggctctattatctctccttcccgacgaaaccctaattcaaatggaagattcgtctcctctgcatctcatatacgtcaccgagagaaacggtacttctagcttgtactacgatctagtttacggcggtaattctgattctaaaacgaaacgaagatcggtgttagaagcaccgtctcgagtacaagttccgttgttatcccgctttgatcatctgagtggcatgacggtaaattcttttaaagataagcctagtttgagtggtgagtttattgtctacgtgtcaacccatgagagctcaggtgagccgagagcaagctggaccgccgtttactctaccgagttaaaaaccgggttaaccaggcggttaacaccgagtggtgtagctgatttcagcccggcggtatcgccttccggaaatttaacggctgtggcttcatacggagagagaggctggacaggggaagttgaagagctacgtacggacatctatgtattcttgactcgggatgggtctcaccgtgtcaaggtggtggagcacggtggttggccgtgttgggttgatgagtcgactctgtatttccataaaaaagtgaggagaatggttggatcagcgtttaccgagccatcttacctgaaaacggaccgttgactacagagtcggtgacaattcagcgagtcacaccaccgggagttcacgctttcacaccggccacgtcaccaaacaaccacgagttcgttgcggtagctacaaggagaccaggctcggattaccgccacgtggagttgtttgatctaaagaggaatgagtttatagagttgactcgtttggtggcgccaaagagtcatcacttgaatccgttcttgtcccctgactcgtctcgagtcggatatcatagttgtagaggcgatgctaatggacggagaagtcctctgctcttccttgaaaatattcaaaccactacaagggacctctctctctttagaattgatggttcgtttccttcgttctcacctggaggtgatcgtatcgcatacgttaagatgcctggtgtgtttgtggtgaagccggatggttcagggcagcgtgaagtgtacaagggaatggcgttttcgacagcttgggatccggttcgacctggaattgtgtactctagctcaggtccaacgtttgctacagagagaacagaggttgatgttatctctattgacgttgatnnnnnnnnnnnnnnnnnttccgtgaggaggctaacgacacccgggcagaacaatgctttcccttggccatctaaagatagtaagcggatagtgtttcgttcgggacggactggtcac

SEQ ID NO: 157541 - DNA, 1615 bp, Arabidopsis thaliana landsberg
cgaccttgtacaacaccgttgtgttggacgcccgtgggcgaacgtcggttgtttggacctacgatcgtggatgaaaccactgagagaatgaagttcttaaaaatcaagttaaaggaagcccaagatcgacagaaaagctatgccaacaaacgtcaaaaggaattggaattccaagtaagagatttggtgtactaaaaggcgatgacctacaaaggggcagggcgattcacctcaaggaaaaagttaagcccaaggtatgttggcccgtacaaggtgatcgaacgagtaggggcggtggcatacaaacttgaccttcctccaaaactaaatgcgtttcacaacgtcttccatgtgtcacaattacggaagtgtttaagtgatcaagaagaaagcgtggaagatgtacctcccgggttaaaggagaacataacggtggaagcatggccggtacggatcatggaccgaatgacgaaaggtactcggggaaaatcaagggatttgttaaaagtcttgtggaattgtggaggccgtgaagaatacacttgggaaaccgagaataagatgaaggccaattttccggagtggttaaaggagatgggtaaagatcaacttgatgcggatttgaggacgaatccaattcaaggggggggagacttgtaacgcctgcaatcctcaataggatcgttgactaggacttggtccgagagaaaaaggtggagtctcggacaagtgagaaggagctggccataagctcggacaaaggggaaatcatgcaggctaagctaggatcgtaaagaaatcagctgggtcagctcgcccaaagctcaagctcagctggaaggagtgacggttactcaggtcgagtgacagtccagctcgggcagctggacgagtgacggttgagctcgaggtagctggacgagtgacggctgagctcgaggtagctggacgagtgacggatgagctcgaggtagctggacgagtgacggactagctgggcggttatgggcgaaaagatacaacccttcggaaaggtgcaactcttcggaacggcacaactcttcggaaaggtgcaactcttcggaaaggtgcaaggaacggatgtgttgattcgggaagcatccattcgccccctatataaggaagggcgcccaggaccattccactcaccacaacacaccgaaaacacaagaatccgggtcatgtgcatcctacacaagactcggtctgggtagggatcggctgaggcggggacgcggctcggcggaggaccggcgggtcttaactgacctgccgagaatcggccggactgatgcgcgatcttcccctctctgaattctctccacggattcgagtagtgtatggcatatagagcattgcatggacttgcatatgattaagtaaatgagattacttatggctctatgactttcaggaatgaatggtgatcgtgggaaggacttggcttaggcgcgagagattcaaggtcgggatgatgggtggtgatagttcggatatctagggatagattatatgacttgtaatagcttatatgcaaactcataggttgtatcgaatcctttgcttaatcaataaagtatccgattgtttgttt

SEQ ID NO: 157542 - DNA, 1100 bp, Arabidopsis thaliana landsberg
tacttgaggaatgaacatatatgtggtcgtcctttaggtcttcgtttcgataagagaaccggagatttgtatatagctgatgcttatatgggacttttgaaagttggtcctgaaggtggtttagcaacgcccgcttgtaactgaagctgaaggtgtgccgttggggtttactaatgatcttgacattgctgatgatggaactgtttactttacagatagcagcattagttaccagaggaggtctgtgatctcttgattttgaatgtgtggatgttgctactgattattttatgtccacaagttctgaaatttaactgtgattctctttcaggaacttcttgcagctcgttttctctggagacaatactgggagggttctaaagtatgatccagtagctaagaaagctgttgttttggtctcaaatcttcagtttccgaatggtgtctctatcagcagagacggttctttctttgtattctgcgaaggagatattggaaggtgagtgtagtgacctagtgatggggttatcttgaactgtatatagatagaccttgaatcaattgcctcactagtagaaagaggaattagggaagtcctaataactgattgttttaggagaattgaaaacatctgtctgtgtgtatgcatcacaggattcatttctttgtagtattgaagggtctttttgtttggatgcagcctacgaagatactggttgaaaggcgagaaagctggaacgacagatgtgtttgcgtatttaccagggcatcctgataacgtaagaaccaaccaaaagggtgaattttgggtagcgcttcattgcagacgcaactactactcatacttaatggcaagatatcctaagctgaggatgttcatactgagactgccaatcactgcgagaactcactactcgttccagatagggttacggccgcacgggttggtggttaagtatagtcctgaagggaagcttatgcatgttttggaagatagtgaagggaaagttgtgagatcagtaagtgaagtggaagaaaaagatgggaagctttggatgggaagtgtgttgatgaactttgttgctgtctatgacctctga

SEQ ID NO: 157543 - DNA, 1190 bp, Arabidopsis thaliana landsberg
ctccgcggttcacgttttttctcaatctgtccggagagagagaaactcaccggggaatcttgaaatcaccatcacatcctctcttccctcgatctccgttatcgactgtaaatcgaattttgttgttgctttgttttcttgggcgaataaaagaggataatttagtggcggggttttcgagaaagagagagaaagaatgagttttcaagatttagaggcgggaagaggaagatcattagcttcttcaaggaacatcaatggtggtggttgtagacaagacacgactcaagctgttgcttctggtatatttcagatcaatacaagtgtttccactttccatcgtcttgtcaatactcttggtactcctaaagatacgcctgagctcagagagaagctgtaagtacttctcaaagttaaagttatctcctttttgagttttagggtacttgaaattgtttctaattgagtcaatttgcttgttttaggcacaagacaaggttgcatattggacagcttgtgaaggatacttcagctaaacttaaagaagctagtgaaactgatcatcaaagcggtgtcaatgtaaaatggaattttttttcttcttgtttggtttttaagctactcttttgttgtgtgtttgatgaattgaaagttgtttgattgttgtgtaactgtgtagctcaagtaagaagattgcagatgctaagcttgcaagggactttcaagctgttttaaaagagtttcagaaagctcaacaaactgctgctgaaagagaaaccacttatactcctttcgtccctcaatctgctcttccttctaggtaacacaactgattgattatatgtggtttcatgtatgttaagctcgaattcgaattcgaacatgattatcataagcaaaaagcatcactttatgaattgtttgtgtggttttgataatcatgttccttatttgtcttggctggctcggtatatagctacatggcgggtgaggtagataaggtcccggaacagcgggcacaacttcaggagtcgaaaaggtaggtgatcccgaaaaaatattcttttacacatatctcctaacctttatgattcaacttatcttctcctttgtttgattgttgtagacaagaacttgtattgctagacaacgagattgcattcaacgaggctgtgattgaagaaagagag

SEQ ID NO: 157544 - DNA, 2027 bp, Arabidopsis thaliana landsberg; identical to SEQ ID NO: 69087

SEQ ID NO: 157545 - DNA, 1495 bp, Arabidopsis thaliana landsberg
gaagcatatgatggataagctcttcattctttctcttctaggtctgttattggtaactgcttatggagctgcagggaagatggtgtacacagatcttgacgttcttgacgagcttgagaactttgatgtactgatagatgatgatgatgatacaaagctcttggattggccatcattcacaagccgacattctggaaaaaatctggtgaatgttgatacatttggtgcagctggagatggagtttctgatgatactcaggtttgcttattccataagaataacaggttatctagatacctaaaacgctatcacttctatgtctggaatgaaacatatccccaaacttgaaatcatggagaaaatttctaagcaaattgtttgcattgtagacttggcctatagatatttacggagatgtagttagatatttttctgcatctgatctgtgcaatgctcttcccaaatcaggcattcgtaagcgcatggagcaaagcctgcggtacatcaaaatctgtgtttctggttccagaaggacggcgatatttagtaaacgcaacaaagttcaatggtccatgtgaacaaaagttgatcattcaggtcaagttatcttcagtaggaaaacagaaactagacctaactgtatatacaagtatgtcttatacaattcagaaacttgtctttgtttacagattgacggaacaatagtggcaccagatgagcccagcaattgggactccaagtttcaaagaatttggctcgagttttcaaagctcaaaggggtcgtgtttcaagggaaaggagttatagatggttcaggcagcaaatggtgggctgcttcttgcaagaaaaacaagtctaatgtaaaatcttctatactaaaatctagctttctttatcacaaaagataagtgctcgagttttcgaatagaatcttacacatctttcttgctcttttacagccttgcaaaagcgcaccaactgtaagaaaccatcatttaccagttattattccttacaaatggctgcttatttggtttcattcaacaatctgtttttgttttcccctgcaggcactaactatagaatctagttcaggtgtgaaagtaagtggattgacaatccagaacagccagcagatgaatttcatcatagcaaggtcagattcagttcgagtctccaaggttatggtctcttctccaggagatagtcccaacactgatggaatccatatcactggatctaccaatgttatccttcaagactgtaaaatcggcacaggttttttttcttttgaccaaacctttatgcaaatgaaacattttacacttcaactacggttgtaataatcccttaagactggattaaacaggggatgattgtgtctcgattgtgaatgcaagctcaaatataaagatgaagaacatctattgtggacctgggacatggatcaggtacatcatcaaatttctagattacctcagttccaaatcaaat

SEQ ID NO: 157546 - DNA, 1155 bp, Arabidopsis thaliana landsberg
ttcaatcctctgagaaaagaagagaagaagagatacttctattgatggagacgctggaagaagcaagtttatcttcttcatcggtgaatctaagcaaactcattactaatatggtaagcgacataatgggtaaagttgtattgggtaaaaaatacagcggcgaggaaggcacaatcgatgtcaagaccataacaaagagtttcttggacgccgtggggctttccccggtcggggaatacattccgagtttggcatggataggtaagattacgggttcagatggtaagctagagaaaataaccaagcagtttggtgattttatagaaaaagtgttgcaagaacatgaggatacaactgccgacaaagaaacaccagattttgttgatatgttgctaacaattcaaagagatgagactgcacaatgccaattggataaaagcgacttaaaagtcatcatatttgtaagattaagcatctatcatcatcattagtatatatattaatgatacaatactttgataatcatatgaagttcttttccatttataggaaatgtttttagggagcacgacaacaacttccgcggtaatagagtgggcgatgacacgccttatgagaaatccagaatgtttgaagaaacttcaagatgagattcgttcagtttcgaagatgaattcatatgtatcaggaaaagaagttgaaaatatgaactacttaaaagctgtgataaaggaggtacttcggctgcatcccccactcccgctattagttccgcgattattaagcgaagatgtaaaattaaaaggatacgacattgctgcgggcacacaggtcaaatatatttacgtattttttcttattataactgatatcaaaaaacattttagataaaaagttttaaatgtgacatataggtgatcgttaatgcttgggcgatccaacgagacactgcgacatggggatcagatgcagaagaatttaggccagaaagacattttgattcaacttgggattttgttggacgaaatttcaaatacattccatttggagcagggagaaggttatgtcccggcattggacttgggtcggtgatggcaagtgtgactttggccaatcttgtgaaacggtttgactggagagttgaggatggacctt

SEQ ID NO: 157547 - DNA, 920 bp, Arabidopsis thaliana landsberg
tgtaccgagtgtgcgtatgttcaggtttcatcatgaagtgtcaaaacaaaagtctaatgttcgaacttccaagtagcaagtgttgttaacatcttcaatgcaaaaattgttgtaggtgaagtggtatcactattttctccttgctgttgttgatgtggaggcgaactttctcggtgagaaagaactcttcttttgtcccactctttggcctgagcactgatcctgggttttcatgttttttgttgagtatcatgagtttttgagtcatctccattgcttccatagttgtcaaggcatttcagaacacatcgatgactagtatcatgctactggattgctgggcgatcccttgcgttttggtcttgacttgggttttcctgaaaacaagatacagattgatgaagatcagtggtgttgttatctgtattgttggtgtcgtcatggtagttttctcagacgtccatgcaggggatcgagctggtaatggtgtaaattgattcattacttctctttctcttatttattcttaccatggtttcactcatcttaagtctgcaagtaaacactcacatatttgcccaagaaactcgagttaagcatatttatggtagctttcaggtggaagtaatctcatcaaaggagattttcttgttatagctggagcaaccttgtatgctgtcagtaatgtcagtcaggtaagcaagtctctgatcacatactaaaaagactttaagtgtacttgtaattctagtcgttatgttcctttgtgataggagttccttgtgaagaatgcagacagagttcaactcatgtctcttttgggccttttcggcgcaattattggtgccattcagatgtatccttcaaacaacaaggctaagactttaatgtttcttaaaacttatatgtgcaatctatga

SEQ ID NO: 157548 - DNA, 1869 bp, Arabidopsis thaliana landsberg
cagcatgcctttacccccacgaggagttatcccgtgataattacgatcaaggacagctttaaaccggatcttcaatccaaagttactcaggtttataatgttctttttctcctcgtttttctcatattattacgtattctaattcttttggtatgatatattgttgcatatgtagatgatagatcagacatttggtgatatggtataccacgaagacccccaacaaagcttggaggaatttccttcaccagcagaactacaaaataagatattaatatcacgaagaccaccaacaaaattgttatatgctaaagccgttgagaatggggttgagcttgagatacaagaggggtcaacagataagaattaccagagtgttgttggctttcatgcagtggaaccaagaggcatgctacaaaaagcattaacagacgacgtccaacaaccaggatggtacgaaagagatgttataaggtattgttgagttaaataagtttatactacataccaaaacccttactcaacatgttgagagtagttgcctctcaaatactaaaatataactgattaggaaattcttgacaataaacagcttcacccaaaataaattcttgcggacacgtccaaaaaaacgcaacttgttgagcaaccccccttataaacctcagagagcttggatgcacggtgcacaaatgattgcactaagcaggcaggtgtgcctctaaacgtttctttctctctctctctttatctggattctcttgctcataaccagtggttgcacaagcatgtacgcattgtgtggagagcttacctattggaatccgtgtcatgaatacattatgttttactacaggatgacaaagaaaaactttggttgatgcaagggatgtttagagcaaatggagggtgcggttacgtcaagaagccgaatttccttttgaatgcaggttctagtggagttttctatccaacagagaatccagtggtggtgaagacattaaaggtttgtttgtcatcctacaacaattatactatggttctatttctcacttaggatgggtgatgacattatatcttgcaggtcaaaatctacatgggagatggatggattgtggacttcaagaagcggataggtcgactgtctaagccggacttatacgttagggtacaaaaatctaaatcaggagatgatactttaatttcttgggtatggaaatgagtttgattttggttctttaatcgcaaatgcacagatcagtattgccggtgtaccccatgatgagaagattatgaacacgacagtgaaaaacaacgaatggaaacctacttggggagaagaattcacatttcccttgacctatcctgaccttgctttgattagttttgaagtttatgactacgaagtatcgactgcagatgcattttgtggtcagacttgtctaccggtttctgaactaatagaaggaattcgtgctgttccgctctatgatgagcgaggtaaggcatgcagctcgacaatgctgctcacacgttttaagtggtcttagcgtacaagtttctttctcattaccaagtggcggctcttgatctagtggtgtttcttaaaacctttcaaagttacgctttctaggacccctagttcaagttccacctggaagggggaaagggtttaggcaagcttagattgtgatacggaaataaggtatttggtccagaaaaacttggcattggcattttactttggagacgaaaataaagttttctctttttcctgttatttgttgtcacttcaagtttctttcacttttatttttgaatttcttttactgaattactgtctttttatttcaaaaactatttttcatt

SEQ ID NO: 157549 - DNA, 1427 bp, Arabidopsis thaliana landsberg
caaagaccctttgaatatttatattcaatgacacacatattattttagaaattttataatcctatatactacactaggttttaacattttagattttttgtgtttagaaacgaataacatattagcccaccctatgaggatgacgcgactaattctactatcccagggcctacggcctataattgacgggtttaaatcgatattaataccagatgggatactacaggtgaaactctgaaattataatcaaaatcaagtggataatatccgactctaattaatataaataatatcaacaaaacatatacaactcgcagtttactcttcctttaaaatcaaataaaataatatcatatatttataattatctttacaataaaagtttttagtttaactaaaatataagcctacttgcggtatactgcaagttgaaattataaataagcagattactatcacgatttctgtaccttctcacatacacacctatcaaaaagttaaaacctttcaaaacctcttggtatattcaaattaggattcttcattcatggaattattattccaaaggttttgtgatgtcttatgaaatgattttggcagaagaggatgtaaaattttttttttaaaaagtagtcagcaaaatatatgtttttttggaagtctttagataattaaatcacagaatagagttgggcatatgagtaacccattcgagttcgggtagaacctgtttgggtttgggattaatgggtatatgatttactacccaatagaataattctaaatattcggttctggttcgggtcagatccagttgggtttgggtcagtttgaaaaaagtttcagaccctaaaaatacccaaaaaaaatagaaacgggaaatttttatgtagatagcgggtctccaaacaaaaaaaacttttaaatttcttaaattttaataaatttaattatatttgagtatattttactaaattttgacaaacataacaaataatttttgaatagtttagttgttttggatatttaggtccaaaattaattgacatatttagatttataattataatcttagataattagataatattacgattaaatataattaatattttggatattaaattaatttttgagttttttgaatactctttttgggtaacggataatttccagaccaatcggatatccacgggtttactaaaactctacctaataagaaaatttcctaaaaatttaacccgccctaacccagttttttggttcgggtattaggttggttatcgggtccgttttttcgtcagcccctatcaaagataatctaatatagaccccaattaggtctataaatgtaaccaaaatattatagaaagactaattctaagttaggccaaaaattagatcctctaatacaaagaaaacatgat

SEQ ID NO: 157550 - DNA, 1139 bp, Arabidopsis thaliana landsberg
  unsure (1)..(1139): unsure at all n locations
gtctctttctctctctctcagaaactctttctccaagaatggcagaggcaagtttctatatcggagtcataggtaacacttcttctctaacgtgtacgttgtgctcataatctgtacatgtataaacacaagtgcacgatccaatacataacatatatatatatgtgtttgacgcaggaaatgtaatttccgtactagttttcctctcaccagtgtaagctctctaaccttgcaagaagtaacaaaattgtataatctatagtctttcttacttagattattaatcgatcggtccatattaatataccaaacaaaaatcatcagggagacgttttggaaaatagtgaagcggagatcaacggaggagtacaaaagcttgccgtacatttgcnnnnnnnnnnnnnnnnnnnnnnnnnnnnnnnnnnnnatcgtcactcccggagaatatcttgtctccaccgttaatggctttggtgctcttgttgaaaccatctacgtttcactttttctcttttatgcccctcgacatctcaaggtttttaatttattctattttatgatattctgatttatatatatgctattatgcatgatctttagtgtttcctatatgatagctggttacaaaatctgcattttatttgattcatttttattcagatttggatctgattatcagatttctatgtctcacttttaattgattcttttttgttctccctaaagtcaagtcgattaaaatatttgatccacttgttataagaaatacgatgatgacttgtaaagtagagtttccaatgtatttctacattttacaaagtagttgttggttcaaataattgagctttgtatatatgttaacaacaatgtgatctttttttttgttcttacagctgaaaacagtggtagtggtagcgatgttgaacgtgttttttccaatcgcggcgattgtggcaacgagaagtgcgtttgaagatgagaagatgcgttctcaatcaataggtttcatatctgctggtctaaacattataatgtatggttctccactttcagcaatggtaagtttcattcttaattttacctcatctgtcaaaactcaaaaacattattttatagcgttttggtagatatcatatcgc

SEQ ID NO: 157551 - DNA, 2692 bp, Arabidopsis thaliana landsberg
  unsure (1)..(2692): unsure at all n locations
ttcctggtttgggatcccagatacctgaacacgtggtagattgattgctacgttgcatggtgaaaggagctgtggtttggaacccatgcttgagacagagtggatagatcgagcaagatttacaccaaactcaatggaatcctatggcataggatacaacaataaggggagttacaagatcattgctggttgtcgtctgaaggaacatcccacaaagaccttgtggacaatgcatgactttgcctccaatgcttggaaatacctcaagtcagtatctggtagtgtaatagtcaggaaggaaaaacggctgaattgaagtactcaccacaagttgtgtattatttttgatgacaagactgatcccatgtacacctgccctatataaattcaattcctccagggaattctttttcagattttgtcatctaccatgtggaacgatagactatcgtaaggatgctcttgtactcagggtttatgagggggatcaattttcattgttaaatcaatgccatgcaacaaagaagattgaggtctgggtgagcaagtacaagattaataataattgggttgcctgaatttttaaccctatactagttggagtctcaactttccaccataaacttttaaccacttgaaaaaccagcataaacaattttaatctcgataaaactacatgtactttcggatttgttcttaaaactacgtctccaattgaacagaccagttaaccgataattatacatccggtttgacttacccataatttaaccgaaactaatccgattttgactctattttagcctaattttgacccacacagtaaataaattatcttattaagaggtttttgtctggggattaataagaatttgtgataaacatttaaaaatattaaattataactaattttcagcacaacttaatatgacaaattatagccctaattctattttgagctatattttgttataaatttttgcacatatcccaacacagagatctcccttgtggcaccacaatatatatatatatatatatgtatttatatatccgtaataaaaacatataccgaatatatatacaccataatatatatatatatatatatatatatatatatatatatatatatatgtatttatatatccgtaaacaccataatcaaagtatatattatggtatttataaattcatttttctttatagattcagttttctttttatatatttcaagatgagttatatatgtatatatatatatatatatatatttatatatgattatggtgtttttaaaaagaaaatggcttttgaattattaaatttagagtatataccaaatacatttatatatatatatataacaccattgtatttataaaaagaatttgttgtctattttgttatattattttgcggtatattttgttatttattattttggtaaacttaattaatttatttttaattttttatcaaaaataaatgaaaataaataaaaagtatttatcttctagagaatatattttttgggtataaattgggttaaaatagagtcaaaatcggattagttttggttaaattatgggtaagtcaaaccggatgtataattatcggttaactggtcggttcaattggaggcgtagttttaagaacaaatccgaaagtacatatagttttatcgagattaaaattgtttatggtggtttttcaagtggctaaaagtttagggtgaaatgttgagatttcaactagtatagagctgaaaattcaggcaacctgtcttcatttgaagcatgcttggagaacctttgcaaggttctggctagatgtgaagagaagaatttggttcttaattgggagaagtgtcatttcatggtaggtatagttcttggtcacaaagtttcagctgctggtattgaggttgataaagccaagatagaggttatgacaagtttacaggcaccagatagcgtgaatctgtgaggagttttcttggacatgttggattttacaggaggttcgtcaaggatttcaatcagattaaaaatgccttagtgagtgctccaatagttcaacctccggactggaatttaccttttgagatcatgtgtgatgcaggtgattatgcggttggagctgttttgggacaaaggaaaggcaataaactacatgctatccactatgcaagtagaacacttgatgatgcacagaggaataatgcgacagcagagaaagaattgttagcagtggtgtttgcttttgacaagtttcgctcttatctggttggttcaaaggtaattgtgcatacagatcattcagcactcaagtaccttatgcagaaaaagtatgctaagccaannnnnnnnnnnnnnnnnnnnnnnnnnnnnnnnnnnnncatcgaagtacgggataggaaagggattgagaatggagttgctgatcatttatcaaggatcaaggttgaagatgacattcctatcaatgattttgttaggaattatgatctctctttcgagtttattgcttgaattgcttaagtactgcagtttcaaatcaatccgactaatggaaaatccagaaggccaaccactaaacttaaggacatccattcccaacataatacacagaggctggagctaatctcactactcttccttttacctcagtcaaaatagttagagttata

SEQ ID NO: 157552 - DNA, 1565 bp, Arabidopsis thaliana landsberg
  unsure (1)..(1565): unsure at all n locations
cagccgccgcaactcttcttctccagcttcagccgcaagtcgatctgtttcttctccaaggtaatgtcttcttctccgatataacttcttctttccattccaacttccaccgtccgatctaacttcttcttcttctccgtcgcgtctcgtcttctccagcagccgtcgcgactcttcttctccagcagcagccgcaactcgatctcttttgcctccaaggtaacgtcttcttctccgatctaactacttctctccgatctaactgcttctctccgatctaacttcttcttcatctccgatctgacattgttttccagatctaatctgttctagtttacggatctaaactctgggttttgtttgttttgcaagatgccgtcgtcagagaatacttatgcacgatataggtcacagcagcgagacccgttgcatgtcaattctcctgtcagtgctgggaatatttcaggggttcaaggttcacgccatccaccatcgtctccaacgccaaccactcagccttctgtcaatcattctgattctcaagctgagcgtctcaacaatctcacactggagaagcttcttgatagtcctggtcgtgctggcttgacaaggctagacccaaagcgtcctccgggaactctctggtaaggttaaattcattgtcctagaacagcttaggttgtagtgccttagaactttgtagtgccttagagcgtaatggaattaggttgtagtgccttagaagtttcaacaaatagaacagcttggttgtacttagcattgtgatgtcttagaagtttaaagacatagaaatccttatgtgtgggctggttggtcttcttgtaggtttgacgatgatgctgcagttgcagcaacagtccccagcatctttgaaagagatttcaaagaacctcatgccaattggtcacaaacaccaggaccagttatcgatcgccggtttgaaacctntgttgtaagtattttaagttgtgtttcattttgtaacttaggcttttttcttgtttatttctgatgtggcttatttctgttttgtagcaagtgtataactgggacagggcaataaataagagagttagggttgagtttgaaacaaagctgaagggaaggatgtctgatcaagttggtctgtggaagggaaagtggaaggaaaagggagatgtggctaaaccgcggtggattgatcctgaagtgtggaaaggtcttgttaggttttggaaggatcctaagtcggagttaaagagtatcaacagtaggaatgtgaggtatcatgatccggatggcctcgagatacataaacaccgctctggccagacttcctacaaagctcgtgcaagaaaacgggtaagataagtattcttctctccttaccattacttaaactacaatgttatgaatctaacttgtttatctctttgtgtttcagtgtgagaagactggagaaacaactcctgatttcctagagctgctagatgagacacatagaaaagcggatggaactttcatcgatgggaagttagaggaaatttacaagcaagtgacatcta

SEQ ID NO: 157553 - DNA, 1781 bp, Arabidopsis thaliana landsberg
gtgcgccgaataagtctctcacaaacagatactagaagacaacaatgcttctaattcttttctgcaacattgcttcgtgtaaacttttttttctatctcttgtattttactcaatttattcttacaaatttgttatacataaaaggaacatttctttgattcttttttgttgtcactaccaaaacgtactgatttgttttttgaataggtggggttcctagggtaaaaaagagaccgatatttaaagttttgttgtgtcccttgactaaaactcaaaacacttctgcttgttttttgttagttgaatttctttattttttaaataatattcatatagctatttatgaaagtgtcaatatacaaataactttcacttaaatttcaatcaatagggctgtttctgtatcaacttttccgattgttatttccattaatacaaatttttagatattgatagttacctaactcacactttttaaattttagttttgtcgacaagtttttttttttagttacatgatgttaattacgactaatcaggtttttaaagtaataaatcaatataaaaatgcctcaaaaaagagagagtgttggaccatggtcgtctataattatttatcaaacatagtcacacacacacttgccgttattgtctagaactctctcttgctctcccaaaaactcatctctcaccaccgtctcaaaacaagttcgatctaaaagcctttacctttagattctctccaataacagatctctctgaatcactctgtcatgtcggttttacttcctctctgtctgattatctccatgttcacctattcaagtaagccctgtttcctctgtttttctacatcttttatcagcaaaatgtttcttgtttatgttatatgttctcagttctaacaagtgggtctataaagattcagaattttagtatgagatctctgttaaattcctcaaaaatctcaactttttcttgtgggtttagttctagcttgagctctgtaatgaatctgaatctgtttttgtttgtttggtaaatttttcagacgcagcgtattgtctttgcaaagaggggaacgagcaagtgcttcaaaaggcaatagactacgcttgtggaaatggagctgactgtaacccaactcacccaaaaggctcatgcttcaatcctgacaatgttagggctcattgcaactatgcagtcaatagcttcttccaaaagaaaggtcaagcttctgagtcttgtaacttcactggtactgccactcttaccaccaccgatcccagtaagttttcagaatgttaacactcttgtgatctttagaaccctacaaaattttgagtctcagaaagttcaagttcaaggtcttttggttagagtactaaagattcaagtagagactaggcgtgagatattttttctctgatgtgtgattttttggcacaggctatacaggatgtgcattcccttctagtgctaggtacggctctttgcttctctacacatttattttcttaatggctttatctagaactttgaaggataccattttattttttttggacaaagaaggatagccatttaatactacactttaatgttggattaactaacttattatgcctatttaatggcctacactttaagtggacacaagcttgatttggtatataaaaaaagtgcactataatcttattttactgaacccttttttctatgatttttttactaaactttaaataacatctacaacaattcaattgccttttttttggga

SEQ ID NO: 157554 - DNA, 1083 bp, Arabidopsis thaliana landsberg; identical to SEQ ID NO: 57786

SEQ ID NO: 157555 - DNA, 1167 bp, Arabidopsis thaliana landsberg
  unsure (1)..(1167): unsure at all n locations
ctcgaccatctatgttttaatttgatatctttgttctgtttttcagctggctaggcggccattgtttttcagagaaactaatccgcagcctagaaaacatactttgtggcaggcgacatcggattttactgatggtcaagctagcatgaacaggtaagaacatttcttatgtccttagtcttaactcgtgagtataggctgataatggtttctgtatctttgtgatatggtaggcaacattttctgcagtgtcccccagggattatgaacaaacattttgagaagcttgttcaatgtgatcatcgcttgttctgtctaagccggcagccagagataaacttggccgcaccgttctttgattcacgactatctatatttgaggatccctcagtgtctggatctcataatattgcatctcctgttggggctcagtcatcatcagaacatgtgtctctatctcatgacgcactatcgcctagctcaggtattttgtttgtttccactatcttatcgttcacattcgtttctctttacttgtggtcatacgttcttgtttatatatagtgatggatgctcgtgcaatcgaaggagttggtggttccgttgattcgaggaatacaaacggttggagtcagataaaaatgcctggactacaccaatctatctcgatgaacgatttccttacatttttgtcagatcaagcttgtgaaaacaaccaagagtttgaggaaatgaaacagttactgctaagtgacaacactcaaaccgatccatctgatgagaagtctgtcatgtcaaaggtgaattctttctgcaacctcttgcaatctgctgcaaactcacagctcaatatcgaaactnnnnnnnnnnnnnnnnnngttggggtcgataacaatagacacatgcccgaaggaggcaaaagagtagttgaccctgcttcaagcagcaagccactacaagggatgtcaaggaaagactcattcagtgatttgctggtgcaccttcctcgaatcacatcactcccaaagttcttgttcaacatttcagaagaagactagtagatagtgaaccgaaaagttcttgttctaggaatcttgaacaagtagctgtaaatcaaattatctctctcgctcttaaggatttggaggaacttttgtgtttgatgat

SEQ ID NO: 157556 - DNA, 1198 bp, Arabidopsis thaliana landsberg
atattataaagttctgatgcaataaattcaaagcatgcatagactacgtacgacttggaaccggtccacttcaactgatatatttcatttcctaatgataatctccccctaatcctttcttttttcttgtcataaacaggaaatttacttcgtcagaaattcagacaagaaaagttggcaaaccctaccacaagatcaataccctaaaccattgattttccacgatggtcgtttagccgttaagccaacacctttaaacacactcgtattattcatgtgggccccattcgccgccgtcttagccgctgcaagactcgtcttcggcctaaacttaccttactccctagccaatcccttcctcgccttttccggtatccaccttactctcactgtcaacaaccacaacgacctaatatccgccgacagaaaaagaggttgtctctttgtgtgtaaccatagaacgttattggacccactttacatttcatacgctctaagaaagaaaaacatgaaagccgtgacgtatagtctaagcagattatctgagcttctggctccgatcaagaccgttagattgactcgtgatcgagtcaaagatggtcaagccatggagaaattgctgagccagggagatctcgtggtttgtccggaagggactacgtgtagagagccttacttgcttcggtttagtccacttttctctgaggtttgtgacgtcatcgtacctgttgctattgactcacacgtgactttcttctatggcacgacggctagtggtcttaaggcatttgatcccattttcttccttttgaatcctttcccttcctacaccgtcaaattgcttgaccctgtctctggaagtagctcgtccacgtgtcgaggagtccctgacaatggaaaagttaacttcgaggtggctaatcacgtgcagcatgagatcgggaatgcgttggggtttgagtgcaccaacctcacgagaagagataagtacttgatcttggccggtaataacggagttgtcaagaaaaaataattgatttgagtagtttattttcttgattagggcctttttgtgtgacgtacactttatttcttataagattttttttctatgatgtatctatctttttttagttaaatgtaattatctaattgtgtgaccaatacgatatgtatatgtacatgtgttattgatatc

SEQ ID NO: 157557 - DNA, 997 bp, Arabidopsis thaliana landsberg
  unsure (1)..(997): unsure at all n locations
aaaactacaaatggtgctcaagagaaatgaaattattatttagagcggtattgatgtttacacaaccactcttgaaaatggagttttggttgtatcttctctttacttattaaagaaccaccttagactatcaaatatatctttcctgggttcagttgatcagtgaggttgcatgatcattgcttgtaatgtgtaaacttatatatgatttgcatgtatgttaagacaatctctttttccttcagtgagttgtgtttcaacaagttgtatgtgggttgttttaatgccaaattgacttgctttgtttgtatgatttcccttctcattttatagatgtccaatctctaataacattgagatagtgacgttatcaataagtttcatagcaaaaccttgttgtggtgcaggcatatgagatgcgaaatgctggagctgttattcacagtcatggcatggaatcttgtcttgtgacgatgctgaatccgcaagccaaagaattccgtgtaagctgtaatgcttatttggtagacaattccaggttccccagtagagttaggactttgcattttaatgtttcttcctgtccgacatttcatagataactcacatggagatgataaaagggannnnnnnnnnnnnnnnntatgaaaaacttgttgtcccaatcatagagaacacagcatatgagaatgaactaacagattcacttaccaaagctgtaagtctaattgttctgaggaagcttgaattgaatatatgcaacaaaataatggttttaattagttttgacatatttcactctcatttgcagatagaagcctatccaaaagcaacagcagtgttggtacgcaatcacggagtttacatttggggtgattcttggatccatgctaagacacaggtttgtgcaagttacttcaatatttggttgaaagttgagaaaccaacaataagttctacgccattttcttatgttatgttcatatatttgtttgtt

SEQ ID NO: 157558 - DNA, 3509 bp, Arabidopsis thaliana landsberg; identical to SEQ ID NO: 1424

SEQ ID NO: 157559 - DNA, 892 bp, Arabidopsis thaliana landsberg
tttttttttgggaagattggggttccactctttttttccgttttccaaggttttattgccctgcaaagttccattgggcctttcattggggttttgctgattctcattctcaatttctgttgggggcgtattttgcacccttttcttcttctttgagtttttctcccaacaaagtggaagctcagggaggatctggtggaccaccattcgacgatggtgtttttgttcatgtaacaaaggtttatgttgttcaaggtgagtccggtgtagcttatgtcaaattcgaatatgagaaagatgggaaaagagaaacaagagcccatgggtaaatgtcattgttagatacaccgtagtttgaggttgattcagatgattacatcacatcaattggagtttctgtgggcaaagtctttggttataacagcgaaatcgtcactgctcttgtgttcaagactagtaagggtacaacctctccgccttttggaatggtgactgagaagaaattcgaacttaaagatggtaacggaggaaaacttgccggattccatgggaaagctagtgatgttctttatgctcttggtgcctatttcgctccatcgacaacttcgactactccatctactaccaagaagctacaagcaagaggtggtaatggaggagcttcttgggatgatggtgtttttgatggtgttagaaagatacttgttggtcaaggaaacgatggtgtagcttttgtcacgtttgagtacaacaaaggctctcaagcaatcctcggtgatggtcatggaaagaaaccattacttggaactgaaacggttctttcttctctctagtctgtttctagtttctccaaaaaaaaatatttcttgatctaatgttcctctttttgtct

SEQ ID NO: 157560 - DNA, 1394 bp, Arabidopsis thaliana landsberg
ctcatctatggggaaacgtgaaattcattttactccggtgggtcgtcaggtgcagagagttctggaatatccattgcgcttggagaatcgttcgccggtaatttgcttcatcgattgtattatccttcgttttttagtttccgatttagagccgttttacagagttgttttcgaaattctgtggaactatcgtcttttaggtgttgttagatctgaatcgttgctgtaaatttcgatgtgcttaagcttgattctagacttgtatggaaaataactagatagatgtcagcatttatatcatgtgatcgagtatgatgaagttcttaaatcttgttttatgtggaagttgattattaagaataagataattatgtcgtcttcatattacaatagcttaaaatttgaattgttcttgtagattttgtgattttgtgggtcgatttagcatgttcatataagtttagacaatacacttgaagctaataagagtcttaattctttaattgttctattttcttgtagatgtcttactcaagaaggtcaagatactctccttcactatctccttatgacaagcgtcgtggaaggtctgtgtcaaggtcattgtctagaagcccgacgaggtatttgtcttattcttaggtttgagttgtcgtgacttgatgtttgctgcttttgaatgcgctaatgtctgattgttttaaatcgcttttgttacattaggagtgtctcaagcgatgctgagaatcctggtaacagtttatatgtaactggattgtctcaccgggttactgaaagagatctggaggatcatttcgctaaagaaggaaaggttgtggatgttatctttaattttgaacacaattcagtttcgagtagctcactagtgtataatgtttaaagagaaatttgtttgttcatgagttttaacatttgtgagcttttgatatttctaggtaactgatgttcaccttgtcctggacccatggactagagaatctcgcggatttggttttatctctatgaaaagtgttggtgatgctaaccgttgcatcagatctctagatcactctgttctgcacggccgcgtcatcactgttgagaaggtaaaaagactaatcactagtgattccttctatagaaccattaagaatatgagctggccgacgctaaatttgctttatgcagagtctaggcacttcgatattgattttttcttctctcttaaaatatttaaggtgtttgcttgataccactttcaaggatctgaggcctcaggcctgctgcctgtagcagctgtgcttcaccaaacagcaaacgttgcaacagttcaggcacatggagatttcatacatttagggttgtatgccctgcatttctctctttcttgaaca

SEQ ID NO: 157561 - DNA, 1933 bp, Arabidopsis thaliana landsberg; identical to SEQ ID NO: 29495

SEQ ID NO: 157562 - DNA, 466 bp, Arabidopsis thaliana landsberg
atggagtgtctaaatccaaaaattcagaacacaaagagaggtaagaagaggataaggttttagtctacaagtttgccaaatgtcactacaaatgccacatatatctccaactaatatatccaaaaaaattcatatctaaaaacaaaacgtttagttgttggaaatggcagcgaaactccgcatttcctcttcttcgattagccacagaactaatgattccaaaacctcatcatcttcttcatattcatcatcgcttgctttacctcaattcctctgtccaccatcaccattaggattcccacagttcaagcttcacgccaaattaggtactctcttagatcttttatttatttgtagatgtaaattttgttaatctttggttattgcataaggtggaggagatggagaagtgaagcctaaagataagaaaaagtttataaccaaacaggaagaacctgaacagtaa

SEQ ID NO: 157563 - DNA, 2353 bp, Arabidopsis thaliana landsberg
tactctgctcaaagtctttctttctaagtttctttcacacgagtgtaatgaaagaaagagaggggtatatggtgataaaggtcgctactttaacacccaaaatctccacagctagcattaactattactccttccgtagagttcatgtttgaaaggaaattttttgttctaaattatatgaagtttcagttttcaatacaattttttttttacgctttatattctgtaagttgtttcatcattggttaattgtaattggataattaataattgatgttttagttaagaaaaaatcaaattaattaatttttaatctgtatgtacaattctaaaatatcaactattaaaaacggaggaagtataatatatagtcgtcacacatagggagaatatgcattaatttccaaaaataataaccaatcaaaatcaacatataagatttgatatctaaattttaattaatttaatttaattagaaaaataaaatacattattaatttccaaaaagataaccagttaaaatcaacaaattatgtttgatatctaaattatcatattaattttttatttattattatagttcacctctcatttttatatgagtaacccattcgagttcgggtagaacccgttcgggtttgggattaatgggtatatgatttactacccaatagaataatcctactatattatttgggaagtacattttaaatgtaaccttatcttttgtaagtaattacataggtatgccattagaaataaaattttaaatagtaaattaattcatctttaagaattaaaaagtcaaatactaatttaattaattaaattcaattaaaaaaagaaatacattattaatttccaaaaaagtaaccaaataaaaacaacaaattagatttgatatctaaattatcatattaattttcttattaattattatagttcacctctcatctttatatgattctattttgcgaaaaaataatatcatcgttaaaaacaattaattagagttgcttcgcatatgccataatgtgaatttttaagaacgaatataaactgttcaatacataaaaaatattataacggatcaaaaatagatttaagaaaattttctactgagtattaggtcataatttgaatatttatattcaatttcatacatattattttaaaaatttataatcttatatactacaataattaataatatattagattttttttatgtgtatgatgtgattcaatatttaatagaagctggaaaatcctagaattgacgggtttaagggcttgattggttctcccgctaccacctgcaaacgcagcgtttgggggttgtagcggttgttagtgattgacaacaatcatacaaaccgttgaatataacttcggatccctcgaaatcgcccgttttcaaaagctcctttccacaagcgtttgtggttgcgggcggtagcggttaggttaaaaaaattgaaaactttttttaattaaattaaataattgtggctttcacccaaactctaatcattataattaaaataatctaatcttttatatatcttatttttattagaaaaccttaatcaatatattataaccctattgtctcaattatggcatccgatgaaaatcaaaatcaagaatcaaacataagtatcatctaaccttttattcattcattagctagtgtaattctttaactatttcatagcatcgttgtttttattttattttgtattctttttagttttttgattgaatacatgtttcgatttgttttctcgattagaaatcatttgatcggacgagatgatatattgtatttttatttggtcagaaaatcaagttttctaatattatcaatttatcataatatattgtatttttatttattttaatagtaatatattatatttattttgattatttttttatttaattaatatcgcacccgctggtttaccagtcataaaactctcgcaaacgcactcattatcaaacgctcaaccagtcgttcaaaacgcttgataacgcttgaaaccgcaaccgcccgtttccgcaaactctcgcaaccgcaaccgcacccactgcgtttaaaccagtcaggccctaagtgatgcatcttgactaaataaaatttatgttaaattacaaaagttgtcgatataacagccgatttgtctatactactaaggccaggacttagtagttgcgttgattcctctatatcatgtgtatgtccgttcccatatcaggtaccattctcattatgttaataacttgattgtggtcaaaagcaaatcataattttaatgactttattaaagtatgaatccaataactcgag

SEQ ID NO: 157564 - DNA, 1220 bp, Arabidopsis thaliana landsberg
ggttttgaacttaatatttcaggttttggctgcattaaacaattagaatgtgtaaatggctacttgcaatgtgtggaatacgagagagtaccctcgaagattctcacgtaccaaacatctgatgatccattatacagtgggtacaggtccgctattcaatctacaaatcaggaagaatctctggtacatatgtttgaagttgagacaactaaagaatttgcatgttaatagcattgagatttaagaatttcctctttttttgcagctcgattttgccatatgggagcctccacatggaccttacagaacgtttaaccatccctggaaaaactatgtcaaacttagtggtgcagtaaggcattgtgctttcaccgtcatggcgatacatggttgcatactttcagagatacaggtttcttattattactattatatgatttccacatataattgtttagtattacaagtaaattggttacacttacatgcatgacataagaacattttattcctcttacaaatggggctttgttatatgacaggcagctccagagaaacgacaggcatttcgtcatgagcttcaaagagttggcaatgaaggcgcaaaagttctgcgtttgattggagaaaaagtggagaagatggagaagctaggccctggagagattctaaatgacgttcaacgtgcagcagaggagctacagatgaaaatagacagtaaatcctaccttcttgtgaactcagaaagctgggcagctactaaagagaaagctgatttggttgaagctcgagaaaacgaccaagaagccaaagacgacgagaccaaagtgatcaaatccttaagccagatttgggatactaacaacaacaacaacagcaataaccatcagagtaatgatcaatctcagcattggatgtcaacagagagtatgatgcttaagaaccgagagatgtggccaagtatgtccttcattggtggtactgtggtgaatgagatagaatgtaaagtatacgaaagtgcgagttcgttgtctctggctacgtttgcttcccttctgatcgagtttgttgcaaggctgcaaaacattgtcaatgcttttgaggagcttagcacaaaagctggtttcaaagatcctgttgatcagattcctaaggtttgaatgtgtgtgaaagaagtgattcagaagtgatcgatacacgttaaatattatgaacaaggt

SEQ ID NO: 157565 - DNA, 3731 bp, Arabidopsis thaliana landsberg
  unsure (1)..(3731): unsure at all n locations
ttgcaacaagtgtaagtacatatgtcagtgtttttcttcacatgctctgaaagctgtttcagggtcaaaaagagtgagatgatttgtgaaagtcacagaaagaacacgaaatgatcttaaactgctgataatataatttcgtatacttcctcattcattagaaaacagaaattgtttcatgttttaccgttaaattcatgtttgtcttccagtgatttgagcttcaacaaattacatggaccaattccggcttcacttttcaacttaagtcgacttactcacttgtaagatactaagatgatatgttttctgcttcttttgggtcttactatataactacacggatcatattataaaaaaaaatcgtttgtcttttcatattaggtttctgggaaacaacacgttgaatggatccttgcccactctaaaggggcagtctctgagcaatttgtgagtaacgaaatcctttataatttttccatctttaaaagccatgtcccctaatttcttggacggtttgttgacagatcctcctaatatggctcgtacactatttaccgggcacttattcaagttgaataaggttccactcctggtgacacagataacttgccaagatattaagaaaactgttttggacatataatatagtcggtagatcctaactgtatttttcttttatgctgacagagatgtgtcgtacaatgatttgtctggaagtcttccttcatgggtcagcttaccagatttgaagctgtaagtaaagaaaaacattatatctcaacttatcttcagagcctttttaaaatttcagaatttttcccacatgcatattcattaggcctcttcatatgcagcatgagacttcctctttgtcgtaaaagtttattataatcacttgttagggaataataaacagaagcgtttgttatatgtgcagcaatctagttgctaacaacttcacactggaaggtcttgacaacaggtgagtttttgtatatatttctattcttttcctacaaaaggatgcaagcataaacgatttatcatttctttcttaaatctttttttgttgttaaaagggttttatcaggactacattgcctgcagaagaacttcccctgcaatcgaggcgaaggaatctgtaagtgtaacaaaaagataccctcacaaattatgttctccatgttgaatgagcaaacatatggacagggctccaatgtcttattggaaaaaaattgttttaagactttcgctattgactggtgtctagattataacttttcgatcaactgcggaggcccagagataaggtctgttagtggagcactatttgaaaaggaggacgcggatcttggaccagcttcgtttgttgtgagtgctgcaaagagatgggcagccagtagtgtaggaaattttgctggcagtagcaacaatatatacatagctacttcactagcacaatttgtcaacactttggactcagagctatttcagtcagcaagactttctgcatcttccctaaggtattatgggttgggtctagaaaatggaggctataccgtcacacttcagtttgctgaaatacaaattctaggttctacttccaacacttggagaggtttaggaagacgacgttttgacatttatgtccaggtctgcactacttgaccgagctttctgctttacaaattaaattttggtgtaattatctgcttccgacttttgattctgatgaattctaagactagctcactttttccagggaagacttgttgaaaaggacttcgatgtacgcagaacagctggtgactccactgttcgagcagttcagagagaatataaagcaaatgtatcacaaaatcatctcgaaattcatcttttctgggctggaaaaggaacatgctgtattcctatccaaggggcttatgggccattaatatcggccgtcggtgcaacaccaggtaaataaatggtgaattcttcttgttttacaccatctcctgatgctagttagtgcttaagtgttacatatttctgttcagatttcacaccaactgtgggtaataggccaccatcaaagggaaagagcatgactggtactattgtgggtgtcattgttggcgttggacttttgagcatcatttctggtgtggttatcnnnnnnnnnnnnnnnnnnnnnnnnnnntacacagatgatgaaggtatagatgtaaaaagctcttgaactgtagaattttggccctctgattaaaaattagttatatatcatctctcatattggtcgattttaagaaccgaattgtttctggcagagctacttagtatggacgtaaagccttacatctttacttactcggaacttaaaagtgcaactcaagattttgatcccttaaacaagcttggagaggggggatttgggcctgtttataaggtaaggtacccataccgaaatggacgacatatctgatatctgtatattcttagatatactaggaaagaagagtgtctgtttatacgttttgttttgaaaaacacattcaatagggaaaccttactgatggaagagtggtcgcggtgaagctattgtcggtgggatcccgtcaagggaagggacaatttgttgcagaaattgtagcaatttcttcagttctacatcgcaacctagtaaaactttatgggtgctgctttgaaggagagcatcgtatgctcgtatatgagtatctacctaatggaactctcgatcaggcgctatttggtaatgaacagaaacatgacttacctatctctgcttctgcgaagctaaagtaatcattatgccattgggttggatgttacaggggataagagtttgcatcttgattggtcaacccgttatgagatatgtctgggagtagccagaggtctagtttatctccacgaggaagcaagtgttcgcataatacacagagatgtgaaggccagcaacattttactggactctgaactggtcccaaaagtttctgattttgggcttgcaaaactatatgatgacaagaaaacccatattagtaccagagtggcagggacgatgtaagcaaaatccatagaccctgacattttgtttgcaacacaattatggatttatagctcatgttagttgtatcaatgcagtgggtatcttgcgccagagtatgccatgcgtggacatctaacagagaaaacagatgtgtatgcctttggtgttgtggctcttgagctagtgagtggaaggaaaaactctgatgagaacctggaagagggaaaaaaatatcttcttgaatgggtacgtctatacttgtcatataggcgaagttgaagatggtgtgataaatgacaaaagccgataatccttttgtatttcttgtatacaggcatggaatctacacgagaaaaaccgtgacgttgaactaatagatgatgagctaagtgaatacaacatggaagaagtgaaacgcatgattggcattgctctgctttgcactcagtcatctcatgcgttgagaccaccaatgtcacgagnnnnnnnnnnnnnnnnnnnnnnnnnnnnnnnnnnnnnnnnnnnnnnnnnnnnaggctacctaaccgactgtacatttgatgacaccacaagctcctcattcagcaactttcaaacgaaagacactagcttctcgacgagctttatagcgcctggcccggagatgccacttagagacggcgaatcgaagcca

SEQ ID NO: 157566 - DNA, 664 bp, Arabidopsis thaliana landsberg
aatattgagagaaatttatgagcttcattatcctggacatgttgatcttaaggtcgtggttttcaagtgtgattggtatgattcaaaagttgggagaggtatacgaagaaacaagtcagggattattgatattaaggctaaaaggcattatgaagagtacgatctttttgttttggcttcacaaacagatcaggtatgttatgttccatatccacggatgactcagccgagaaaagatcaacaatgggaagcagcaattatgatacaaccaagaggcaaagtattgataaacaaaaatctggatttcactgcaatgcaacatgataacgatgattctattgttgaagttgattcattacaaatcgagacactatcatatctagatgcccaaccagaagatcttgatgatccagtagtagaagccgaagatggatcagatgctgaagatggaaattctgatatcgaattaactagtgacgaatccgaatttttttttttcatttggactttttacaactttttatgtattatcaaaaaaattgtttccaaaattgatgaagtttttttatttaacattttgttcacaggtctttatttttgtattaaaattggtaacacgtatgtcacaatctatgtcctatcgcaaaagtcactaaaacagtga

SEQ ID NO: 157567 - DNA, 2162 bp, Arabidopsis thaliana landsberg
  unsure (1)..(2162): unsure at all n locations
ttattttgcatacttaggcatttaggatcaccttgcattcgcattgcatgttttggtgtgttttcaggtgcagaaggagctaaaaaagactctactcgatccattcactcgatccaggcacgcaacagaagaggcatcattctactcgacctccttactcgatccatgatgctacagagaggctgcagtttactcgaccctcttactcgatcaacctcagatgaagcagcagattgatctactcgcccctcctactcgatcctctactagacccatttactnnaccaagggtgactaactctacaagacttgttgagctatcaaagcgtcttcggatcctcttcattccccactcaaccagacatctgagcgtacggataggagaggaagaagcatctactcgaccaattgatcactcggagcatagacacaaaggcgcagactttacagcaccctctttactcgatccccaagatcgagtattcgcccaaaccgcctcaagtctcttgtcttctagtgaatctagggtttcaatatttcactataaatagatcactttgggatttgtccaaaggatatagcttttatccttttagtttttctttgtgtttatgaatcttcaaaacttaattactcttaatctattttgtttttgcatttagttgttttagtaaagttgtttagcttgtttagatctacattttggtatgatttcagtaatttctgggtttgtgttcttgagaatgttgcttgagtagtgattagggttcttgaggatggattagattagggtaatctctaggttagttaggtggttaagattaggttagaacccttctggattcgcttggcccctatgcggttttcgctggctaatgtagagattcgatcatagacgtccagcgtccaaaagacgttcaaatggatgtttgatctacgaattccagagatttgtagactcgaccaagacattggcttgtctgcttattggctttggtagattgttgcttaaaccctgctctgctatgtttcatcaacgagagttgagattaggaagtagtagagttatgggggtctctgtcacgagagtggattgacccggtttttttgaatctatcgtctagggtttctgcctttcacctgttagccacttgatgagccctagagttgcccttatcaatgaatccatccttaggacttctattcttcttagatttatttgtattcaccccctcattgcacttctatttaactgttatatgtgttacttgtagattgcattttagttcttaaatttgttacatgttggttttactcgacccaatgatcgagaaaggcttttaaagttctcattttcgttgtttgaatcctgacctaggattgttactagaaaccaaccatctctataatcaggtttgacttagttgcttctgtacacatcttgattgctagcaataacagtggactggattgacaccccctatagctgcatcgatatgttagtgtttaagcagaattgaactgaacacaccacacttcagcacattaagtaggcgtaaaaacctacttatcaatttggcgccgttgccaattcattgttgcattgttacattcaagatatcagaaaaagttaagatcaagttcttttacatttatcaagttactaactcatcttttcgtctgcttttctttgtggtataggtactaatctttgtgcatgcaaactcgatccaaaggttttgcacatctactacaattcagagacacaattgacagaagagcttgtgaattacaagaaaccaaagcaaaggcagcctgtgatcaacaaagaccagctgctatggatcaactgaacagacgagttgatgttcaagacccacctaatgttgatcaaccaagaaacattggtgctggtgatgccccaaggaatcatcaccaaagacaaaggatagtgcctccactagttcagaacaacaactttgagatcaagagtggtctcatctcaatgatccaaggaaacaagtttcatggtttacctattgaagaccccctgaaccatcttgacagcttagactatttcccttctctttgggagacaagacacaccattgggagaagactctgccccctgacttcatcacctcatgggatgattgtaagaa

SEQ ID NO: 157568 - DNA, 863 bp, Arabidopsis thaliana landsberg
aaatcatctattgtcttaagaaatgtagcttcttcattatttacgtttttgagatgattcagttttgtgctttttctttatatgttcattagatcagagaagagcttcgcaaagaaacgttacatctagctagtgagttcttgtatgactttttttgacgatgacaattatattcatattgcgagatctaaaacattcatgctaatataacaggagaaaacttggagaaggaaccacagatagtggagctcagaaaccaagtgaataatatcattcaatctctgagtgagttaattaagtatatgaaacttctctccatttgtataatctttttaaaaacagtgcagaataatccgtacatccgagcttgcgactgctcaagagaagctcaatgagcttgagaatcaaagagaagagatcctcaaattctactctccaggttctcttcttcatagacttcaaggtaagtaaaaccattagctgcttcactcaatatccttcatgtgtaacaacaaaatgatacatgtcggtttctaatacacaatcccgggtttgtttatcgcagatgctatgaaccaggtggatgaagaatcagaggagctgcaacagaagtttatggagaaggatattgacacagctgcatttgtgcagaaatacaaaaagctaagaagcaagtatcatcgacgggctttgattcatctcgctgctaaaacttcatctattggctgaaaacaaacttacacgttttgttttttttgcttccgaccttaattcgatgtgtaagtaaacacaactggttaaaagtcgagatctatatacgagatcaatatatatcattgtattacataatcatgttatgctct

SEQ ID NO: 157569 - DNA, 2507 bp, Arabidopsis thaliana landsberg; identical to SEQ ID NO: 71956

SEQ ID NO: 157570 - DNA, 2140 bp, Arabidopsis thaliana landsberg
  unsure (1)..(2140): unsure at all n locations
aatggattgatccagatgtgtggaaaggtctagtacagttttggcaagatccaaagtcagaaaaaagagtaacaacagcagaaatgctagatatcatgatccggatggcaaagggcatctataaacaccgttcaggccagacctcatacaaagctcgtgcaagaaaacgggtacgataaatattcttctctccttaccattacttaatctagaattacatattgacatcttgtttatctctttgtgtttcagtgtgagaagactggagaaaaaaactcctgatttccttgagctgctagatgagacacacagaaaagcggatggaagcttcatcgatgggaagtcagaggagatctacaagcaagtaacatctaggattgaagaggaagagtctcatatgggttcaggggacaatccggagagcactggatcaggtggactttctgttcatgccaaaaacaagatatttactgaggtaaattttatgtgctctttctgttgtctacttcataatcactgttagcgttgtctacttgataatcactgttagcgttgtctagttgtgtctgaaatcttattgtgttgtctgaaatcttattgacaacttattgtgttgtctgaaatcttgacagcttattcattatactttgtgtagtgttgtgtttgaattgctttctattgtaagtgtggttgtgttgtgtacttgatagtcactgttagcgttgtctagttgtgtttgaattcttttgtcttgtgttgaacttgttttctcacttgttttctgttgtgtccttgtgagtttttgtgacctttgcaggttgctccgagaaagaaaggaaggatttatggtgttggatctctgcattttgaagcatcctcagcccatagtggtccaacacttcctagtgatgatccggttatactttctgagaagctggctgccgctgaagcttgcattcaaaatcaggctgggaagatcaacaacttcgatatcctctttgactatnnnnnnnnnnnnnnnnnnnnnnnnnnnnnnnttcttcgacgaggttcctcgacacagacaagaccggttagcgcaaatgaaccacctgtagctacagctccggaacagcaagccaatgaggagacagctgctgctgctaccctagctaaccttgcaacaggatcctctccatcatcagtattttgagaacaatgtctttgtctttttccttgtaatctttttagaacaaattgattatggtttcaaacattacaaacgtagtatacattttagataacttgtgaaatttcagctttcaattgtgtctttatttaagaagcaaaaatcatctctaatcaagccataatttattaattaagactaattaacaattaattagagtctaattaaccactaatcaagccttaatatatctgaaagacgttgcagaagacttgcaaatccatcacaaatgctgctagggatttgctaggcaaaaaaagaagaatcgcaaatccctcgtagcaattgcgaggaaagtactagaacgctaattgcgtgtgttttgcgaggaaaacggtttctcgcaaattttgtgagagaattgtgacattttaccatttgcgaggagcaatttgcgaggagcaatttgcgaggaacttgttgtcctcgcaaatcccttgcttttagctgtttgcgatggcgagtcaatttctttcccgtcgcaaatcgactgttttcttgtagtgattgtaccacatgtgaaagtggagatccacgatggttgttatagaagcattattattgatagtattttagattagttgttaggctaattagatatgaaatataatgtttttattaattatattgttaagaatgactcttatataaaagccaaactaaaatctaagaaccggatatgtggcattttatgattaggtgtttcatttttcttttgtttcttctttttctctctttcacacaacacgacatttaggcgtggacattcagatttcagatcggattcggttcgggttatttcggattcggataattcggatgaagaagtttattatccgtgcggattatatgactattcggttctgtttcggttcggatggtgtcagattcagatttcagatcagtttttga

SEQ ID NO: 157571 - DNA, 2455 bp, Arabidopsis thaliana landsberg
ttgcattcgcatcgcatgttttggtgtcttttcaggtgcaaaaggagcttaaaaggactctactcgatccattcactcgatccaggcagctacagaagaggcatcattctactcaacctctttactcgatccaggatgctacaaaggaggctgcagtttactcgaccctcctactcgatcaaggcaacctcagatgaagcatcagattgatctactcgcccctcccactcgatccactactcgatccatttactcgaccaagggtgaccatctctacaagacttgttgagctatcaaagcgtcttcggatcctcctcatttcccactcaaccagacatctgagcatacggataagagaggatgaagcatcttttggaccaattgatcactcggagcatagacacaaaggcgcagactttgcagcaccctctttactcgatccccaaggtcgagtattcgcccaaaccgcctcaagtctcttgtattctagtgaatctagggttttcaacattttagtataaatagatcactttgaggtttgtccaaaggatttagcttaaatcctttagtttttctttgcgttcttgaatctttaaaacttctttaatcttaatctatttcgtttttgcatttagttctttgagtaaagttgtttagcttgtttagatctacattttagtatgatttcagtaatttctgggtttgtgttcttagttatgttgcttgagtagtgattagggttcttgaggatggattagataagggtaatctctaggttagtcaggtggttaagattaggttagatcccttctggattcgttggcccatatgcggttttcgttggctaatgtgcaaattcgaccataggtatccagcgtccaaaagacgttcaatggttgcatgatctacgaattccagatatttgtagactatagaccaagagattagctagactacttattggctttggtagattgttgcttaaaccttgctctattatgtttcatcaacgagagttgagattaggaagtgttagagttatgggggtctctgtcacgagagtggattgacccggtttctgaatttatcgtctagggtatcttcctttcaccttttagccacctgatgaaccctagagttgtgcttatcaatgaatccatcctcaggacttctattcttcttagatttatttgtattcacccgtgattgcacttttatttacctgttatttgtgttacctgctaattgcattttagttcttgaaattcgatgcatgttggttctactcgacccaatgatcaagtcgggctcttaaggtcttatctttgttgattgaatcctaacctagaatggttactagaaaccaaccattaaggttgttggctcagcagaagcagatacactacatcactgatgaagagcacttccaaatgcaagaaggggggaatgattaaactgaagagttgtgctacattcagaaccaaggaggatttaacaagggctacaacaactacaagcccaacccaaacctctcctacagaagcactaatgttgctaacccccaagatcaagtgtatccacctcaacataatcagtctaagcatttgttcagtacaaccaaggttatgtccctaaacaacagtttaatggaggctaccaacagcagaatccaccaccagggttcactcaacaaccacaacaagcctcagcagctcaagatcctgaaattaagcaactcattcaacagatcatccaaggacaagctactggagccatggcttttgaaaagaagatagctgaattacacaataagatcgattgttcctacaatgatctgaatgtcaagtttgaaactctgaattcaaaaatcaagtatgtggagagtcaatttgcatcaacctctgctccaaagcatcctcagcaacttccaaggaaagcagtccagaatcaaaaggactatgctactgctaattctatcactatccaccaagaagatgaatctccaccaagtcatcagactcccaatactgaggacagtatgattcaagaaggggggaattcaactcaaattgctgcacctgccacctagcaatttatctggaaaatagagcacacatctttggtgaatgctgaacattctagaaaaaagttcaaaattgaacaactcaagcaagagcagaatcaagagatgattagcagtgccaacactcaagaaacatacaagaagaaagtcatccaagaaaagcttgatgatcccggttcattcaccctgtcatgctctctaggaccattgacatttaataggtgcctttgtgatttgggagcatctgttagccttatgcctctctctacaactaaaaggctagggatcaaggaattcaagttcttcaacttagccttactcttagctgccggttttgttgcacatcctcatggtagtaataatgaaatctgt

SEQ ID NO: 157572 - DNA, 1258 bp, Arabidopsis thaliana landsberg; identical to SEQ ID NO: 1703

SEQ ID NO: 157573 - DNA, 817 bp, Arabidopsis thaliana landsberg
atttctctatgcagatcagattgttaagcaactaccaggtacatcaagaaatgtcggtattggtgactctgaacctggtcgtaactcctcaagccggcgctttttcttgtctaagccggttcatcctatactgcatccttctgataatgttagggatacagcatctgattctgcggatgcctgcagttggagcagcgggaccccaagcagcattgattctgtggatgttcctgagccagttcttgattggaataataactctaccaaagcacaacaagtagcagcttcaagtacatttaaatgcggactgtgtaacagatacctctcgcagaaatctccgtggggatctcggtccattgtaagaaaccgagacatgcctgtcacaggagtgctttcatgtcaacatgtctttcacgtggaatgtcttgaccaatcaactccaaagattcaacgcaatgacccactgtgtccaatatgcaccaaacaggaaggagaacacttcaaatcaaacaacattgtcccgaggcttaaaccgctttatgaagatgggccatcttcaagaccatggggctgtgctcaggccggtgactgtgttgaaagtgctttcaatgtgccccctaaaaacaccatgatgatgataaaccggaaccggataaggaaaagcctctcattgagaggaaactcaagcaaagatttttcaagaaaaatgaagagaagtaactcagttgccatggaaaatctggctaatcaagtctcgcttgttcattctagagggaaagagaaagtttcatggtagctggaggaaaaaagcagagtg

SEQ ID NO: 157574 - DNA, 3462 bp, Arabidopsis thaliana landsberg
atggctgacgaacagaataaacaaaatggccctgcaaacattggtgctggagatgcaccacgtgatcaccgtcaacggaaaagaattgcacctcctgctatccagaacaacaacttcgagattaagagtgatctcatcttgatgattcaggggaataaattccatgggctgccaatggaggatccactcgaccacttggatgaatttgataggctctgcaacctaacaaaaatcaatggtgccagggaagacggattcaagctccgtttgtttccattctccttgggcgacaaagcacacatctgggaaaagaatttgccccatgactcaatcaccacctgggatgattgcaagaaggcttttttagcaaagttcttctccaatgccagaactgcaagactcagaaatgagatttcttgcttttcacagaagactggtgaaagcttctctgaagcatgggagcgtttcaagggttacaccaaccaatgccctcatcatggcttcaagaaagcttctctgctcagcagtctttacagaggagtcctaccacgcatcagaatgcttgtggataccgccagcaatgggaatttccagaacaaagatgttgaagaaggctgagaattagttgagaaccttgctcaatcttatggtaattacaacgaagactgcgataggaccatcagaggcacatctgactctgatgacaaacacaggaaggagatcaaagcgctgaaggacaagctgcacatgattcttcttagccagcagaagcatatgcacttccttgttgttgacgagcagtatcaagtccaagattggaagggaaaccagttagaagacgtaagctacatcaacaatcaaggtggttacaaaggatacaacaacttcaagactaacaaccccaacctctcctatcgcagcaccaatgttactaatccacaggatcaagtatatcctccacatcaacaacaaggtcagaataaactttttgttccctacaatcaaggttttgttcccaagcagcaattccaggggaactaccagcaaccaccaccacctgggtttgcacctcagcaaaaccaaggtcctgctgctcctgacgctgatatgaaacaaatgctacaacagctgcttcacgggcaagcctctggctccatggagatgggcaaagaagatatctgagttacataacaagctggactgtagctacaatgatctcaatgtcaagatgaaaacactgaataccaaagtccgttacttagagggacattctgcatcttcttcagctccaaaacagacaagccaactaccaggcaaagcagtttagaatccaaaagaatatgctcatgctatcaccctgcgtagtggaaaagcacttacaactagggaggaaccaaagacggtcactgaggacagtgaagatcaagatggggaggatttaagtctcaagaaagatcaagatgaccaaccactcgaccagtcactcgagcaaccactcgtccagtcactcgagcaaccactcgatctgccactcgacagcgttactcgaccaaccactcgatctgtcatcccagcagcatcaccaactgctccaaaaccagttgctgtcaaaaacaaagaaaaggtctttgtccctcctccctacaaaccgcagcttccatttcctggccgtcacaagaaagcgttggcatacaaatatagagctatgtttgccaagaacactgagtttgctgtttggtccggtttaaaaattagtatggagaaatctactctgtttttagccggctctccagcaaacggtcatcaacaaattgcagagaattttcctattgaagtgggttctcttcctgttcgttatctcggtcttccgcttgttacgaaacatctttcagccgcagattactctccactccttgagaaaatcaagaaacgtattggcacttggactgcaagatttctctcctttgcaggtcggtttaaccttattagttcagttttatggaggttgtgtaatttctggctggctgcttttcggcttccacgagagtgtattcgagaaataaataaactgtgttcgtcgttcctgtggtcgggtccggatatgaatcgaaagaaggcaaaggtggtttgggaggtggtttgtaaaccaaggcaagagggtggactgggactaaggtgcttaaaagaggcgaatgatgtttgttgtctgaagttgatttggaaaattgtctctcatggtaattctttgtggggtaaatggattgaggctaacttactaaaacggagatctttttggtccataaagcattcaagttcaggatcatggatatggagaaacctgcttaaatatcgagaagtggcgagctcgttgtttaaagtagaagtgaagaatggacaaacgacctccttttggcatgatcagtggtgtgccttgggtcgtctttctgatcttgtaggtgaacgtggtgttgttgatatgggtattggatggcaaatgacggtggcagaggcgtgggctaatcgccggagacgacgacacagagaagatctgcttatggatatagaaaatgcacttgtgttgcattgtgagaatcaaagggaagcagcagatataatgttatgtaaaggggataatgatatttatagagcacatttttctacaaaagatacttggcataatctcagaaccggttcacccacggttaattggcatcgaggagtatggttctctcaaggtacccctaaatactcacaacagattatctacaaggaaccggacgatgcattggaatgtgggagctccagggcattgtattctctacaataatactctagagacccgagatcatctcttctttgaatgtggttattctgcggccatatggacaaatctagcaaggaatatttttgggtctcatttttcaaccgattggcacacgaacatcgtctatctctcatgccgacgtaaacatgtagaagggtttctagctcggtatgtatttcaggtggttatatacgcaatctggaaagaacggaatgggaggatacatggagaggatctgaaccctttcttcacttctgttcaagggagacaagagatatgacactagtcttcaaacttggtttgcttcaagagtttaatttatttaaattaaataggattgtaattgatttagcttaaactctcaaaaaatgttgcacttgatgtaaaacagttattttttttttgaatataatttagcactagattcaaaaaaaaaaaaaaaaaaaatgttctggtctttggtctctgtgatatcctgttagtagcaccatgaaactgtatattgtgtaagtagatatatatttactatcttttgttgaatatacaaggttattgtacgcaaatggaatcagcaagacgagtggttaaccaaagtgtctgcagaagaggtatgtcggggatcctctagagtcgacctg

SEQ ID NO: 157575 - DNA, 585 bp, Arabidopsis thaliana landsberg
caggaggaggctgatgatgaagctgtggaaacgggcttccggtgctctcaaagaccggaaaaccttgtttaccatcggcttctcccggaaaacctccttccgcaaccctgaccttgattctgccatcatccacgcaacctctcacgatgactcatctgtcgattaccacaatgctcaccgtgtctacaaatggatccggtcctctcccgccaatctcaagccgcttgttcatgctctttcatctagggttatccgcacgacgggctgggttgtggccttgagcgcctttgtgcttgtccacggtgtgctttgctgcaaagtcgcgtcccttcgagaaattcgtcgcctccctttcgatctctcgggtttctcggatggtcattcccgtcccggcgaagcttggggtttcgtcgcttttgtccgcgcctgtttctcgtttcttggcccgtactctttctttttatccggtcccgtccgtcgtcgcctctgaggccctcagctaggttcggttgcctgggagctcgggagagtcgggaggcttcagtctcttctccctatgcttctccgggtccgtccgatggctgt

SEQ ID NO: 157576 - DNA, 560 bp, Arabidopsis thaliana landsberg
gattttcacattccttctatttaattcgaatttcaaattgccatttctcagattccggtgaaagaaaaaaaaacctagaaaagtgttttctccgttttccaatcatccatgagtccggacaataaactgcttccgaagcggatcatccttgtacggcacggtgaatcggaagggaatctcgacacggcggcgtatacaacgacgccggatcataagatccagttaacggattccggtttgcttcaggcgcaggaagccggagctcgtctccacgctttgatctcttctaatccttcttcaccggagtggcgtgtgtacttctacgtttcgccgtacgatcggactcgatctacgctccgggagatcggacggtcgttctcgcgtcgccgtgtgattggtgttcgcgaagaatgtcggattagggaacaggattttgggaattttcaggttaaagagcgaatgagagcaacgaaaaaggtcagagagagatttggccgctttttttaccggttcccggagggagaatccgccgccgatgtcttcgatcgcgtctccagtat

SEQ ID NO: 157577 - DNA, 1960 bp, Arabidopsis thaliana landsberg
attgactattgggtgcaggaaaaaacctgatatatatatatatattgatgttgtaggcacttcttgcttatgggctcagtagctcaaggcgtgccccagatgctcttcatccgtgagtctctctagtaatcttgtatactgtatggtagaacagaacagctttctcttgtttgaagaagtacttagaccagccttttcactttgctcagctatggctactcaaaagaaagatttgtatggtctttgatatctgctgttggcatcttttgccttgggtctggtgctaccatagttaatggagtacagaacttgtggacttcttcggtaattttcggcatatcttgtgactttgacgttatctgctatttgatcttttggattattagatactctttgtacatttccttggttgttcatcaattttgactatctttctcagccacctccgaatatggaattagctgctgtggtaattggtggttcttttctaattgaaggtatcaacttctcctgatctttgtgcatcttgttatgtgaaatattcttgaagttggtcgagctatacttcaagcctacatgctgaatatcgtttgttaatctttatgtctcaaaggcgcttccttactcgttgcaattcaatctgtcaaaaaaggagctgctcaagaaggcatgaccataagagattatatatggcgtggtcatgatcctacttctgttgctgttatgactgaggtattactttatacgtggatctgatttgaacatatgtagaaaccaagtaaaggaatgttgttagagtcgttgaaaacactgttaaattgtattatgttcctattcgtctgcttgtgactattgtacatgcacaggatggcgctgcagtggcaggtttggcattgctgccgcatctctggtcgctgttagaatgacaggaattccaatctatgatcctataggatcaattgtagtcggaaatttacttggaatggtatgtctgtgtctgtgctcgccttaacttgttattatattactctatattacatttctaaactaaagagcaattcgactaggttgctatatttctaattcaacgaaaccgacatgccttgattggaagagcaatggatgatcaagacatgagtaaagttcttaaatttttgagaaatgactcggtacaaattcttcttatcataatttagaaatctcatatatgacgcatgtagaggtgggctcagaatcaaatattgtgttgtgtaggttgtagattctttatatgactgcaaaagtgaagtgattggtcctggatccttcagatttaaagctgaaataggtgcgtattttgaactgttattcgctctcaaagaattgatttgttccctatgcttgaaaataagaaggaaaaaggcaaagtcttagcgagtgaagatcattctatcgtattctgaacttcttgagtgattccattgggcactgtattaattgttgtatttaaacagatttcaacgggcagatggttgtccaaaactatttgaagagaactgggcgtgaagagtgggcaaaaatggtatccaaatttgcattctttatctcatagttgtgtctttttagcttatgaacaatctattaactaccattagtcaaatttgtggttagttactttaaaatttctgaaaattgatggtgtacttactcagtttcgcgaggctgcaaagaacggagatgattctgcaatgctcaatattatgtcaaactacggtatgcaaatgttcgacttctggaattgtcatagcttacgttccaagcttgaaaacaaactgtataaactgttgcaggtgaggaagttgtcacggctttaggaagcgaagtagaccggttagagaaagagatccaagagcttgtcccaggaatccagcatgttgacattgaagcacacaaccccacacccacagacccatctctttga

SEQ ID NO: 157578 - DNA, 1240 bp, Arabidopsis thaliana landsberg
ttcctctgatgcttcgtcttcgtgtgagtcatcgcctttgttcgtggcgtcttcttcgagctgtaagaaggttgtgaggcgaagtgggtctgtctcttctacaaggaagctgagtgttgggaaagaagaagagaaggtttctggtgattgcttcgctgatggtcgtaaaagatgtgcttggatcacacctaaagctggtaagcatcaaactttcacctatcacacattgcatagtgagagagcttttgactttagatgcattcaaataaatgaaatgagtgaaaatgtgaatgtgagattgagtttagcctgattgtgtgagatgatgaagttcttatctagttgaatcaatgggactgaattgagacaaggagctagtgttttttgtttgatctaattatgttcttctgtatgtgaatattaagtaattcaatggccaacaaaatgtttcaattgctatgtattttattcagtgagcattgtgtagatcatttgctatgttgcataacttatgaagtagcttgtcctgaagttctcttataaatattttaacttctcagtgtccatgaaatttagatgaaggatgttttgattagctgatagatccacttcgtttatgcttttactggattctctatactaatgagcataaatgtttccatgccaagaggcactttccattattctttgttgttctctcatgcttcatatctttctctgctgtaaattgactaataatgttgcgtttttctacgttgtaaagacccgtgctatgttgctttccatgacgaagaatggggagttcctgtacatgacgacaagtatgtggcatcctcaactattttccttctatctgagatacactttgtagttataagagtctcttaccgcttggttaacttgtgtaggaagctttttgagttattatgcctctctggtgctctagccgaactctcatggaccgacattctctccagaagacatatactcaggtaaccaaaccaagttctttagtaatatgaattttgaattcgcaatataaacttctgatgctaagccagtagctctgatctctgattgcctaatttgcttcttatttgaaacagggaagtttttatggacttcgatccagtcgctgtagctgaattgaatgacaaaaagttaacagcgccaggtactgctgccatttccttactatcagaggtcaagatacgatcaatcctcgataactcacgccatg

SEQ ID NO: 157579 - DNA, 1854 bp, Arabidopsis thaliana landsberg
  unsure (1)..(1854): unsure at all n locations
gccgttccgacgactttctttcggcttttcacgcgttgtcggctcgaaagtgcgattggctgaagcatttctctcgagagcgagttgagcgtgcgcttcgtcttcttcacggcgtttcttgtcccactagctcagagtcttccgatcatcgcactcaatttttcgtagatatgcaatcgacgaaacttactctgcgggaggtctatgccaagaagaaagaggataaggaaaggcgattgacggaggagaggcgccttgttaatgcgggattgatcttgccgcgggccgattctgaagcgacccaagacgggaatgttattcccgatgctaccacaccgcagactgttcctgaggcgtctcgagatggagtcattcccgatactgccgcgccggttgacgcgacgcctgctgaggctcggggaaccgagccgtctgttgctgcgcccgaggcggttgtggcgttacttgcgaatgacaaagcggcaggtaagcgcattcgggttgacgatgaatcgtcaaagaagaagaagaagaagaagaagaagacatctggctccgaggcggaaaaaatactttccatttttgaagatcgtactgcctcggccaatctgctcgggggatgtgttggccccttgcttcctcctccagatactcttctggaatctcggaagtatgccgagacggcatctcactttctgcgggtatgagctttgttgcttataacttattttggtgttgtcattgtaaatctaacttctcttttccaggctgtcgcttcgatgaaccggatggtacattcgtatgattcggctatgcggagcaacatggaggtgctggtaaattagccgaagcggagtctcggattcaggccatcgagcgagagaagaacgaggcgctctccgaagctgctgctgcgaagcttgaaagggaagaggtcgagaggatggcctacgtgaataaagagaatgccattaagatggccgagcagaatctcaaggcgaattctgagatcgtccgtcttaagcggatgttatccgaggagagggggcttcgtgacagcgaggtggctcgggccattcagacgacgaggcgggaggtttccgagaccttcattgccaaaatgaagaccgccgagcacaaagtgtcgctccttgatgaggtcaatgaccgattcatgtacttgtcccaggtgcgagccaacgcgcagctgatcgaggccctcgaaggtggcggagttctggagagagagaaggagcaggtcgatgagtggttaaaagattttgccgatgctgaggtaaattttaatcgcttaatggccgagctgaaagatgatctcaaagctccagctcccgagcccgctcctctgagtccgggtggtcataggtcggtcgagtcattagccgacgaggcgggaattacagatcaagctggatcgctcctccctgccaaggataaccgcccatctgaagatctcgattagggacccgaggcggnttttgttttcctcttctctttctgctcggttataatacttatgcctagatggctttatccgatgatatgtagaacctgtgcctggacggctttatccaatttaagtcactttttgaaatccaaaagttatggtttattagtcccgaatcgttatattttactagtataagattgatttttttttaaaatgaaagtctctcggttgcgacccgatcgtattcacttctcgactagcgtttaggaacgagctgggatactggtgttaaaagtataaccgggtttctgaagatgaaaatttcttatcagaaataatctgataaatttcacctcgtatttgtatagcgcgctgtagccgaatag

SEQ ID NO: 157580 - DNA, 599 bp, Arabidopsis thaliana landsberg
cggaccaatgtaaggatgacacgtggaaaagtgacttggaagagaatctctccttgagctggatactcattgacccgacatgtaaacgtgcggcaaatgtatcaacccgtaaacctgtctcggtgcaccgtcattggttaaccggagaagtccacgtaaaattctcctctatttttgtcgtgggcaacaagaaaaggtcggagcaagtggagttcactgtaacggtggtgctggcggcgtttaaccggagggaagaggagacagcagtgatgcagataagagaggtgagcctagtagcagaggacaaggatgggaggaatctaggagggaaggttagtttggaaattttggtggcggccatggggatgaaacgtaggtttagggcgggaggggaagaagaagggaaagagaagtacatagaatatatggagaggaagaccgcgaaggtggagatgaagtggcggcgagggaaagaaacggctatggagacggcggcgtgctggatcgccgtcctcttacttggtttccttttgtgtttttatctgtttatgcataaaaatttagtagctattatgaaaaaactaataaaatagtaaaat

SEQ ID NO: 157581 - DNA, 1048 bp, Arabidopsis thaliana landsberg
atggctaaagcttttacgttgcggggtgagggtagaaatagaaggtacaagtttatacaaagaagtacgacggcagccaagagcgggatgtttatccacgatagagagtattgtatacgcgatgaaggagatcggtgaagatcctgaaggtttagataatatgttgaatgtttttgaatccatggttgaagatcaacgaagatgtaaagatgagaactttaacaagattatctgaaagacaaaattactctgctgttgtaacttgtaagctgaatgaattagattcttcaattttgataattatgccgaaagttggagtcgtttttggcaatttattaaaacaattgatgatataaatgttggggtgtgaacaagaaaaattcatagttctgggccaatatgtaaattaagaaatataagttttgttgagtaagacttttgttaattttgaactcagagtgtgttttcgttttccaatgctttcaattcgcagaagcttaactctagcaaaagagccaaaagatttgtttttgtttttgtgtaatctccgagctcgatgtgtatctacagatgactatgatccaccattttcgcctctctctaaacccactaaacctccaaaagagaagaagaagcagaagacgaagaagcaagaccagtcgtcggagctggtaaatgacctgaagattccagtgatttcagacctccctttcgattttaggtattcgtattcagaaactaacccggaaattgaaccgattggattccgtgaaccgaaacggttctctccatttggaccgggtcgattggaccggaaatggactgggactaccgcactggcgtcgccggagattgatcagagtcaatgggtggaggagagagcaagagttctcggcgagactttgacagaggatgaagttacagagcttattgaacggtatcggcatagtgactgtacacgacagattaatctcggtacaattttgaatcttttgcctaagttttttagctttgaaattagtttgcttgatcaaatcgaatcgtcttc

SEQ ID NO: 157582 - DNA, 3104 bp, Arabidopsis thaliana landsberg
acaaaccggcgtgcaaggccgtatcgtcaacgtcacgtccgtcgtccatagctggttttccggtgatatgttgcaatatctcgccgatatctcacgaaacaataggtaatttttaattagtataagctagaaaatatcattccaatcatatagcgaataattaatcattgtttaataataagtacaacaaaaaggtgatgcgacgacaaaaataaacgccgtcgtcctctcgtctttttcctttatttaaaatcatattttcagagagaataataatagtttatactttgtgacttgagtttgacccactaattatagctttaactttgcgttttacagaaattacgacgcgactcgagcctacgctctctccaagctcgccaacgtgctccacactgttgagctatcacggcttctccatgtacgttattatacaaatttaactatttggtaggaagtaacaatttatctcctcatttctaataataaactacaatatatatgcagaaaatggatgcgaatgtgacggccaattgtgttcatcctggtatcgtgaaaacccgtctcacaagagatcgagaaggcgtcgtcactgatttagtgtttttcttgacatccaagctattgaagtctgttcctcaggcagcagctacgacatgttacgtggcaacaagtccaagattgaggaacgtgtgtggcaagtacttctccgactgcaacgaagctaggtcatctaaatccgggtcatgcaatctcaaagctcagagactctggactgcttctgacttgttggtttctccacctaattccactaccaatctttctcatacctccttttaaccaacaaaccatcctagatattttctacgtgtaaatcttaagccctatatatagtaatataattagctttataatatatatagttataaaaatatatactatagatgaaatgggccaaatgtgtgtgtagttgtgttacgtgtgcatataagcaagcctccctatatttaatatgtggttatggtttgacattattgttaatatatatattacttgtagggttttgtaatcctagctagctaggtccttgttatgtaatatatacatatatcaatcaaaaacatcacagaatttcataatcttggtactcttataaaaaaaaaattatttctgttgatgactgatgactgaaatgaaaatcatatcctgatatccatccacacaatccaaatatggttcctttgcaatattagcaaccactcttcaaatgggccaataatgctagtcactgctataataaagggcttttaggcccattaaataatcatttggtctttcaaaggcccatcacgctaagccctagaccctcctccaaagaatgaaatgaaatcctatccacaagccaaatttggttccttttcaaaatacataccaaatttcgatttgtcaaacactcttcaaatggatcttgaataatcactaatcactgctataataaaggcctcattaggcccattatagaaacatttggctctttgaaaggcccataacgctaagccctagaccctcctcggaggctaaaacctctcggctcttcctgcaacttccatttcagatcaagctccggctgaaaatggcgaatgcccagaaaggcttcactgtagaaaccctaagatctgcgtcgaaacagtgtctccgctgcctagtcgtcccggtccgtctccgccgcgctattaagaaatatctccgcgaggaagatgatcctcacattaggaagaaggtgcgtcagttatcggaatcattccaagagatcaaggacaccaatcttcagttacctgaaaccacggccaagagtctggctgattctatgaactcgctagagaccaaacgatggaagatacaaaccgtttatggagatagcggtctccaatacagagacggtgagactgctgcttatattgcttctcgtatgcctgccgtcttctccgtctgctatagagtcctcatcgaggtactttctcattggtgataccatttgggatagttgtgtagagaattgagcttgagattggttaaattcttatatagattcgtcgaagagtaccaggttttacgcctacaagagtgctggattttggtgctggcactggttcaggtttctggtgaggagatagatgtttccctgttagctttggtagttttattttgattattgattcgttgtaacatcttgcagggcggttaaagaggtttggcctaagtctgtggagaaagtaaatatagtggaaccatctcaatcaatgcagcgtgcaggacgtaacttaatccagggtaatttcactttgatagtctctggctaaacacttgagtgtagtgattgattctgatctttgccattgttgtgaatatgataggccttaaggatttgcctctgatccatgggtatactagcctgctagctcttaataaagagatcaacaaaaagtctgagaggaaacatgatcttgtcatcgctgtgggttatctcttttatcactcgcattagctatgattcttgtttacaagtttgtttttttactgagcatgttttccaaaaaaaattctgttgtggttaagtcctatgtgttaggggagataccatctctgaaagacaggattactgtggttcgccagctctgggaccttacagatgatctcttggtatgtttttgagttttttcatctttcattctcctcaatgacttctttttatactagaacgtgtacttctcttcacatgttatctctgtgtgcactgtgcatttttttatctgctatatgcattgagctttatgaattccttacataaattttgattggacaggttctggttgaaccaggaacgccacacggtgctaatattatatctcaaaagaaatcccatatactgtggatggagaagagggtactttttatttgcttacacattttcatgctcaaataatgatctgtttctgttttcagacgttatttcaccccccttctgcttattttcaaagtattcaaattgaattagaaagtgcgtatcctggaaaagaaaatgaagaaagatggagagggggtgc

SEQ ID NO: 157583 - DNA, 882 bp, Arabidopsis thaliana landsberg
ttctgcttatttgggtctgggtaccgtcattttaccgtttgaagctaaaacggtgctttatttgacagataaaaaaagccaatcgtgttcagatatgggtgtcgaggattatcatgtgatagagcttgtcggtgaaggatcttttgggagggtttacaaaggaagacgcaagtataccggccaggtaaattgttgctgggttgttctctttgttatcatcggctacttaaaatcagctaatcaattcttaatttggtaatttttatcagacggtggcgatgaagttcatcatgaaacaaggaaagactgacaaggatatacatagtctaaggcaagaaatcgaggttagcaagtttcagtccttaattgcacttaccatcaactttaatcccaatcaattgtatggtatttgaccaacattatttcttttatgcctcacatattgcggaagctcaagcatgaaaatatcattgaaatgctcgactcctttgaaaacgcacgagagttctgtgtcgtcactgagtttgcccaagtacttttctcactgtatattgtagaatctaaagtactgatttatgaagcatatagctagacttatatgaaataaagaatcaccatggaacacccaattttacagggtgaattgtttgagattcttgaagatgacaagtgtcttcccgaagagcaagttcaagcaatcgcaaagcaattggtaacacgttttgccaacatggctcttatttctatatctgattattaagacaattttgaaacttctttataatccaggtaaaagcattagattacttgcattccaaccgtataattcaccgtgacatgaagccacaaaacattcttattggtgctggctctgtcgttaag

SEQ ID NO: 157584 - DNA, 835 bp, Arabidopsis thaliana landsberg
ttattggtcgccataataatagtaatctctagttcagtctctgtttatcggtaaatgtttttttgagttgtgtcactgaatttgcaggaatttgcaaaggctgagatgaattcaatgttatctaacttagcattcaacaacattattagaatggtgacgggaaaatgttactatggagatggtgcagaggatgatcctgaggctaaacgtgtgcggcagcttatcgcagaggcgatgagttgttttggtgcaggacatgcggctgatcatttaccgatgttgcgatggattacagatttcgagaggcgggtaaagaagattgctgctaggcttgatgagtttttccaaagattggttgatgagaaacgtgtggcaaaggagaagaaggagaacacgatgattgatcacttgctttctttgcaagtatcccaacctgagtactacacagaccataccattaaaggaaccatgcttgtaagtaatcccctaagagcatttaagttaatggtcacatttggtttatttcgtgtatgtgtgcaatgtgcagtctcttatacttgcggggactgatacatcagcggtaacattggaatgggcattatcaagccttttgaacaatcctgaagtactaaaaaaggcgagagatgaaatcgacaatcaaattggcttggacaggcttttggaagaatcagatattccaaaccttccttatcttcagaacattgtctctgaaacgttgcgcttgtatcccgctgggcccttgttagtcccgcacatctcatcagaagattgtaaagtagggggttacgatatgccgtgtggcacgatgttattg

SEQ ID NO: 157585 - DNA, 645 bp, Arabidopsis thaliana landsberg
ctcggggatagagttattttcagcatgctcaagacacttgatcggtaccagaaatgcagctatggatccattgaagtcaacaacaaacctgccaaagaacttgaggtgttcttaattcaaatactattttagattcctatcatatcatttcaagaaagatctttttttttaaaagtttgttttcgtgaaatatttcagaacagctacagagaatatctgaagcttaagggtagatatgagaaccttcaacgtcaacagaggtacatatctgtctatacctccatatatttactcaattctgtatccatgtagattcatatttgtaggtgtgtgtggcttttgttggtgcagaaatcttcttggggaggatttaggacctttgaattcaaaggagttagagcagcttgagcgtcaactggacggctctctcaagcaagttcggtccatcaaggtatctttatgcatggaatcaatgattcaaatgagattaatttgtgttgtttaattataactactatggtggtatgatgattgtttgcagacacagtacatgcttgaccagctctcggatcttcaaaataaagagcaaatgttgcttgaaaccaatagagctttggcaatgaaggtataattacagaataagca

SEQ ID NO: 157586 - DNA, 406 bp, Arabidopsis thaliana landsberg
attttgttcatattagtgtcaaaattgcaatccgttatttgtggtggattcggatctacggcggttcgattccaacatgtttacacactgtgtgtggtttacttactcgtggtgggcttgcgagtttgctcaccacgggattagttaggcgcttcggcgaagttcggttgggatactcgggtgttagttgtgaagaaatgttgttaaactattatttgtgggtttaatgtgtgtgttggtgataggtctctatcaaggaggtgtgtggaagataagagttgagcttccagatgcttatccttataaatctccatctgttggtttcattactaaaatttatcatcctaatgttgatgaactgtaagtctttttaaattcaatccactagatgttttggatcaattta

SEQ ID NO: 157587 - DNA, 773 bp, Arabidopsis thaliana landsberg
ctttatcttcttcctttactctgcgccgctttgtctctgtcgcaatctcgtaagcttcttcagtcttctcttagtttaatcattggccgtaatttgtattcgttcgaattgattactgtgatgttgaaaacctaaatttatcggatcctgatgacgtaatgtgactcgggaacgatctttgagttagaagtatttttgcagttttgtgtatgtaaagttgaaaactttcaccaaattctttggttttttaaaactgtggatcaaaataactgccatgtaaatctgaattttatttcaaagcctgtaattttgttatagagttttactgtataagctgattgtgttgatttgaacagaaccatatggagagagacatggcaatgatgggagacaaactgatattgagaggcttgaaattttatggtttccatggagctattcctgaagagaagacgcttggccagatgtttatgcttgacatcgatgcttggatgtgtctcaaaaaggctggtctatcagacaacttagctgattcagtcagctatgtcgacattttcaggttagttttaattaccaatatgagagaatttgctagagataattaactaaattctctcctttactctttaccaatccttttttattgtgacctcatctaaaaatgacaagctttgcttatataacaagttcccctccccatctgtgtcactgagtgatgcatagattaaatgagattgaagatttggaaagagttgtgtggtaggaggttactg

SEQ ID NO: 157588 - DNA, 2847 bp, Arabidopsis thaliana landsberg
  unsure (1)..(2847): unsure at all n locations
taagtctacctttcgtcaaggagtctgattctaatttactttccatgaccccaacaccaccggcatgagcatcaatgagtgaagtcccaacaggagttccagctaacagacccagttcctgtgaataatgaaaacaataggataaaagggaattatgtaacagaatgaaaatatagacctaagaagtagtaagtatgctctaagacccacagaagaaataaagcgattgttcttgtatctaaatacctctattttcttaatttttagtggttgctctgtaaagaacttaccttagcagcggttgcagttagaccattacccagtggatgtccaggaaaagctacacttcgtcctgtataacaatagaaataacattgtcagaaggtaaaaagtagaggtttcacagttcctctaagagcctttctgagcagctggggcaaacaaagagagatgcataccaatcttagcatggtgcccatctaccaaatcgcctaaaccaatttcttcccagaactcatcatcccatccacaagcttccatatcacgagaagccttctcagtcatctggtgcatgtgtgcatggccaagataagtccatttacatactgtggtgcacaaactacgtgtatcatctccagtagctctagggagaaacaaaagaaatcaggaaatgcaaagataattatctcatagggaacaaaaggttaaagaaaaaaaggcctgaggcacctgtaggatagccaatcactcaagtccatccacttatacaccattgaccaagactccttannnnnnnnnnnnnnnnnnnnnnnnnnnnnnnggagaaatcttttttcgtcaagctcaaacacaaagaaagcaatcatataaagaacccctataagaaagttgtacctacttttggtggctccatttctggagaaacaccgccaccacagtactgcaagactggagaagtaaatgagttgattctctctgcctgctttacagctctatggtccatccatacaataatgtttcttcttgaatcaccactccacgacactgtaacaggagatccctcagcatcaaccgccactacaaacaaaaataaacgttacattgtcaccgttaagctcctcttattcagccaaacacaaagacggttataagcagattctacacaccgagagagcacgtggcagcaaagcctattcctttcacttccacatccgaaacatttgcaagagagcaagcagatttcacagcagcacaaactgcatgccaaatatctgttgaagattgctgttccaataatattatcaatgtcaaagttaatctctaaacaaataagccatgatctcccttatccaacataataacctcaatacagtccccatccttccaaatctgtattggactagtagcagatcctagaagcttcccattatcatcgaataaacctgcatcataatcaacttaagctacaaaaccaaaattgcattgctggtcgattttcaacattaaaaagaatcgatttttagtagactgatcaaatttcatcgccactaaatcaatcatcattctcacgaatctaagaagactacaatttttcaaaattgacgagattttaactcggggaataagacagaaggattaccggcacgggcgcttccagtgccaacgtcgacaccgagaaaaacggagcgagacggaaatggatttaactcagaggtggtcatctgaacggcaacggcggaagctacggaggtgacgatgactttagtggctcaccttcctttatctactttcctttcctttatacatcataaccggattgttcttggttagtagagagccggatttagctaatttggatcggtcgaaccacggtccacgtgctccgttttttcccctgttttatgactaataaaaccctacaagtccgttctttgacctaaaaaacaattctccaagttgagtcttcttactcgattcatcgggaaaaagagatggcagatcgtatgactcgaatccctgtcgtcaacgcagactgttgcaagcctaagaagtagcttcttatgcaaggtacaattaccctgcaatgactataactcgaggggacttcaagctgagattgaaccaaggagaattcacggattctcagattatagttatgttgggagagaatggaacggggaagacaacgtttatcaaaatgcttgcgggttcgaagcttgatattgatgaagaaggatctcaagtacatgagataccacagttctctgtttcttacaagaatcaacatatgtcaaaccgtaaatttgagattactgttagagatttgatacacaggaagatccctaacgcatatgcagaacaccaattcgtgtcagacgttatgaaaccgctcaagatcgaggagctcatggataaaagcttcaacaaactatcaggtggagagaaacaaagggttgctttagctttatgccttggtaaatctgcggatatctacttgatcgatgaaccgagcgcgtttcttgattcggagcagagaattatagcttccaaagtcataaagagattcattcttcagatgaagaaggcggcttttgcacgatttcataatggctacgtatttggcagataaagttattgcgtatgaaggagaaccttccgtggattgcacggcatcttctcctcagtctctacgtagtggaatgaatttgttcttgtctcgtttgaacatcactttcagtggagatcctacgaatttcagaccaagactcgataaactcgattggatgaaggacagtgccctcacacatgcggaatattagctctcagcaaaacagcagatgaattatg

SEQ ID NO: 157589 - DNA, 291 bp, Arabidopsis thaliana landsberg
tcaaattgttgatgttatgtggtgagtttcaattgcagatatgaagatgagccagcagagcctgagatcgaagtaagctattatttgtagaagagagattgacattgtttattattattactaggctgattagaatgtgttggtgtgagtaggaaggagtagaggaagatgctgatatcaaggagaacgatgatgttaatgttgaccctttggaaacaagagataaggttgaaacagaacctgtgcaacgcccacgtaaaacctcttagtctatgactaagtatgaacgtg

SEQ ID NO: 157590 - DNA, 955 bp, Arabidopsis thaliana landsberg
  unsure (1)..(955): unsure at all n locations
atgatcgtgtactgttttcagtaatgtagctcataaaaagtgtggatgcattttcttacacagactggcttatcttcacgaagctattgagccaaaagtggtgcatagagacataaaatcaagcaatattctgatggatgacacctttgacgcaaagttatctgatttcggtcttgctaaattgcttggagctgattcaaattacgtcagtactcgagttatgggtacattcgggtgagtaagaaactgtatgctatagctataactttacttttcataatctgcattggttaatgaagcatatttctctgttccattgatgaatgttcaggtatgnnnnnnnnnnnnnnnnnnnctctggtctcctaaacgaaaagagcgatgtgtacagctatggtgttgttctcttggaagctattactggaaggtatccagtggattatgcgcggcctaaagaagaggtatacaaaacattcatctttctctagattgtagaatactctgaaagcagaggttgatcttgattcttgaaatttgaaatgtgtttttaggtgcatatggtggagtggttaaagctaatggttcaacagaaacagtttgaggaagtggtggataaagagcttgagatcaaaccaacaacaagcgaacttaaacgagcacttttgacagctttaagatgcgttgatcctgatgcagacaagaggccaaagatgagtcaagtggctcgaatgcttgnnnnnnnnnnnnnnnnnnnnnnnnnnnnnnnnnnnnnnataatgacaaacaatgcagaaataaactgattttcttctgtggaaactagaatgttcataattggtttgatgaatgttttgatcaggaacgaagaagaaggagaaatcagaacgcagagacgcatagagaaagcacagacacgaataaagataatgatataacaacagatgcaaagatttga

SEQ ID NO: 157591 - DNA, 1518 bp, Arabidopsis thaliana landsberg
gcggcatgttggtgacaaattggttcatgcattttgtggtgttcatcatagaaaagaactatcttcttcggaaaaaagttttgtactttgtgcatgggttgaagaagaatgttcaagtcttcatttggtttagtctggttctgattgcttggatatgtctgttcgatggtgatgttaaacgtactcgtaagaccaagagatttctagacttcatcacttggactattgtctctcttctcgtagggtcaatccttttcttggtgaagacgtttgccttgaaagttcttgcttcaaagttcaacgtcagaaacttctttgagaggattcaagagtctgttttccaccaatacgttcttcagactctctcgggacctccgcttatcgaagaggcagagaacgttgggcgcgtgccaagcacaggtcacctaagtttcacaagaaccaaagatggaaaggtgaaagacaagaaagtgatcgatatgggaaaggttcacaggatgaaacaagagaaggtctctgcttggacaatgcgtgttttgatcgaagccgtgggaacttcaggtatatcaaccatatccagcactctagacgaggtcaacaataagaaagagagaacagataaagagataacaaatgagatggaggctgttgctgctgcttatgacgtcttcaacaatgttgctaagccaaaccacaagtgagtcatcacacaaatactctgttttcttctactctgttttcatgttaatcatcacaactcgaattgcttcttaatttctcagttacatagaagaagatgacctattgaggttcatgataaaggaagaagtagaccttgtactcccattaatagaagatgccgacaccggaaaaatcacacgcaagacttttacagaatgggtggtaacattcttcaaacacccttaatttttgtgttcaaagttgttttagatgactaatggttaccaataaaggaaaccctagataaaaacataacacatgtctatttagagaagttgttaagttaaagtaggtgtgttgtgccattttttgacaggttaatgtatacacaagtcggaaaactatagggcattcactgaacgacacaaaaacagcggttaagcagttggacaaacttataactggaatcttgaccgtgatcacattcattgtttggatggtacttctggatatagcatcgaccaagcttttattggtcttctcctcacaatttttgggtcttgctttcatgatcggaagtacttgtaagaatatcttcgaatcctttatgttcgtctttgtgatgcatccttatgacgtcggagatcgttgcgttgtcgacggtgttatggtaacttactttgcaagtttgtttaatttgctcactattactactcagttaaaacatctaaatcattgaggtatttttttttttatattattgcttgaagttgttggttgaagaaatagatcttttaacaaccatgttcctcaagattgacaacgagaaagtgttct

SEQ ID NO: 157592 - DNA, 3378 bp, Arabidopsis thaliana landsberg
  unsure (1)..(3378): unsure at all n locations
tgctttctggaaatttcgaattttgtttgcaggttgaagcaattttggataaagatagtttcacattagaggatcttcttgacgaggatgaaattattcaagaatgcaaagccctgaatggacgactcttaaatttgtatgctctgtaaccacattttcttgcatttcatgcttaattaccgttttgggagaggaaaggaaatgcaattgttcatgtgtaaaggttgcaagtgacagtgcattggctttgggtggtggatttattacctgacaatgctgtcacttattttgacgtccacctcaatagcttggctaatcaatttatttcacgacatgccagttttttgcattattttacgacatgtcagtttggctaatggctaactagaacagttctacttacacattattntaagacatgccagtttcttgcatcacatgattttctgtcattcagtcgaacaaaattatctccctattctgcacaaaagttggattatcaaacatcctgtcttaatcaggcgttcttgactattggtttcgttttatttcagcttgagagaaaaagtgcaagtggaacaacttattaggtacataatagaggagcctcttgaggacgtggaaaagaagcgaacattcaagtaagtgttttggataaatgatctgaaaaatatcattaaaacagaaaaaaaacgatattgtttattgttttttttccctgattttgtttgatgaataaacaattgatattcttttctgctgtaggtttcctttcattgcctgtgaaattttcacatgtgagattgaaatgatactgaaaacactagtagaagatgaggaggtagagattgactttgttactttctcctatatttatacttggtaaatggttatggatttagggtctcttacctctcgtgatctcttccttttgcagttgatgttattattgttttcgtttttggaagctaaagaaacccataactcattacttgccgggtacttcagcaaggtatttagcattcaacaatttttaattatcagaaaattcattgagaactttccaacgctcttatagggctctatagagtttcctcgacgtgtactctcttacatctgttatttctaggttgtcatttgtctgctggtgcggaagacgatcccattcatgcaatttataaaagtaagttggttttgtttcccagattaggactttcgtttaagaatgacttgaacttagctagaattattatttttccttatctctgtagaaattattgaatcattagcttactaatttcttgtacactttggatcttctacgtaacttgagataatgccgtgaaatagtcagagatattgatgaatatctggtttgctatttaattattgtaagagatttttactaatcaacaatattcaatccaagtatccaaccctgttgttcaaatattgataactggtacacaaatttactatgctttaaacaccatttgaccgtttgaaaattcatattaagaattcacattatgattaaccttggctttcttgtgctaccaggatcatcaagaaattctgaagcagcttgttgatttgattggtattacatctattatggaggttggtttgcacttttatatgccttgttggaattccttattaggctctacgtttattacacatcaacttgagaacatactgaatatgattcgtttaagagaacaatagtaatcaacccagtaataatggtaattattgctgatatttctctcatcattgtcatggcgagtattgctgtttaaactatgattgttacacaaggaatttcttcaattattattgtctgtataccatgaaagttatataccgagaggttgtaaaattgtatattttctgtaaaatacttgtttcctagactctaacttattgcttggtgcttaggttttaaaacgcctggttggtactgatgaacacctatattcaaactatacaagtgcaatgcagtggatagaagatacggatgttttagagatgattgtggacaagtttggctcttcggtaagtttcattcagttgcatggattacttttgtttcaataagggcaagtcttctggctttcctcctttatttcagatttatgctaccattcaatgcattgctatccactgatatcttggagatttttgttttatttttgtaggagtctcccgaggtacatgccaatgcagctgaaattctgtgtactgttgcaagatacgcaccccctggtcttgctacaaaactttccagccccaggtagactttctcagctttggctattattttaatgtagtcgttgatactgcttaaaatttctaattaattgacttcttactatgattcctggacacttttatgcagctgcactggaaggttgttaaaacatactttagaagattcacggcctaagtctgttctggttaattcgttatctgtatgcatatctctactcgatcctaagaggtttacactgggcacttatcatatatatggtcgtcaacttacccatggaagcatggtaactaatcccgagacagttgagggaatgcttggaagcctaggtgagcaaatacagtatggttattaaagattcttatgtagttcagtagttgtacttgtgtgttgttgtgtattgacttcttgaatgctatattccctattgtgaaagatggggttgggttgggaaggaagaatactgggtttgtgggagtcggaacctacaaccagatttcttaagcacattttttgcttgttggtatgaaaactggtgaaactttatattttttcctaattgtgtagagacgtgctagacgcttgttgaggtgcaagacaatcatcatggcattttacttttccaaatgaatactatgtggcttgcaatgttaattagtatcttggctactatgaatactatgtaataggtttctactgtgcaggtgatttacttatgcttttgaatgtttcatctgctgagggtgttttgttaacaacgtatggcaagttgcaaccacctcttggaaaacacagattaaaggtactttatttttctcgtttgtgtgatttgttttctaactatgatgtatctttcactagatggtttatgatttgtaatttctgaactacatttgttcaatagacgaaaatttgaatttatttatttttcctagattgtagagtttatttcagtcttgctcactgtcggtagtgaagcagcagagaaggaagtaattcgacttggagcggtgaaaagagtgttggacttgtactttgagtaagtaggaaatttcattttcttagttgatgatatgcaaactgccatgctaaattgtgatgcaacg

SEQ ID NO: 157593 - DNA, 1249 bp, Arabidopsis thaliana landsberg
atagcatcctttgtccacaccaaacacttgtttccatcatttgcgtacgcttgtctagttcaatcagctacgcaacgtgaggcacacgtcgtaaaagtcccggatgtcaagaccgatgctgttgttggatcagtggctaatttcatgttttcaataggaagaaactcgtcatttcgcttataacaatgaaggtatgtttcccttttacaaccaccagagtaatcattcgagtcatcagatccttgggaaaattctcgtttgaaaccaagaacacatctacatgggggaggctctcggttttcattgcaaatcccaaatgatccacaactgttataaacgtcacatctattatcaggttgagacaatatcacacgccacgactgtaagtcaacgtgccaaacttgcagcatgaactgccccgaaacacccatgaccaaacgatatctgctctggggatctactgaaaaggtgatgtaagactcatccatattcaatgctatacttttcttagtaccttgcaattctggaaatggcttgaggctttgaagccaatcatacaatggcccactggaccaatatgactttgatctattccaaaccgtgacgagtgagtgtagtttagggtcaaactcgagagagtatcgacccggtgatggatctatcaagctctcccaagaagagaaaagttggcttactaatctgattttaccgccaggaagccaagtatccgagggatgatcaaaactctggcacaacacagctgcagaagaattaggcccatctctcaatactagattaccactatcaagcagaacagcttgaacatccttgctcatactagagttaacaccggtcgaccaaactgtttcatggaaaagtaagtttccttctgagatcttttgaggggatctccgagatgtcccctccgtatgagatttacgggtggcgctgatattatcatggagaattaagtttccatctaagatctttaataagtaagtagaagcatcccctccaagaggagattctcggtttgcgacccaaacaatagtctgtggagagacgtgcctgtaccacattcctatgtagtagtttctatgatcataagtatctggagttggggtgaagagaccgagttcgaatatatcaccgctggaaacaatggtctcaaatcctgaaagaggttgattagtagaaatagtgtcagttgaagaagaaacttgaaaagacaagaccaccaacgctccgt

SEQ ID NO: 157594 - DNA, 1202 bp, Arabidopsis thaliana landsberg
actctacgaggttagaaacaatattagattttgcttttgtttcttgtccttacaaggaaaccggtttttttaaaaaaataccatttggttcgcagtcgttgaagaaaacctgtaaaggagaatatacaaatgttcatccacgtaacacacaatgcttgaaattcgttgaagaatttaataaggtttacacactctagcgccttagtaaataaaaagattcatgttcactaaattcagagttcagacacttttttttttcttgtggttatttcattttagtgtacaaacagaatattgcaacaacgtttactagatccgttgtgcgaaactgaaactccagattgctatgtaagtaatctatatatcttgccctctcttatctgttaaaccctttgagaatatatctatcatacacggttgcttttgcagatttataggtttatgctaactacctactgggccaatgacgaaaccgtacgcaaagctcttcaaatcaataaggtaatagtatatcttaaggttcttggtaaaagcacagtgccattattataggaggatctacgattgcaggagagaagaggggaatggatacgatgttatcgcggtattccttacaatcatgacattaacagtagcgtaccttaccatatctataacagcatcgatggttatcgttctctcatctacaggtcagagtttataacccttttgctgatcttttgtccctatcaagattcaagattattgttaaactgtaaggtttttggtgttttggtggatagtggtgatcatgatatccaagtgccttaccttggaactcaagcttggataagatcgctcaactattccatcattgatgactggaggccatggatgatcaaagatcaaatcgctgggtatatataaaccgaatttgttcttccgttttgtgagattcactttgaaatgtattcttgattcttacttgaatggcagatacacaaggacttatgccaataaaatgacatttgctactatcagagtaaagtcttcttaattgtttcagcttaacatttttattttcattgcatttccatttgaaaaattgtattataattttgttttgattacagggaggtggacacacggcagagtatagaccaaacgagacctttatcatgttccaaaggtggatcagtggccaacccctgtaacaaagactc

SEQ ID NO: 157595 - DNA, 998 bp, Arabidopsis thaliana landsberg
gatcgataaataacactgtagagaagtcgttctaccaagtagagatccggagtggtatttttttgggccacgtgaccggaagtatccgaacgggtctaggacgaaccgagcaacgagaggtggtactgaaatcgaccggcaaagatcggagagtgacaagtcaaagcagagcgattgggatgaaaaagactttggtttattataaaggaagagctcctcaagggatccgtacggattgggttatgcatgagtatcgtctcgatgataaggattgtgacgatccctcttcgctccaggtaactgatcgttctttcatcactcgatatctatttaccaaatgatagtaattagtaaatatatagttactaatatgatcaaattgtaacttatatagaaacaaaaaagataattacgtagagatgcatggctactaaacaacaacaacaaaaaaagtaaccaacttgagatttctccatttcttatagtatatacgttaatagaaagatatgtgtgaattttcatatactttttaagattaccctgatttaatgatacatattcgtttcttgctgtaagctgacaaaagcttagggtttcgctttggatctttactgcgccgaagacaaaagctatatagaattatttttttcttcaagaaaagctatatcttattcattaattgttcattatataagacaaatattcatgttcttttttttttttatcactcatactcatgcatgcatgttcttttatttacttatgactttcatatactcgaatgaataccagaagatatttattcaagtatatttaaacattctaagattgaaaatataaatggtttgctgcaggactcgtatgcattgtgtcgggtattcaaaaagaacggaatatgttcggagttggaatcagaacggcaattgcaaacgggacaatgtagcttcacaacggcgtcaatggaggagatcaattcgaataacaacaacaattataat

SEQ ID NO: 157596 - DNA, 965 bp, Arabidopsis thaliana landsberg
  unsure (1)..(965): unsure at all n locations
cggatgaaatggttgaaatcactctttaaaaaatgccgtgatctcgaaggttctggggtacaaaggttgcaccaaaatcactgattcaggtcctgctgatcttgtgaaggacggcagaaagataaaatttttagacattaataaatgtagcaatgttgaagatgctgaagtttcgagcgtggcgaaagcttgtgcatcttccctcaagacactaaaattgttggactgttacaaagtcgggaacgaatctatatcgtcgctggcgcannnnnnnnnnnnnnnnnnnnntctgataatcggtggatgcagagatatctctgacgaatctatcatgttactggcagattcctgtaaagacagtctcaagaacttgaggatggattggtgcttgaatatatctgactcttcccttagctgcattctcaagcagtgcaagaacttggaggctctagatattggttgctgtgaagaggtcacagacactgctttccgggatttagggagcgacgatgttttgggattgaaggttttaaaggttagcaactgcacaaagatcacagtaacagggataggcaagcttttggacaaatgcagttccctggagtatatagatgtaaggtctcttccacatgtgacagaagtgagatgcagtgaagctggtttggagttcccaaaatgttgtaaagttaacttttcaggtagtttaaccgagccagatgttctgctttgatcgttgctgttgggatctcgttacttgtctgttgggaaattctggtaaccctaaaccttctgtgatctctctatctgtctcgtgtatgggcacactcatggcttatagttcatcagtgagtcttctctcaagctcttgtatatttttgtgcattaaatatttggatgtagcggctgcttgattattcttcagttgctttgcaaagtgtgtgtagttgttgttgaacctgcttctc

SEQ ID NO: 157597 - DNA, 2506 bp, Arabidopsis thaliana landsberg
  unsure (1)..(2506): unsure at all n locations
atgactcgatcggtatgatcgaatccatacgtctaaaccagattaattcaacaatccactatacgaaaatatacacatgtaggcatgtagctcgtacaacaagaacagagctcgcaacaacaagcggaatcaataaatgaagttaaatggagaagatagcaaactgagtactgttaccctatcatactaaatgataaaccctctatgagatttgaagaacttctcctttgttttccttcaagtagacgttttgcggttagaatctttcttcagctttccccgttaacacatccagctcacagcctaatggaacctcgcgatctcatccttactcacaaatcaaactcaaaacaattcatcaaacacaaataaacatgaaacaccgtaatataaaagaaagaacaacactaaggattacacttgaatctagatttgggaaatctaaatatccaacatatgatagtgttacaacaagaaccgagctcaagattcaaaagatgaagttaatcggagaagatagcaaagcgtaattatactctatcacatactaaatagaaaaaactatgaaatatttagagacttctcatatgttttccgtttagcatagtctctttgattagagtctttctttaaccttataactcaaccgaaccaagaaacttaagtttccgctgcacgagtataataaacttaagttaaattgggttatatatttttttatttaatttttttgaatactcagaagatttgatcatgaactactgaaacaacgtttttggccaataaataagaatttctacatcaaatttgtccatatagatcttatgatcaatttcacaaacaaggtttcaatgcttttgggtacgttgaactttttccacggacgttgtactaccgtgtgaagtttattcatgtcctcttggtttttttccaacgaaatactaagttacgtctaaccatccaaagaggaacaatgtatgatctaaattaattgaaaattcgaagaatccaatcacctttttttaggatcttaaaaattagaaagaaaaaaaaacaagacagaaaaaactagtgaccgatggatgtgaatctctaagtcaagattagtaaacctaaacttaaccttctacgaaaaattctattataagttcccactaatcgtcccgccattttaaaaagatataaaaccgtggggagaagtagaaataaaaacaataaaacaattaacaaaacaagaaaaaacgaaaagcatgcaattgtttttcgttttttgttgaaacaaaaaacaaacttaacttcaccaaaaaaactacagaaaaaaaaaagattcagtttccttttctttgtctccacttcttatataagagttggcgtttttttattacaaacataacttttgaaattatggctaattataaaggaagaggaaatgttatgataaggagcatattattgtgtctctatggtatcataagcattgtgtgtgtcaatggtactttcataaactacaaagatgctttaaccaaatccctcatcttcttggaggctcaaagatcaggcaaactccctcctaataatagggttccatggagaggtgactctgctctcgacgatggcaaactcgtaaatgtaagtttaggttatattacaaataatgtttattcataaatcagattttaaggttacaaaagataatgagataattatgtatgtataggtggacttgtctggagggtactatgacgcaggagacaatgtgaagtatggtcttccaatggcgttcacgatcacaacgcttgcttggtccacaattacctacgagaaagaacttcgagccacgggagagctcgaaaacgctcgtgctgctatccgttggggtacggattatttcctcaaatgtgcttctcgcaagaaccgcctctatgttcaggtttcaaacgaataatcaaatttgtgtgtttgcaattacgttatgctagaaacatgaacgtaccgttttattacttaaaatggttgtgcctatgaatatgatcaaataggttggtgatccaaacgcggaccaccagtgttggcgaagacctgagaacatgaagacgccaaggccggtgttggagataagcgataaagttccagaaaccgannnnnnnnnnnnnnnnnnnnnnncattcgccgcttcttccatcgttttccgccatgtcgaccacaaatatgcacgccggcttctcaacaaagccaaattggtatgcttatcaatctatgcatctttttatacataaatactatattgtttaaaactcttttgttaatgtttaaaacaaagactattttgttgatttttggtagaaaatgtgatatattttttttagagttcctttaatcaataaaagaaataaagatctgatcaaaatctcaatttcagcttttcaagctagccaaaagccacaagggtacatacgatggagaatgccccttctattgttctaactccggttacaatgtaaccctc

SEQ ID NO: 157598 - DNA, 717 bp, Arabidopsis thaliana landsberg
aattaaagggtagtagctcaaggtatgttttgtgtctcgcttatatcctataacaatcaataagtatactctgtagtagcacaagttatgtgttgttgatagatgaagctcttctcttgaactcttgttttcgatacagtgttggtgctaagagggtcatagctttgtgtgttagcttcaaggaatattgcgaagctcagaattacaaagggtaagcttgttcaacaccgcttaaggactcatcggttgagatgtttgcagcaagtggatattgagtataagaccttgacgacaaagcttcaagatatgttcaatgtgagtagtgatgatatagaatccaatttttggttcattttatgaatcattttgttgactaatgaacaaatttattgccattgttgttgttattgcagcttgagaaacaaatcattcaagctggtggtagagttcctcaagtggatattaactaaagagagactaatccataagaaacaagatgatgacttcaaatttggattgttcagtttctcctttttaaaatttattttggattttggtgttttgcttaaaaactcaatagaatgtgtggaaaaaaagagacaagtgattgttgttgataaattagtagtgtgtattggttctttgatcttattcgagaaaatttaacatctttggaccaaattaatgtgattgatgatatgttggttttgcttctgg

SEQ ID NO: 157599 - DNA, 749 bp, Arabidopsis thaliana landsberg
cgggtttcttgtttggtaattgaagggccatgtttgggagcggggggtacgaggtgggatcaaagagacaaagaatgatgcaatcaaatccctacttggcagttggcactggacctaccagctttccaccttttggctatgccggcggattcccagtcgttcgcctcaggggtcttcccttcaactgcgctgacattgacatcttcgagttctttgcgggcctcaacattgtcgatgtcctgctcgtcagcaaaaacggtaaattctctggggaggcctttgtggtgtttgccggccctatgcaagtcgagattgccttgcaaagggacagacacaatatggggaggagatacgtggaagttttccggtgctctaagcaggactactacaatgcggtggctgctgaggagggagcgtatgagtatgaggtacgtgctagcccacctcccaccgggccatccagggcaaagaggtttagtgagaaagagaagcttgagtacacagaggttttgaagatgcgaggcctcccttactcggtgaacaaacctcaaatcatagagtttttcagcgggtacaaggttatccaaggacgggtacaggttgtgtgtcggcctgatgggaaggccacgggagaggcatttgtggagtttgagacgggggaggaggcgaggagggcaatggctaaggacaaaatgtcgattgggtcaaggtatgtggagttgtttccaactacacgtgaagaggctcga

SEQ ID NO: 157600 - DNA, 130 bp, Arabidopsis thaliana landsberg
tctatgtacttcaggttaaggatgtcaagagctacatacattatcggtgcccttgcgggatctgcggtagtagcttacgtgtgtgacaaagttatttctgatgataagcttttggaggcaagttttaacc

SEQ ID NO: 157601 - DNA, 2011 bp, Arabidopsis thaliana landsberg
tgatcatggttatattccacagatgatacacaaaaaatgtttcaaataacaggatttagtacgtgcagatgatacacataagttaaacatgaaaatcatacatgtatagatacaaaaagcattatgaattcatgaaaagaagtgaaaataaagtaagaaatgatgaatgataaaattaagttaattaaacgagaaaaatgataccattaatagtgttgagtaaattttccaaggatttcttctatcccgtcatgtaggagattctatcttcaagagacatgcatgcgcttaaacactaatcttacaatttgttatgagcgtaggcatatcatgtggttggaagatgatgattccatcgagctagatgcatagatcaaagatgttttgttagttgttattgttcttggggacctataaggaaaaaaaaaatagggaggttttattaggggaaaattgtcaaaaaaatcacaaactttcaaatttgggacgatttaatcatgaacttcacggaaaacaaataaatcgtaaagtttttgttaactttcgaaataaatgacaaagtttttgttgacttgccatttgagtcatgtcgttaaataggttaacaaaactttttacgatgttaatgttccgtttatctgctctattagaacaaaacaatgtcgtttattgctagacaaaaaacggcgttttgtctgttgaaacaaatttaaaccctaaatcctcaaattgatttcattatctgcgattttgaggtcaaggtgggtctgtgatttttagattttgaaatcgatttggggatttagggtttaaatttgtttcaagacaaaacgacgatgttttgtctctgcaataaacgacgttgttttgttctaacagagcaaataaacgagacattaacgccgtaaattttttctgttaacctatttaacgacatgactcaaatggcaagtcaacaaacactttgtcatttatttcgaaagtcaacaaaaactttacgatttatttatcttccgtgaagttcaagattaaatcgtcccaaatttgaaagttcatgatttttttgacatttttcccgaatatcatttatgaattatgatacaatgttactaaaaaaatcatttttatgtctcatgcatgtagtaacgaacacacactaatatagtaacaaatgatcagacgttactcttaaaaactagagtggtcatcatgttcaaactttaaggtacattagaccatctaattagaaccatgcgtaattagtattgttaagtaaccaaaagaaataacgacgatcaatagtaagttttttttttttgtgtgtgtaaccaataggtagtacttaagttaaatgtatattatttcattcctatttctttaaattggtatcgattcattctaaaatgttgcatggattttttttaacatctttagataaagttttatgttccgttttttttttcaggtgacaaatttcaaatgtgggggttttgtcctaggactaggcatgagccacaacatgttcgatggagtcgccgctgcggagttcctcaactcgtggtgcgagatggccaagggtcttcctttatccgtcccaccattcttggaccgtacgattctccggtcacgaaaccctcccaaaatcgagttcccacacaatgaattcgacgaaattgaagatatttccgacaccggaaaaatctacgatgaagaaaaactcatctacaaatcatttcttttcgaacccgaaaagcttgagaagctcaagatcatggcgattgaagaaaataacaataataaggtatcaacatttcaagccttaaccgggtttctttggaaatcaagatgcgaagctctactgtttaaaccggaccaacgggttaagcttctgtttgcggcggatggacggccaagattcatcccacgtctcccgcaaggatattgcggcaccgggattgtccccactctctcacagacctccttccctccaccctcccttccccttcccact

SEQ ID NO: 157602 - DNA, 355 bp, Arabidopsis thaliana landsberg
aagtagtaataggaaggtaacgtgtaagatatcatcaattcgtaggaggagtaaccatacagctccggtggtggagcagtcgacgaaaagcctgaggaatcttgttccggcaggcgtagtaatggagacgtcaaagctgatgcaagagacggctcattacatcaagtgccttagtatacaggtcaaggtcatgcagtgtctcgttgatggcttatctcccaaatgatcatcaattaatcatcaacatcatcatcaatgatcgatgtatatagagatgcgacacatacatagtctattggattggggtaatcataaggaatatatatgtgtatatatacccataccccttcttata

SEQ ID NO: 157603 - DNA, 2064 bp, Arabidopsis thaliana landsberg
tacatgggctttagatgggttagtagataggaaatacataggcttgtcaagttaaggtagaagtcatccacaatgccacttgcattcaagattctctcacaagtctgaggaaatgtttttacgaggctttacgggttaacgctgctggtgaagaaaagcagagtgattactaggaaacagagcttgaggtttgtttctgaaagcgagaatccgggtgcgattcaaatttatagcccttagccaattgcttcatgtaggcttttcttgacagcgaagttacctcatcgactttagcttttcttccttcggttagatcgtagtgagcatagtcgaaatccatggcggaacctgtccaaattttccttggaagctctccgaggaagaaagtgttcttgaagtggacaccaagctttcatacatgtatccattattattactaaacacgaagaaaacaaaacggatctaactgaatatactctgaagattattagaagaaattagacagaaactaatcaaatgaagcctgcagagaagagaagagaagaaagcgttaaaagactaatcaaataaattaaagcagagagtgagagagcggagagtattgtttcgtagcttgtgatgtgagaggaggaagagtgatggagaagtttgtgattatttaaagtggacaacggttagattgatgatattagtaaaatagaaatctgatctaatttagggttttacttttacctgttattagtaatttatgtacagaatgtttactcaacggttaaattgatattagtaaatgcaaaagggatctaattaagatttctctcatagacaccaaacaaaaaaaggaaattcattacttaaaaaaggaaataaactctcttggtttaatgaaaccctaacgcagttctcagaattttagagaaaccctaccgcttcttcttctttttctgtgtgtaaacaacaatggattcttcaatgtcaacgaagacgaaaaccaatttgtctgtgagaagaaaccaaacttgtttcaagaaatcgtctctgtctttcttcttctactgcaaaaaagaccacgaatttgtctatgagagaacagaccatgttcaagaaagccttggagctttcaactctgtgcgacatcgaagtctgtgtcatatattatggtcgtgacggagaactcatcaagacatggccggaggatgaatccaaggttcgagacatggcagagaggtttagcagattacacgagagagagcgacgcaagaaaagaaccaacctttctctgtttctacgtaagaagatcctcgacgacaataagctctcggagaaagtcttagagatgaagggttcgttagaaagtggtctacgggtgttacaagataagcttctgttactacaacccgagaatcagaccaagttaggtcagaaccgtgcggtttcttccacaacgaatccattctcttctcctgatcaacaatggacagaaccattggtgaatggtgtgtcaaacacagaggaagacctatcgacgtcatcattgagtcaacatgagagcaaatattcagtctttctctataaccatgacaacggaagcgtctatcaagtccctgactcgatctgtttctagtttagattatgagttcgtttaattgtctgattaagagtttgtgttgaattgtatgttttcctaactatgaatgctattttctcaattatatttttgtctatgagtcttaaatttgagtttgaatatacattagacattgaatgttagatgtccataattgatgcagataagacaactaattgagtaattgagcaagatattctgtgaaattttcggttcaatttgtgaatgagctcaatggaggaaagcttttagaagaggatatgataagcaaattacctgacacttcgatatgtcagacgctcttgtagcagcttccgtcaaaagatgttgttaatacaagtgttttgtccaagatgtggaaaaaaactgactatgttcagttgaagatttagatgccagtgagttcccagattacaatgccttagtagtttcattat

SEQ ID NO: 157604 - DNA, 753 bp, Arabidopsis thaliana landsberg
  unsure (1)..(753): unsure at all n locations
agcttccatttcggtctcccactatgtatctaggattttgtgttacttttgttagaaaactgcgatttttgtgctaatgtttgtttctccaagatcaatggaactcgtnnnnnnnnnnnnnnnnnntttagttgataaacatcaaatgtttctaattggtctttgatcttaaacccatttgattatggtatctaaagtttgatccttttgatgcaatctcatcgcagtttctcatggttttaatattactgaactcttttgatttgtggtgaagcaaaccttctctgtcacaactagctccattagaagccattctgtttgatgttgatggaacactctgtgactcagatcccatccaccttattgccttccaagaactgcttcaagaggttccttgctttttttaatgtcataattataacttcaaatttacaacaagactttagaaaactgtgaataatatgctatggaaccttgttattactcagtttcaagctcttgtgtcaatcaattttgtttctttctatcattcgcagattggttttaacaatggtgtcccaatcgatgagaaattctatgttgagaacattgctggaaaacacaattctgaaattgctctacttctgttccctgatgatgtttcaagagggttaaaattctgtgatgaaaagcaagccctttaccgcaagtaagctatttttcagagtaacatccattcttttaatgtcacaaactcttttcaggtctgagttc

SEQ ID NO: 157605 - DNA, 956 bp, Arabidopsis thaliana landsberg; identical to SEQ ID NO: 13269
  unsure (1)..(956): unsure at all n locations

SEQ ID NO: 157606 - DNA, 1105 bp, Arabidopsis thaliana landsberg
acaccaacagcagatcagtggccggattaacaaagcttccagattatgtagagtatcaatttgtccctgcaccgtctctacgttctttattcccagcagttagtgatgatgctctcgacttgttgtccaaaatgtttacctatgacccaaaggctagaatttccattaagcaggctctagaacacaggtgcctaatgttcaccatctgtttataggcaaagtatatctagcgttctgctctcacacctttgttttcattatttcaggtacttcacttctgcacctgctcctactgacccggctaagctcccaaagcccgttcctaagcaggatggtaaatcatcttacggtaaacatgaggccattacagtgcaatcaccaccacgtaagcttagaagagtgatgcctgagcgtgggagggttgatagtttgaagtctcatgttgacaaggatcaacaagcacccatgtcattagattttaccatcctcgctgagcgacctccaaacaggccaacaatcaccaggtaaaaaacaagacagtttctccctcactgcatattaatctcatttgtcattacagcctcaagattgattgtgttttaatgacttcttcttgttcaatttgtagtgctgatagatctcatctgaagaggaaactcgatcttgagttccagtaagactgttggttatgcactcttctcttagcttctccattttcatgttctggtgaaaccacaccattgttaagttgtcaatttactgctgcttgtgtaatctggcgatttattcttttccatatttagcttgattacaaaccagagggaccttagattcacaatgataatattttgttgtcccataggctttttattcattgtaaactgatcatactgtactatgaagtctatgattataaagctttctactttttgcttctagaattctttgcggtacaaagagagctctgtttaatcttcaaactcatttttctttcgatggtggccccaggaatttaattgatccattgacagctcaaaaagattttaccaaataccaacatcaggtttataaaacacatacgagccagaaaaacagatgcccacat

SEQ ID NO: 157607 - DNA, 939 bp, Arabidopsis thaliana landsberg
  unsure (1)..(939): unsure at all n locations
agattcatcgtttgaggagttctgtgagtttatcaaggtaggtatggtttcttaaatcttcgtttaaagtttcaattcttttcaatttaggttttatgttaaacaaacgaggttttattttttaaacaacatatcacaaattcacaatagttgtttaacttttttgttttttgtttttttctttgactataacacatgaaaaggtcagatatgtatcatcatcttcaaacgaggatttttctccaccnnnnnnnnnnnnnnnnnnnnnnnnnnnnnnnnnnnnggattcatgctatgacctctccatcaatctgcagatcttgtgaggagcccatcatttcaaccgaagagagggagctatggttggagaatgctcgtcttcggtccgagattgatacattgacttgtttcatatggagattaaattcgttcaggaacctatatcccgcatttgctacgtctttgactgaagtgggttacggagtggcggttatgacgtcactttcgctgaaagaagttgtttttcttgcgaggcaaagaactccgatgtggacaagtaacgggagattgaatctcgacgaatactactctaaattatttccttggtacgcaagaaacgcacccgggtttgtacatgaggtatcaagagcttctgcttttgtcccatgtgatgcttcatcgctcgtggcaaatcttatgaatcatgtaagtgtgtgacaaactacatgaaatcataataatatacacatttatccttttttcttatattgtttatctattcaggtaagttggcaaaaaatctttccgtcaatcatcgcggatgtgtctgtggaatcacaacaacggggattgcaaaaggtaccaacccttcctttattttccgtacaaaaattagaaaaagtaataattttatatctttatcattgtagattaatgtga

SEQ ID NO: 157608 - DNA, 473 bp, Arabidopsis thaliana landsberg
ttattccttcaggatgaatgggtgatctctagggttttccagaaaaccactttagccagcaccggtgccgtcggaggagaaggaggaggagcaactgtgagcgtaagcagcggtactggtccatctaaaaagacgaaggtaccctcaacagtctcaagaaactatcaagaacaaccaagctctccttcctccgtctcactcccacctctcttggatccgaccactaccctcggctacaccgacagcagttgctcctacgacagccgtagcaccaacacaaccgtcacagccagcgcaataactgagcacgtgtcctgtttctccactgtccctactactactacggccttgggcttagacgttaactcattcagccgtcttccaccgccggctaggtttgactttgacccttttcctcgtttcgtctctagaaacgtctcgactcaatctaacttcagatcgttcaagaaaac

SEQ ID NO: 157609 - DNA, 782 bp, Arabidopsis thaliana landsberg
  unsure (1)..(782): unsure at all n locations
cgtcaaggcctgagagaaaccaaagagaatatgaaagcttcagaagaaaagctaagatagcccgagggaagagagcgatgacagagaggtatgagcttatagacgaagatctgaaagatgagtacatgcctgagcatactcgcagagctaccaaacttctgcacaagcctgacgtattgcctgctgaggaatatattaggctcttcaagctgaatgagttatgtagcactaggtatccttgctcgaccacacttgcacaactcggattgttggaggatgttcagcacctgtaccagagttgtcatctggacactctgatggcttatccgtatgtagcatatgaagatgagacaattcagttcctctccacgctgcaagtggagatttaccaaggtatgacctctgatgagttggattgtgaaggattgggattcttgtgattttctgtgtatggtcatgagtataggttatcaatcaagcgattggaaggattgtttggcttccccagtggaacgggatctaagccaaagtatgaaagagaagagnnnnnnnnnnnnnnnnnnnnnnnnnncagctctgtaccgttgaatgcttccaggtcaaagagcaatcagaaaagcagccctgtcatcaggtacttccagcattctatagccaatgtactctactcccgagagatcacagggactgttactaactctgatatggagatgatcgcaacggcccatcaaaggaactcttcaccaaactaagaatggtatgcccctccagggtgaaatcaa

SEQ ID NO: 157610 - DNA, 771 bp, Arabidopsis thaliana landsberg
ccccaaattgacttgttctcctctctgtttaggtttgtgtctctttaatggtgtgtgaaaggtgaaagctttaagcttttgtgtgtgttttaacaacaatggcggagatcaagaatgctaaagtagaacaaaggcaaacgaagattaggaatgttccagtagctgtaactcctgaaggtttctggtgttgtccttctcctgttgcgtttcaaaagactcttaaatctcacaactctctcaccaaacacaagcaatcttctcctcctcttcaacctcctaagccggagaagaaaccatcttcgactactattagatccgtcattgcttctgatgaaactcaaaaaaatttgggtagttttgatactgttcatagtatttgtttttcctgtttcggatcaagagagaccacaggggcaaaaggttgagactttaccgtggaaagttgctattgagtttggtgaaccgggaagtagtgatgctaaagtgattttggttgggaagcaaggtttttgtgtgaagcttagtggtcataagaaagttttggccgatcatagttggttctttgctaagaaactagctgagaaagattcggtttttgcttgtcttgagattgagagctgtgaagatgctgagctttacgttgagaccattggacttatgttttgaaaagatatgaagctacggcttatgaaacataatgttagcacagttctttcggtgctcaaggtattgcagctctatccctttattagatgctggtcttgatgttca

SEQ ID NO: 157611 - DNA, 899 bp, Arabidopsis thaliana landsberg
ttccttttttttggattttttatctaagttttgttggttagtgaacttaaatttttttttgtttaggtatgaaaattgtttggaccggcttctaaccgaagatgattattttaaacctataaatggaattatgaagcttgtataccttcctatccggcttcaacttaaaaaatcgcatataatttatgcaaaaaaaattggttgagtaaatttaacattcattccattaaaaaaaatgttcgttttgtaagaaacattcagtttggtttggttttggtgtttgtggatcaatcaggtgtttcccagaagtaatagacatatactttgagaacgtgggaggaaaaatgttagacgcagtgctcgaaaacatgaagacacatgggggcgaatcgcagcatctggaatgatctcacagtttccagtaaaaggaaaggctcgcagagcagaagagtatattatcaaattggatgagttgaacggatacacaaaagaattgggaccacaatatcatataatctaaaggaactagaaggtgcacataaattagccaccattatttacaaacggatagagttcaagattttacagctgtcgaattctttgacaaatactctcaagtctttgtattttgtgcttccatatgtaagagaaggaaagataacatatgttgaggatatagcccaaggacttgagaatggaccttttgctttgatcggactcttccatggtaagaacgtcgggaacaacttgttgaagttgctcgcgagtgagatttaaattaataaatgttttattaccgtttgtttttaattgttgctggaaataagatcggtttgtacaagctgtgacaatgctttgtttgttggtcagaaataaatggactttgtttgtctatataa

SEQ ID NO: 157612 - DNA, 1422 bp, Arabidopsis thaliana landsberg
gctcggatagcatgcatggacatatgaggggtatgggcatggatgcctttagagttagtatgtcaagtgctgttagttcctcgagccatggttctggtcatgatgatggagatgcattaggagatgttttcatctggggagaaggcataggagaaggtgttttgggtggtggaaaccgtagagttggtagttcatttgatataaaaatggattccttattgccaaaagctttagaatctacaatagtactggacgtccaaaatattgcttgtggtggacagcacgctgtcctcgtgacaaaacaaggggaaagtttttcttggggagaggaatctgaaggcaggcttggccacggtgttgattccaatattcaacaaccaaagctcatcgatgcactcaacaccacaaatattgagcttgtagcatgtggtgaatttcatagttgtgcagttaccctatcaggggatttgtatacctggggtaaaggagattttggtgttcttggacatggaaatgaagtaagtcactgggtccctaagagggttaattttctgctggaagggatacatgtatcatctattgcttgtggaccttaccacacagcagtcgttacctctgctgggcagttgtttacttttggtgatgggacctttggtgttttaggccacggagacaagaaaagtgttttcattcctcgggaggtagactctttgaaaggtcttcgcactgtccgggcagcttgtggtgtatggcacacagcagcagttgtggaagtaatggttgggagctcaagctcaagtaattgctcttctggaaagctctttacatggggtgatggtgataagggtcgtcttggtcatggtaataaagaaccaaaacttgtgcctacctgtgttgctgctctggttgaacccaatttttgccaagttgcatgtgggcacagtctaacggttgcacttacaacatcaggccatgtctatactatgggcagtcctgtctatggtcagcttggaaactcacatgcagacggaaaaactccaaaccgtgtcgaaggtaaacttcacaagagttttgtcgaagagatagcctgtggtgcttatcatgttgcagttttaacttcgaggactgaggtttacacttggggaaagggatcaaatggtagacttggtcatggagatgtagatgatagaaattccccgacattggttgagtcacttaaggataaacaggtgaaaagtattgcctgtggcactaacttcacagcagctgtctgcattcacaggtgggcatcagggatggaccagtccatgtgttcaggttgccgtcagcccttcagttttaaaagaaagaggcacaattgctataattgcggactagtattttgccactcgtgcactagtaaaaagtcattgaaggcttgta

SEQ ID NO: 157613 - DNA, 2818 bp, Arabidopsis thaliana landsberg
tcagtttatccacgaagtgctcgtgctttcacaaattaaccacaggaacgtggtcaagatcttgggttgctgtctagagactgaagtccccttgttggtctatgaattcattaccaatggcacccttttcgatcacttgcacggttccatgtttgattcttctcttacatgggaacaccgcctcataatagcgatagaagtcgctggaactcttgcttatcttcactcctctgcttctattccaatcatccatcgcgatatcaaaactgcaaatattctcttggatgaaaacttaactgcaaaagtagccgactttggcgcttcgaagcttataccaatggataaagagcagctcacaactatggtgcaaggcactctaggctatttagacccagaatactataccacagggcttctgaacgagaagagcgatgtgtatagctttggggtagtcctcatggaactgctctcaggtcaaaaggcattgtgctttgaacggccacaggcttcaaaacatttggtgagttactttgtttctgccacggaagagaataggttgcatgagattattgacgaccaagtgttgaacgaggataatctgaaggagatccaggaagctgcaagaattgctgcagagtgtacaaggctaatgggagaggaaaggccaaggatgaaagaagtagctgcaaagctagaagccttgagggtcgagaaaaccaaacataagtggtcggatcagtatcctgaggagaatgaacacttgattggtggtcacatcttgtctgcacaaggcgaaaccagtagcagcattagctatgacagcatcaagaatgtaccaatattggacattgaaactggccgctgatattgctcacaatatcacatgtatctcttttgtttgtaaaaaaagaaaaccactcatttgttgcttcatcaatatgctttgagagcttgtttgttcatcatcaataatcatgttcatattttcctttacttggtatactaaccagtaaccgatctggttattggcaaatttaaaactcttgtgttaaattgtagttcataaaaatctaattccatatgagattgataatatacagatatagcttcaaacacatctcaataagaaacactagaatcccaaaaaaaaacataggcaaagaagagaaaagttatgatcataaacctgcttcctaaattcttcatctactgtaccacttcatcatcgattctgcatctttgaccatagcgaaagctttctttattttgcacggcaggcaggtcttctggaacatgatttttgacgtcacagcctcgaagccttggttcaacttcaaccccatcaaaaactcgtaacgctgctccttctctctcgcctcttcagctcgtttagtacactcgcaattgcaaccaccgcatttacactccggtttaggagcatactccgacaactccagaaaagcattgctcactttttcaaaatacttctttaccgagtcaccatcttgactcagctccatgattttccgacgagtctggtagatcttcaaatcaacgcttgggacgaatatacgtcggatactttcccatattttttgagccgtttcctcaaacgttacacgtttaccaagttcttcggtcatcgaattccgcaaccagcacgtaaccaatgagttgcattgttcccatcgattataaagcggcgaggaagcgtctggcttctcaagtttaccgtcgacgaacgcgaatttgttcgtgattcgaagtagatgtctgaaagaaagtttccagatagcgaagttgtcttcggcttggctgagtttttggatagagaaatcggagggatgatgaattattggcgggagataatacggagaatcgcggtctgaagttggagatacgctcttgataggttccgccattgtcggccctgctctgacagtctctctctgcttccaaatcctagggcttgctttgtatccctttcgattttgacttttttagtctcaaataaagaaataattttccaaaataagaaaagtcgcaattttttgtaaacagttgggcttaatgggccttgtatttcccctccctagcccaaagtttcagggattaccttacccattaaaggaccccgcgcatcattgggatatgatcttgttggtcattaatcaaagcgttgaacctggtgtcttcacatgacctgtatcttggttttggaggacaagaaacatcaaaaacacgtaatcagtttaccaaagctccttattaccgtgtaaccaagggactttgcatctatggttccatctattatggtgcttgggcccctagactaagaatggatccggtgaatggtgattgtgtgttttcatgttagatatgagaggctaagttttatcaaagtgcctagggatgttttggttcgggagtgtgaatcaatattgatagaatacaaagggaagttagcttccattgctagaaaccctttaagcttctctagttttgatttgtggatactagagaatgtcaagaaacatgttggtccaagcaaacatttgagcttcctttccctttggtcaatatgacttctcctggcaccaacaaggctggtgaaatcatttttgccccaaaatctctcccacccattcttcaacccttcttcattttctagtacaatgtaggaaaaaagacatcagaagagttaggctccatggaattgcagacgagaaagagttttgtcgccgatgtggactcaatgactcatacacgatatctgcgtctctatctcacccgaacatgttgaaactattgcctcttt

SEQ ID NO: 157614 - DNA, 3133 bp, Arabidopsis thaliana landsberg
atgtttcttctttcaaatctttatcaaactgttttactatcttcaagagccttttatcagaatctgattgaaagttaggaacttgtaaaaatatgtaatcagaaacagcatactgataataggaatctatgaaacatatatggatatgttatgttatgtacacatctctgtaatatatgaagaagtgtacatacatgtaatatacacaaagaaccaaactctatgatgagtctgtataaatgttatacacatcactctataaccacagagcttagctttttataagccaacaacaatcttttaatctctatatattacaaacaaacttttcaaaatctacgagatacatcagcatcttttcgaagtgacgccatctcttcctcacaacactcactcgaccaaacctcaccatctctcttcctctccaaacactcgaccacacaaagacactcgatctcacccctccggcttcgtctccctccttcactcgaccacaaaacaaccatcgccgttcgcgccaccgccttcactctctccttcactcgaagacggtactcgattttgccatctcttccttctcaccactcgccgttcactcgaccactccgcccttcacttcgccggaagcttcaccgtctcaccgtcgtatccttctcacttgaccgcaactcgacctctccgtgcttcatcttcatcttcatttactcgacttcgccggagctcctcgtcgttccagcttcgcgtactctctcaccgtctctccttcactcgaccactttacgcttcgcctcaacatcttcgccggagtttctcgccattcaccgtgcttccgtcgcctccgttcactcgaccaccggactggcttcacgatctcttaactatccaccgttcactcgaccttgccattcacttcgcctccgttcatctcttcactcgaccgctcctcaaaccgccgttgcaatcaaccgaacaagcctcgccaccattcactcgaccacgctgttaccgtctctcattgactttcactcgaacgctatactcgaagccacaatctcactgtactcgaccgttttactcgaccgcgtacttgaccggtttagtgtttgcgttttattcggactaacatattgatatttggctttgagttacattctttttcaggaaatcaatatgagtaactacagcggcgaatcctccatggatggggattacaacgtcgatgaagctgaatcttggtcaactggaccagagagagagcgacaagcttatgagagcttcagagctgagacccaacgctcagtagctcgacgcaatgagaggagagctgagattgctagaggaaagagagcaatgaccagcagatatgagttgatcgacgaagatattgacgtcaagtatgagcccgagtcatggcacagagagacgaagctgttgaacaggcctgatgaagttacagtggaggagtacatcagacttttcgatctaaacgacttctggggaacgaggtacccctgttatgagactttagcccagctggggctaccggaggacgtacatagcttccaagaaggaaacaatagagtttctctccactctacaagtggagatgtatcagggacttacatcagataagctggagagtgaagggttggagttcttgaccttttcagtgaacgagcagcgttaccagctatctatcaagagcttggaaggattgtttggtttccccagtggaaagggaactaaacccaagttcgagagggaagagttgaaggatttgtggttaacctttgggaacgatatggcgctcaactcagcgaggtctaagagcaaccagatttgaagcactgtgatccgctactatcagcgctctgtagcgaatgttctgtactctagggaatctacaggcaccgtgtctaacacagacatggagatgattgaatctgcactcaagggcattctccgcagaacaaaggtgaagaaggtcctgaagggcgacctcaatgatgcaccaccggttatgcttctgttgacccacctgtgtggatacaggaagtgggcgcacaccaaagggaagaagagggcgcgaggagccctttgtgtaggaggtgttgtgacaccgattctgattgcatgtggtgtacctctcacgtctccggggtttgatccgaggatgatggatttagatcatttgcgtcgttgtgagtttctggagaacgacatggttggcgatttctatcgctacaaattcgagcactccttgacccgaacagccaacattcggcttccctgcatcgaggccttaaccatacttcagagtgaaaacattgacttcaaacctgcgcgtgattacctctacattgagagcgctcatccgactgatgacaaacgacggaagctacagaggatgagattgctgagacagatgaggatagggagaaggagtacgatacgagcatatatcatttcagagagcacgtacctccagcgcgggagagcaagagcttgagcgaagctcacagaaacaacagtaagttgcagaggtggtgcaagaaacaagagaggctactcatcaagtgcttcaaggccatcaagtttctgacagacaagctaagctgctcctcttctaccacagctattccgcagggagagcctcctcaggacatgccctcgaggagatatgatgcgccagagccaagtcgccacaggcctgagccaagtcaccacaggcctgagcctagtgatcgagcagtcccaccagtccctgcgaggcattcatcattcgagcctcgggagctcgggagaaagaagaaggctgcactcgctcggtctggcagtaggagtacacgacttctcctgtcgcgtagcttatgcgaccgcggtgctgaccgcaacagaagaagagaggtcgagtatcatctgagcggtgctgggcgcgacgaaggagcagaggtcgagtacccccagggggaagctgagacacaacagggagattcttcgatggcctgggagcaatcacaggcagctattgacgaccaactccgctccttcttccacttaggtatgcacctcactccaccattgtaatataccatctcttgtttttattttgtttttgtgatgtgttttgtcc

SEQ ID NO: 157615 - DNA, 1597 bp, Arabidopsis thaliana landsberg
atgggatgtttcggaccatcaaaggcttcaagaacaagaaaccatgaacatgacaagatgacacgacaaaacccgtctcatcaacctcaaaccatgagagctgaagaagttctgttgcagattcctagatgtagagtccatctcataggcgaatccgaggcggtggagcttgcatctggtgatttcaagctcgttaaggtctcagacaacggtgtaactctagctatgatcgtgagaatcggacatgaccttcagtggccagtgattagagatgagccagtggtaaaacttgacgcccgtgattacctcttcactctcccggttaaagacggtgatccacttagctacggggtcactttctctggcgatgacagagacgtagccctcgtgaacagtctgaagttgcttgaccaattcttgagtgagaattcttgtttctcgtctacggcttcgagtaaggttaacaatggaatcgactggcaagagtttgcgccgaggattgaagactataacaacgttgttgctaaggctattgctggaggaacaggacatatcattagaggaatctttagtctcagcaatgcttactctaaccaggtttaaatcacaccctcatgatatattcgaagctttcttgatgtatatatatacataatatgattatgagttttatgagacaacaggttcacaagggaggtgacataatgattacaaaggctgaggagagccagagaaatggaggttacaacaatggaaactccagtggtaatgagaagaaaaatggaatcaacacaaaccttcaacggtattcactcaatagtttaaaacattgtttgtatttggcgttcacgtaagattttatctcaatggaagtaatacactcaaatgtaaacgcaaaaacacagaataaagacagatattttggttcttgattcgtttgatatcttggctgctttgttggatggatgtaacatgtatatagagtgaggaagctgtcaaaggcgactgagaatctgagcaagacgatgttgaatggtgcgggagttgtgagtggctctgtgatggtccctgtgatgaagtcgaaaccggggatggccttcttctccatggttccaggggaagtccttttggcttcacttgatgcccttagtaagttataatataatcaattcctttggaggtcaaaaactggaacaagtaatatatgttttgtttgatccgatagataaaatactagatgcaactgaagccgcagagaggcaaactctgtctgctacatccagggctgctaccagaatggtcagtgagaggtaaattatttcacctaacaatcctcaaatttgagattcatgttttcatgataagtcactagtgatcatacaaaatttcagagttttaaggtgataataaggtgatcaataagaacaaattttggcaaagcaggtttggagagaatgcaggggaggcgacaggagacgttctagcaacagcgggccacgcggctggtactgcctggaatgtcctcaagttccgcaaaactttctatccttcatcttctctcacatccgggatcgtcaaaaatgttcctagaaagtga

SEQ ID NO: 157616 - DNA, 464 bp, Arabidopsis thaliana landsberg
ttaacacatgcctctgtggagagttgtcttctgcttgaaaaggaccacgatgtgtagtctcagatttcgaattgttttataggttgtcccacattgtctataagcatcttgtgaatggaccctttcttataatcgatgtttaaagctgacattacccagccttatattgttgcctgttcatttatgtttgaattattcagtgtgccactgtggtgatctataagaaaccctttttatgtaaatacatgtactttgtgcagatatgtgtttggtgttggcatcatattatagagatggctgagaaagataagacagagggtcgttgtcctgcatgtcgtacccgttatgataaggaaaagattgtagggatgacagtcagctgtgaaaggtagatctgaagctgaaaacaaacccttttttgtttctgtgaaacgtgtaaaaacttatctttttcttggtctgat

SEQ ID NO: 157617 - DNA, 932 bp, Arabidopsis thaliana landsberg
tttcacatctgttctagagaacttcaatatatatccatatatggtgtcattggtctgtgagccatatcctaagaactaaactagctagctctcttactatggaggagaggaaactgaacttgagcgtacctcttctttcaacaagacggatgcagaagacagcaggagtctctgtgcgtagaaccaagagtaataacttcactgattatgactctaagacaagtgaatgtccttctgttccagttcttgttccatatatgatgggtttagatgatgaggttactgaacctgcctctgttcctttcacttgggaacaagctcctggaagattaaagggcaatgatttcaaaccccaagtttgtgttttgatgaaagaagaagaacaagtttttacaccatgtcttccaccgggtaaagccgttgatgcaaacatgacaagattgcagagttcaaagggtaaacaagttgaagaatcagatgatgatgaagatgatgtgttttctgatgctcttgacactctctctccaaaggactcgttttcttttaacaatagcattagtggtgtgagtgaatatggtggcgttgagaccaagaaaccactggatgctcaatctcgggatttcatgatgagtcgttttttaccagctgccaaagctatgactgtggagcagtctcattatgcttcgaatcgaaaaccatccacttttatggctgaaccaacgatacagataagagagttagtaccgggggagaagcagcaaactcctaatagatatgatgtgtctatagtcccatcttactattaccaccaagacattgatgatgaagaaagcaaggtgggtgaggaagatgatgaagtttctgagtacgcctatctttcaagagaggttgtggaatgttgcccaattgtgcttttagactctctcgcatgc

SEQ ID NO: 157618 - DNA, 1111 bp, Arabidopsis thaliana landsberg
atacatattctctcctcaacctttctcattgcataagacaaaccagatagaacagaaaaacagatcatttttaatgctttctcatggaggaaacacacccaaagacgtgagtcaagaaaaaacttttatttttattgatttttattaacaatatccgtatatattaaggttctattgtcgatttgtttctacagcgttgaagatgttgagaccgttgatgtttatacagctaaaggctttcttagtactggtcaccgatatctcgacgtaaggtaagtataaagaaaaatatatcatttaagttcttcttcttttttgtaagaaatcttattatttttgtcgttgattgtaggacaaatgaagaatttgccaagagtcatgttgaggaggctttgaacagatgaaggttattttaaatttagcatgagtttcatttcaatattcgatcacaaataaaacttacaaacaattgtgaatggttttgtaggtagggttataaatcctgatttcctttctcaagtggcatcggtttgcaagaaagataaacatttgatcgtggttagactctaatatttaattagtgatgacatatattaaatcacattagattaagattttacacagaccgtttccttatactaaatatgttaccgtgaaggcttgtaacgctggaggaagtcgtgcttgcgttgaacttctcaatgaggtgagtctatatatacacacacacttacacaattaataagtatacctattcaaaaatataagtatgtcatgttagggactataagtaaataaataataatttctagtctaatatgttaatatctttaaagtagggtagttagggtttctcaataagacaatagacatattctctttaccctctgacgtggtatcagagctagggttttaagaaacggaaacaaaataaagggagagataagagatcatgtggacgacgaccacggtggtaacaaagatttgacgaataaccgggtataaagctgtggaaggcgaccgtgggagtggccttacgatggcagacaaagccatgggtttcccactttatctccatttttttgatggaccagagaatttgtcacctaat

SEQ ID NO: 157619 - DNA, 890 bp, Arabidopsis thaliana landsberg
ggacgtctatagtcgaatttcacattagctagcaaaaatcgcataggggccaacgaatccagaagggatctaacctaatcttaacaacctgactaacgtaaagattaccctaatctgatccatcctcaagtaccctaatcactactcaagcaacataactaagaacacaaacccagatattactgaaatcataccaaaatgtagatctaaacaaactaaacaattttactcaaagaactaaatgcaaaaacaaaatagattaagagtaattaagttttgaagattcaagaacacaaagaaaaactaaagggtaaaagctagattctttggaaaaattccaaagtgatctatttatagtaaaatgttgaaaaccctagattcactagaagacaagagacttgaggcggtttgggcgagtgctcgatcttggggatcaagtaaagggtgctgcaaagtctgcgcctttgtgtccatgctccgagtgatcaattggtcgagtagatgcttcttcctctcctatctgtatgctcagatgtctggttgagtggggaatgaggaggatccgaagacgctttgatagctcaacaagtcttgtatagttggtcacccttggtcgagtaaatggatcgagtaggaggggcgagtagatcaatctgcttcttcatctgaggttgccttgatcgagtaagagggtcgagtaaactgcagccttctttgtagcatcctggatcgagtaaagaggtcgagtagaatgatgcctcttctgaagctgcctagatcaagtgaatggatcgagttgagtcctttttacctccttctgcacctgaaagcacaccaaaacatgcaatatgtatccaagatgatcctagatgcctaagtatgcaaaataa

SEQ ID NO: 157620 - DNA, 1213 bp, Arabidopsis thaliana landsberg
atgttacctaatggagaagatgattcagatctcctgcgtctggtgaaggagcttcaagcctatctagtgaggaacgataagctggagaaggaaaatcatgagctgcgtcaagaagttgcccgtctaagagcacaagtaagcaatcttaaatcacatgaaaatgagaggaaatcaatgctatggaagaagttgcagagctcatatgatggcagcaacacagacggatctaacctgaaagcgccagagagtgtcaaatccaacacaaagggtcaagaggtcagaaatccaaatcccaagccaacgatccaaggtcagtctacagcaacaaagccgccaccacctccaccacttccatcaaagagaacacttggaaaaagatctgtgcggcgtgctccagaagtcgtagagttttatcgtgccctgacgaagagagagtctcacatggggaacaagatcaatcagaatggagttttgtcgcctgcattcaacagaaacatgattggtgaaatcgagaatcgctccaaatatctttcagatgtaagtactatacaggataaactttgtccatcataacttagaagaggtggctaaatgaacaaccgtatggaattaaatgtccatcataacattaacagatctcctaacggtgtttgcacatttgcagattaaatctgacactgacagacacagagatcatatccatatcttgattagtaaagtggaagctgcaacatttacagacatatcagaagtggagacatttgtgaaatggatagacgaagaactatcttccttggtagatgaaagggcagtcctaaagcatttccctaaatggccagaacgcaaagtagattcactaagagaggctgcttgcaattacaaaaggccaaagaaccttggaaatgagattttgtcattcaaggacaatccaaaagattctctgacgcaggccttgcaaaggattcaatcgttgcaagacaggcgagtatgtctaaagaatataatactagcaactccctgatcttaaccaattacaagaattaaatcgccttaaatcttcacattttcaggttagaggaaagtgttaacaacacagagaagatgagagacagtacagggaaaagatacaaggattttcagataccttgggagtggatgctcgacacaggactgattggacaggtaggtgacgtgatagatgcagtaagggaat

SEQ ID NO: 157621 - DNA, 987 bp, Arabidopsis thaliana landsberg; identical to SEQ ID NO: 26114

SEQ ID NO: 157622 - DNA, 701 bp, Arabidopsis thaliana landsberg
aaggaaacaaaaaatggcttctctttggctgaagttaatctccataagtctaatatacctcaatgttatcgctaaatcaactccggtatgttccttaacaagtaatttggtatactaaactcattaatgaaattctcatattgctattgctggatttgtattattgcagcatcaagaaagcgaattcgaatgtgtctctatagacaaacaatctgcactacaacatcctctaatgaagaatcatcgcatacaggtattgttcatttgccataattaaacatactaattatgttttataaagaaatatgttggaataaacctaaatgttactgtagactagaccaagtcgtgagcttttatcaatactctctacgtccaatggtaacatactcagagagattgatttgaaggggtcagaagaatgtccaaagggacaagtaccaattcataaacaaaaaaccaacttaaccaataatcttattcatccccaacaaattcatagagcaggtaagtactcgtgtcttaatcaattttgacataggctaattttgatttattcgtatagatgttaaactaaattgtgtgcatcttcaataaacatatatatattttgtaattattttcccttttatcctttgtaatgatgtttgataaaaaaaacagtgtaaacaatacctaaaactaaatattttaactagtaa

SEQ ID NO: 157623 - DNA, 1277 bp, Arabidopsis thaliana landsberg
catttatttgataaatagatttaagctaagagttaaaaaaagatggcaacactaggagatattggagtagcagcagcaatcaacatactcactgcaatcatcttccttttggcatttgcaatcttgaggattcaaccattcaacgatagggtttatttccctaaatggtatctcaaaggtgttagaggcagcgcctgttgaattcaaggtgctgaccgttagcagagattgatgaagctaggagcttgcgatcatacgcgacggttttaaactggatgcctgatgctcttaagatgccagagcctgaacttattgatcatgctggtttggattctgctgtttacttgaggatttacttgattgggtaatcaaaaaatgttttgttcttgcatacagttactaattatagctttgtttttttttttctaatggttttttttttttgtttactattttataggcttaagatctttggtccgattgcattactttcatggccaatattagtacctgtaaattggacaagtgatggtctgcaactagctaagcttcgtaatgtgacatctagtgatattgataagttatccatctcgaatatcgaaaatggatcagacaggtttgcaaattatcccaaaaaatctcatattgatgattctttcttccctctgtgacttcaaagtttgtactttggaaggttttgggctcatatcataatggcttatgcctttacaatctggacttgttatatgctgatgaaggagtatgagacagttgcaaacatgaggcttcagtttcttgcctcagaaggccgtcgacctgaccagttcacggaaagagtcgttcttatcccttgcttttaaactcataacacagctggtactgatcttgtatgttatgacgttttggcaggttcttgttaggaatgtacctccggacccagacgaaactgtgagtgagcttgtggagcattttttcctagttaatcaccctgataactacctcacacatcaggtaaattttctcattaaacggcttgaacttttcatatgtatttctatggtgttcttacacttcttgaatcaatatttaggttgtatgcaatgcaaacaagctcgcggatctggttagtaaaaagacgaagctgcagaactggcttgactattatcagctcaaatacactagaaataattctcagatcagacctataacgaaggtacttacagtgttaaacgtgatggttctgatgttctgttaagtaataactgtcttctcgcatc

SEQ ID NO: 157624 - DNA, 382 bp, Arabidopsis thaliana landsberg
cacccacatgcttgcccaagagccattgatccagctttagaaactaaatggaagaggcttgagagggaaagagacagaagagacgtgataagcacgataatgtcatcgacaccaggtgctgttgtgttgggagattatgtgatagagccgcataaccgaggtgtttatgatgaagaagacgaagaagaagattacagctcagatgactctctaagcaacgggatactggatttagaatcatcatggcaaggacaaagccatcatattcggtttcttgatatggaatcaagtgacttcgcatcctcttccagctcccctgcttctccaagccgttcgcttcaccgtttgctctttccaaggaaccagagaggcggcaatagag

SEQ ID NO: 157625 - DNA, 1243 bp, Arabidopsis thaliana landsberg
cttccagttattcaatactaacctcttcaattgataacgctctcgtagttactgatgacatgggtagctgttgcgaaagttgatgatctcggcagacgacctttactgattggaggtgtcagcggcattgtatgaattcattttatgtctatatcttctgtttcttattttccaaagaaaagatatcatttcttatatttcttccaaattccaggcgttgtccttgtttctactgtcagcatactacaagtttctcggaggctttccccttgtcgctgttggtgcactgcttctctatgttggttgttaccaggtttgtactctagctcactgttagctgtggctacatagttttatctagcatattactaaagtctcagcgcgaacagatctcatttggacccatcagctggctaatggtgtcagagattttcccgctccgcacaagagggagagggatcagtcttgcagttcttacaaactttggctccaatgctattgtgacatttgcattttcacctttaaaggtatatttttctgttcctgcttgttcaacccttgaagttattagtaactcttatcaaaatatgcattctctgtaggaatttcttggagccgagaatcttttccttctctttgggggcatagcactggtatcactgctgtttgtaatactagtagttccagagaccaagggtctcagcttggaagaaattgaatcaaaaatcttgaagtgaaacgttgaagaacatatttgttatagttgattctggtgaaatacatgtatgaggatgtgactattctctttgtaacataatatgtttcgtaatcaatgggaaaaccaaacctttttcatgattattcgagcagtaattagatatttttggtcggggatggaaacgacaaaaaccgggaggtaagcattaaggttttcaataagcttaagtcggtatttccctctctctgttctaagttacatttatgggctgtttcatttggttaatgaaaaacgataaaacatcctcctgctcagattaacatgcctgcagagctggcccaagcataggaacgaagagttgatttggctaacatcagcactggggatcacataccttctgttcttcgacctatgtatgtaaactaccattgtctctctctctctctccctcagtaaatgtatgtctttttcatggattcacattaaggtgcaaaaaggcgaagaaatggtaaagaaacgttggaa

SEQ ID NO: 157626 - DNA, 555 bp, Arabidopsis thaliana landsberg
gtttctctctagcattcttgttgataattgtgatcctttcggtgaagatctttgggatgaaatcaaaataaacgatttagtcttccaaggagttaggctatgtagccgctgcaaggtgatgattatctgaatatgacgtgaaagtaatgtaacactcagattctcaagtcgagcttttaaccattttgttctttcaggtaccaactgtgaatcaagaaaccggggttatgggtaaagcagaaccaactgaaactctgatgaaattcagatcagacaatgtcttaatgcctgacaagaaaccgcgtggaaaggttagctatataagctctagtctggttttcagaagagacttgttggattgattatgatgctaaacctattcaatatattgatttcggtttatgacaggttttctttggcaaggagatggtttggaattggaagttaaccaacactgaaggcgaaggaaagaacccaatcaaagttggtgataccatctcagtaaaaagaaagatcccttccagagctgaagcagctgtttaagtcaatcatggg

SEQ ID NO: 157627 - DNA, 860 bp, Arabidopsis thaliana landsberg
  unsure (1)..(860): unsure at all n locations
aatggcttcctggatattcaagttgctgctgctgctgcaatgtgtgcttgtgttgattcaacatgctgattcaagttctatcatcagatatcttcctggttttgaaggccctcttccattcgagctcgaaaccgggttcttttcctctgcattttcatttccatattacccctataatgtatgtatgacgctgtgttctgagttttagagttacataatgaaggtatattggtgttggtcaaaaagaggaagatcaactgttctactacttcatcaaatctgagaacaatccagaagaagaccctcttcttctctggttaactggaggacctggttgctcttctttctctggtcttatatatgagaacggtaaaataaaaatctcttaactcattcttaatattcctctgcagaatattcagtgacttgtttgaattgaaaaacaaaaatcagggccacttggtttcaaggttgaggcgtacaatggaagtatccccacgttggtctctactacatattcatggacaaaggttagagaaatttaattcatgataacaaactcaatgaaataaatcttaatgtttcagcttcaagttttaagaatcattgcttcttttcaggttgcgaacataatatatttggatcagcctgttgggactggcttctcctactcaagaaatccatttgctgatataccaagtgacacaggatcagttaagcgggtcaacgagtttgttcgtaaggtaaaggccaaaactcaaagcatctgtctttctgcattgacttttggagatatcgttaatattgttggtgatttgttgtgcagtggctagctaagcatcctgagtattacccnatcc

SEQ ID NO: 157628 - DNA, 788 bp, Arabidopsis thaliana landsberg
gcagctcaaaacttcttcaaacagcacaattcctatagtggctggctgcatagcgggtgctgtgtttatcctccttttagctactggtgttttcttttttaaaagtaaggctgggaaatctgtgaatccctggcgaacaggtcttagtggacaacttcagaaagtgttcataactggtaattgcctttctactccttgatataaaatgtgaagtggcattgttggttctagaatattgaggtttaatcgacatgcttgtctctgtcagctccactttttttcttttcaatattagtgatgtatgatttgctactcaggtgtccccaaactcaaaagatctgagattgaagctgcttgtgaagattttagtaatgtcattgggtcttgccccattggtacattgttcaaagggacgctatcaagtggggtggagatagctgtggcttctgttgctactgcgtctgccaaagaatggacaaataacatagaaatgcagttcagaaagaaggtatttccggtcaaccagttttcttatattttaaggattttgatttctatcaccttatattatgttttcgataatttcagatcgaaatgttatccaagataaaccacaagaattttgtcaaccttcttggttactgtgaagaagaagaacctttcactaggatcttggtctttgaatatgcatcaaacggaacagtctttgaacatttacactgtaagtaacaaagctctttagtcatatgagtcattattacactgtaagttcgattaaaaatgggcta

SEQ ID NO: 157629 - DNA, 1011 bp, Arabidopsis thaliana landsberg
tatacagaaagagttccagatcgcagtacaggagaccttgcttgtaattcgtatgatctttataaggtgaaaggctatcaatgacgaatgtgtacatatggtgtttgttcaattttttcttagttttaatttaatttaaagatttttcatataaccttgaacaggatgatgttaaactactaaaaagaatgaacgttcaagcataccgattctcaatagcatggtcaagggtcttaccaagtaaatggatcttcatgttttcatctaattataaatagaattcgtaaaattttatattccatcactcaactttaatttgtgattatatgctaaatttagagggaagactaattggaggagtcgacgagaatgggatcacatactacaacaatctcattaacgagttgaaagcaaatggtaaattccaaattcaagtgcttaattaatcatattttaaatcgttttagtatgtttgtgatatataaacatttaacttacatgaatacaggcatagaaccatttgtgactatatttcattgggatgttcctcagactttagaagacgaatatggaggtttcttaagcacacgtatagtgtaagtgcattaacgattttgattcaaagttttttgggtttttttcttcttcttttgtttaggctatgtaacactgctatcaaatctataatatgtgcgatacgtgaatagggaggactacacaaactacgctgagcttctattccaaagattcggagacagggtcaaattttggatcactttaaatcagcctttctctcttgcaaccaaaggctatggagatggatcgtatccaccaggacggtgcaccggctgtgaacttggaggagattctggagttgaaccttatacagttgcacataaccaacttctagctcatgcaaaaactgtatctttatacacaaaaagatatcaggtacgtgtataatgtaaaatctttcataattttttttgcgtcaattttacttttatgtgg

SEQ ID NO: 157630 - DNA, 767 bp, Arabidopsis thaliana landsberg
agttttttcttttgtgattaaagcaattggtttattcttgtgtgaatcgctcaatttgcagtgagactcacaatctaaagaaagagaccataaagcacgaatacctctcggtactgtgaaattttattttaagtgtttactagattgttggtttgagaatgtggaatataaatcggatcttttattccggtgagtaggtgaagatgaggacatcaaactacaatacctactcaggtggctctcatgtgatggaatacggtaacaatagtattaagtcggagaagctttatctttaccaagggtttgatccagccaccgttaatctcccactaaacgaattaccggtcaagtcaaaaataggagtcgttaaccaacgcgacgcggaccttatcttcctttggcatatggtagtgtaactatactgttttgtttattgagttatgtttttggttatctaaattgactagaaggttttagtttacttaaaaacaatattggctttggttttacagtatcggacataggaagatgggtcaaggaagaaggatgacacattgaaggaattaactgagacagcaaggcataggaaacatttagatgcaagcgttgaattgatagccacaattttgtttggtccgacgatgaatgttcttaacttggttagagaacccggtttgcctttggttgtcgattgggaatgtcataaatcgatggtaaaagttacgcaacccttaaatctcaattttattcacattaagtaaaaaggg

SEQ ID NO: 157631 - DNA, 1425 bp, Arabidopsis thaliana landsberg; identical to SEQ ID NO: 36480
  unsure (1)..(1425): unsure at all n locations

SEQ ID NO: 157632 - DNA, 3460 bp, Arabidopsis thaliana landsberg
cgatagggcatcagctaaatggtttgcattccgacgaatgaatttgaaacgaaaatagcttggagctaatgccttgatgtcttctaagtagctttgaatctctgcttgaccaagagatgagtgaccttactttttaagccttttccaaatattggtaaagatggatggagtcaacacagaatgtaacttggcggtaatttaggcgttttagctgacctacagcttcaactgaagctttatcttctgtttcaataactgagtcgatatgctctatggaggaagaactcttgagaagacatcggccatgcacttcagttagaatccaactaatacccgctttgctgttttcgtcaatccatgaggcatctacataacaatacaaagtagagttggagctaggaacttccaatgaggttgtattaactggttccttctttattctctgctttggtgactgattgatcattataatcattacgagcattttgccacaaagagaaattcataagagcttggtttataatatcagatagtgggcatcgtttgttattaaagaacaggtcattacatgctttccaaattctccagtcaatgaatggaaaaagatgcacatggtgctcaagcgttttcttaatgttaagcatgtcatgaacaatacacgtgagagagagagagagagatggtgtcgtaattgacctgggtggatatagaagggggacagctccaaaatttctcttgctatgcggcagtgaattagagaaggtgaatgacatattctgcttcttcaccacagaagtacagtttcttaaaaatttgatatgccttcgagcaatattatcttcaactagcaaagtattgtgtaagatttttttttaccaaaaatgctttattttgggaggaacgttcaaagcccaaatatgtttgtatactttttactgtatacatttattaagtaaagaaaccaactacaaatacaattcaaatttgagaaacttttatgttcactacaccaccaccactagtgtactataaaaatagtgaagtaatatgatcattaattaacatgtatggtttagttttaacaattttttgatcttgttacaaaaccaattattattttgaatatgatttgatgatgttttttctatatgtatcatattaaattcaaatgcgtggatcacacgctataataaacgagcatttgataaggtaaatttatttccagtataaatatctgaaatttgatgtatcttaagtttataaattttatcagtatgtaacaaagataaataactaatactataaatatataccccctctgttttaattgctgttctgccaataatattttgtttataacagttatcgttttagatttttaatgtaaatattggtaaatatttcagatatatgctcattgtttaatgttctaaccaataaaaaaatagaaaatatattaattaaggataaaataaaataatgattgctttttaattactgtacaaaaactttaaacgacaattatctcgttcaaaacagatagagtattaactttaaaatactccaaccttgagttttttctttgactttctcaacaatataccgaaacatctcagatttcttcttatcaaactgttctggtagccccaaatattttccgccacctccctcattgtgtattcccaggagatttctcattcttcgctttgtgtcaatgacaggaatccaaactttgcggtctttaattggctaagagagattgtggcttggaaaacaagatttgaggattgtcgcttcacatgggtccgacgaaattccaacatggcagcagacacattagctaaacatgcactaccttcacatacttcttatcatttttctaattttactcctcatgtaatcaccgacatattccatcgtgactttatctctgcatttcaataataagattgacgttgatggaaaaaaaaaaactattgacttgcgatataactctaaattttatagataaatatgcgatataattattgtcataaaactaatcacttttttttttttatataatttgacaacaaactattacctattttatataagttattaatctttaaaaaaataaatgttcgtctttaatatatacattttgagattttaaaaatgaattataactataatttaaatttgagaaacagttattttccactaaaccaccactaatcacgtctttgtcataaaaatttgacccaaaacaattaaggaaaataaaatatattagttgccattctgtcacgatcttatcgaaactgtgagatttttttcttttttaggtttttacaaatcattttgaaattcactcttcgccttccccaaaatttcaaaacccgcctcttcacttttcgccttcctctacttatttagcctaaatctctcataaatctggaaaacaacattttctctctaaatctctctctcactcgtttcaacaatggcgattgaaactcagcttccttgcgacggtgacggtgtgtgtatgcggtgtcaggtgaatcctccgtcagaagagactctcacttgtggcacgtgcgtcactccatggcacgtgccgtgtctcctccccgaatcactcgcttcttccactggagagtgggagtgtcccgattgctccggcgttgccgttccctccgccgctccgggtaccgaaaacgctcgacctgaatcttccggtttagttctcgttgctgcgatccgtgcgattcaggctgatgagactttacccgaagctgagaaagccaaaaaaaggcaaaaactgatgagtgggggtggtgacgatggtgtcgatgaagaagagaagaagaagttagaaatcttttgttctatttgcattcaattgccagaaagacctatcacggttcgttttcattcttcaaatcaatgtgtttttgagtttattcgctaatttatgtgtttgttcttgtgatttgtgttaatgacttgttagatcttgtgattagtacacataaaccctactagaatcgctaatttatgcttgtgacttgtgttaatgacttgttagatcttgtgattaatacacataaaccctactagaatcgctaatttatgtttgtgacatgtgttaattacttgttagatcttgtgattagtgttgataatagtagtagaatcgcgaatttatgcttgtgatctgtgttagtgtcttgttaaatcttgtgattagtacgcataactgtagtagaatggctaatttatgtgtttgttgttgataaggatgattaatatttgaagtagcacactaatggcttatttgcaaccagtcttatgcttgtgattagtgttaatgccttgttgaatcttgtgattagtacacataagtgtagtagaatcgctagtttatttgtaaacttgataatgatgattagtgtatttaagtagcagactaatg

SEQ ID NO: 157633 - DNA, 1370 bp, Arabidopsis thaliana landsberg; identical to SEQ ID NO: 30340

SEQ ID NO: 157634 - DNA, 559 bp, Arabidopsis thaliana landsberg
  unsure (1)..(559): unsure at all n locations
tctcttgatgcgaggttccttagcgggcttaaagatgaacgtgtgcaagcagctanagtcttcaaggcaggtgggtttggagatatcttgaccgatcagaaagttgacaagaaacagctagtcgatgacgtgaggaaggctctttacgcatccaaaatcnnnnnnnnnnnnnnnnnnnnnnnnnnnnnnnntgccaagagcatagaaaaggggtggggattgaagctaggtgagttagctagaatctggaaaggaggctgcatcatcagagcaatcttcctagacaggatcaagcaagcttatgacaggaacgcagagctagctaacctcttggtggatccagagtttgcgaaagagataatcgagagacagtccgcgtggagaagagtcgtctgcttagctatcaactcgggtatcagcacaccgggtatgtctgcgagtctagcctactttgattcttacaggagagagagattgccggcacctctagtccaagcacagagagactactttggagctcatacatatgaaaggactgatgtggaaggatctttccaca

SEQ ID NO: 157635 - DNA, 1329 bp, Arabidopsis thaliana landsberg
atcaatcataaaatcgagttattacacgtgatcacggagaaaaaagaagatttttattacaattactgaaaaatgccaacggttaaattaattaatatcatcatcatataatgaagaaaagatactctaaagaaaaaggaataaaacccacagctcaatttgtctctcttggtttagtaaaatcaatatcaaatattatatggaaatactataatttcacaattctatataaccctgaaccgtgtgttagttacactattattctaagagtttattttctaggtttctctctgataagaaactaggtatcttcttcttctttttctgtgggtaaacaacaacaatggattcttcaatgtcgacgaagaagaaaaccaaattgtctgtgagaaaccaaacttgtttcaagaaatcgtccctgtcttcttcttctactgcaaaaaagaccacgaatttgtctatgagagaagagaccatgttcaagaaagccttggagctttcaactctgtgcaacatcgaagtctgtgtcatatattatggtcgtgacggagaactcatcaagacatggccggaagatcaatccaaggttcgagacatggctgagaggtttagcaaactacacgagagagagcgacgcaagaaaagaacaaacctttctctgtttctacgtaaaaagatcctcgacgacaataaattgtcggagaaagtcttagagatgaaggattcgctagaaagtggtctacgggtattacaagataagcttctgttactccaacccgagaaccagaccgagctaggtcagagccgtgcggtttcttccacaacgaatccattgtcttctcctgaggatcatcaacaacaacaatggacagaaccattggtgaatggtgtgtcaaacacagagcaagacctatcgacgtcaccattgagtaaccatcagagcaaatattcagtctttgtctataaccatgacagcggaagcttctatcaagtccctgactcgatctgtttctagtttagattatgagttttaattgtctgattaagagtttgtgttgaattgtatggttttcctaagtattatcattatgaatgctattctcaattcaatttttgtctgagtcaattagttggctttgttggatttagatgccaatggtgaatttccagattacaatgccttgtgattttccgattaaaattcttccaagccctaacaatggagatttgttcaagagatctcctaactctcctctatggtttgttacacacacatcaatacatgcataacttgtgcaataatcttctatctatttatatacaactcac

SEQ ID NO: 157636 - DNA, 868 bp, Arabidopsis thaliana landsberg; identical to SEQ ID NO: 41080

SEQ ID NO: 157637 - DNA, 4112 bp, Arabidopsis thaliana landsberg
agagaacttcggcaacggcgccaaatttgatatagctcaaattgccttaagcttactccctcaattaagagatcgtcgttagcacttaagggtcgaattccactgagctctcgatgttcaaacaatagacttatgatgttgttcaataagctaaatgaggtaattgaataataaagacaaataggcaagtaaatgagttgtagattcaagtgattaaagcgtcatatctaaggaattgtctcgggagatagataaattgtacatctagctaatattaggattgttatcgtaccgttctcgaactcaaactatgattttagagtaatcgctggtgttacgcgaaactctctatacttagagctaagataaccagagaagccgagaaatcctatactaaagcatgtattattataaagttttattagttcacatagtatctaaaccagagcccttctatgagcctacatgttctttcttaaatgcctaggctcatctatgatagttcaaataacaagtacctatggtgggcatacctattatctaatatcaagttctaggtgatcaatctaaaactagcaataagaataatcaagatgaagaactctaagagtaatctcaagttgttttcgatctataaatccatctaaatccctattgagagtccctaaacccaacaaggtgattactcaaacatgataacagaaacacaaatcataatctgaatagtttgcattgatgcattagacatagagtaaaagggaggtcagaatcctctctgcagggattagattcttctttgcaaaagtgtatctctcaataaaaataagcttaggtctaaacaatgaccataaaattatgtatataggttacttaaaaacgtacagggtctattttgcaaataaggaaaatttctggggcttctcaaacacttagtgaatcatgaaaattccctttgccaaatatgggtgtcgatcgagatagatgtggtgtcgatcgacaccaccgcgtgaaaacgtctcggataatcttcattgctgaaaaagcttccaaagttccttattatgcttcatagctctcaaatgcataattgcacctgtaatgactcaaaacacaagaaaaagattggaaagacactattctgaaactatgttagaaatcagtaaaaaacatgatatatcagtcaccatcagtcctaaagacattgttcccgagtgccttgacaattgtaatgaaagagacaaacaagaggacactaagatccccaccacaaatcaaaaagaatgtatccaagcccatttgattgtcaatgtagacatgagagcgtttactttctatcatcatagacatcttttccgacatccagtaagtaattatgggattgcattcggtgtacttcaaactgaaaacttcgaataatgtatgcacaaattccgtgtatgtcatgttttccttaacacgtacatagcgaccaaacatgccttcatctggttcaaatttccattctccttctttgcatttccactcacccaccatagtaaatacgggaatatccataacccacctgcataataaattcaggagacacacattaaatgcaactgaaaaatactatacatataaaaaacaaatggaatgtcgatactacacacttataaacctaaataccaattatcatttgactattttaaacaaacaaatatagaatttgcaaatattctgataaaaaaatggagttcgaacacaatcaagatcctaatatgacataacaaaaaacttcttaaaagaacttcattacttacacgagcaatgcttgttttggctccaaacttggtacaaaaacaagatcaacacttcttcagcagcaatgtacgttctcaataattctttgttcctgggttcatcttctttatctcaacaatttttttattaattattatcaataatttttttaatattatttgatgtaatgatgattttgcattaattgtgacaatagtcacatctaaactttttgagggcattaaatgttgatgtcacttcggaataatggaaataatctcacttgtaacggaaccgaatcgcgtcaacgtgaaacaaaaaatcttcaactgaaccggaacagtgtacttaactaaacctgctaaactaaaccgtacatttcaacagttactaagagagaagcgcaagggcagaagcgtcattttgcaggcaaaaagacaaatggtgaaaaccacatttgactttgacaatccatgaaaataaaacatggtcaacgggtgtggcccgcaatttaccctaaaaacaagccatcactctagtaataccccaagcaagaagcaagagaaactgactttcggtgaggtttatactctttcaaactcctattatgttctaagttacacaatagagggcggtgaagggaaatcaaatgatgaacttgagggaaatatagaacagacgctaggaaaggagaaagaagaaaacaccagagttgtggtgaatgatgacggcaaacaagagtcttttcaaggaaaaactggcttgccaaaaaattctcgggcacacaaggtgggtttgccattgcggtagtacatccctcgggactctaagactgctcacaaattagtttcgaccctttctactcaaatctcgcgggatcagagtaaaaggccccccgaacactaatttatgtcgagctttttctggaatgttcgtggtttcaacaaaatgtctaaacattccatagtaagaaaatgggtttctcaagaagatttgcagcttgggtgtattttggagacgagggtacaagaaaaatttgcagtttgaattgtaggatcagtctttccggaatgggggttcatatcaaactatgcttttaatcgcttgggacggatctgggaagtctggagtccacgagttagattgacgccatgttttacaagtggtcaaatgattacttgttcagttcttatggaaaatatggaggaataattttttgtttcttttgtttatgcttcgaacttcataaaggacagaaaagagttatgggaggatttgcaaaatcaccaagattcaccaatgttcagaaataagccgtgtatgatatatggagattttaatgaaattttgaagggtgaggagcattctctatatgaggtaaaccctgttattcccgcaggaatgagagatttccaggaagtggtgcgatattgttctctcagtgatattcagagtcatggtccattatttacttggtgtaacaaaagagatgacgaggagctaatatgtaagaaactagacggggtgttagtgaatgatgcttggttagcagagtttcggcaatcatatggagtttttgaagcagggggatgttctgatcatctccgatgtcgcataaatataggagctgctaaacaacacagacgcaagccttttaaattcacgaatgctttggctactaatgcagggttcttaccaatgattcaagacttctgagacagcactgaaacgcttttccattcaacttccgcaatgtttcatttttcaaagaagttaaaagcactgaaaccaagaattaaatcgatgagtaaagccaagttgggtgatctagcgaggaaaacgaaggaaatttttgaaactctttgtcgatgtcagatggaaacgttaatgaatccaacaacatcggcaatgcgaatagaatctgcagcttatagtagatgggtgcacctctcgggcttggaggaaaaatatttgaaacaaaaatccaagctccattggcttaaggttggagatggcaaaaataaagtgtttcacaaagcgacaaaggttagagaagtacgcaatgccatcaatgagatcaaatgccctgatggtactacagtggacacacaagaggagataaaaaaaaaagaggctgaaagtttttttcatgatttcttagctcacaggccagctcactataagggtatttcagaggaggagctgaggaagctagtgcagtaccggtgtcagaagcagatggaatgcagttggaaagagaactctctactgaggaaataagagaagtgttattctcgatgccaagtgataaaagcccgggttcagatggatac

SEQ ID NO: 157638 - DNA, 706 bp, Arabidopsis thaliana landsberg; identical to SEQ ID NO: 14720

SEQ ID NO: 157639 - DNA, 2900 bp, Arabidopsis thaliana landsberg
taattattctatccaagactcatataattattctatccaagactcatatctgggaccagttttgaagacaacaacaagaaagtttactctgtctggaaaattgctacattgtgtatttagtaggatcttgactacactgaaagaaaaggagctttggtttcatttcggaggacaacctacgagattctctattagaaaatttcatatggttaccagatttaagtgttctccagattctgaggaacgtgaggagaatgaagaggagaatgatgaagatacaggctacagttgggcgaagataaaacagagacacacaacggatgtgcttcttcacattccgagggacactgatgaagattcgagtgaagaaagattctgcttggccatgctcctcttaatagagtcgactttcctcactctgtacaaaggctgcaaattccctgtagaaaatctggagagagcacaagatgtggaaaagttgaccaattatccatggggggaagatgcattcaatgtcccaatgtcatcgatcaagaagaacgtggcatcaaacatgatgaagccaaagcatgatattcatggatttcctctagcactacacatttggattctttagtctattccaatgctacaaacagcctacaaccgaatcagtttaatagagaggcctactgcattcttgtgtgagaaatacacgagcctaccatcaccacaactttctcaaatacagaacattgaagcatcatatcatgtaagtttagtctcttctttcaacggtttaaactagttttgggaaggctttatactaattcggtatggccttccttatttgggaaggctttatattaattcaggacggtcttctggaaatatatagtcgaatgtattaagtttgctaaatgtttttgtttttgtgcagccgaaggtgtttttcatcttaccgtcaatacctgatgatcttgaagataaagtttcattggaagacgaagatgatccagaattggatatgctggtctagcttctaggcaaaggttacaagataaaatctgaagattggacaaaaacaatagttgatgtaggagcagtattagaagaagttgtagtgatttttttttgttcggtaacaaagaggtaatgaaaccaacttcatcaggcgagtctctggttgagaagcttgacaagctagtaaacctagttcaagaagggtttaaatcaacaaatcaacgcttattagaaatagagaggaagctgacaaaacttgatagaagaagaagaagagatcatgtaaaataagattcttaacaaatttaaattatattagaggttctgaaatgaatttaagccgatttgatgtcttgttgtagtgggaacgatcaagaagtccatctcctatgcgaacagatttctattccaaccgacctccatcttctatggtaactgagcaagaacctgcaaacactacaaaaaaatgtccattgatagcattacggcataacacggcttactgaactgctattgaagattagatgtattttagtattcatatgatagcatttaatgacgctaataaacattgattaaaattatattatttatcctacgctatggatatgttttcattaagcgggaaagtaaaatagtttttttccgcctaacacttaacaaaatgatgaatttccccaatttgtcgattagagttattattttctcaaatttctcaagaaccttaagaactagccatctctgctcaacctctctcaatccgacaattcgtcgccgattaatcttgataataggcttttagtcaattaatcctaaagcactatcatgtcgttgtagtaatgaaggttgtcaatccaaatgggtgtgttgcaaccaaatgagatgaaatcagaagtcaataagtcaagccaagcaataacagttttgagatttctaacaatcctaagcgaacatggcgaacatgcagaagacagaaacaataacagaattactaaaatcactcgaccgcaacaagctgatgccagaaggaggatgttgtcgagtaacaggtcgagtaacacacaggaaatgaagataatcttactcgactgcacagtctgttgccagacactgggtgtggtcgagtaagatggtcgagtgattgtaaaaactaagaaacaggcaatgagaacgattaagcgataactataaaacagagaaataagatagacaagaaattcgtaaggatggggtaatcgagtagagtggtatcctagcctattcgaatggttaacaagcgcaatcaagctatccctagacaacaggttcaacaacaaatcaattcactcccgtgatagaaatcctcaagcaaagctagcccagactaattaccattaacggaatctaactatgcaggcaataagaacagactgataaagtcaataaacgctctaaacggccaatcccatggaatagagacgcatatctcaggaactagtggatcaagcattccatcgaacaccttctgggtgtgggaaagcttgggatcgaattccagttgatcagaaagaaataagcagtaaacgcaactagtcctaaagggattcaatcaattctaaagcttaaccattctacagactacagattccacaactactctatcccatccctaagaattctaagtcactactcagacaacatgctcaaagacataaacacagataaacgataatattgcataagtaaagagataaagagtagagaaacaagatgacagatgaaatcaaatgcggaatctgaataacttggaaaaatctcgaattacaggttgcagaagcaaaagcggtgcaacagagtttaacagaaaataaaactgaagcaaaaactcaatgtcaaatagatgtctcacgacaaaaccc

SEQ ID NO: 157640 - DNA, 896 bp, Arabidopsis thaliana landsberg
acttgatagtttcaaaatactttgtattccatcttgctgaaaaatattgtttcggaaatgtaaaaatcgaaaatatatattgcagtacgcgtgtgtccaatgaacttggagcaggaaatgtaaaaggcgcaaagaaggcgacctctgtgtccgtaaagttgtctttagttcttgctctcggcgttgtaattgttttactcgtaggtcatgatggttgggttgggttatttagcgatagctatgtgattaaagaggagtttgcatcattgaggttttttcttgctgcctctataactcttgattcaatccaaggagttttatcaggtaaaagaatccaatattttttttttactcatctagggtggtaaaaatcattgttaaatttatatacaggagttgcaagaggatgcggatggcagcgtttagtcacggttataaatttggcgacattctacttaattggaatgccgattgccgccttttgtggtttcaagttgaagttttatgccaaggtattgcttgattctataataagattagtaaattttgtttgattatgttatgtttgattcattattttgatggcgacagggtttgtggattggtttgatatgtggaatattttgccaatcatcatctcttttgcttatgacaatattccggaagtggacaaagctgaatgttgctacggtctgaaaactctagttacgttccatttttctacggaggcacatttattttcttaagcagatatggaatcagttatcaagatatatatttggaactcatgatcattttccaaacgcttagttaagatttatctttcttagttttctttttattcttttggagtgtaagggaaataatctggttcacaaagttggtcatggcttgaa

SEQ ID NO: 157641 - DNA, 715 bp, Arabidopsis thaliana landsberg
ctgaccccctttttttgttgtataatggaatttaggtttgctcgagttcatgggattgcaccatcaatttatggaacacaaatgaatctacttcagaaggggagtcagtatcagtaaagaaaagaaaaggaaataatcaggccgaggaatctcagtcagaggtaccggataatatgcattcttttgaaacgtactatctactcttcaaatcaaaatagagaaatgtactcccagttgtgtttttctgagttccaagtgtctgatatcaattacgatattgaacttcttacagggagaggcagtgacttctttggttggacacacacagtgtgtatcatcagttgtttggccagagcatgatgtaatttattcctcttcgtgggaccattccgttaggagatgggatgttgagacagggaaagattctttgaacttggtatgccttctctctctccttttctttcgtaaatattagggcacacaccagacatgttgttgccgaaaaatcagtgcttttgaagttgttttcgccggaaacttaaaaccggtttgtttctgtgaaattgtagttctgtggaaaagctctcaacacggtagatgttggtggtgaaagttctgaccttatagctgctggtggctcagatccaatccttagagtatgggatcctcgtaagccaggtgatagatccatatggacacacgcccataggaacgg

SEQ ID NO: 157642 - DNA, 1184 bp, Arabidopsis thaliana landsberg
gacgctgggcatcttcacgctcttctcaaggtaacatgacccaaaaaatgaacttgtcgtatccctttagtgtaagcttgttgtttctttatcaaacctcaatagtttttatttatattacttttcttgacccttaggtgcggaagcagtttaaagacatatttgttcagatggggtgagagaaactcttcacatatattgtaattccccatttttctgttgattgctaaaattaatggtgagccttatgtggtcataggtttgaggagatgccaacaaacaactatgtggagagcaggtatcctctagttattaagaatcttggttttcagctttccatggaggctttaaggatatctaattatacatccttttcttgctatttgttggctgatcttaatctgattcatatacgctacagcttctggaattttgatgctttgttccagcctcagcagcaccctgctcgtgattctcatgacaccttctttctaaaaggttcaaatcttgaatcctttgtcactaaatttgttgtttaggacagctttttctaggttgcttgttgacatctcaaagaatagataactcttacatttaagacgtaaatctttgaatgtagttccctctactacaaggacgcttccgaaagattatgttgagagggtgaaacgtgttcatgagtctggtggttatggatcaagagggtaattgacttgtatcttcttaccaccttgaataaataataattaatttgcaatcactctgacatggccttttgcaataaaggtataattatgattggaaaagagaagaagcaaacaagaatcttcttcgtacccacacaacggctgtctcatctaggatgctttatgcactagcacaggttcaactagactttagcttacaggttttgagacgttggtttccaaaattcagtagtataattagatttatatcttactgtagaaaccttttgtgcccaagaagtacttttcgattgaccgtgtcttcagaaacgaggctgttgatcggacccaccttgcagagttccatcaaattgaaggtatagttctaatggtcagagttgtcactgtggtcagagttagcataataaactgtcaaactttattcataatcggttaaatgatctcatcttggatcaggtttgatatgtgatcggggcc

SEQ ID NO: 157643 - DNA, 382 bp, Arabidopsis thaliana landsberg
ctatatcatctctcggtttcactattgaacgtgtaacactggtcgaaagaagacgaacataaactcgtctccggtaaccaaaaatggtttccatgactacttcatcttcttcgtacggaacattctctacagtcttcaacagttctagacctaattcctcagcaacctttctcgtcccttccttgaaattctccaccggaatatcgaatttcgcgaatctgagtaatgggttttctctaaaatctccaattaatcctgggtttctcttcaagtctcgtcctttcactgtccaagctagagctgctgcagaaaaaaccgttcacgatttcaccgttaaggtttggttcttattcttttacccaattcagaccaaaaactaggg

SEQ ID NO: 157644 - DNA, 1468 bp, Arabidopsis thaliana landsberg
atggaacaagatgggatttgtccctcctatataacgggagataaatatctctgggcctatcgaagatttgacactgagaaatgcatggccgtgctcaaatggattgaaagtcaatcgtttattttatcagtataaatcagagttcgataaatatgattcagtataataaggttgacaccatttcttaccttatgctaaaattgagatatacagacgaaaggattaccagaatagatgattccagtacaagtgcgagattgttgggaatgtcctgaaatcatttgtactcactctaaattaagttgtatcgacgaggttcgacagtcgaataatattagatgattataatattttggtagaagcctcttataatcaatgactttagaagttcataactaatgttatacgatcctacaaggtcacacacctaagcatactggattaaggttggtttatataatataatatatatatatatatgttatatgagatatacatatatgtttatatttctgtatttataataaagagttttttatagaagctacatatatatatatatatgaagttgacgtgtgatactatgtttttagtcaattatcctaaaacaccaatcatgtcattgtagtattttaggttgtcaatccaaatgggtgtgatgctaacaatcaagatgtgatcagaagtcactaagtcaagccaagcataacaggttttggtgtgttctagcagtcctaagtgaacatgcagaaaacagaaaatcaaacagaaacagtaaaacactcgaccaacacagctctttgtagagcactgggtgaggtcgatagacaggtcgagtaacagacagaaaatgaaacacaaatactccactgcacagtctgttgccagacaactaggtggtcgagtatgaggtcgagtaacaagaaagaactgcagaaattaagcgacagataataagatgcagtaaacaacagtagagtaaacaaataatttaatcagataaagaattcccgaggatggggtaattgagtagtttcgttttctcagtttacaggtgattgacatgctcaataaattaaccctagacaagaacttcattaaccaaatctaagtgccaccgcaatagagaccctcaagttaacctagtcccagactcaatcaccattgacgagagctaacctaacaggcattacgaatcaacaagttaaagccaaaaagctccctgcaaccaataccttggtacagggtcacgaatctctagaattagtggttcagacatttcatcgaacaccttttgggcgtggaaatgtctgggctcaaattccagttgatcagaaagcaataggcattaagaacaactaatccagaagggatctatcaatcaatactcaatcacctagcatactgagaattctacactactctaacccatcctcagaaacctattcactactcagacatcataaca

SEQ ID NO: 157645 - DNA, 1063 bp, Arabidopsis thaliana landsberg
tgcttcatctccaatcgctctctctctcgctcggtgtgatccgtgtagagagattgaatctgctgagtaacggtgcaatgtctcgctaccagtctcattcctttgatgacggcgaggttaatccttttgcggtaagcttgattcaatctcatcatctagggattctactttttattcggctttgttgaatcgcaatgtttctgatctgatttatcacattctttgttgttttttgtacgtcatgccactcgcaattcttgggatcgacttttcggttccaatgcacaaggagaaacgtggttgatcgtttgatcgatttacgctttcttgtgttcgcatgattgttggactttgtgatgtgagtgtctctgggaagggtgataacaagtttcagtatgtaattgccctaatttcaattggtcgtaccctcaattgtttattaatctcacttacatctttttccatttccagtttagtgcttacatgtggccattgatactttatactgatcttggatatggcgtaatggtttacttacttgcttgcaatggctgttacatattcatatcagtttcttgtccattgaattgttgtctctgatgttctaaaggtctcgtagatcttcattgtatagtctttactttaaacattgctcttgcaccttaaagaccataactgctcttgctataagcattattaacttctttcccctttttgttgtatttgaaccttcagaatcctacaagtgttccagctgcaacgtcaaagctttctcctcttccccctgagccgtacgaccgtggtgccacaatggatattcctcttgactctggaaaggtattttctacatccacagaagcctacgtaccaagtatattctcagaataatccctgagacaattttatgattgccaacttctaggatctgaaagctaaggagaaggaactccgggaaaaggaggctgaattgaagaggcgggagcaggtaagctgtgattggatttgaaaccaactaatgttacataccctgatgtcatttctcaaatggttagcagtaggtttt

SEQ ID NO: 157646 - DNA, 1443 bp, Arabidopsis thaliana landsberg
  unsure (1)..(1443): unsure at all n locations
tgtcagttgcgacgtagtgttttcatagacaaggttttcatatctaagagtatggttgtttctgtagagctagtctagtcgactataacatgaagttgcacttgcaaagaacttttttagctgaaatgttagacaaaaaagacatatagatagatcagataggtgcaatcgaaaagatgctaaagaaccagaaagttcttatctttgttgatgatttagatgaccaagatgtgctagatgccttagtgggtcaaactcaatggtttggaagtgggagtagaatcatagtggttacaaagaataagcattttttaagggctcatgggattgatcacatttacaaagtcggtgtcccatctgaagacatcgctcttgagatgttttgtcggtatgcttttaggaagaaatctccacctgatggttttatggagctttcttctgaagttgcattgcttgccggcaatcttcctttgggtcttaacgttttaggttcatatctacggngtagggacaaagaggaatgggtagatgtgatgccgaggcttcaaaatgatttggatgggaaaattgagatgacactaagagtctgttatgatggattaaacaacaaaaaggatgaagcattatttcgtcacattgcatgtcttttcaatggtgataaagtttatgacatcaagttgcttctagcagagagtgacttggatgttaatattgggttaaaaaaccttgttgataagtctctcatatttgcaagagaggatactattgagatgcaccgtttgctacaagaaatgggtagagaaattgttcgggaacagtccatttacgagcctggagaacgggaattccttgtggattcgaagcatattttggatgtacttaatgataacactgtaagtgctcttttcataaccacctgatacaacttctacaactcttacagcatagtctgatctttacaactttttctcagggtacgaaaaaggttttaggtatatcatttgatatgtctgagattgaggagttgcacatacataagagagccttcaaaaggatgcctaatctcaggttcttaagattttacaagaaattagggaagcagagtaaagaagccagattgcacctacaagaaggctttgacaagtttttcccccctaaactcaaattactgagttgggatgactacccgatgaggcgtatgccttctaactttcatgctggatatctcgttgtactgagaatgcaacacagcaagctcgaaaagttatggcaaggagttcaggtgaagttttgtagcaagattaggcacattactatattaccttttgaatggcatatgtagtcagagatgtgttcttttcttctttgatagatagagtttgcaacttttgatatatagttcaaaagatagaaagaataggattataatgcaattggagattg

SEQ ID NO: 157647 - DNA, 527 bp, Arabidopsis thaliana landsberg
agaaagaaaaatgggatctcagatcattcataactcacaaaaaccacatgtagtttgtgttccatatccggctcaaggccacatcaaccctatgatgagagtggctaaactcttccacgccagaggcttctacgtcaccttcgtcaacaccgtctacaaccacaatcgtttccttcgttctcgtgggtccaatgccctagatggacttccttcgttccgatttgagtccattgctgacggtctaccagagacagacatggatgccacgcaggacatcacagctctttgcgagtccaccatgaagaactgtctcgctccattcagagagcttctccagcggatcaacgcaagggatgatgttcctcctgtgagctgtatcgtatccgacggttgtatgagcttcacacttgatgctgcggaggagctcggtgtcccggaggttcttttttggacaactagtgcttgtggcttcttggcttacctttactactatcgcttcatcgagaagggattatcaccaataaaag

SEQ ID NO: 157648 - DNA, 532 bp, Arabidopsis thaliana landsberg
ccgatctagccgtgaatctgtctctagagtctgtaactcacgggatttcagtcgttgatctgcctctgtttcgatccgtgttaaactcggtaaagtctatctctgttttctcctttgttcttcatcttataacttcgcggtctagatcttccggtaatctgattttccttttgaattctgatcatgtagatttaaaactatggatccgatggatatagttggaaaatcaaaggaagatgcttcgcttccgaaaggttcggtctcgtttccttctttggatcgatctactacttaatttttggttctgtcaatttcttggttaaattgaaagattttgtaaatctagctctagctatggcttcaggttactcaatgcaatgactctgtatttttgtctgataaaaaatatgtttgttctttcagctaccatgacgaaaattacaaagtagatgttacccgcagatgttcgagaagaaagagatgctcaagatctattgattgagtgttgtgtaggtcatgattgttagtctta

SEQ ID NO: 157649 - DNA, 837 bp, Arabidopsis thaliana landsberg; identical to SEQ ID NO: 5985

SEQ ID NO: 157650 - DNA, 543 bp, Arabidopsis thaliana landsberg
  unsure (1)..(543): unsure at all n locations
gattacgtgaaaggagatttatcagcattgggtgttggcttgacaaatccgacattggtcaaagtatcgtgggaccagccttctccattacatcgacactcccgaccaagcctgctcttacgaatactctagtaagtcacaaccgagacattttcagataaccttaatccgttttctaattatcttgaaccggagttaaccaaaaaatcaattacaaataccaaaccggattaaaaacaggggattgtcatgatcaacatggattgaaggatatgtgtgtggatggagcaatccagaatttcacgtctcagcttcagcattacggtgaaggaacatctgatcgtagatgtatgtcatcattttcatttatttcatataatgatgatatccaaagtgtaactgcgtattttgtattttgatgcataacttaagtttttaaaattataatatatccttgttcggtcgcgtggatngcaaaaaaaangcacttttgttcttgtctcatttcatgggagatattcatcaggtttattactcataatc

SEQ ID NO: 157651 - DNA, 495 bp, Arabidopsis thaliana landsberg
  unsure (1)..(495): unsure at all n locations
agcaattcttcttgtcttggctcaatttatatacaaacacactctctctctcggttttgtccaaacaatggctcgcttcgatattgttctactcataggtctttgcctcataatctctgtctttcccgatacaaccaccgcacnnnnnnnnnnnnnnnnnnnnnnnaaaacttgccccaatgtcgaacaaatcgtgagaaatgctgtccaaaagaaaataaagaagacattcgtcgccgtccctgccactctccgtctcttcttccacgactgctttgtcaatgtatgtttctatttaagcgttttcatatcatttttctcctctttcattaggcgattaattggtacctttggcgtaattggcattgtagggttgtgatgcatctgtcatgatccaatcaacgcctaagaacaaggcagagaaggatcatccagataacatttcgctagctggagatggatttgatgtggtgatccaagctaagaaagcccgtg

SEQ ID NO: 157652 - DNA, 604 bp, Arabidopsis thaliana landsberg; identical to SEQ ID NO: 53198
  unsure (1)..(604): unsure at all n locations

SEQ ID NO: 157653 - DNA, 494 bp, Arabidopsis thaliana landsberg
gagcgtggcatatcggtccgctttcggtttacaacagaggatttgaggacaagcctgagagaggaaagaaagcaagcattaatgaggttgaatgcctcaaatggcttgactccaagaaaccagattcagtcatttacatttcttttgggagcgtggcttgcttcaagaacgagcagctattcgagatcgctgcaggattagaaacttctggagcaaatttcatctgggttgttaggaaaaacataggtattgaaaaagaagaatggttaccagaagggttcgaagagagggtgaaaggaaaagggatgattataagaggatgggcaccacaggtgctcatacttgatcatcaagcaacttgtgggtttgtgacccattgcggctggaactcgcttctggaaggagtggctgcagggcaaccaatggtaacatggcctgtagcagcggagcaattctacaatgagaaattggttacgcaagtgctctgagatgca

SEQ ID NO: 157654 - DNA, 1338 bp, Arabidopsis thaliana landsberg; identical to SEQ ID NO: 5870

SEQ ID NO: 157655 - DNA, 1220 bp, Arabidopsis thaliana landsberg
  unsure (1)..(1220): unsure at all n locations
tctgcccaacccaattgcggccctgtcacgggagctccaggtagcagattcggtgaaggcataggacaaggtagtggtccagggatagggattggtatcggtataggacagggtggacctagtgtagtagtcccaggcacaagaatccctccgatagtggttccaggcgcacagattcccggttttgtgattccaggtatcacagttcctggctacggtactggatgccaaacaggtggctgcaatccgaacccaccacactactatatcccaccaagctgtccccattgtccacctttcacatcaggacaagacaaacacatgtcagacaaaggagccatgaccgaagctcttgcacnnnnnnnnnnnnnnnnnnatgtttaagctttaagagtccatgaaacaccagtctaataaatcactcataatgaaatctattttggtttataaaagcttcacagaaagttgaataatacaactttcttgctcaagtaaaaagatatataagggaaatgcatataagaataagtgagaagtactcagagacagaaaaagattgattaagaattaggcagctggtaattgcatttccatggctgtgtatctgtatgactgacaaatgagtttaaatagaccggcacacaaatcaagttaagctctctactttaatggaaaatacgaactttagcttatataatttcttaatttgaaatgacataaaaagaggtgaatttttcttaaagcattaaactttccgaaaggagagtggtggcactgtaataacgacggagaagaacgaacgaacgcgagagatcgagagagagagaaatatttaatggatcggattctgaaagcagctcgaacatctggttcgctgaatctttccaatcgttctctcaagtaagatccattttttagtcttctttggatttcagatttttgtgggattagattgttttagtttttcgaattgtgttagaaatgtgaatcatctatcatcttttgatcggggctcagtaagttttcgtcttttctaaattatcattgaatcttcgatgttagaagttttgatcctattacctggtcacgagatctcattgtatatgagctgcaaagtctttgtttacacgactgtttatattgatttgagattcaattttcagggatgtacctactgaggtatatcaatgtttggaaacgaccggagaaggagaaaactg

SEQ ID NO: 157656 - DNA, 523 bp, Arabidopsis thaliana landsberg; identical to SEQ ID NO: 19572

SEQ ID NO: 157657 - DNA, 701 bp, Arabidopsis thaliana landsberg; identical to SEQ ID NO: 27226
  unsure (1)..(701): unsure at all n locations

SEQ ID NO: 157658 - DNA, 543 bp, Arabidopsis thaliana landsberg
  unsure (1)..(543): unsure at all n locations
aaaaataaaacagagcaaaccccaaaaatggggaagcatttattccgatcatctcctccaccggagaaaaccaacagctcatctctctctcgcggaatcagctgttcaagaatgtatgagcaacatcaacaccgtcatatcaaaatggacttctccggctgcttcttcctccgacgacttcctcttctccaccnnnnnnnnnnnnnnnnnnnnnnnntttgttacagccgttagacatctacaaagcacgatgcatcgtttggtttccgttaacccttcctcggagaagctaatctacgcacagaatctaatgcaatcggcgatgaagcttctcgaatcagagtttcatcgtgttttaaaagcgaaccgtgagtatttagatcctgaatgtgtctctgtacgttcttacagatcatcgagattcagtacttcgactacgactagtgtctccgattccgcagacgaaagcagttacgaagaaaacgccgacaaagagcatagatnnnnnnnnnnnnnnnnngacgcaatggatgatctcgagat

SEQ ID NO: 157659 - DNA, 658 bp, Arabidopsis thaliana landsberg
  unsure (1)..(658): unsure at all n locations
cgagaaggtaacagaattcgcaggactattgaactacgattccttaggaaaacttctctacttacatgctgtgatcacagaaacacttcgtctctaccctgccgttcctcaggtaagtaaaaatccattaaatttgtgaattgagatatcgaaacgaagaaaagaaaaaatcgtatattcgatattcgtaggatccgaaaggagtattagaagatgatatgttaccaaatgggacaaaagtaaaagctggagggatggtcacatatgtaccttactcaatgggtcgtatggaatacaattggggatcagatgcagcattgtttaaacccgaaagatggcttaaagatggagtctttcaaaatgcatcaccattcaagttcacagcttttcaggtaactataatcaaacacatacaagatttttgtttttgaacatgaaagatgatgagtttgtgtgagtgtaggctggaccaaggatatgtttgggaaaggattcagcttatctgcaaatgaagatggcnnnnnnnnnnnnnnnnnnnntctataagtttcatttggtgccaaatcatcctgtcaagtatcggatgatgacgatcttatccatggctcatggcttgaaggttactgtatccagacgttcatagacacacacacaaaaa

SEQ ID NO: 157660 - DNA, 661 bp, Arabidopsis thaliana landsberg
aatgaatcatatatgcttttttttctgcggaatatgcaactctttggcttcttccagactcaaccaaagaagatttgctcacaaattggtctttgcgcttacgatggcacccatggcgtcaggtaaatttccaatgattttctaaccaaataactatctgtatattatgaacattggtgttctcttattgtgcggcgttgtatcatgtttagtatggagattgaatcggtgtcggacaaggaaaacccaagatcatctagtggtattccagacgcgggttgtcctgcatgtaaaatggcggttgtgtggatacagagccaattgagccagcacatgactcaagagaggatagtgaactacattaatgaggtagaaagacaataacaagtttatatcttgtggaagtaagtaatgatattgtttttgttctgacaccaaaatcgtaaattcttagataagcgagcgcatgcctagtccaaatggagagtagtgctgttgactgctcacaactttttaaaatgcctactgtttcattcaccattggaggcaaagtctttgatcttgctcccgaagaggtacattctatatgtagcccttgatgacattttgaaaacatatgtatattatctgtgactgataatgtttgtgggaactctctgtg

SEQ ID NO: 157661 - DNA, 2050 bp, Arabidopsis thaliana landsberg
tttttctaagctatgagattgttatgtgcaaaacatattttatatttttgtttcacagatgacattcgaccgtggatgacttgggcttattatatgtcccctatgatgtatggacagactgctattgttatgaatgaatttctcgatgagagatggagcagtgtaagatttcaccaagtccttctcttgttgacttctctttaccaattgtgatgcaaaatctgttatgttacatgatgcagcccaactatgatacccgcatcaacgcgaaaacagttggagaagtcctactaaagagccggggcttctttacggagccatactggttttggatatgtattgtggcactacttggattttctttgttgttcaatctcttctacatactagccttgatgtatttgaaccgtaagtaatcttatttttcggctattctagacttttgaagagaatcattttttgttgacaaggtcttgaaaaaaatatttcttcagctcttggtaactccaaagctacagttgtggaagaaggtaaagacaaacaaaaaggggaaaaccgtggaacagaaggtgcaatcttttaattcttttatctttaatttctgtgtcttagtttctgactaagcttagaatttgcaggttctgttgtggaacttaatagttcttcaaataaagggccaaagagaggaatggttttaccttttcaaccactttctcttgcattcaacaatgtgaactactacgttgatatgccttcagtaagtaaccatgtctcatactatttagacttcaccaattacgtaacaaatgcgttttaagtttcattcgttgtaccttaaaatattgcaggaaatgaaggcgcaaggagtggaaggcgatcgtcttcaattactaagagacgttggtggagctttcaggccaggcatattgacagcattggttggtgtcagtggtgcaggtaagacaacattaatggatgtcttagccggtaggaaaactggagggtacatcgaagggagtataagcatatctggttacccaaagaaccaaacaacatttgctagagtcagtggttactgtgaacaaaatgacatccattctccacatgttaccgtttatgaatccctcatctattcagcttggcttcgtctttccaccgatatagacatcaaaacacgagaggtaagtatattactatgcaaaacaattcactgttttctcacaatagctcgcaagactttatacccaagtaacttggtttgtgtgattgatagatgtttgttgaagaagtaatggagttggttgagctcaaacctcttagaaactctatagttggacttcctggagtagatggtctttcaaccgaacagaggaagaggcttactattgcggttgaattggtagctaacccatcaataatcttcatggatgaaccaacatctggtcttgatgcaagagctgccgctattgttatgcgtactgttaggaataccgttgatacagggaggactgttgtctgtacaattcaccagcctagcatcgacattttcgaatcattcgatgaggtttgcctccaaaaaatcacagtttttgtcccaaaaacagaattattttttttttaacaaatcatatttggtcattgtagcttttgttgatgaaacgtggaggccaagttatatatgctggaagtctagggcatcactctcagaaactagttgaatattttgaggtgaatcatctgtttgtttcatctcttagtcatatatatccgtggaattatctatatctagaacgctacttgcaggctgttgaaggggttccaaagatcaatgacggatacaatcctgcgacgtggatgcttgacgttactactccttcaatggagtcacaaatgagcctggactttgctcaaatattctccaactcctctctttatcggtatgctaaagaaaatgctgctactaaaccagagtgttactctgtccttttaaaacgaactaaatgttctttctcaggagaaatcaagaactcatcaaagatttaagtactcc

SEQ ID NO: 157662 - DNA, 672 bp, Arabidopsis thaliana landsberg
ttctagataggccaacgaatccaggattctttaagagcaaatcagattatgtcaaaaaaccaatcccaaaagaaggattagagaagctttggaagacaatgtttaagttcaacgatattgtgtggatgcaattcaacccttatggtggagtgatggaccagattccgtcgaccgctacagcatttcctcatcgtaaaggaaacatgttcaaggttcaatactctacaacatggttggctgcaaacgccacagagattagcctaagtatgatgaaggagctttacgaggttgctgaaccgtacgtgtcaagtaacccgagagaggccttttttaattacagagatatcgatgttggaagcaatccgagtggtgagacaaacgtggatgaagctaagatctatggatccaagtatttcttggggaatttgaagagattgatggatgttaaagctaagtatgatcctgataatttcttcaagaacgagcagagtattcctccggttcgtgtaaaatagtgatattaagttatctgggcatgtgttataggcttatagtctctatgtagtttgccttgtttaatcattagtactcaataaagaaatctatacgtgagtagtaattagtttcataatcaattaagcatgttcatctaatttccttttgttatatata

SEQ ID NO: 157663 - DNA, 155 bp, Arabidopsis thaliana landsberg; identical to SEQ ID NO: 56334

SEQ ID NO: 157664 - DNA, 791 bp, Arabidopsis thaliana landsberg
ttggttcatggatcctcgggtgatggactcagtcactcgatttgcttgagattcataaatttatacatgtgctttgtggccttcaaatgaaacactggtgatgtcgatatgatgtgatttggcatcgatgctgtcattggctccaaaaaatcatgttttagcggtgagaacaaaaaaaaaacaaattttttggaggatcagctggttgaagttaaaactcgagggtattagatggttaaattttaatattgttttggatataggatggtcattaaaaaaaaaagttttgattagtgttggtgcaggaattagcacttccgacaataccaatttaaaccaaggaataacgtgaataaaatcgagaatttgattaaaccggggtatcccggctagcctgttaatgggcctaagtcatgagctcgccagaagatttaggtcgacagttaagatcgccataggcggcttctcaggtcgtgtaaagggaaaacttccatttaagagaagaggatctcatgaagaatagaagtaatgaagatttagacttaggataattagaagtttatcatattttggtatgttggacccattgtataaataggggggggggggtcaagctctccaagaggatcatgacctacctaagacaagagactactattacagagcaaaccctaactttatattcaagcaactttatttttctcttttgattattcgtgagctaagagagaagtgaatttgtctaaatcccttagtacaaattcattgtttgattacagaatcaacaatat

SEQ ID NO: 157665 - DNA, 553 bp, Arabidopsis thaliana landsberg
ccttgtcaacaagtacggcttaatggttcatgtaccgctgccgaagaatcaggtatgggctaacgcggccgtgagtatctcggagagggtcgtagaagagatgaaacggaaggatacgcgtggtggtggactgatggaggagatgcagaggatggagaggatcgggttgaagctgatggagttcagtgaagggtttaggtttaatggggaggaggatgtggtggcgcaagtggcggagatggaggagatttgccggaaaatggaagatgggcttgaggggttacagagaagagttagagaagtgtttcataggttggtgaaaagcagaagtgagatacttgaagtgattgatcactgattgtaatcttttaactttgttgttgtgaaaatttaatctttgagttaactcttttgattaagaaaagagaacaaattacaggtttttattgttttatttatgtgataatctttgatgtatataaattacaattcgtaattaaagaaagataatgtatacaccatgtttaatactaagattgcaaaactattgtca

SEQ ID NO: 157666 - DNA, 1602 bp, Arabidopsis thaliana landsberg
gttgttttttttgaatatattgacgattcgttggcctccgagatctaaggcatctctcacaatcaacggtccagattccatctagaagatatattacaccgaccttgttttctctatctaattctcacacacacaccaacgcaaacctccaaaacagggccggggcgattcattcacaatctcggcgattctctcttccgtctcgagtcgctgagatccatcaggttcgtttctattcgaatctattctcttgaatccgtatttgtttcctttcctccctagatagatttcatttttctggaaacattgagatttccattgatttgatgtttagtggtttagatcggataatttttgttgttgactctcaaaaaacgaatcataactatcttaaaactttgtttacgcattgttattgaaggctaaataaaaaatgctcaattgttgctagaaaggaaggtgtctcgaaaacatgtgaatttatttcttgagcctcagtgtttctccctgcaacaatagtgaatgattcaattgaaaagactttttggttaagccatttttctctttaatagattatgtgtttcaactcaattaggaactgtgtgtttttttgtttccttgatgtaacttgtgagttgatttatttgggtagttaacttgtatatatatttggtggtgggtcctggaggaaaatgagtcagagggagctctgttcatacattctatgtttttaaatgattagtatttttctttcatctaatacttgctttttgtgctaggaatttcgatttttgggactaatttatcgagtatatataattggataagtgagtttggtattaatattaagagcaattaggttggttatcttgccaaacagtagacccctgtcgttttcttagtcatttaagaagtaatgcttaagattcaggcctctaatctggttatgatagtgaagaggatctgtaaatttacctatacgacctgttgaaaaggacctctggtgtttgttactatgcgtttctgatcaatatagacatagttggatcatattcttctcttgatcgtctgtttcattttttttcaaaatcagtaaaaggtctgcaaaatggttgctcagggattcactgtggatcttaaaaagccccttgtatttcaggtaattactgtttcccagggttttaaatagtttatgtcaacattttccttgagaccatagtcacccaagattgtcttcgtttctttcttagagctaatcaaagtaacgctctctctttaacccctcctgccattgctttggatgttttacaggttggtcatgttgctgtttactatgaggaatgggcccaccaacctatggcgaccaaggaaggccctcggtatcttgagagcgactcttgggcggtatatattttatatgcatcttttgtgattcttcacgctcattctcaatactaagcggtgtcaatgagactctgaccttcactctgtgacgtattggcaatgaaccagttcttgacacttacagtttggcgaggagactctgtcattggattgcctgacaaggaatcactccttaggctgtcaggatgcatgggctgt

SEQ ID NO: 157667 - DNA, 512 bp, Arabidopsis thaliana landsberg
  unsure (1)..(512): unsure at all n locations
atcatcatattccagctgcgagttactctgttttgcaagaaactagacaaatactcgaattttgattgtgtgttgcagctttgtgtgggtggctgctgggaagcaacctgatttggagaagcgtgttggtgttgnaggatatggttatccagcaatggtagccttaaacgcaaagaaaggagcttatgctccacttaaaagcggttttgaggttaaacacctcaagtaagtgcaccttttgtctttctctctgtcctatatgacgaaaccaatggtccatgcatcttattagctcaacgggtatttttcttatttgtgttatcagagatttcgttaaggaggctgcgaaaggaggaaaagggaatttgcctatagacggaactatggagatagtgaagacagaagcttgggatggtaaagatggagaggtggttgatgcagatgaattctcacttgaagacctcatgggaaatgatgatgaagcctccactgagtccaaggacgacttgtga

SEQ ID NO: 157668 - DNA, 768 bp, Arabidopsis thaliana landsberg
gcttgtatgaggtggagtaaaaggctaatctatacaagtctccgaagtgttgtgtttgacggggtccatggtactttgaatgctgatgaatcactgcggtatccacctaaggttctttgttatgttgttaagaacttgatattttcacaggactatgtgaaaatttggagaggtttttgagcttctgtcactgagaatgtctatcttttcagcataatgattcatattcagctactaaagctgaaggggaagctttgattttgaaagcgaatggaagaagtggactactcacttgttgcatacgtcctagcagcatatttggtcctggtgataaattaatggttccatcgcttgttactgctgccagggctgggaaatccaaggttgcctctattttctttgttttatctctttggccttctaaatgctatctattttccttgtgacctattatgctctggtctctccttttttagtgatgttaatcagtcttgctacttccattacagtgtatatacatattgaaagatatgatattttgcagatatgtgtatatttatctaacaaaatgccgtgcttcctaagaaaatagatctcaataaaatgaataaataagctaaagatgcattgtctcaagtcttttttgctttcccccccaaaaaatattaggactcttatgatgtttgattttattgccagtcattaagggatgggagaacttctatgatttcacttatgttgaaaatgttgtgcacgcccatgtttgtg

SEQ ID NO: 157669 - DNA, 2448 bp, Arabidopsis thaliana landsberg; identical to SEQ ID NO: 3896

SEQ ID NO: 157670 - DNA, 700 bp, Arabidopsis thaliana landsberg
aaagagtgtatcttgatatttggtttgcgatcgagttaagtggaagcgatggatactgccagagcatggctgaagaaattaaagtctaaagggaaagagaaatcttcgaataagaaggaaacttctagaggaaatgttaaggagggatcaaaaacagctggaggtgaagaagctgtgtctaatgtgacaaagcagaaggctgctgctgcgaaacagtatattgaaaatcattacaaaatgcaagttcaaagtcagcagcaaagaaaggagcggtatggtttcgttacatatttatatgtttcaagttttcatgatgggaaagaactttattcgtgtctttctgctactttcgtgtgaacttccgtccatatccttagctctttgtttggtatttacatttcatacagacgcaaaatgctagagaaaaaattagctgctgcagaagtctctgaggaagagcaaaataacttgctaaaggatttggagatgaaggaaactgaatatatgcgccgtcagaggcataaaatgggagctgatgactttgagccattgacaatgattgggaagggtgcattcggagaggtaacatctcttttatagatcatagtctgttactctgttttctcagcctctcattggcatgcatcatcttgaaatgttctctgtgatgcatccttcttgaaaggtcttgttgggcatt

SEQ ID NO: 157671 - DNA, 461 bp, Arabidopsis thaliana landsberg
  unsure (1)..(461): unsure at all n locations
atgttccttcatgttgttcttattgaagctgcttccattggttttgtgattgagtgcaggtcttataacatggactccatggatattgatcaaagtaacataggtgaatcgcctcaccttctgctgagaccagtaagtccattggaatcnnnnnnnnnnnnnnnnnnnnnnnnnnngaattggcctaatcctggagatacttggcattggaaggttggaccgagaattagcggtaaaggctacttcgtggatagatacttatatcctcctaagtatcttcccggtttagatactgaaatattgcggaaaaataaggtgtttaggagcaggctctcgctccaacgatatattcgtgtacacttccctgcagcggatgttcaaaagttctttgcttctttcagcaagagcataccctgcagagatggtcaaggttcaatttactctatatggtgctttactca

SEQ ID NO: 157672 - DNA, 2518 bp, Arabidopsis thaliana landsberg
atgcaatcaacaggggatacaaataacaggtaaataaaagtgcaatcagggggtgaatacaaataaatctaagaagaatagaagtcctaaggatggaatcattgataagggcaactctagggttcatcaggtgctaacaggtgaaaggtagataccctagacgatagattcaaaaaccgggtcaatccactctcgtgacagagaccctcataactctactacttcctaatctcaactctcgttgatgaaacatagtagagcatggtataagaaacaatctaccaaagtcaataagcagtctaacaaccaatctcttgggctaaagtctaaatatctaccacaaattgtaacgccccctaatcgctctatggccggacaaaccaaaggcaacccggaaacgctacgatgatagctaaccagacaacacaacttagggttcaaacagatttagacctttagccggattacccacataaaccatccctcacgaacgcggtttaggcttttcaacccttgccatgatcgtgaattgtgttagcctggacgatatgttatatcttttataacatataaattctcggacaaccaagtatccaaaacgtttcaacaatgggcccttgagcatacacattcaaatccaacaaaaatcaaaatcattaagttttgcaaaaagcaacaaactctgtacccgctttcctacgtcctaagcatgcctctaatggttcccactaaggtttcctgcaaaacaaaatcgaatcataagtaatctaagattacttagtgagcttggtctacctacaacagacattagttccccatcccataatcataacacaaaacacgcaatagacaataactacaaaaggcagcttaccgaagcatctagcaaaaacatgcaaatgcaattaagactccagttttattaagttctttttttaaacagggcccgatatgctgcgttcaaacacccccacaccaaaaacacaaactcccgggatctctcgctttacaaccatgataacactatattttactcattttaggcatgtatttatcatcatgtagcttagtgatcactcattgtatcatagcattttgcatcacatttagcttattttgcacacttaggcatttaggatcatcttgtatacatattgcatgttttggtatgttttcaggtgtagaaggagcttacaaggatttctactcgaccctctactctatcaaactaggagggaagtagcagagcattctactcgaccaattcactcgatccaggcagccacagaggaggcaacagaccctactcgacccccctactggatcctctactcgacccgtttgctcgatcaagggcgacctactctacatgacttgttgatcattcaaggcgtcttcggatcctcctgattccccactcaaccaaacctctaagcatacagataggagaggaagaagcatctactcgaccaattgatcactcggagcatggaggcaaaggcgtagactttgcagcaccctgtttactcgatccccaagatcgagcactcatccaaaccgcctcaactctcttgtcttcaaatgaatctagggttttcaacatcttagtataaatagataactttgggatttgcccaatggatctagcttttatctcttagtttttctttgtgttcttgaatcttcaaaacttaattactcttaatatattttgtttttgcacttagttccttgagtacagttgtttagcttgtttagatctacattttgatatgatttttgtaatttctgggtttgtgttcttgattatgttgcttgagtagtgattagggttcttgaggatgaattagattagggtaatatctaggtttatcatgtggttaagattaggttagatcccttctcgattaattatgcatcatgcttatttctttctgatcaattggaatttgcccttaggcattccagaatccaaagatggtctatggtatgcctgatctactaattctagagattagttcatctatccgagagatggccctttagagggctcttttggctttactctgttggtgtttagtgcctattgaattagattatgtcgacaaaacccgagtctggacctagcttagtttgagggtcaatgatacgagagtgctttgatttgttttaaaacattttctttagggtatttgtctttcgcctgtagccaccttatagatctcacagtttgcccttatccatgaatccgtccttaggacttctattcttctttaatttatttgtgtattttcctttaacttgttcatttatctgttattgcattttagtacttgaatatgttgccttcatggttctactcaaccctgtgatcgagtagggcactttagtttgtattttttattgtttgaaacttgagttaagactgttactagaaacccaccatcattgtattttggcttgaattagttgcttttgtacacatcttgaccacctagcaatcagaatgaaatggatt

SEQ ID NO: 157673 - DNA, 965 bp, Arabidopsis thaliana landsberg
  unsure (1)..(965): unsure at all n locations
ttcaggtttcggggtaagagtttcaaggctatttaatttttatgctaaaactcttttagagttgagtctttgaatacataaatttccccaatcaatattctttctgagttctttttttttgtttttgtttggacaagtatgatgtttttccatgggctatggaaagtgtcctggaatatataaagcagacctatggcaatcctcctgtctacattcttgagaatggtatgatcactgtctttctctatatattctgatctatgtctcttgttttttggataagacttctcatttcttttgccattgcaaacgaataggtacaccgatgaagccagatttggagctgcaacagaaggacacacgtaggattgagtacttacaagcttacattggtgctgcactcaaagccgttaggtaagtaaagtgtttcttactgcatcttctcttctctactcttgtctgtgtnataaataaacaaaagacattactacgtgtaggaatggatcagacacgagaggttacttcgtatggtcatttatggatttatacgagatagtaaagggatacgagtttagttttggattatactctgcgaatttcagtgattttcatcgtaagagaactcccaaactctctgctcattgttactctgcttttctcagtggcaacatcacttttcttggttctcaaggcatcatgcaattgcagagcaacttttcttcttcagcttcttcgtagtagtaatgttgcatttacttaattctcacgaatatgttctagcgaaaaacatcaggcctctgttttactgtgtttgaactgcttgcccttttaaagtctatacgaattttatttttcctaaaaacggcatgcttttcttaggcccatgtaatagtgggattttttttacactgtgacattaataatgagttccgtatttcgtttcagcacaccactcgctcatataa

SEQ ID NO: 157674 - DNA, 641 bp, Arabidopsis thaliana landsberg
atggtgtgttgcggactacgggttatatatgtagggccacgcttggaaaggcttaacagagtgcggcaacactatttgcgggggacttggaatcggagctcatcacctggccagcatgtctggtccgacaggagaacccattcttctcgcagtctttgtctttgtacaaggtaaattatatttatataccaattaagttttgcatgtatagggactaagacatgattctttgtttgcattcacatttgttttgcgtttacatattacaatataacatgttatatatgtaaaagttaccctttcaaagcctaaattgtttaatcactagctagtataagattgactctctttttttgttgttttttcagctgcgttgtcgacgtttgtgaggttcttcccgcgggtgaaggctagatacgattacagtctgctgatattcatactcacctttgcgttgatatcagtgtcggggttcagagaagagcaggttgtaaagctgacccataagagaatttccacagtgatcataggaggactaagttgcgtcattatctccatctttgtctgccctgtttgggccggccaagatcttcattcactcatagcctctaactttgagaaactctcatttttcttgttag

SEQ ID NO: 157675 - DNA, 589 bp, Arabidopsis thaliana landsberg
atggcaaaggctatcgtttccatcttcgttgtctttttcatcttcttcttagtcatttccggtaagcaaacttactctccgtttcttgacatatttgtttataacttaaaatttacccttatgttctggctacaaatctctttgaccatagcaaaatcatgatatgatcattctatcttttcttaattttgtttataacagatgtgccggagatagaagcgcaaggtaacgagtgcttgaaagaatacggaggtgatgttggtttcggcttttgtgcgcctcggatatttccgacgatttgttacacaagatgccgtgagaacaagggagctaaaggtggaagatgccgttggggacagggcagtaacgtcaaatgcttatgcgacttctgcgacgatactccacagtaaaatctaaagcaatcgctaatcaatgcactaaggctgccatagacgcaattattatacacgttgtctttacgtacattcacaagttttagtcatggtttgtgtaataaatgaatgtgaatggtctatccaagtgatgtaatgtgaaatcagaaataatgaaagtgtgacttttgctacta

SEQ ID NO: 157676 - DNA, 1019 bp, Arabidopsis thaliana landsberg
  unsure (1)..(1019): unsure at all n locations
gccaaaaaggttagccggtttatggctggtcattttgaccgacaacaaatgaatactgcttaaaaagatttgannnnnnnnnnnnnnnnnnnnnnnnatgttcccaatttccagaggccacttttaagaaagaatgtagggggaagaatgtctgcaggccgtaggaggagttttgataatagccaactgcaaattggtgacatatcaaattttgttgatggtccagcttccctgaacaaggcccttaacgacggactgaactcaagttctgattggtgtgccagagttgcagcttttaattttctccaaactctgctgcagcaaggcccaaaaggtgctcaagaagtaattcaaagttttgagaaagtaatgaaactatttctccggcatttggatgatcctcaccacaaggtcgcacaagcagcactgtcgacacttgcagatcttataccatcttgccgaaagccttttgagagctacatggaaagagtcctaccccatgtgttttcacgcctaattgaccctaaagaagtagttagacaaccttgctcctcaaccttggaaattgtcagcaaaacctacagtgtggattcccttttacctgcattgcttcgttcactggatgaacagagatcaccaaaggctaaattagctgtgattgaatttgccatcaactccttcaacaggtacgctggtaaccctgaaatttcgggtaatagtggcatcttaaagttgtggctggcaaagttgacgccattaacccgcgacaaaaataccaagttgaaagaagcttccattacttgcatcatatctgtttacaatcattatgattctgcgggactgctaaattacattcttagtttgtcggttgaggagcaaaactctctgagaagagccctcaaacaatatactccccgcatcgaggtggacctgttaaactatatgcagagtaaaaaggaaaaacagagaattaagtcatatgacccatctgatgccattgggacatcatctgaggaagg

SEQ ID NO: 157677 - DNA, 806 bp, Arabidopsis thaliana landsberg
atggctaaattgaaaaaacaagtcaagcgtacaaaggaaattttgagtgcaaacactgcggctccaatatctgtggaatctcttcatgatgatcgtgacttcaggtataactacaatatttgggtttctctatttccccagcacatcgaaaattggctgcaaaagtgttataatgatgtctcatgctctaaattgcatcatgattggtctaatttttgtgatgtgcgtgatattctaacctacttatcttttttcaggagcacaattacccgtgagaagtttgaggaactgtgtaaagatctgtgggagagatctcttacacctttaaaagatgtgctcaagcattcaggtttgaagattgatgatatatctgcagtggaactaataggaggagctactagagttcccaaactacaggtaggttttcatgctctcaaagccaatcaatttggcattctcatccaaaactgggggactttcacttttttttttcttttcaaatgaagctaagatataatttttgttttaattacagagcacaatccaggaatttattgggaaacaacagttagacaaacatctagacgctgatgaggctattgtcctcggctcagcactacatgctgctaacttgagcgatggaattaaattgaaacgtaggctaggtatagttgatggttccccctatggttttctggttgagttggaaggccctaatgttaagaaagatgagagcacaaagcagcaactcgtaccacggatgaaaaagctacccagcaaggtaccgcattacattcaaaatctgt

SEQ ID NO: 157678 - DNA, 1000 bp, Arabidopsis thaliana landsberg
tttcatttcaggctggaggagttgcaggtcctagatatcaagtttctgtatggatgcacgaaaccaacaattgcagtactttatcaggttagcatacatatttaaatggatatgctatggaaaacagataatcatatatatttatttctttcatttacgaacctagttctgtaagcaatattgttcaaaggaatctgttttctttcttaatacccgctctgttggtaagctggcagcaattgagcaaattagctctgctgtattttttaaataaattgtatcttggtttactttgctaatgcaatgtgctcaaggatgtttgctgggtgaactaattaatgcttgggtttacaggacaacaaagatgctcgtcatgtcaaaacatatgaagtttctctaaaggataagaactttgtcgaaggtccatggtcacagaacaatctcgacaatggtgctgacttattgatccctgtaccttcacctctatgtggcgtcctcatcattggggaagaaacaattgtctattgcagtgctagtgcattcaaagcaataccaataagacctgtaagttctttcaacgtaatctcacctgcttttgtaaacaagttgcttgagagttgagatttctgcgggtactcctttttttttgttttcttagtttgatatgcgaccttcatttttcgtatccagtccatcactaaagcatatggaagagttgatgttgatggctctagatatcttcttggtgaccatgctggaatgattcatctgcttgttataacgcacgagaaagaaaagtgagtgtacatgtgtgcttactcttacatccatccatattcgaaataattaaaagctctttagaacttatttactttgtatttgtgtctgaagggtcactggcctaaaaattgagcttttgggtgaaacatctattgcatcgactatatcgtaccttgacaatgccgttgtctttgtcggctcaagctatggtgattcacag

SEQ ID NO: 157679 - DNA, 431 bp, Arabidopsis thaliana landsberg
gatttagcttctaatatcttattattgctaccattttctcttgctcaggggtcagagagtgaggagctggcggctgcgtccagactggaagacgatctcagtttttaccaaactgcaagccctgatatcgcaaagctatttgaaattgaaacccaagtcaagcgtcctgccttagttttactgaacaaggaggaagagaaacttgcccgttttggtaagactcctcgaatacattaccttctttttttgtgctacttagatttcctctatgcctctctcatcaagcttctctttggcagatggaaacttcactaaaacggctatagcagagtttgtgtcagccaacaaagtcccattggtgatcaacttcacaagggaaggtgcatcactgattttcgagagctcagtgaaaaaccaagtaaaaaccattt

SEQ ID NO: 157680 - DNA, 742 bp, Arabidopsis thaliana landsberg
cattgatgcttactattaaggagaaagatctacactctgtgaaatccggtacatgtaacgctagttgcatcaggttttatctcgctaagcttttgagactttctggatatgatgcagctgtatgttcagctagatggcaaggtggtggcaaagttcctggtggtatgttttcgcttctaagaaccgtcttatacaagtgtttctggacatagaattctgagagaatgatatgttttgtttgtttgcaggagataatgagtatatagatatcatattgagtgatactgaagttggtcaagatgatcgtttgattgttgatattgatttcagaagtcattttgagatcgctagagctgtggattcttaccaacggataatggaatcacttcctgtggtttatgtaggaactgttgcaagattaaaccagttccttcaagtaatggttgatgcagcgaaattctccttaaagcagaattcaatgccgttacctccatggagatctttgaactacctgcgatccaaatggcattcacctcacaaaaggcatctcggtcctatcgatcaacaaggtcctggaatgttctcaccgggattacatggacagtgtgctgagaatttaaagaggcttcagtttgctctccaggttgaacaagaggccgagagattcatgaagaagaagagcggttttagccgcaggaacaaacccgagataatgagaattcaaggggctcgtgctccttaa

SEQ ID NO: 157681 - DNA, 1080 bp, Arabidopsis thaliana landsberg
atgaagctgttacaaagaccacagagataacccaaataaaagaaacggttggattcttggaatttgaagtgtctgagctgaagactcaactgtctgcctatgatcctgtggtagcatctctagcagaagatgtcagatcccttgagcaaaatgccttgtcgttgatgaaactccctgtgccagctggtagacgcagagaggtaaactgatagaactctctggcctgatctatcataaacttattcccgttttctctatttggcatcttacctcatctttctcattctcctggcacttgtacctaggcttccatttggtgaaacctgtgcgttttgcatatatgcctcatgaactaataacttccaatttccccagggtgtccaaaatgatgaacatcaagaagcagcagtctctcaagaacctgtaggacattgcagtaccaacctagacaatggaattgtgcttttgcaggacatgaaaacaagaatcaaaaccattaagcaagcagttgctgaggaaaaaaagaggcgtgggaagctgagaagacgaagctcttcacacagaagcaaagaccgcaagctgtttgaagagattgaacttgaggaccaattctcgggtgaaatcagacagcctagatcacctgcgatgactgagtcgaaaaatggttcattaatgaaagacattccccttgatcaagttgcagacacaacgtcctatggaagaagccggagaactagtcgtggttcgagtgaccaaatgcttgaattatgggaagaggctgctgaaccagaatccagcataaagtttctgatcaacaataaaaactcaaagaagcctttgattccccgtcttcatcgcagaagcaggaatccctctgttgaatcacagtctgagaaaatggttggagttgttgacaaactagagttatctagaagcactgaggacaatgcaaagattctggagagacttttgtctgattctcgaagattggcaagccttagaatcagcctaagagatctgaaaagcaagctggagataaacgagaagccaggcaagttcactaaccctgattttgctaga

SEQ ID NO: 157682 - DNA, 774 bp, Arabidopsis thaliana landsberg
gttaaaaggctggactttacatccaatctttaaaggtttttgctcaatgtcttctttaatattcttggcctaatagatgtatttttttttcccctctaacttcgtttccttttgctttgtgcagcattactcagagttacctgatatcaaacgtgtaattgtgaacacacatgctattgagccacaggtattacctctgaactaattgttggttgctaaacaactcgatgttcaagttgctgaatatccctctactcaaatttgcaggctcttgtcgagttttttggtactctttctagcgagtgggcaatggagtgcatgaaagatctcctgttggtcaacctgagaggcaaccttcagataatcgttcaggtatgtgctgtattgttgtaagatgtgaattttattgtttaatgtgacactgacgtgtccatgtctttgcaggcttgcaaggagtactgtgagcaacttggtgttgatgcatgcattaaactctttgagcaattcaagtcgtacgaagggctgtactttttcctaggttcatacttgagtatgaggtaattttatcaagaacctgctgtcattcctgtaaacaagcaccatgcagcaatttgtatttttatgacttacaatgtcttccctctgtgtgatagtgaggatcgtgagattcacttcaagtacatcgaagcagctgccaagactggtcaaataaaggaggttgagcgtgtgactagagagtctaacttttatgatgcggaaaagacgaagaactaa

SEQ ID NO: 157683 - DNA, 1472 bp, Arabidopsis thaliana landsberg
cagtattttgcaaattctatatctcgtcttctcccaccagtggatggtgcacatgctgcctcatgtgaagaaatgtcaactgccctgtccaaagctgaggcagctgcttataaaggacttcagcagtgcattgaaactgtgatggctgaggttagttgttttttgtgtacattacaaacagatccatgaggttcaaccctgaacaggtttagggtcatgcgtattattttttttcgactcattttaaggactctgatatggtctttttcaggttgataggctactttcatctgagcagaagtctaccgattatagatcacctgatgatggaattgcttctgaccaccgcccaacaaatgcctgcataaggtttgtctagataagactctaccttccgctaattggttgaaagcttcaccttttctatttttcagtttgataagctagaagtgcttatccgtagtaacttaagtaggtttttgaaccattttacaaaatatatattgatcacgtctaaacgctgtgctcttcttttgttttttcctctaaagaacttgttactttaatttctattcccactctcttgtttagggttgtggcttatctttctcgggtacttaagtctgctttcactgccttggaaggtcttaataagcaagccttcctgactgaactggtataatttctttctcaccaaagatttcgttaagccttttgttactattttatctgttcgaagtgcttattctccctggcctttgctttttttattgctttgtccaatcacggactagagaagaagaaaaaaacattctaagcttaagttcctgtgcgatattttcgacttttccatatactgctatcttttcgcctatctataacaattgtggtggcttcaaaataatagttaaaaagaataaatgataatctctgcatcatatgaatggtgctatatatcgagaaagatgaggacttgaataaagtattctccattatttcagggaaataggttagaaaaactgctactaacacactggcagaagttcactttcaatcccaggtatgattcagccctttgtatgttttctcttttccttactaaagtcacatctgcagaataaccttaaaatcagattcaggtcctaaataaacgaaacatagagaaccatgccaaaatttactatctctgagttttcactctgatctgacatgaatgcaatgtttgacgtagtcgcacctcttggtataaatgttttgtcggatcaaatcaaagtcttgaccacattaaataaaagatccattgcaaaattaggtctgagtgaataaaccttggttctgtttttatgattactaacacatgtgttgacagtggaggactgcggctgaagcgtgacttaaacgagtatgtaggatttgttaaaagcttcggtgctccatctgtggatgagaaatttgagcttctgggaatgtaa

SEQ ID NO: 157684 - DNA, 311 bp, Arabidopsis thaliana landsberg
ccatggaaagcaatggaccgaagtaatgaatggaaatgatttcaggtctgttggtttggagttgactcttgacgattttcagaaagttagcgatgcggttccatttctagcagatcttaaacccagtgggaagtatgttatggaggatatacataaggtaaggctttggcgaaatcgttttgcttattacttatctgtttttttattggtcagtttgtaagttttgttgtttaatctacagataggtggtacgccagctgttctccgctatttattagagctaggattgatggatggtgattgtatgacag

SEQ ID NO: 157685 - DNA, 343 bp, Arabidopsis thaliana landsberg
actttgcttcactggatgtggctgtgccgcacctggtgtcgcgtctgtactacttaccggtggaggatttacgggattgtctaatccaatagctgggagggctgacaggagttgaggatcaagaaaatcttccaccgatacatcggccaccggttctggttcataggatgtagaatcttccaattgagcttaaagagttttggcgatttcaaactcagcttcagcttcctgcattataccttccctccgaagcttcatggcttgacattagtgacttagtgactcttgctgcagcttaacacgtcacgacctgacattgcctttggagctgaacttgaacgac

SEQ ID NO: 157686 - DNA, 970 bp, Arabidopsis thaliana landsberg
tgttttatagaaatatctcatgtagccttttcattatcgttttgcagtctttccattactgcaagtacaggcgcgacgagaatcagctgtacatatttgcggatgactgcgtgccgaggtggctgacagcatcgcaccatgtggatttcgataccatggcaggtgcagataagtttgggaatgtgtattttgtgcggttgcctcaggatctgtcggaggagatagaagaagacccgactggcgggaagatcaagtgggagcaaggaaagctgaatggagcaccgaacaaagtggatgagatagtacagttccatgttggggacgttgtgacgtgcttgcagaaagcttcgatgatcccaggtggatcggaatcgataatgtatggaacagtgatgggtagcataggggcattacatgctttcacatcccgtgatgatgtggatttcttctctcatctggagatgcacatgaggcaggagtatcctcctctctgcgggagagaccacatggcttacagatctgcatattttccggtcaaggtaataaaccaaaacccatttgcttttcctccaaatcaaaagaagtcccttgattttgaatttgacactttttgcatcttgtaacaggacgtgatagatggagatctgtgtgagcagttcccgacactcccaatggacttgcagaggaaaatagcagacgagctggatagaacacctgcggagattctgaagaagctcgaagacgcaaggaacaagatcatttgataacacacgaaaagagagagagagagtcattgttttgttgaaggacaaagtagagagtagagaagaaagaggttataatagattttgtaaagctcttcaatggtttgttaaacaaaaccccgctcttgtgaaaactgatgaattaattgcaagtttacttttgaatctacaactttgtttagagtatatttagttaggctttgaag

SEQ ID NO: 157687 - DNA, 421 bp, Arabidopsis thaliana landsberg
agaaaacctagaaggccaaaactagaggagaaacccatataacacacaccgacatattcatatagatggtgggctcggaacatcatcaccatcatcaacaacatcatcatcaaaaccatcagcagcagcaacaaaggagcaaagaagctttagggatggtggctctcacgacgccctgagaactgtttgtctcaacaccgactggacttactctgtcttctggtccatccgtccccgtccgtacgtatctctctcctcagctcctctcttttttttttattgacatgatctatctatctctcctcaaaacgatgtcttttttgttcttcaggagagttcgaggcggtggcaacggctgcaaagttggcgacgacaatggaagcttgtaagttacacttcttacaaaaaaaaattaggttac

SEQ ID NO: 157688 - DNA, 1490 bp, Arabidopsis thaliana landsberg
aacttaccaaatccgcgagagagctgcttcagcgccttctcaagatttataatttcaattaccctgaggtagtttaacctcaaaaagcttattactcgtaggtatagtaacaagtaacaacgttgtaaataaattattcttcatagactttgaacagaatgttcatcatcaatgctggtcctggattccggctcttgtgggctccaattaaaaagttcctcgatccaaaaacgacatcaaagattcatgttcttgggaacaaataccaacccaaattgctcgaagccatagacgctaggtaagattctagtccttaactcaatgatatatcttgctttgtattataactaattttatacaaaaatcatcgtaatctcgttttttgttttagcgagttgccatatttctttggcggcctttgtacttgtgcagacaaaggtggctgtttgcgatctgacaaaggcccatggaatgatcctgagcttcttaaggtcaactttggagcttaaagcacctttttaatttaaaagtttttctgagccacttaccaaatataagtgtgttctatggaaagcagatagctaggaaccctgaagccagattctcgacaatttcagaggaagactacttgcttgtagaagaaggaacatcaatgtcgatggtctttgaagtaagctaagattatgtttacaccatgatatctaatcaagtaccaaccgcattcttttatatgcattaaatttgtagcctctagagagaaacaagatgaaaaccatcgaagagaatgtgagtgagaagcacattgacgcggttgataagttcatggctctgtctttgccaccaaaacctcatttaaaaaccctaagaaaaggtataagaatctactcacactaattctcaagtctgcagatatatgtattgctctaaaattccaatctgtttacgcctcctacattgttacgtagggaaagagccacaaaagaaagatgatagctttcttgtgggaggggttattgcttttgtgatgggaattgttgcaatgctccggctatctaaagccgttccaaggaagcttactgatgttgcattattgaccaactcagtttactacgaggaagcaaaaatgtctaagccaaaccaagatgaagtttcagcaccaccagtctctagctctgagtacgtaattatggtcaaacgtatggccgagcttgaagaaaagtacaagtcccttgactcaaaatcagcagatgaagctttagagaaagatgataaacttcaggctgcgctgaaccgggttcaagtgcttgagcatgagttatctgagaccaaaaaggtaaggtctatattacctcaatcatcaaatcactcgaatatgtagtaatgattggtttggcttcttcttttttccggcttaggctttggatgaaacgatggttaaccaacagggtattcttgcatatattgagaagaaaaataagaagaagagaatg

SEQ ID NO: 157689 - DNA, 1497 bp, Arabidopsis thaliana landsberg
aacactagaaccaatttactcggtctggttcgattagggacagtagagaatcgtacacgtcgatctctccagagccaaaacctctcctgatcccgtaatgaagaaaacgaagacgatggtggcttccatctccacccttattagacggacctatccttcaactttccggtgtaattcactcgcgacgattcaatcacaaacccaattgcctcgcgaatctctgcaacatcattcttcagctgagggacgactccgattctccgggagagttttctgctcggaatctggcgccggatgctggaactgtggcgagaaagctgcctttttgttctgtaactcatgccgtagcattcaacctgttgatgactccgtcgactattttcagatttttggcctgtaagtgtgtaacgacttgattagaatctagggtttgaggagaactatgatagtaatgtggattcctgttttgttgggctgaggagaaacgatagaaagattgaaactttaagttggatatcattcaaaagatgagacctttgaattgagttttgaattttcaataacttgttgtgtctatatagggagaagaagtatgagatagatcctggaagccttgaaggcaagtacaaagactggcaaaagaagctacatcctgatttagttcataacaaatccaaggtctctttgtttctacattctaatttatgttattactcttcttttcttaaaaattagctcttacgttttgacattattgacagaaagaaagagattacgcagccgagcagtctgcaaaggtgactgaagcatgccggacattgacaaagcggctgtcgagagcaatgtatatcgtaagctcttcttcacttttgtcattacgtttttgaggattctcaaaagctgcaagttttcctgaaactatttgattatgtagatgaagctgaatggcgtaaatgtcaatgaagaagaaacaataacagacccaacattgttaatggaggtaagtggatctacttgccaaagattagtcttgatgccatatattagtttgtgcgacttgttctgctactgtagaggtgcaaatacatgtctgccataaataaacacattcacttacttttattcattgaaaatggtgtcagattatggaactcagagaggccatatcagaagcagatgattcaacatcgttaaaccagatccgatcccaggtaccttgaaaattcctgattgagctagcttccttcaaatggtctttctttccgttagctttccaaacaccttaaaatctgtagctctgggcatcggttgaatatgccaaactgatctaaccaatgcgattttgttgtttttctcaaggtacaagagaaactaaagcaatggtctgactctttcgtcgaagcgtttgaaagccagaagtttgatgatgctgtaaaatgtatacagagaatgacttattacgagcgagcctgcgaagaaattttgaagaagctatga

SEQ ID NO: 157690 - DNA, 757 bp, Arabidopsis thaliana landsberg
  unsure (1)..(757): unsure at all n locations
aaaacatgttgccataactcaacgaaccatcaaagacatcaagagacggnctctttctctctctgtctctagtctctactctcgaacgggctaagctcagatcattacaagattcgcttttgtgctgaacttggtcccattcattagttatttgcttaaagacaacatttttatatgcttccgttagctaaatccatcactcccccctttaatcatttccctgctctgttggccccagaaacagcttgctaggattcactacgacgtcgtttcgggtttttctccagctgtggataatggctattctctggaattgattctattcactattttgttactggggattttctcagcaaaccaaaacaggttagttttggcctgttatgtggatctctgtttctttggattttggtaaacttctgtatcttagattcgcaaagttaagaaaaagttagataaatttcttgcttttaggcatcttaggatgatgacaatgtgagctttttgctaggatttattttttctggggatttctgagattgnnnnnnnnnnnnnnnnnnttcaaagaggcgcatgagacttggcaggttagtctttcttttacccttatgtaaaatcagatcacctttttgtgggtctcttttgattntctgaaagttgccaactttttggggtttcttttaactntttcaattttttacatttaaagcgatttaggaatcaccttttggagaatcctnctgtttaagcttactac

SEQ ID NO: 157691 - DNA, 467 bp, Arabidopsis thaliana landsberg
taggaatgaaactagtctgcatgagcctaccgctggggaagaagaggacaatgatcaaagctacatcaccagggaaagtagacaatctgaaacagacgtttacatcagcgacaatggtccttcaacttcattgccagaagatccaaacctttcatcagataatgaactagaggatgacgagttagcagattggggtgatgactctgcagctggtggtgcctccctcactcaaagcccgcttagtagaaggaaactgaagatggtacttgataaggacgatgaggatgattgaagataacaagacttatatgattatatccatatctttgttatataaatgcaaggtatctcacaataataaaaaaatccagaaattcaactttcatgttacatttagtaatatactgtaattcaatggaaaatagttggtgttttagtctttgttttgtcatattgttgctgatgtt

SEQ ID NO: 157692 - DNA, 518 bp, Arabidopsis thaliana landsberg
ctacagaacgaagagtccgggaatcgtatgcagttactgtcgcatcatttaagcctaccaaagtcatcatcgacagcctcggacatggtttcagtggataagtatcttcagctacaagattctgttccttgtaaaatcagagccaaacgtggttgcgctacacatcctcgaagcatcgctgaacgggtaacttcacctagttaaggccatctttacatatatcaatggaagtccatttgaagcagaatctagtttgttttcagaaagcctttcctaagaaatcttgtcaattgtgtcaggtaagaagaacgcggataagcgagcgaatgaggaagttacaagagcttgttcctaacatggacaaggtacagtattcaggaacttccttgtaatgacttttgatcataaacaaattgttaaatgatgttgttttctttatgttttaacagcaaaccaacacttcggatatgttggataaaactgtggattacatcaaagatttacaaagacagtataag

SEQ ID NO: 157693 - DNA, 235 bp, Arabidopsis thaliana landsberg
gtttcgttttcttgtgggtttaatgtgatctgaatcctattttcttccaacggtctctgttctaaattctcagatctagatttgtgaagtctaaatcctttgctctcccagttttgctgcctgtttgtctccttcgtctgcagcttcagttctggccgttccaactatggtagaggcaggttcatttcgatccttcatcgcctcagatgcagatctctctccattgaagatctag

SEQ ID NO: 157694 - DNA, 367 bp, Arabidopsis thaliana landsberg
gagttcttcattgccgatggggagggacttcctcgttcactagttgagcaagaagcgaaacaggcgaaagagatcctcgacttgtactctctcgaggtaaatatattttgctcacttgcaaattgcaaacttagttcctttcttagaaattatgagataccaaagtgttacggattatgtccgttgtggcagagcgatatgctaattcagatgctaatgactgcgagcgagctcatcaacatgggggtgagttcagagcagcggcgcttggaggatgcacaaactcttgttagagttctttgccacaagaaagatcgtaacgcctccaaattcttaaagcgccagtacgagcttcctatgtcaacag

SEQ ID NO: 157695 - DNA, 581 bp, Arabidopsis thaliana landsberg
tcttctcagttactcttttcactcaatcaccatatctatggtttcgctactcagcctttttgtcttttttattcaggtttctgacagatttacttaacaatagaagcaattaaagaattaaatcgatttgggttttgatctactctcttcaaattcatctgggctctcgaaatcttctagcttaatcccgattctgaattgccagttctgataataaaaatggtgtctttattgttctctgttcttcaggattgctcaaaacgctcgccaggtttccagcagaatgagctggagcaggaactatgcagcgaaagagattaagtttggtgttgaagctcgagctttgatgcttaagggtgttgaagatcttgctgatgctgttaaagtcaccatgggtcccaaggtactctttttcttctacacattttgatttgatttggacatgatttggccagaggttccttccttagcatgtgatttgggtgaccggttgattctgtatcgaatttggtctaagactttctgctttatgtgattctaattttgaagggacgtaatgttgtgattgagcaaagttgggg

SEQ ID NO: 157696 - DNA, 3243 bp, Arabidopsis thaliana landsberg
cggcttcgcgatctaagctatggaggaacgaatgagaaaaaacatagaatccaacaataaaatgtgagaaaagagacagagaaagaaaggaaaaaaaagtgaaatttggaagaaagaagaagagagaaatgtcggtagcacacgcagatgacgccgacgattacagcagaccaacgggagagagttaccacgccgagaaagcattaccaagcggtgatttctacacaggacaatggcgagacaatctccctcacggtcatggcaaatacctttggaccgatggttgtatgtatgtcggagattggcaccgaggcaaaaccatgggcaaaggtcgttttagttggcctagtggtgccacctacgaaggcgatttcaaaaacggctacatggacggcaaaggtataattaacaaaaattccccaaaatgttgcatctgattttgctaaagttttgatttttattttgttttgactcaggtacttacattgattcctctggagatttatatagaggatcatgggtaatgaatctgagacatgggcaaggaacgaaaagttacgtcaacggagattgctacgatggagaatggagaagaggtttacaagatggacatgggaggtatcaatggaagaacgagaatcattacattggacaatggaagaatggtttgatgaatggtaacgggacgatgatatggagcaacggaaccgttacgatgggtcttgggaagacggagctcctaaaggcaatggaactttccgatggtcggatgggagtttctacgttggagtttggagtaaagatcctaaagaacagaacgggacttattacccttcgacttcttccgggaattttgattggcaaccacaacaagtgttttatgttgatttgagtgaatgtgtggtttgtacttgtcagagaatcccggttttgccgtctcagaagatgccggtttggtacggtgcttctgagcagagtagtagtgggaacaggacgaagaacagtgagaggccgaggaggagatctgttgatggaagagtaagtaatggtgaaatggaattgaggagtaatggttctggttatcttcaggtagatgataatgctgagagtactagatcatcactagggcctttgagaatacaacctgctaagaaacaaggagcgactatctctaaaggtcataataattatgaactcatgcttaacttgcagcttggaattaggtaaccgaaactctcagtgtgttatcgatttgtgtttgcttgttttgctctgtttgaatgttgagtgttgtttttgttgggaagacattctgttggaagaccagcaccagctacttctcttgatttgaaggcttcagcttttgatccaaaggagaaactttggacgaagtttccatctgaagggtctaaatacactcctccacaccagtcttgtgagtttaaatggaaggattattgtcctgtggttttcaggttcgaaactccgtacttttgatttcttctcttgtggtattaagaaaaccgatgaaaatgttgtgtttctcgtgtaggactctgcggaaactatttagtgtggacgcagcagattatatgttatcgatttgtgggaatgatgctcttagggagctatcatctccagggaaaagtggaagctttttctacttgaccaacgatgaccgctacatgatcaagactatgaagaaggcagaaaccaaagtaagagctgaattttaactgcaaaattctgcttattaagattcactcatctgttttgtttttcccttgaaaggttcttataaggatgcttccggcttactacaatcatgtcagggcgtgtgaaaacactctagttaccaagttcttcggtcttcattgcgtgaaattaactggcactgcacagaaaaaggtcaatgccttttttgtattcatgtctctgcattgttgtgattagcattttcaattttggatgtactgatgatagaatacttgcgcctgcaggttcgatttgtgataatgggtaatcttttctgtactggtcactccatccataggcggtttgacctcaaaggatcctctcatggccgtcttactactaaaccagagtccgaaatcgatccaaacacgacgcttaaagatcttgatctaaattttgcattccgattgcaaaagaactggttccaagaattctgcaggtgaatgattcactacttgtaataaaactctttgttatatatctcttttcacttctttcattagtaaacccaaattcgagtgtttggtttttaacaggcaagtggacagagactgtgaattccttgaacaagagaggattatggattatagtctcttggttggtcttcactttcgagaagctgctatcaaggactctgccactcctacttccggcgctcgaacccctaccggtaaaatcttgtcaaatctttaactcagttttcaaaacttccaacttaaatcttgatcgaagcaacttcatcatctacaagcaggaaattcagaaactcgtctctcccgagcagaaatggaccggtttcttctcgatgccagcaagtaaagaaccaaaaattcaatgtttatatcgaaaactgtaaggaatgttttataacacaagtgtggttctttgatgatttttgcaggctagcatcaataaaattgggtataaacatgcctgcaagagttgaaagaacagcgagaagaagtgactgtgagaatcagcttgttggggatccaactggtgaattttacgatgtgatagtgtatttcggtattatagacattctccaaggctacgacataagcaagaagcttgaacatgcctacaatccaatgcagtatgatccgacatcgatctcagccgttgatccgaagcaatactcacgacgattcagggatttcatcttcagggtcttcgttgaagacgcttgagagaacaatcatctaacttgcacgccaaggcccaacaaagttgaggtttttctttttgttagaattttttccttctatatagaaatatctgtaaatttattatgttatttaaccagttcaccaaagtagagaaaaattgattcttttgtaactaaagttcaatactctgcacctttttgttgttgttgttgttgttattctttgtacttcgtttcttcaaacgtgaaagaaagtatgtgtacagatacggtgacttgtatttattattcactactttcatccaatcttcatattttac

SEQ ID NO: 157697 - DNA, 275 bp, Arabidopsis thaliana landsberg
ttgctcaggatatcgatatgaccagaggaaaacgactatacctgaatgaagaacgttatgctgctttaacttacttggtaaatgtttgtctcaacaatcaaaagaagaaacttttgtttgtatggtaaaatatataattgttctgctttgtgcttttcaggttggttctcatggacttgatcgcagttcaaaagttctcggccaaaccacaattggagccgtcttacattaaacgatctgcgccatatttctcagacattgatctctatgagatg

SEQ ID NO: 157698 - DNA, 4783 bp, Arabidopsis thaliana landsberg
atggcgggaaacttcaataatggcggtggtggcggtttctatcgagattggatgtacaagagatttgatgaagtaacgggaaatttgtcaaccgaatacgttgcaagagtagaggagttcatgacattcgctaatagtcagcctatagtacagagtagtcgaggtaaatttcattgtccttgtagtgtatgcaagaatgaaaaacacatcatctcgggtagaagagttagtagtcatttgtttagtcaaggatttatgcctgattattatgtttggtataagcatggagaagatttcaacatgaatgtagaaccgagtaattatgttgatagtacgtatctaagagagaattataaaagtgtgggtaatgttgtagaagatccatatgtggatatgatgaacgatgcatttcgttataacgtggggtttgatgataactatcatcaagatggtacttatcagaatgtggaggatcaggtacgtaaccattctaagaaattctacgacttgttagaaggtgcccaaaatcctttgtacgatggttgttgtgaaggccaatcacaattatagttagcagcttgagtcatgcagaacaaggcggatcataatatgagtgaaagatgtgtggattcggtatgtcaaatgttgtcagattttttactagaaggaaaccaagctactgattcgcattacaagacagaaaaattgatgcgcagtttaggccttccttattatacaatcgatgtttgtattaacaattgtatgcttttctagaaagaagacgaaaaggaagatcaatgtcggttttgtagtgctcaaagatggaagcctatggatgactactgtcgaagaaccaaagtgccatatagtcgtatgtggtatctacctattggtgaccgattgaagagaatgtatttgagccacaagacagcagctgtaatgcgttggcatgccgagcaccaatcaaaagaagaagaaatgaatcatccttcagatgcggcggagtggagatattatcaagagctacatcccatgtttgccgaagaaccccgtaacgtttatctcggattatgtaccgatggattcaatccatttggcatgtcgcgaaatcattttttgtggcatgtgatcctgactctatataatttaccccctggtatgtgcatgaatacaaagtacttatttcttacaattctaaattatgggccaaatcatcctcgagctagtcttgatgtcttcctccaaccccttattgaggagctaaaagagtggtgtgataacactgtattttactcattttaggcatgtatttatcatcatttcgcttagtgatcactcattgtttcatatcattttgcatcacatttagcttattttgcacacttaggcatttaggatcatcttgcatacatattgtatgttttggtgtgttttcaggtgcagaaggagcttacaaggattctacttggccctctactctatccaaccagtagggaagcagcagaggattctactcgaccagttaactcaatccaggcagccacagaggaggcagcaattcactcgacccacttactcgatcaaggcagcctcagaagaagcagcagatcgatctactcgcccctcctactcgatcctctactcgacccacttacttgacctaaggcgacctactctacaagacttgttgatctatcaaagcgtcttcggatcctcctcattccccactcaaccagacatttgagcatacggataggagaggaagaagcatctactcgatcaaattgatcactcagagcatagacacaaaggcgccgactttgcagcaccctcattactcgatccccaagatcgagcatttgcccaaaccgcctcaagtctctagtcctctagtgaatctagggttttcaacattttagtataaatagatcactttggggtttgtccttaggatccagcttttatcctttagtttttctttgtgtttatgaatcttcaaaacttaattactcttaatctatttcatttttgcatttagttgtttaagtaaagttgtttagcttgtttagatctacattttgatatgatttcagtaatttatgggttcgtgtttttgagaatgttgcttgagtagtgattagggttcttaatgatggattagattagggcaatctctaggttagccaggtggttaagattaggttaaaaccctcctggattcgcttggcccctatgcgggtttcgctggctaatgtcgagattcgatcatagacgttcagcgtccaaaagacgttcaaatggatgtctgatctacgaattccagagatttgtagacttgaccaagacattggctagtccgcttatttactttggtagattgttgcttaaacccttctctgctatgtttcatcaacgagaggtgagattagaaagtggtagagttatgagggtctctgtcatgacagtggattgacccgatttttgaatctatcgtctagggtatctacctttcacctgttagcctcctgatgaaccctagagttgcccttatcaatgaatccatccttaggacttctattcttcttagatttatttgtattcaccccttgattgcacttttatttaccttttatttgtatcccctgttgattgcattttagttctgactgttggttctactcgacccaatgatcgagtagggcttttaaaagttctttttttgttgtttgaatcctcacctaggattgttactagaaacccaccatcactataatctggcttgacttagtagcttctgtacacatcttgactggattgacaccccctatacatgcatcgacatcttagtgtttaaggagaattgaactgaacctcacattcagcacacaagtaggtctaaaaacctacttatcaatttggcatcatttccaattcattgttgcattgttacattcaagatatttgaaaaagttaagatcaagttcttttacatttatcaagttactaactcatattttcgtctgcttgtttttgtggtataggtactaatctttgtgcatgcaaactcgatccaaaggttctgcacacctactaccttcagagacagaattgatagaatagctcgtgagttacaagaaatcaaagcaaaggcagcctgtgatcagcaaagaccagctgctatggatcaagagaacagaccagttgatgctcaagacccacctaatgttgatcaaccaagaaatattagtgctggtgatgccccaaggaatcatcaccaaagacaagggatactgcctccaccagttcagaacaacaattttgagatcaagagtggtctcatctcaatgatacaaggaaacaagtttcatggtctacctatggaagatcccctagaccatcttgatagctttgataggctctctggccttaccaagatcaatggtgtcactgaagatatgtttaagctcagactatttcccttctctttgggagacaaggcatacaactgggagaagactttgcccccagacttcatcacctcctgggatgattgtacgaaagcttttcttgccaagttcttctttaatgctcgcacatctaaattgaggaacgagatctcaggcttcacacagaaaaacaatgaaactttctgtgaagcttgagagaggattaaaagctacaccactcagtgtccccatcacagtttcaagaaagcttcattattgagcatagtctaaagaggagctttaccaaagatcagaatactactcgacactgcctcaaatggaaacttcctgaacaaggatgtagcagaaggatgtgagttggtcaaaaatctagcacaatctgatggatgctacaatgaagactatgatcgctcaatgagaggaactggaggaactgaggataaatagagcaaagatatcaaggctctggatgaaaagctagacaagctgttgttggctcaacaaaagcagatacactacatcactgatgaagagcacttccaaatgcaagaagggaaaatgatcaaactgaagagctagctgtgttacattcagaacaaaggagggttcaacaagggctacaacaactacaagcccaacccaaacctctcctacagaagcactaatgtagctaacccccaagatcaagtgtatccaccacaacataatcagtctaagccttttgttcaacacaaccaaggttatgtccctaaacaacagtttaatggaggctactgataagtgtgtattttgcatgttttgagcatccatttgtcatcactttagcatcatatcatcactgttttatactatttctcatcatttgtcatcactttgcatgtttaagatagttttgcatgcatgttgcatatttgtgttgttttcaggtgatacggagctgttgacgagctaattagaagaagcggaccttatcataccaaaccactcgacccccaggtcgagtagacgcttcacaacctcaacagaccactcgaccctctggtcgagtagaggccttcatcattccaccacctcaccgccactcgatcacatcattcgaccccgaggtcgagtgtcttcacctccaccacctgaccatcactcgatcacgtcactttacctggaagtcgagtatctccatcaccaccactcgactacatactagatgtcgagcttcagagtcttctccattccgcactcaaccagacactcgagcacaaggaagaaaagaagattccagcttatcactcgacctctcacgcgaccaccttggttga

SEQ ID NO: 157699 - DNA, 2491 bp, Arabidopsis thaliana landsberg
caaaaactcatcctccaaattttatacctcttccctcacaatctccaacaatggctgacgataagaagaagcggaacaagaagaagaagcgtagtactggtaacaagaggaagatgaccactgagcaatcagaagcctttaagtcaatcaccgattggctcatcttaggttcttctccatctctctcctcttctctgatgactttgccgtcaacatcaattctggttctctaagatgtggagagaaagttgtgtttgagcttcattctcattcaaatcgcagcgatgggtttctatcaccttcaaaggtcgtggagagggcttataacaatggggttagtttcaaattttatggtttgtgaatcaggagaagatctgaactgggttttgatttgctggtgaattatcttaagattagctattgctctgattagattgtgcatcacaacggtaacgccaattcgatgatgtttcgccacttaacactaagttcacttggtagagtttaactataaagattatagcgtggtacctctgttttagtgggtcaaagttcactgctttagtatagtttaaccataaagtttatatctttgtacctctgttttagtgggtcagagttcactgctttaggtagagttttaccataaagattatagctttgtacctctgttttagtaggtcgtcaaagttcactgctttaggtagagtataaccattgaggttatagatttggttgtttgtgtgattgtttcgtctgtaccattattaggagtagttcgtaggactgagagaaaggtttatcttttccatcaatttcgcttttgatatcacaatccggcatgggtttacagtggagctgttgatggcatgatgatatcagggatttgattgcttctcaatgtgatcaaagcaggtgaaagttctttctttaacggatcatgatactatggctggtgtcccggaagcagtggaagcaggacgtagattcggtatcaagatcattccgggtattgagatcagcacattattcggtttaaggtatcatctttatatttgttgtgattgcttgattcaaaatattcttacttgtttgtaatactttaactcagtcatgaatttctttgccgaaatccagagactccgggtctgaggagccagtgcatatacttgcgtattatggcacttccggtccagcattatatgatgagttggaagatttcttggtgaagataagagatgggcgtttcgttcgtgggagagaaatggtattgaaattgaataagctaaagatacctttaaaatgggaacatgttaccaggattgcaggcaaggatgttgccccgggtaggatgcatgtagcccgagcgcttcttgaagcaggctacgtggagaatttgagacaagctttcactaaatatttacatgatggtggacctgcttatgctacgtaagttctagttcttcactaggttacctgatttttttgaaccttgcgggatttaagcgtttatgattatcttatgctagtctagtgcttaccttaggtgggttgtagtggactttacctctgttgacagctcatcaactatattagagaaactagagagtagagatctaacatgctaaaagaaagtttagggaaaatgagtttggatattgtaggattggttttgcatattgctttgggcagtggttgatagttagagacttctattgctaatcagttttcttatttggtgtagttcgttggtacttgtttaaaacctgtcagtatcacactgacttttttctatgtgaatggttgcataaccttattgcagagggactgagcctatggccgaggaagcagtaaaacttatatgcaaaaccggtggtgtagctgtgcttgcacatccgtgggcgttgaagaatcatgtcggtattattaggagattgaaggatgctggacttcatggggtcgaggtttataggagcgacggcaagttagaaggtctctcactctctccatccctggttccctctctatcagtctatctatctatttgagttcactgaattttaatgttgattgaacagtgtttagcgagttggctgatacatacaatctgctaaagctaggaggatcagattatcatggaaaaggcggacgcaatgaatcagaattggggagtgtaaaccttcccgtgacggcattgcaggacttcttgaacgttggacgtcctatatggtgtgaggccattaaagcaaccatgagagcattccttgaccaaccatcagattcaaacctctccaatatcttaaggttcgataaggcaaggattctgaaaggaaattcagcttggtcctgtggtaaggagttgatggaccgatgtttagcgatttggttgaccagtgatgagagaaacagcaatgtctttgaggctctcagattgaagaactcttttgaaccaatcatgtcaaacggaacatgtgtcacagttggtccttaa

SEQ ID NO: 157700 - DNA, 437 bp, Arabidopsis thaliana landsberg
  unsure (1)..(437): unsure at all n locations
agggagaaagaactggcctctgtgaagatcaatcctgcagatgttgagtttattgtaaacgaacttgaggtaagcatctttttattagcttcttctatgcatgtgttcacaaagttctgaagtttgtcaccattgtaaatgagcagatagaaaagaatgtggcggaaagaactctaagggagcacaaaggtgatgcggttgctgcgactaggcaattgctttcacgatatcctgtatgatggagcaggaccattctttacttccaaggttttttgtatgtttgagaggttgagagcaagtctcctaatatttaaccgagttaaaattgtctannnnnnnnnnnnnnnnnnnnnnnnnnnnnnnnnncagttacaatcgattctggggtggtgttttgtggttctatctgaagtttaaagttcaataatattatcaag

SEQ ID NO: 157701 - DNA, 454 bp, Arabidopsis thaliana landsberg
ttgcagacatttagtttgttatgccattttaatttgaagaaaaaggtcatagagattctaatgactccatggaatatcatagaccagcctagattctcttaccgcggccttttaatcggtaaaccattattcatttcaacttcttctctaatcacttaataacacatcacttctgatcgactgtttttgttactacacagatacatcccgacattatttgccacttcccgttataaagaacgtgattgattccatgacatatgcaaaacttgtaagttcttaagatgattcaatttggttcggtttataaatcccatcttagaaatgaccaagattgatatactttggttgggtgattgcagaatgtggcacattggcacattgtggatacacaatcattttctttagagataccttcttatccaaagctatggaacggcgcttactctttctc

SEQ ID NO: 157702 - DNA, 390 bp, Arabidopsis thaliana landsberg
cgctctcgctctcgttttctttgatgaacccttttacttcattcttactcttgataaatccaaattcccgagaaacccatttcatttccttcttctgtttctagaaagacctcttcttttcgataaaccgagatccacgaaacccgcatttcctctcgctaatctattctaaatttcgatacttttttttttttttttatcgggttgaatctcgagaattccgaagattcagagtctccatagtcgaaggtgtgtcacgactagagatggggttccgtttgatcaaactggcgctttctctgctttcatttatgagaggcccattgatctaataccgagttcgtaaactatgatagaggatgtgatggtgttatcatatgtttgattgac

SEQ ID NO: 157703 - DNA, 279 bp, Arabidopsis thaliana landsberg
gtcgctcaccgatgatcaaaaagtcactgccggaactaaatttaccgagcttggagctgattctctcgacacggtaaatatcatctcattgtattgtatctcagagctcattggacatcatcatcaacaaattctgctttctttttgcaggttgagatagtgatgggtttggaggaagagttcgggataacaatggcggaagagagagcaaaggagattgcaacagtccaacaggctgctgaactcattgaagaactcgtccaagagaagactgcttag

SEQ ID NO: 157704 - DNA, 811 bp, Arabidopsis thaliana landsberg
gttgctagacatttcaccagaggaacctttgaggttaaaccgttcatggatgagaagacagtaaacgaaagacagcatcaagttgccatttcactgctcaagaaagctgacgccatagcagactcctccggcaagaagaagctcactctaattccaattaagaaggagaagaccagtggtaaacaaaggcgatgagactatttttctttcttggcatcacttttgttagttgtatcaaataatactgtaccgaatcaatttttgtgtatcaatatcatcttcttgccaagattttgcattccaaagaaatagaaccaaactaggacatatattagtctaaaagtcactgagacaaaacaacagtaatggaaaatacaaagctattctacaatacaaaactggaaacaagtggtacaagacgattcaaacaacaaataaatgaggaatatgacagagatcaggaagttgcagcattgcaggtcccaactccatctttacaatcgtttgtaagatcgttgaatgtttcaatctgcttcttccctctcaagaatacttctgtgtcaacagatgctctcatgtaaccatcaaattcgaccgggttgcctccattaagcttagtagtctctgaataccactcactgctctcatcccaaagatctttgttgtcgcgaaggaaatgagtggcgtacttatctttcaaagggctgaagaaggataattctccttcattcgttgcgatgtagagatgccttacttcttcaactatgacctgcaaggacgacaagagagcgctgggggaagaatccgcttc

SEQ ID NO: 157705 - DNA, 1081 bp, Arabidopsis thaliana landsberg
ggtttaccttcgtcaaggagcttacacttgatattcaaaatgtcatagccccaccaaaggaaaaatcatcagcgtggagaaaagaagttgatgtctcttcaaaagaaggtgaagatgtttcattctcagatgctgactctaaaacggggaaaaagcaaagcagtggtgaagaagattctgagcagtcagagggtaaaacatccgatgttgatgccagagataaaaacggatctctggatgactctaaagttagaaagggcattgaagctgatagttcacctcgaacgaaagatacgaggaggtatgttttttgtgctagacctaatgtgttttggattgcatccttcttagctgttttgaattcatgtgtttccgtgaaaagtactgcaaatagaggaaaaacaggttcttttctccagagaagaatatatctcggttatttacattgtctatgttaattttccagtgaaaatggccatgatgatggtgaatctactgcttctgctggcaaaactgtaaattatgactctcacgacgagacagattcagtttcaagcgtcaaccctgacaacggcaaggtaaaccattttgaacaccccgaagttttgggtttgttgcgtttgataatatatatatatttctttaacctttgtatttcgacatgaaagaatcgttaatttttacgtaactattttttgttatgtttttaccaggacaaggatcatgggaagtatgacagtggttttggatttggatttgggtttgatgacttcagtattaagcctataaaaactggttcgaccatttcaaatgacttcctccctcctaagttatctatatttgctgattccgtcccaagcccaccggcaaatgcaagcgacgtttcccctacaaaaccttctttgtttgctgattcagttccgagcactccagcgacgaacaatgcctcttacccaggccagaaatcattttttgatgactcggtcccgagcactcctgcttatccaggcaacttgtttgctgagaagaaatccttctttgacgactctgtcccgagcacccctgcttatccaggcaactt

SEQ ID NO: 157706 - DNA, 719 bp, Arabidopsis thaliana landsberg
atgggttttgtcttaatctgtacttgtcctccgtcctcgggtgtcgtcgtctctcagcttcaccatcaccaggtccgtcttccttcttcgtcttctgattttgattttctaattacacaatctgtttaacaattctcttttgtgggtcacaattttcagttctccgccggagtcaaaagcaatgaactttggtttcgtccgactcgtagaaccctaatttcgaaatcatcttgtttcaatctccctcaagaacccattctctccgaagctctcaaggtacaattatatagatgatgacaaaattgattctttttccgtaatctgtacttgggatgagttgttccagatagcaattaagcaattgatatcccaattttgtgatgtgattgtgtgttgtttgttgatcaatcttggagggtttttgtttgtttgtttcacatatgtatccttagataagtgttacattgtttgttttcatattggatggtagtattgatgcatcaaatgctctctgttgcaatgtggtttgtttgtaggagccaattgcatttttgggtgggatgtttgctggattgttaagacttgatctaaacgaagagccgctcatggattgggtgacgcgaacagttgaagcctcgggtattacagaagaagaagtagatgcatatggggttgttttcaacgatgaagactcttctcaacagatagagattgaatga

SEQ ID NO: 157707 - DNA, 728 bp, Arabidopsis thaliana landsberg
gaattttcgagttataagggactatgtttcaaatcctacaacactgaagaaacgactatttgaggttgggctcgatatgcttcagctgacaccgattctagacatctttatgttggtgtatttattcctaaggcatgctgaacagttctacaatcatccaagtactgcatcttctcgaagatggtccaatttgtcaaagtggctcttcagggaattcaatgaggtagttgccttcatctggcgtccatgcccacaaaagtcgtgtgaacggagtttaattctgatttcttagtaaacctttgaaattttccgactctctccattcaaaataaatgtgatgccttttctaaacttcttgtttctacaacaggttgaccatttattcaagcatcggattaatagcagtgtagtacatgcatccgaatatctaaagcaatttccctcgcctatcatctccattattgcaaagtttgtctcgtttgtttctggcggctttgctgctgtcttaatcatcattgcgtttcttgaagaatctctacttgagggacatgtaagaaatactaacaacgcaaaaagcatttgatagataaattatttgggtattgaagtttcttttaccacctgtgtagatattcggccgcaatctgttctggtatgccgctgtttttggaacaattacagctattagcagagctgccatatcggatgaacttttggtcctcgaccca

SEQ ID NO: 157708 - DNA, 386 bp, Arabidopsis thaliana landsberg
gaaacatttgaggtatcaaagatctgcttttctcgaccacaacgtcgatatggacgagcttttagcttcaattcaccagacccagaacgaaaaagagcttttttctttgctttcaacttacaaagacagacaattatctatacggttcatggtctctcttctttctcgagaaaatgattggcagagatcattggcattgctcgattgggttcatgaggaagccaaatacacaccttctgtgttcgcctacaatgttgttcttcgaaatgtgttgagagctaagcagtttgatattgcacacggactgttcgacgaaatgcgtcagagagctcttgcccctgataggtatacttattcgacgctaattacctcgtttggtaaagagg

SEQ ID NO: 157709 - DNA, 436 bp, Arabidopsis thaliana landsberg
taacttagagagctttaataatctcccttcttctacttcttcttcttttttctttgtcatctaccataatttaactctctttttttgattaaacagaaccaagttttgtcgagatggagaggctaaactcgaagctgtacttgcaaaactgttatataataaaggagaacgagaggttgaggaagaaagctcagattctgaaccaagagaatcaacaacttctcttcgaactcaaacaaaagctctcgaaaaccaagaactctagtggatcaaatcaaggaaacaacaacaacaacaacaacctctcttcatcaagctctgcttctggataatcgtgatgcaacaaaactctttaggacaagacttggattcggataattaggagaacccatcgtttttattttttattttattggtgtaatgtaagaaaaattag

SEQ ID NO: 157710 - DNA, 1639 bp, Arabidopsis thaliana landsberg
aggaatttgtggcacattctgctgctgtcaattgtcttaagatcggaaggaagtcttctagggttctggtaacaggtggtgaagatcacaaggtcaatctttgggctattggtaagcccaatgccattctggtcagttctcggtctactgtttcattatgtgttggttataagttagtagagtgtttctatgggattcactctttctgagtatctcatttgtgcttgtttgctgtcagagcttgtatgggcactcaagtggaattgattcagtgacgtttgatgcttcggaggtcttagttgcagcaggagctgctagtggtactatcaaactctgggatctggaggaagcaaagggtcagttcagcagctctatgagcatctaaagtgactcttctcattctctggttagtcagccacagccggctcgtatatctactgagtatgttattttggttgcatctttgggtagttgtcagaactctcactggtcacaggtcaaactgcgtatccgtgaattttcacccttttggtgagttttttgcttctggttctctagacacaaatctcaagatatgggatataagaaagaagggctgcatccatacttacaagggtcacactagaggggtcaacgtactcagattcactccagatggtcgttggattgtatctggaggagaagataatgttgtcaaggtttgtagctgcctttttcctttcttagtatgtattggggaggaaaactagggagtcaacttaatagaattcaaaatttctattttttcgaggatactttgaagaacaataccacattttgtgaaataggcataaactggttctgagagatggtagtcaaagtcttgaacaaatatctcagagtaggctctttatgtgtggatgagaacatgtgattgtttactttaatgatacctctatgcggctgaccttactatcctagggggagaatttttcttagtgctaaaatacgctcatactacctgatcaacttggatactcgttattctttgtttcatctcagagtttgtactgtttaccgtaattgttttcctgaaaagcaagtaacctgcaaattttgctctctctcttaacgttggactgatatgtgggttgccttcaccaggtgtgggatttgactgctggaaaacttttgcatgagtttaagagtcatgaagggaaaattcagagtctagattttcatccccatgaatttctgctggcaacaggtctgtataactctaagtagggaaacttcgtaacattgaagctcctagtttttcgggtgacatagatttatcacaatgatatgaacccgatttattcttaaagttaagagtgctataagcaaaattacatgttgtaactaaccctgacatcattagatcactgtagcatcatcgtctctttgtaactcacaattttacagctttctcatatgttaagtgttaggatttgacaggagagagacttcagtagtggatatttcttcttatggcattgttttccttactgttcatttgaattatgtttgtttctgcctatggccttaggttcagctgataagactgtaaaattctgggaccttgaaacattcgagcttattggttctggtggaactg

SEQ ID NO: 157711 - DNA, 334 bp, Arabidopsis thaliana landsberg
caggttttggtggaagagaaatcgagcgttagaatcttgacatttaacagacccaagcagcttaatgctctgtccttccacatggtattgaatcgttcccttgcttattcttcctccatttcgtacgtgccctagttacatatatattggtttgaatcaatcttctctaggtctctcggttgttgcaactgttccttgcatatgaagaagaccctagtgtgaaacttgtcgtcctaaaggtaatcactatatccttattatctcctctgtttacacacacttaataacatctccacagggtcagggaagagccttttctgctggtggggacatt

SEQ ID NO: 157712 - DNA, 674 bp, Arabidopsis thaliana landsberg
atggcttcttcacttcctctgttacccaaacccatttccccattctttaaaacgccgccgttttctacctccaaaccactcgtcttcctcaactttcaaactcgtcttacgtcgagatcttccgatgtatcggtcaatctcaagaagaagaataatccgtggctcgacccgtttgatagcggtgaagacccggataacgaatacgggtccttgtttgccgacggtaaacaagacgaggatccaagaccaccggataatcctgataacccttacggcttcttgaagtttccaaagggttacaccgtcgagcttgcttctttaccgttgaaaatcagaggagatgttagacgatgttgctgcgttatctccggtggcgtttacgagaatctactctttttcccgactattcagctaatcaaagacaggtaataaaagtataagactctgtctccgattcgacatttttttaaaaccttaaactgaaatgcagaacattgtccgtacgtttctgttgttttgtaaggtatcctggtgttcaggtagatatattaacgactgaaagaggaaaacaaacatacgagctaaacaaaaacgtgagatgggccaatgtgtatgatccggatgatcattggcctgaaccagctgaatacacagacatgatcggactcctcaaa

SEQ ID NO: 157713 - DNA, 1004 bp, Arabidopsis thaliana landsberg
atctcgtgaggaagagctctggaggagagagaccttttcccttaacctcatcgtcgacggcatcgactctgtcattttcaactgggtatttcaaaagtctcatccttttttctttttatgattggcctggaaactctagaaaacagagcaggcagggtttgacctaaattacattcattcaagaacgaggcgtgattaatgaacaatgatgggtctgatttgcagataaaaccggataattacattttcctgtacggaggagatgacttggactggataaggagattcacaatggcggccaaagcaacggccaaagattccaacgtgaaccttgagatggcttacgtcggaaaacgaaaccatagccacagggaacagatcaggcgtatcagtgaagtaatcaggtctgaaaacctgagccatagctgggccgaacctgccttgatgtggttcttctggactaggctcgagagcatgttgtactccaagattcaactcggtaaagccgatgatcacgacgatgtaagagttgactagctagggttttcaattatttcggttcggttcggttcaattggttaatgaatgattttgtgtgtttgaaaacgttgattaggtgatgcaaggaatcaaaaagatactaagctacgacaagcttggaggatgggcactactgagcaaaggacctgagatagtgatgatcgctcacggtgccatagagaggactatgagtgtttacgaccggacctggaaaacccacgtcccgaccaaaggttacaccaaagcaatgtccgaccaccaccacgatgaggtcctccgtgaaaccggaaaaccttgcggccactttgatttccacatcactgctcggagcggtcggattccggagaagatgaattgcttcgagtgtcagcgtccgatggagaagtacatgagcttctcttgttgtcacgatgaaaagctccacgaagacgagaactacaacttctaaatgatgcaataagctc

SEQ ID NO: 157714 - DNA, 667 bp, Arabidopsis thaliana landsberg
caagtaatgtttatattgcttacgaagcactcaatctttcagatccttatctgaacactgatgctggaactatgtctccatttgaacgcgatgaagtttttgtcttgggcgatggtggtgaggtaaataaatatgacttttatttctttcgtaactttttaaaaaaacttacaagtcttcagcttttgagaacttttgagtcttttttgggaaaaaggtggatcttgatcttgtaaactacgaaaggtttctagatatcaaattaacaagagacaataacatcactactgggaaaatttatcaggtaagaagaattagatctcaactaatttggtggtttgattgatgagttaggcttactaaatcttcttatacacttctatgtctgggtcacagcatgttattgctaaagagaggaaaggagattatttgggaaagactgttcaggtacctttcttcaacttatctctttctctggtgttggtttcttgtaagtcttaaaaagtgttttggttgatatgatttttaggttgttcctcatgtcactgatgcaattcaagattggatcgagagagttgcggttattcctgttgatggagaaaaggattctgctgatgtttgcgttattgaattaagtgggacaataggtatacaaaaaaaaaactgg

SEQ ID NO: 157715 - DNA, 208 bp, Arabidopsis thaliana landsberg
gtttaagctgcatgtcgattcttccgaacaaatattctttcttggatttaaaacccgacccggaaacccggtctagtgagagtgacaacatttttcctccactgaagattttgcctctgtgttcaccccaagttaagtcaaactcttcgttaagctaccggagaatgctgttccggccattgttacgactagaagagtcattaacacg

SEQ ID NO: 157716 - DNA, 1860 bp, Arabidopsis thaliana landsberg
acaaaatctgagattcgcgaaggaagaagaagagttgtcttgagagattgatagagatggacaacaatggagttaaacccgctgtttccgccatggatgctttcgagaagcttgagaaagttggtgaagggacatacgggaaagtttacagagccagagagaaagctaccgggaaaatcgtcgctctaaagaagacgcgtctccatgaggacgaagaaggcgttccttccaccactctccgcgagatctccattttgcgaatgctcgctcgtgatcctcacgtcgtcaggttagggttttacctctgattcgataaaattgcccccatattctcgatcttgtagtcgcgttagggtttatatagtcgatttctcactatctcgcttgttttccagattagatagatctcaatttcaaatcgtagtaatcagttcgaagagtctactaattgttagatgatttggctctgagaaactgttgatagatgtttccctagagtttgatctggatcgctgtatcagttagttttccagtgattgcaaaatcaattatatacggaaactttatttgtcatctttttcaggttaatggatgttaagcaaggactaagcaaagaaggcaaaactgtactgtacctggtttttgaatacatggacactgatgtcaagaaattcatcagaagtttccgtagcactggcaagaacattccaacccaaactatcaaggtttttaaccaccttattactgtcatctctctttctcgcttcatttgtgctcacttgaaccaaacataacattctgaaaagttatttgcagagcttgatgtatcaactatgcaaaggtatggcattctgccatggtcacgggatattgcacaggtgaattgttctctggctttcccttgttttcaacttctaagtgagaatgattttagataataacttggaagagagatttcttcttcttactatttctccttgtttcaaaacagagatctcaagcctcacaatctcttgatggatcccaagacaatgaggctcaaaatagcagatcttggtttagccagagccttcactctgccaatgaagaagtatacccatgaggtaatcaatgtttgacactgcttcttgcacttatcccactttgtatgtattgtagaacttatggttttgaatcggttgttcattgcaacagatattaactctttggtatagagctccagaggttcttcttggtgccacccattactctacagctgtggatatgtggtctgttggctgcatatttggtatgtgttcttttcagactcgttgatttcactagtcactgcgatatcatcttaagttactaaacaacaacaattaacattgctccttcaccatttacagctgaacttgtgaccaaccaagcaatctttcagggagactctgagctccaacagctcctccatattttcaagtaagtctttgttgattcttcaccttttacatgacaaacataagaaaaccttttttcattttgccgctctttccggtgtacaactcaggttgtttgggacacccaatgaagaaatgtggccaggagtgagcacactcaagaactggcatgaatacccacagtggaaaccatcgactctatcctctgctgttccaaacctcgacgaggctggagttgatcttctatctgtaagtctaaagtttattaactagctaccaaaacaaactcaacagacgaactaattgcgtttttatcttcctggaacagaaaatgctgcagtacgagccagcgaaacgaatctcagcaaagatggctatggagcatccttactttgatgatctgccagaaaagtcctctctctaa

SEQ ID NO: 157717 - DNA, 558 bp, Arabidopsis thaliana landsberg
  unsure (1)..(558): unsure at all n locations
agaagatggaagtgtacaatgacgatactgaaatgaggtcaccagagacacaaccaatcaaggaaacagctttggaagtgtacaatgatactgctgaaataaggtcaccagagacacaaccaatagaggaaacagctttgnnnnnnnnnnnnnnnnnnnnnnnnnnnnnnnnnnnnnnnnnnnnnnncaagcgacgcaagaagaagtcgatggtgtgggaacatttcacaatcgaggcggtagaaccgaactgcagaagagctttttgcaaaggatgtaatcagagttttgcttacagcaacggtaacaaagtggctggtactagccatcttaagcgtcacatttttaaggggacatgtcctgcacttatccatacgcatgacaatgacaacaacccactgatgtctactccttacactcccaagactgacactccgagaaggcgttaccggtctcagaacaacgctagtccctatgttgcgtttaatcaggacaagtgtcgtcaagagatagctaagatgatcattatgcatgactaccctcttacatggttcagca

SEQ ID NO: 157718 - DNA, 1479 bp, Arabidopsis thaliana landsberg
atggatctatggttaatcgcagctactgctgctacaggatatataaccaagcatttgcgaaatgtatccaaaggtaaatcttcttctgaagatttgactaatgtgaagctagagtcaccgagatgcttggctagtaatgtagtaagagttaaaagaccaaaagaagaaaactttgaggattgcttaaatggggaaactcttgatctatatgaatgtggcaatgcatatggagtagaagtagctttgagtaatgaggagaatttgggatataatgaggagattcgttcaggttctttcggggacagagcgtttcttaggagaaatcagcgtcctatcaagcctttttctttggagaaaagcataatgactcggttacatagagagaaaatatccatggaggaatatatgcgtagtccgtttccatcaccttgtggatcagtttcgaggcccttgcttgttactgatggtacaaaagtaattagcaagaatactggagattctgttagccagcaagttccggaatgcgggattcctcagcttaggaagttgaaatcttcacttctttacgctaaaaggggagttggaaatgcgaagagcgtgagtagaagatctgataatgggactggtaaaattcttgctctcttttgagcatgtaagatttatatatactgacaaaggaaaagcttaacatgttagcttttttttcaggatcaaatgatgctgtgttgctgctatgcgttgggatttcaattgggataatgtcatcaattgtagcaaaccaaaccgaactaagcaaagtcagagcagagtcaaagcagacagataatttgggaaaagagttagaagatgacttacacgatggtgaaaaacagtgtgatgaaaagacagcagagaattcagaatctataagtaaaattgaagcagaacttgaagctgaacttgaaaggctggagatcaacatgatttcctccaacgttgagacaaaactctcagatgtctttgaggtgagctttatactctagcttttgctttttcctttcctttcactgaatcattgtctcattttggtcgatcatgtctgttcattctggaagttatcccgcagcactaatgatcctgttttctccatatatgaaaattgagctaaacagatatttgatcataagactagccattgtttaatcatctatagaagttcagcttgtaaattgtttctcaattctgcagctggagccagatttcgaagtagaatttgcgcagggtgagctgagagatgatcaggttgaaagacagcgttttgatgaaaccgtgtccaaccaggaacggagtagcaattccacacctgaatcaggaaactacatagtctcacctcgtgagttaagcttgcgtctgcttggagttatcaattcacgctatgaaaaacggataaaagaacttgagaatgccttacaagagagtcagaggaaagtggagcaactg

SEQ ID NO: 157719 - DNA, 2859 bp, Arabidopsis thaliana landsberg
agtctaatcaaaatcctactttggtgctcctcgctttcactgccccgatctcttctttctccgccggtgaaattaaggttctgaaatcatcctcgattgggtcaacacaatcaatcacgaatcatcatcggcgatcaggtattcaaaagagaaatagatttttgtttcggtgaataagagaatattttatttctcaagaatgaagaagagaatgagaatgcgtgagactctgtatttataagcagagaaggtttattttcttaagagtatatttgcttcattaattgatgatttgatattaatataaccgttgggatttttcagtatttttaatttttaatttgtatttgcaatttttcaggcaatcttggttggctcctccaatttcagaaccagtttgtggagcataagccacattctgtggacttgactgatacaggacacgtatgaccaatgctgctatatgtgttatgagagaagtggcctgtatcaacaatacatcaggagcacataggccttttacaagcatcatcaaaagcttgacaacaagaaaacaagaggacatagtccctttacaagcaacaacaaagcttgagctcgagtaccttaaactctgctgcattgaaccaccaatcttatatatatatatgttggcaagtctggtgtggagaggaaggatacagcatatttttgaagattctcagacatttcatcctttctttatcttgtctcttctcttgcaaactcgttagtccatttaggttacttgttattgacttaatcatagttagatgatttctgttcaacttttaaatgtatgtttgtgtctgcattttgcactctttatctgcagatagtcaaaattttcccaattgttgttatgtttggagttattaaatggacttggcaattctaagatcatttagccaatattggcaaacgctgtataactggaaatggaaaaaggaagaacaaaaacgaaattgacatttcgaatgacaaaaagatgtacatgacatgttgttttatgtattggcctgtgtttactcttcctgtgccaaactatttaattctctttagatgctacttcatcaacaacaaagcttgagctcgagtcccttcagcagctgcattgaaccaccaatcttaagcaagatgatctgttgttttctggttcaagtcgtcgttggaacgtaaaccacattgttcagcaaacagtgagatcggccacagaagagacagatcatgcttccgataagtagcgataccaagaccctgatccatgtcccagctctgcaatttcaaattaccagcaagggtttagaaacatcccaatatactatatcatacatgggtccatcaggctaactcacccaatgttgatgatcaagtaggtgttgatcaaaatgcaaagaactggaaggtatgggacgaatgggcagagaaaccctgaaatagaatcatttatagaatgctagtacgaaactgcggctcaagtataaatccaagtttaaacgtcctaaccagatgataaccaactcagcaaatgaatagaaactcttaagtaagcaacgttttagatgaaagtgaggccaaccaatgatggctcgcaaaatcttatactcagttaaatttctccaaaaaaggcttaaataagcttcaggccttacctcctttgtgtccaaattttgtgcctttcttcatcctcgtcaatgtgtagcctttaaaaagttttaagtgttcaaactcataaacaaaacaccaactcttctttctacctgaaaatccaactatcaagataagatcaatgagagcagtgaaataattttggtgtggagcttacatatgttccctaagccaaatggctgacaataacgtttcacaaacaacaactcatacgagaagctcatctgtacaagaaaacagaaacatgaatgggataatggcaatcatggtttaaaaacataaaacttgcaatcatatatagtaataacctcatggatagaactggaagggtgagacatttttgacgactttgggggtctaaaatgctgaacatacttgaaccgatgtttttaatccactacatacttgaaggtaggagaagagttgaagatgacattggagcagaagcactatatggggttcagatgtaacatttccatgtccaagtgcgtttctgcagagagcttcaagtcatcaaaaatcaccaaccaccactaaatgtgaactttatagttatctaaaattatcactaccatcagatatcatctagaatcaatcgtaactaaaaaaaaaaaacaactttcaaaaactagataataacatataggagctagcaacatgtatactatttcactttttttagagtttctaagccaatcagaaggctctatttcacacccactcgcacaaagtgagcgttgagcgcgtgagagcaattctgtgggtgtacccctttccaaaacacgcctttttcaatcgacgcatttgtctccaaaatcctcgtcgcgtgaatattttgtttgttacttcttctctatgtaaaccgaaccgcaaatcaattctaatttatttcaataccatttaaacctaaccgaaatcaattgaaattagtaatgactaaccgcttgtcctcatcggaagagtgatctaaagctagatttttcgagagagaatctaaggaaattccgacaacagaagaagggagtataccggagagctcgccaatcaccgccggagcgatggagtaaaattggtacgattttgaaaaagagaagcgtggtggaagaatttcggattaggattttgatagtgtgtaaacgacggtggtcgatccatgagctccgacgacggtga

SEQ ID NO: 157720 - DNA, 944 bp, Arabidopsis thaliana landsberg
agaaggttagacttccgtaatttgcctccacatgaaatgagggccattctaccgaaaatccaggttctgatttagattattacaatggattcttcaaatgtttcaaagcatcttatagtattcgttataactaatttcaggtgatggctcggtctttgccattggacaaacatacattagtcaacaacttgaggaaaatgggagaggtagttgcagtgactggggatggaacaaatgatgctcctgcattgcatgaggctgacattggacttgccatgggaatagctggaacagaggtagcctttggttctcctctgttactgagttattaaatcattgtaaaatcgatgttctctatgttaaaaactcccgcgtatacaacacacaggttgcgaaagagaatgctgatgttatcataatggacgacaactttgcaacaatagtgaatgtggcaaaatggggacgtgctgtgtatatcaacatccagaagtttgttcagttccagctcactgttaatgtggttgcttcgatcatcaactttgtctctgcttgcatcacaggtacgacagaaaaaccaatcaaacaccatctttcttctagcgtttggtcaaatatagtaaccatttcttttggtttcttttccaggatctgctccactcactgctgtgcaactgctttgggtcaacatgatcatggacacacttggtgcattggctctagcaacagaacctcccaatgaaggtttaatgaaacgtgcaccaatagctagaaccgccagctttatcaccaaaaccatgtggagaaacatcgctggtcaaagcgtttaccagttgattgtcttaggaattctcaatttcgcaggcaaatcacttctcaaactagatggccctgactccacagccgttcttaacacagtcatcttcaactccttcgtcttttgccag

SEQ ID NO: 157721 - DNA, 303 bp, Arabidopsis thaliana landsberg
aggccgttccaagcagggggggcagcgggtaggcgaaatgaaggtttgggctctggaggggtgggtgatgctcatatcgatcacgagatgctaacttataaatctgatcatattagagctcgccaagaagtacttggaaccactatcattggaggaacaatacctaaaccagaagatgctccggaatcttttcgattacttgcatcgagaactaccatctttggctgtggaactgcatcatttgcttggatatgagatgaactccagagtaataggaagcaagtataatctgaatgaatcaca

SEQ ID NO: 157722 - DNA, 1246 bp, Arabidopsis thaliana landsberg
cacttttacattacgattgatgatgaatccatgcttccattacaggttttggtctcaacaagtaccttggcatggggagtgaacctaccagctcacttagttattataaaggtaaaagaaggtcctcttctattataatgtttgggatcactttcttggattttctcctctaatgatttgtcttttctctttaataccgttgtttttggcaatgtttcctatcagggaacagaatatttcgacgggaaaaccaaaagatatgttgacttccctcttacagagatcttgcaaatgatgggacgtgcagggcgaccacagtttgaccaacatgggaaagcggttattcttgtacatgaacctaaaaaaagcttttacaaaaaggtcaagctcagttggaattatttggcaatttttggtatccgttgcaacaatttacctcaaaaagatcatacttcctctgcatgcagttcttgtacgaaccattccccgtagaaagtagtttgaaagagaagctgcacgatcacttcaatgcggaaatcgtctctggaacaataggcaacaaagaagatgcagtgcattatcttacatggacgtatttgtttcgtagactggtaaatatgcttcagttttattaaaaagcgagatactacttgagaacgtgattctggttccttgaaaaattgtgctaaaagcatgatcagttccctgcagccagattctctttttcctttcagatttttccattactgcagaataaccagttcatgactcaatctggtatttgatgtaacagatggctaatcctgcttactatgggctagaaggtactcaagacgaaacaatctgttcctacttatcaaggtaaatatcaaagttattaaataaagaagatttctctaactagaaccattgtaatattggtgtatgcgggctgctttttgtgtagattggtgcaaaccacatttgaggatcttgaagacagtggttgcctcaaagtaaatgaagatagtgtggagcctacgatgctgggtacaatagcgtcacagtattacctttgctacatgaccgtgtctatgtttggctctaatataggtcctgacacatcgcttgaagtaagaagctgatccagtttatattgattattctttttgtttttctttggtttctaatcactgccctttaggcatttttgcatatcttggctggtgcttctgagtatgatgaacttcctgtgcggcacaatgag

SEQ ID NO: 157723 - DNA, 707 bp, Arabidopsis thaliana landsberg
tgtgatgctaacaatcaagatgtgatcagaagtcactaggtcaagccaagcaataacaggttttggtgtgttctagcactcctgagtgaacatgcagaaaactgaaaatcaagcaaaaagagtaaaacactcaaccaacacagctcgttgcagacaatgggtgaggtcgagtgactggtcgagtaacaaacagtaaatgaaacaaagatactcgactgcccagtctgttgccaaacaactcggtggtcgagtatcacgtcgagtaacaagaaagaattgcaaaaactatgcaacagatgacaagatacagtaaacaacagtagagtaaacaataaattcaatcagataaagaattccgaggatgggataattgagtagtatcgtttccttagtttacaggtgattaacatgctcaataaattatccctagataacaagttctttaaccaaatctaagtgccaccgcaacagagactctcaagttaacctagtcccagactcaatcaccattgacgagagctaacctaacaggcattacgaatcaacatgttaaagccaaaacgctccctgcaaccaataccttggtgcagggtcacaaatctctggaattagtggttcagaaatttcatcgaacactttttgggtgcggaaatgtctgggctcaaattccagttgatcagaaagcaataggcattaagaacaactaa

SEQ ID NO: 157724 - DNA, 843 bp, Arabidopsis thaliana landsberg
atgcagagcaaaaatcattgtaatggcccattactgtatggcaaatatatagctgacgatgttgatcctgctgcacaggttgttgttagttatgacggaacagctgaaattccccaggtacagtattaacacctttttttaacgaatctgcatttattttctggtattaactttgttacattgcttgtttactgttttgtagatcattaagtggctatcgaaaatggttgatgatggtgacaacagaaacctacctttctatgtaagcaacttccgttttaattcagtatttacatgttccttttatcagatatctcatttgatctttcactttaacttgcagagagctaaaactccagaacttgttccagaaagcgctgaaccgatgagatcaggagtcccaaagaccgtaaaagcaactcagaaattgttgagcttatggaacagaatcaaagactacctagctgatccaagatgggagcctaccatgcttctagaagagttgattcccgcaggcaatgtttggtggatgattagccgtttttcgaaacaacaacctgctcagacaaatcagccatcaccaaatcaaccagccgataacgtaacaatgaaatgattcatataaaaatattaatttttgacataagcccgaattaagaaagattgatgattgtttgacaggtggaggagaagaagaagaaagagagaaagagagaacaacgaaggaggaatgcaaaggaagaagaggttcctgcttcgatcactgataacgaacctaaagatgctgtccaaattctgtcttcaggttccgattctgactaatatattaagccataggattct

SEQ ID NO: 157725 - DNA, 755 bp, Arabidopsis thaliana landsberg
ttagtataatggggcagatctagaaagtgacttaataatggaaagtgatggcttcaaccgcctcagctccaaacgtctcttccgctctaaatcaaaagctcccgtctccagatctgagccttcttccttcagctcaaatgcttcttcctcttcctccatcaatggttttggttttagttgttgattgcgaggggagcgaccagaagatttgaaaccgaaagatctcatgaaactctaaaaagtaatgaccttctagcttttgctatgactcttatcaatttcttcttttttgaaaccggaagatctcatgaacctctagcttcggctaagatctctttctgtcttggacatgaaaactcacaaaataaacatatgtaaagaagaagctttgactatcaaaatttccaacactaccaccacatttcgtttttttggtcttggcatggttggatttactatatcgactccactcgttctagccaagtctagatcctctataatggagagaaatttctaatcagtcaccaatgtctatttggcagatcggaactcaagcttctccgatatggatatgaactgagttttattaaccataacaatgtttctagagatctattcgagatcctctcttcctgccaccgtgagttatctttccggagcagagaatttttcttgtgccgcataaccgccacaccaacatcgcctctctttgctacatcatagctaaccctaaaattttcatgggctcggtccat

SEQ ID NO: 157726 - DNA, 1413 bp, Arabidopsis thaliana landsberg
tctaagaccttgactaatgccttttataatatgtgtttcaaggctggtacacaatggcgcaaaattcaagatagactggaggatgatgacagatgctcatgtcttgaaaagatagatcgtctgattggttttgaggtaagtaacttcatcaagtagttcaggctgccacatagaatttgtttataatgtttgttattgcaggaatacattcttgacctagagaaggaagaagaagagctgaagagaggagagaaagtaaggtcaatgttcagggttgtaacctcattttttgttcttatgtagtccaatgctcatggtttcattttcttgtggagctaggaacatgtaaggcgggccgagagaaaaaaccgtgatgcatttcgtacactattggaagaacatgttgctgcaggcatccttacagccaagacgtactggttggattattgcattcaggtgtctgaccaatttagatctttactggacaaattgaattttatgttggattcttttcctcacttattttacgtacagttaaaagacttgccccaataccaagctgttgcatctaatacatctggttcaactccgaaagacttgtttgaagatgtcacagaagaattagagaagcaggtaatttggactatatatatagtgtaattctctattggtagagtattccacctatgcgtgaatctgctagttatgataatcgaacctttttgtgttttgattgacagtatcatgaggataagagctatgtgaaggatgctatgaagtcaagaaaggcaagtcaaggatagcttcaatttctacttactaattttaccaattttttttatctaatccctttctctacagatttccatggtctcctcgtggctgtttgaagattttaaatctgctatttcagaagatctcagtactcaacagatatcagacataaatttaaaggtaaatagaacatgtgtcagtacataaattaatcaacagaaacggctatgtgtacattggaagatatatattaggtgtgaagaagttcttgtaaagttctgttatatagggctctgattcatttatttttccgttgtttatcagcttatatatgatgacttggttgggagagtgaaggaaaaagaagaaaaagaggccagaaagcttcagcgtctggctgaagaatttaccaatctgttgcacactttcaaggtatatctaccttaccagtggtgctttctttttgtctggattcactgggacgttaaagataattttttgttttggttaaggaaatcaccgtagcttcaatttgggaagatagcaaacaactagtagaagaaagtcaagagtacaggtaatatttatgccttaataggtgcttcatggcttcaatagtaaaaaaaggtgtggtattac

SEQ ID NO: 157727 - DNA, 403 bp, Arabidopsis thaliana landsberg
aatttcaacagcaaatacttcctagctctttgtacatactaacaatctacaatatcaaaacacaaatcttcactgcaaatcaaaataattcccctaaaacccaaacatgcatattccatatacaatacataaatgcaagtttcactaaatcacataagaaagcacccaagcaatcataaagaggatacacaagatagaagccatgagcaaaagcaccgacgaggacaagaccgaagagacgatctcttagaactggcttatgccttaaagacaaccgaatcaaaggaagcgcaggtgcgtagatgagaggtactaagaatttgatcggagctcctttcttcttcctctccattactggttttgaaggatcgcttgacgacgccatgacggattcttcagagag

SEQ ID NO: 157728 - DNA, 337 bp, Arabidopsis thaliana landsberg
ggtcgcgtgacacctgaaagtgtaatatacagctttggaactctattacttgaccttctgagtggaaagcatatacctccaagccatgtaaggtttccaaatatccttttgaattggtaatatttcttagtgtctgttactggattctgactaggaagcattctccctgagcttgagagaagcatgttataacttaatatccttgaatagtatagtattttgctaatccattaccttgtatggtgtgttctaggcgttggacctcatacgggacaggaacattcacatgctgatggattcaagctaggaagggcaaatttttggtgaccatggaact

SEQ ID NO: 157729 - DNA, 1287 bp, Arabidopsis thaliana landsberg
tccttattgtgaatcttcaggatgtgagtaatatccgtcaggttccagatcatcaggtttggtggttctattctcagtggcattgtatgtaagtacatgtgtagaagaatctctagtttactctgtatttgtgtttgattgattggttttcacagcaagtgtctgtggatccttcaagagatgagagtttgatttctgagttgttggatttcaaggctgaggttggtgacattggcagtgcctcttggttccttaatgatcttgcgagtgagcaagatgctgaaggatttcaggtaataccactactacactagaactcttcttatggtagacaaaccaactttaagaactagtggtgttatttctctagaatacatctagtatcttgagtacaaacatagagtttaacgtgtatagatttcccaaagttggaacctttttgcctgtgatgatactagtgaggctgttttttggttattgtggattcagtctctgaaactagtcgaaatagaactaatactggtgtgtttttggttaatctttaccaagattgatgatatatatgaagaagacaatctagtaatgttgctgtgtaattttcagttgattgagcaatcagaggtcattgaggcgcctggactgtctttcagaaacatctctgctgttgcgacaactgctattggagagatggtaatgtccataaacatatgatgtctttgctcataattttcctttctatttgttttctccttaacaaggatcattacaggctatatccaaaggaagacagggaagagaagcacaaaacctagtgagagtatgaagcttctccttgttctgtctctctatttattctaaaggggtttgttacttgagacaccaactggtttatatgattctgcaggtatatgtggcaaatattcgtcttaagggagttgatacagatgtcttagtgactgcctatgaacctatcctgataaagtaagtcccacaaagttgagtcactcagttatattgcaagcagttgaatatagatatgcatcgttttgatacagaacttgaatatcaaaatatggttattgttgttgttgttgtaccacatgtcttttcatctaaggtgtttgcgtattattgtgcagtcctctgagcgaaagcgcggatgctgtgggatctggtttagctgtcccagcttcacaatctggaaaaatgccaatgtgtgatatcattaaacaatcactctctacattcaaagtcaatgactggaatcttttcggttcctcagcttga

SEQ ID NO: 157730 - DNA, 1918 bp, Arabidopsis thaliana landsberg
atctctgtctctctctatgggtttctctctgcgcagcgaacatccataggagctcctcactatacggcccaagagatagagggagagagaagacatcataccgcccaaacaaaagactaagggtataaaattgggtttactgaccatgcgaaacctacccaaaaaaactaccaactgtatgaaaggctctctactctttcttgaaacgggaaagagggagggaagaacaatatgaagacgaagaagatattatacagatcaatgggaggttcaaggacacggcgaggcttgcagctcgttggtattgtcacatggatctgtgcttcttcttatcttaaatttacccataaatttagatctctcttacaaccatgggtcgctcgtcaagtcgttggtggtgtccctctcattctcagaatccaggtgcctcattaattagctaaagctatcagctttttcaaaatttagaattgaagctgatttttttgccttgacttggaatttaccattttgggtatatgcagaaatgtcagaatggagtgttggatgctttcttctcagggctatcttgtgttgtctctgttcccttttacactgctttcttgcctttgctcttctgggtaacattccaaagcttcttcttcaacataaaagtttaaatccttagtatttagagattttttatgtggatatggatgtacacttgaagtcttactaatcgatattccagagtggacatggtagattggctaggcagatgactctcttgattgcattctgtgattacttgggaaactgcattaaggtatttggccttctataacgcattctcttagtttacaagtttctaaagaagcaagtgttggttttatacgctcttctttatttaggatgtggtatcagctcctaggccaagctgtccaccggttagaaggattactgcccctaaagatgaggaagacaatgcaatggaatatggcttgccttcttcacatactcttaacactgtttgtttatctgggtatgttgtctgctaactcgttaccagctttgttgtggaatatcatcatagttgtagaaactccatacctagctagtaatgtctgttctcggtgttattgctgtgagaagataattgactaaatagtggaactggaatgctatagaggtcataacacttgtctccttattgtctggtgtttcagctatctactccattatgtgttatcctccttggaatacgaaagtgtgtctatccagtactatggatttgcccttgcttgtttgttggtagctctaatcgccttcggtaagacccaaaactcatacctgttaaacacacattccttgaaaggatttgattgctcaattgacaacattgttttcttcctaggaagggtttacttgggtatgcatagtgtcgtcgatatcgtcagtggtcttgccataggagtcctgattctaggtctttggcttaccgtcaatgaaaaacttgacgatttcattacatcaaaacagaacggtaagctccttgctcatagtttgataaagctcctaagttgcaaacattgaataacagaaaagccatgactctctggattgtgcagttagctctttctggaccgcgttgagtttcttattgctctttgcttatccgacccctgagcacccaactcctagctacgagtaccacacagccttcaacggggttaccttaggaattgtaagcattgaaagattttcagacgatattgtatgcactagtgttatggtttatttagacaatggccttaatcgatgtttttacttgtcttaggttaccggagtgcagcaaacgtacagccaattccaccacgaagctgctccacgaatcttctcaccagagctccctatttcatcctaccttggtagagtcatg

SEQ ID NO: 157731 - DNA, 360 bp, Arabidopsis thaliana landsberg
cggacattgtttcaacgtaatcgatgttttctctaaagttcagagacgataagcaaagttacatcatcaaagccaaacatggttgccatatatgaaacacgtagtcccaattatatgaagtccccctaaagctattctatacactcaaacatatctcatctttcaacagacaatgacaaatgttaaatctgtttctgagtgagcagatgaaagcttctacataccgagaaatggttctttcaaaaccgagaattgccttgcaatcttccacttgatgataccccaagcatcggcaccgtctgtctctttctgatgtaaatagcagctacgttaacagagacagtgctagcataatcgact

SEQ ID NO: 157732 - DNA, 1940 bp, Arabidopsis thaliana landsberg
atgttccattcgggtaaaaaacgaagattattcatggatgttgagttatacagaggatatcagagaatcggactaaacttaacgaatgggaaacaagatatgcacgaagccattgatgtaagtgtcctatttgcttgagtgatgtttccaagtagtgattataactaactgatatggttctattctcttatagtgttacaaagagttcaagcaagggaaacatggggacatcggaaaggtcttggaagggccaaaccagtggtaagagtttgattgattgttttcttttgcatctaagtttgtgttaaaaaaatattataacgaaagggcgacaagataaataaagtgtgtagatgcacatatatgaataagaatagtgaaacgatcgatagtagaatgatatatattaactgaatagaggctaaccaaagtaatcataaaacatttaaaactaattttaatagattaatgacgttttaatttttgtaaatatatatatatatatatatatatatatatatatatatatctttgaataacccataataaatgacgaaatcatttatctctttgactatttatctttttgtgtattttttgctacctcttttttgaaggccaggaaatcctcaagagtacaaagatttaatggaggagtatattaagctgtgcacaggtgtgtttttaccccttttttgtttatcagtaaaatttataagtttctaatttcatttcattgtctttctttcttttagatctttctagaaatatcttaaggggaatctcattagcccttggtggatcaccttatgagtttgagggaaagatgcttagagaccctttttgggtaatgcgtatcattggttatccaggtgtaaaccaagaaaatgttattggatggtaatcttttactaccaccacttttcatttcaactttattatcaagattcatttgtagtgacttactctgcgttttctctttttcacttacagtggagctcacactgactatggtaagtaagcttgaactcaaatcaagttgataatattcataagtttttattttactcaagaccaaccataactttgcaggcttgttgtcacttataaatcaagatgatgacaaaactgctcttcaggtattattggtcttatttggtagctaatatttttgtcaaaactactaaacaacacatcgtggaaaacccgtaattaagctaagctatatgaagagcctaatgggtattgtcgtgaaaaacagggtaattgttaaaacttgcgagacatacaagttatagataaaatgaactaacataactacgattttgccatccctcatttttgcaaatataagaggatattatttgcctatctagtgcatattctctctattattactatgatcatttttataatttttatgcttatatttgaaaaggtgagagacttggccggcgattggataccagttattccgatccctggatcatttgtctgcaacatcggtgacatgctaaaggtttgtttcgtctcacactttctgatctttcttacatttcaactagtccttaaaatgttttttgagtcatatatgcagatactatcaaacggagtttaccaatccacactacataaagtaatcaataactctcctaaataccgtgtatgtgttgcattcttctacgaggtactaaaaacttgtaatactctttgtattctcctcttttggatttggattcatgtttatctttaatatatatcttgaatgaacagactaacttcgaggcggaggtagagccacttgatatctttaaagagaagcatccacgaaaagaaacatctcaagttgccaaaagagtcgtctatggacagcatctgattaacaaagtcctgacaacctttgcaaatttagtgaaaacagttaatatggttgatgggct

SEQ ID NO: 157733 - DNA, 1430 bp, Arabidopsis thaliana landsberg
accaaacgcaaacatcttgctcccacgtcctggcttccctcattacgacgctcgtgctgcttacagtggtctcgaggttcgcaagtttgatcttcttcccgagaaagaatgggagattgatcttgaaggtatcgagtgcattgcagacgagaaaactgtggctatggttgtaattaccccaacaatccctgtggaaatgtctactctcacgaccatctcaaaaaggtttgtgtttttgtatcattacacaaaaatgctcatctttctgattcataactgagccaaagcttgaccctttgagccatttttgattcgtagcttgctaaagattgcgtttttggttcattttaggttgcagagacggctaggaagctcgggataatggtgatctcagacgaagtatatgaccgaactatattcggagacaatccatttgttccaatggggaagtttgcttcgatagtccctgtattgacactagcaggcatatctaagggatgggttgttcctggatggaaaattggctggatcgccttgaatgatcccgagggcgttttcgagaccaccaaggtttgtttactgctacttcttttgtatcctctcttgctgttttgtaacaagtaatctcactgtatgtttactctctgtttctgacaggtgttacaatccatcaaacagaatcttgacgtaactcctgaccctgccacaataattcaggtttgtgtgttttagatatgttatagaatctttgcaaaactagtctatggattcatgacactactgtatgttcctttgataggctgcacttccagcgatcctggagaaagcggacaaaaacttctttgcaaagaagaacaagatactcaaacataatgttgatttggtgtgtgataggctcaaggacatcccctgtgtcgtctgtcccaagaaacctgagtcttgcacttacttattggtaaaacttctgtaacgacacacatccacaaatgtagttatgatcggttttctttagactggtgcttcttgatccatttcagaccattactagtctttcaatctgatgaatagttttcactcactgcagacaaagttggagctgtcattgatggataatatcaaggacgatatagatttctgcgtaaagctgaccagagaggagaatctcgtgcttttaccaggtaaagcgaactaagcagcatgaatcttgatttgagttttgatactaaactggggtttgtggggaatgttttgcaggtgatgctctgggtttgaagaactggatgaggataaccatcggagtcgaagctcatatgcttgaggatgcacttgagagactgaagggtttctgtacacgtcatgccaagaagacagagacagaaactgagtcacttcaagctttgaaactgagtgataataaacacgaaatgtaa

SEQ ID NO: 157734 - DNA, 747 bp, Arabidopsis thaliana landsberg
atggcgacggagtcgtcgtccccgagctctgttcggaaaggtgagtctccgatgaaattcggcagtcgtgtcgacggaatctatgaattgatcgattcaattacgtatatctgttgaagatttcttgtaggacttcgttttgatattttctagggtttctgtttctctgacagttgttgttcatctaagagctactggaggtgctcctatactcaaacaatctaagttcaaggtattaatcttccataatcgatcttctcatgttgaatttggtggcttttagttttgatgaagaatttgagtgtagatgtttgctaaacgttgcttgttaagtttttgatcattatgtgttgtgaatgttggtgtaaatagattccagggactgataaatttgccaaagtgattgactttcttagaagacagcttcattctgattcgttggtaacaaaaaacacagcttctcctctattggtatgaatcgtttagaatgcgatgatcttggtctgacattgctcttttgtttgtaagtttgcctatgtgaatagtgctttctcgccaaaccctgatgaatcagtcattgatctttataatgtaagtctttgtttgtttatcactgtttgtgcacaagtaccttttgaatttgtcttcttattgcttacatggtgctggtttggtatgtgtaaactttggatttgatggcaaactgagggttaactatgcttgttccatggcatggagctaaaactg

SEQ ID NO: 157735 - DNA, 446 bp, Arabidopsis thaliana landsberg
tgtagaagaaacttttaagcaccaaagcaagtttctaataacttcaggggtaagagtataaataactaaaaaacagagacaatcttcaaaagcctctctcagtgttttactcttctgctctgtgtaaactactaaacgtaggaacccaaatcgaaaaaactctccctaagagatttacccaaaagcaaaaggcaacagaagcatcatcaagcttctagcattacatacgggaaaacagaagaaccagaagtttcagacaaacattctttacatgtctgtgaggagcagaaatatatataaaacttgtagctacggttaatgcatttgatgtcgcgggatagcacgggaacgaaccggtgtctttgatggactcaccctgcaaaatccaaccaccaaagtacgatcaatgttcagattcatgatcaatttagagagaatgttaaaga

SEQ ID NO: 157736 - DNA, 2211 bp, Arabidopsis thaliana landsberg
gattactcgacctctggactttaccggctgaactcgacctcaacgtttcactcgacctactggagccgaccactcgaccaagcttcacgtttcaagataccaggcttcaattccgattcactgaggaaccactcgaccgctggtactagcaaatcggcagacccactcgacttcagaaaagttattcaaccgcggtctctacattactcgatccaattcggtctatttcgttgcctattgataacaattttggtttcattgttatctttgagactaacctattgacatttgagctttgagttctaaatttctataggagaatcatgagtaattacagtggcagttcttctgttgatcctgactacaacatggatgagacaaagtcgtcatcttcaaggccagagagagaacagagagaatatgatagcttcacaagaaaagctgagatagcctgagcatactcgctgagatagtgagagtgatgacagagagatatgagcttatagatgaggatctggaagacgagttacatgcctgagcatactcgaagagccaccaaacttctgcataaacctgatgtattgtttgttgaggaatatattaagctcttcaaattgaaagagttctgtaccacaaggtattcatgctcgaccacactcgcacaacttggattgctggaggatgttcagcacttgtactagagttgtcatctggacactttaatggcttatccgtatgtagcatatgaagaagaaacgattcagttcctctccacactgcaagtggagctttaccaaggtatgacctttgatgatttggaatgcgaaggattgggattcttgagattctctgtgtatggtcatgagtataggttatcaatcaagcgcttggaaggattgtttggtttccccagtggaacgggtactaagcccaagtatgatagagaagagttgaaagatttagggatcaccattggcaactctgtaccgctgaattcttccaggtcaaagagcaatcagatacgcagccctgtcatcaggtacttccagtgttctatagccaatgtcctctactcccgagagatcatagggattgttaccaattccgatatggagatgatcgctatggctctcaatggcactctccgccaaaccaagaacggtatgtctctccaaggtgaaaccaatgacactcctctctctatacctcttctgatccacatgtgtggatacaagagctgggctgtcagcaataaccacaagagagcacgaggcgctctttgcataggaggtgttgtgacaccgattcttatcgcttgtggagtcccaatcacatctgatggactcgagccacgggcaatggatatcgagcaattacatcactacgaaatccttgagttcgcaatggttggcgacatgcatcgtttcaaatttgagcactctacagataagaaagccaacatccttctcgctagttctgaggttacacgcataatagagggagataacattgatttcaggcttgagctcgataacctctattacgagaacgctcagccaacatatcaggatgttcatacagaagaagctaccgaggatgggatggcgaagacagagaagtggagtatgaccatgtatcattgtagtgaggatgtacctccagcgagggagagcaagagtttgagtgaagctcacaggaacaaaagcaagttgtagaagtagtgcaagacacaagataagttactcgccaagtgcttcaagactatcaagtttctaactaacaagctaagctgctactcttccactacatctattccacagagacagcctcctcaggacatgccatcgaggagattttatgtgcctgagccaagtcaggacatgccagagcctagtgagcagagagtctcacatgtccctactagacattcgtcattcgagtcccgggaacactaaaagaggaagaaggctacgctcgttcgctctagcagcagatcacgctttatccactcgaggagatcactcgaccgcggtgctaactgcagcagaaggagagaggtcgagtatcctcaaagtggtgctggccgccacaaagccgatgaggtcgagtacccacatgctggagctgatacagaacagggcgactcgtaaatggcttgggaccaatcataggcagccattgatgaccaactccgttcattcttcgactgag

SEQ ID NO: 157737 - DNA, 684 bp, Arabidopsis thaliana landsberg
aaaaaaagggggggcccccaaaaaaaaagaaaggttttttacccggggggggggccaagaaaattttttaaggaaaaaaaaccccccaaaaaaccccccatagaaaatattgtggggccttctcaatgggggggaatcaaatttttttttcacacaaaaatttgttttctctcaaaaaaaaaggttgttagttttcaattccaggcatttgtgttgcaaaagaaaggggatatcgcggaaattctggatcccaggctggaaggaatgttcgatgtgatggaggcagagagaatgataaaggtttcacttttatgcgccaacaagtcttcgacattacggccaaacatgtcgcaagttgtgaagatgcttgaaggggagactgagatagaacagatcatatcagaccctggagtgtatagtgataacttgcacttcaagccatcgtctttgtcgtctgattatatcttgtcgattccttcatcatctgaatctgcttatgatctgtacccactcagccccgagtccattgtctttactatacagtagcctgaaccctctgattatctctacgctagggttgttgttgtaggctacttcgggctcgagaaaagattgtaattagggctaatatcgctagttgtacttggaaaagaatttattttgttttagaagaaaaatcatact

SEQ ID NO: 157738 - DNA, 2683 bp, Arabidopsis thaliana landsberg
ggaaacatatcttcttcaaattccatttgcgtttcaattgcttcatgctatttatttgatttgtaattcgtaatttgaaccatgtcctgtaattatttggcaggcttttgagccccctatagacttgagtaaacacatgcgcgagccaataacaggagcactgtctatggaggtcagatcaagacttggaaatttatccttttcattttgaaatctttaatttatatgtataaatgcaggagctccaaagggaggaacatcatcatgatcattccctcaagaatgcagagataagactcaataacaagacatgtgaatttgatggaggccacttaaatcatgaccatggcagtgtaatcatgccaactcatatacttttatacctcatatagtgtaatactaattctaatgttgctctcttttctttcttaggtaccattttcatctcatgattggttggattcttcgttacaggcgcatgttcctctggttgatgtaaataaggtatgctttttcacttttactatggttgattatattagttttttttcatcctagcaactcataattgttgtagagatattttagtgtgaccaaagataaagagaatatatcctcaattctcaaaatgtacatgaaacatgttagaggtgagaggtgacacgcacaccagtacaattgtatatatatatatatatatatgttggatgttgtgtgtattgctcaccatctattacttagaaatgtgcatgcatggtttttgttgtattctaccacaggttcgttgggtaataaggaatatagttcgagactggggagcagaggtaatcatatttttgtttgtcatgatggcaaggatgagatcctttctctaatatcatgatcacaactttagtggtatatacaatattttgacttacagggtcagagagaacgagatgaatgctacaagcctatccttgaagagcttgattccttgtttcctgatcgtcacaaggagaggtacactttctgacttttgagtttctgacctcccatcaatgcattctgagtatttttgttttaccattcaatatctaaatttggtggctttgctgtctaatccataaactctgcttacaaagttaacgtatatgatttgcagcactcgtccagcctgtttagtccctggtgctggacttgggcggctggcccttgaaatttcttgtctaggcatgcagtggagaagcaaacctttttttttttttttttttttttggaagctttgatgatagcgaggaattaatataacaactcttgtacattggaacaggtttcagaagccaaggcaatgaagtttcatactacatgatgttatgctcaagttttattcttaattagtaagagtttcttacttttctcttatacatttttaacatcagccagcaacaaacttataagtgtgtttctaagttgcttttggagagtctctaaatttgattgagttaatttcttgattctgttccagttttgagtttttctctattgtttttttttattctttttcatcagtacacaattgcctggtgagtggacaatatacccctggatacacactaactgcaattcactctcggatgatgatcaactacgccctatttctattcctgatattcatcctgcaaggtatgccttatcagagagagtactttgcctatggtttggaaatttttgatagctttaaggataaagggactaagcaacttgtattggggatttcatggagctactacaatcatttatttcaatttactaaaaagtttaatgtaaacactctctgagagcagtgcaggagtaacagaaagtttctcaatgtgtcgtggtgattttgttgaagtattcaatgaatcaagtcaagcaggtaagaaatggtgactacttgcttttgtttaagccaatatgtgtatgttttataccaaatacaccactcatcactgagtttcaggaatgtgggatgcagttgtgacttgctttttcattgacacggctcataacatcatcgagtacatcgaaaccatatccaagattttaaaggatggaggagtacgtaatttcctatacgtaccctcctttccaacgtctttgatatttcatcactcgcctatctaaattaatgaatttatccatcaggttttgataaatctaggacctctgttgtatcactttgcagacgagcagggccttgaaaatgtaagcattggaattgtcacacaatctctcgctagataaataaatttgatataacaataatatatatatatcttgtttctccttaggaaatgtcgattgagctaagtttggagaatgtaaagagagttgcttcacattatgggtttgagatggaggtaaatctacccaatataatggcaatgacatttgcctgtcagaaatgaaacatctcatgatgcatgttcttcctcacttatatgagtggttgtcctaacaatatttgcagaaagaaaaaacaatagaaacaacgtactctacaaacccccggtctatgatgaaggtcagatttttttccatgtttttggatccagagatgggtttaatttgtgcatgatgttgtgtgtgtctgttgcagaaccgatactatcctgtcttctggacaatgaggaagaagtgtgctataacaacaacttaa

SEQ ID NO: 157739 - DNA, 1195 bp, Arabidopsis thaliana landsberg
attcaatcattttgttgtctgtaggatttaagtatttgaatcttgccaatggatttgacgtggttaagtgccctaattgttggagctgcacttggatactgcattggcactcgccgttccaaacctgttgttgctgctgttgataaggatatcaaaactcaatcctccaaaagtccactcgagattgagaaactcgctgatattctcgatgatttcaagatggtagttagctacatttttctctctactgttatggaatcacaaaattgttgaattgagttttgtatactcaggttttggtggtgagaaatgatcttaaaatgggtaaaggaaagattgcagctcaatgcaggtgataaactaatcatgctctcttttactattttaagtgtttaattcatgtttatcattcttacatttgagtgttcttattctgattcgttttattggtctgcatttctgcagtcatgcaactttaggattatacaagaagcttgttcgtcgagcgccaaaagcattggactggtatgcctctaagtcatgatcaattccatttgttacttaatatatggattgaattaacagtataggttgctattgcagctgggaggaatgtgcacagccaaaagttgttgtgaaaatcgaggacgaggacgagatgctagaattgcaagtgagtttactaaaacaaattgtagtagactgtaaagtggattttttttattgaactatattttggattcacagctttagtgctgttgccaaattgatcttcacgggctttgcaggagttgccagatgttagtttcttgataatttctgagttctgaccatatacatgaatacttaaggggaatttgagatatcatagagcttatcttgatttttcccatttcttatatcttgtattgactgttcacaaaattgtcaggaaagagctaaatcccttaaactgcctacccatatcaccattgatgctggaagaacacagattgccccaagtgagtttcataagttcctcccctcttgaacttgaaatcccttggtgctttaaactttatgattgctagttaattgccagggagaaagctctcttgattcaatcttctttcgtaagtatcattttctgcgaaaatgtgaatctaataatacgtcatgttctttccagattcaaggacggttatggctattcttg

SEQ ID NO: 157740 - DNA, 1242 bp, Arabidopsis thaliana landsberg
atgccgtttcgagctggttattccggcgagctggcttttctggctgagctggctggtcttgacgagcagacttctctcgacgaactgacttgtgttgacgagctgacttgtatcgccgcgctgacttgtctagtcctttctccaggtgtccaaaaaagtgtcttttcccgagactttctattccttatttatactcgtccgtatagtagggtacgcaaggtgaattcccgggagtgccccttttgcgcagccaaactctcatctcgaccaggccgggtttcggcccagtgggctggctcgggttctaaagtgatggtcggggctgggccgttatttcttgaaatgggccggctgatcattgaagcccaattgatgtatcaacagttgtcccccaatccgatgttcggttgcggacgtcggatttaacagatcagcgaaactgacgcgcatgtggctccgtccttttcgatgcagcgcgtggatccaacgtgccttctgattcgtgcacttggtttcttgcggattcggaagctcaagcggcgcgtaggtaatcattgcgcctactcggcagcgtgatgattacctaggtcatctctcgcctctataaatgtgagaaacacgctcagttttctcaggattctttgcagccaaaggtactttcttcttccccttctctctattttgagctcgcaatttataatgccgtcgtcagatatttccatcgattctctctccgaccatcgtcgatcttgcaccccggacggttcttcagagtgttctggagccgaccgttttcgagccaaatctcttgatgacgatcttggcgaggcgggatattcttcctctgagtcgtcttcgcaaacttctgttgtggccgagctacagcgccgcatttcttctcctctagttgaccgggctgaaacaagtgctgcggcgacaaccactttcaagccccagcttacagatgaggaaattggtgatgaggatttcaaggaagccatagcttctggagagatcgcgatcttcgaacctcgatctgcggttgggggaggttttgaggacgatgttaaggagatgacagtttctgatgagattggtgtttttcctgctgtattcggccctaagcccggctcgactgactatctgggaccaaccaagacgtcagctgcttctatgaataccgtgcttcgcttttgtaaccgcgccgcgtggatatgtgactcgggatccggaaacgcatga

SEQ ID NO: 157741 - DNA, 380 bp, Arabidopsis thaliana landsberg
tccaaacttttctttctctctttcgtttcccattttttctcttatcactcatagatcctgattgatctgaaaaaatggtgaagaagcaatcgccattacacgttgtcggtgtgtctgttttgatggtgttgttatgcagtgttaattacagtctgtgtgaaaagatcaaaacgtataagctcacaagaggaagcttaagtgttactttcagtaactatggtgctgtcatgacgtctcttctcctccctgacagacatggtctgaaaatttcttttttttttactgatttttctgtgtttcaaatctgaatttgcttttcttatgattcaggaaaacaagacgatgttgttcttggatttgatactgttgatggttacaag

SEQ ID NO: 157742 - DNA, 585 bp, Arabidopsis thaliana landsberg
  unsure (1)..(585): unsure at all n locations
ccaagtatattggatcaacgggtntgattcacgatttgtcatttcatcttcgtggagagagtttgatctgatttgttgatcgtcagcgttatgtctagtccgagaagtaacaagccgaagattgtcaacggtcctggtggttatattctacaagacgttcctcatctcattgattaccttcctgatcttcctgtatgtttcacttgatctctgattggttctaaattgatttgaaaatttctcgatttgcacaaagagatcgaatctgatatcgtctagttaacaaaggaggaatctttagctttgggtttcaatgttctgatctgtttctggtttactcttaataaaatggtgataattcgtggttttgatgttattgcagacttatccaaatccattgcaagacaatccagcttactcagtggttaagtaagtatcttcacctatttcagacgtttccattgcttaaagttcatagtttttgttctcatttggatgttttttatcaggcaatactttgttcatgctgatgatagtgtccctgagaaggtaattttcaagcataatccttttttacctgtaact

SEQ ID NO: 157743 - DNA, 964 bp, Arabidopsis thaliana landsberg
atgtccccaaccggtgtttcccagaggccggagtctttgaggtattcactggagctgctatcgggaggagaagaagatgatgatacgttgcaagaaagtagtcgtgatagagacattaactgagactgagatcttgagcttccatagcttctctggacacaacctcggtttgctacctttcccatcttcaatctagcattgttactcgacaatggaggaaaatggattgaagctgatgcggtatcagcacctttgatgattcctgtgttcacttttgatggttctgctcgatgttgcttccatgctagaaatgagctttctagtcttgattgtacctgccaagtttacatatatcaacactaacttcttctaatcgagacaaaccgagattatactgaaaaataagagagtattaccgcaggaaagagggtacacgaagcaaaagacaatgaggatgaagaaaaaggagaattcctccttcccttgtctgcagatccaaaacttgatggcccaagatcatcatcatcatcatcatcgtcatcatcatcatgacgtatgagaacaatagtgtaccaagaattgtaatcaagaaagttctagcaaagcttgagaaggaaggtgaaggagctgtcgttagaaatggcatcacaaagtgagttctcttcttcttctttctcaaaagcaaaatccaatgccttcaccttcaagtttcatattttttttttctttttgggttgattcaggattgaccagacgttattggacccgttcgtgttgctagttgaattttcctgtaagtttcttccttcccccgaatctgtcaattaaaagtgtggttcttttattatgttagcatgtcataatcatttgctctgtttgttaatcagtttcaatctcagctggattcccagatcatcctcacagaggtcaatttcacatataccatcttacacacggagttgct

SEQ ID NO: 157744 - DNA, 351 bp, Arabidopsis thaliana landsberg
ggcaattattagggacttgctgtcacacacacttttgttctcggctcacctgctgaaggcagttaactttgttgcagaacttgattggtaatcaatattcaagagctacggatatcccatatcatttctagtctctcctcttgaagaaaagcaacacattttcacgtacctattatctaattagctacttatgagaaatgactaatgacttatccattcttcttggcttttctagcattttatcgttggcttgtgtagcccatcagaataactacgtaaggcctgtcctgacagtaaaatcattgcttgatattcgaaaatggagggtgaagttgactctatcagctgcac

SEQ ID NO: 157745 - DNA, 1606 bp, Arabidopsis thaliana landsberg
gcgcccccaatctctctcaaccaaggcgattttcatctttgaaaccctagtttcttatcgattccgcctctccggccaccggcgctcctcgctgtggtcgtgagagggcccatgtgtttctccgctcgccggtttggccctttccaatcggcgatttgacgagtttgacgatcgagttgtgtggtgaggtcttcggtggtgcttcctgcggttgataaggcgtcggcttgtcttggtcctatcggtgaggacggtgattgtcaccttcccggcggtctcgctcttcctctagattgctcgtggacagcatctgagcttttgtgaggctccctacggtggttctcggtggtttactctacgcgttgttttcgacgacgtttctgcttgtctcgtttcaagtggtggttaggtcctgttctggcaagtggtttgagcagtatggtctcccagatctagtctctctttcctttggcgtgcggcggatctccaatggttgtggctcggtggggcgtattatgctctgtccgacattggaaagctttgctctcctctcttctgtgcctgcttcatgtcttcactcggttagttttttctccctccgctttgaaagagtcgttggtttccctggataaacgcgtgctcctgtaggttttgttctctgtcgcttgttgttgtgttagcggcgactgtctgtgcttaggtttcaacctctggttgtgtcgttctctagctcttgtcttcactgggggtcttgttcagttcattgtgtgtctgttggtgtggcttgttgttcgagccggcttctctgacttttgcgagtccccttttgaccactttattcagctcatctcccaagccaaaggtggggacgagacaatgaagaatgagtattgtccgagacttgctttgcttctgcaattgtttcttgttagtttcgtctaggatggagttttaaggcttcgcttgatcaaaggtttggactgcctcagatcgcttgcgcctttagtaactcctcgcatctccaagacatgtcgcacttgttttctgctttggcatccaagtttattgcttccttgttgcattaatgtctgcgcttctgctcactgcttcggattagtgttagctgcgtgttaagcttcgaaaaaggttaggtagtcttggtgtttgatcttgcgactggtgatgctagtatggcattttgagaatatgatgttgctatgcacgtgctactgacttcaggaggaacttggtatagtggtaagcattgcctgcctcattttgctcgtgtagttccgcagttgatctctcggctcgggctgtcgttgaaaggacgacctactcgcttatcatcaagctcttcgctgccttgttctctctttcactcttgtttctcttcccagctacactttagggattctttagatcttgtttcaattctttcttcttccaaaggcatttgtttgtttacggattgaatcgaagttttgatcaagaatgtgtatgcttccatgttttttaaacttttttggcatgggaccataaatttggttatgttttcttgtgtaaccttaattttcattgtgaaatgaatatttacattcttagc

SEQ ID NO: 157746 - DNA, 2461 bp, Arabidopsis thaliana landsberg
atgtttttggaacaagcaagttcgacagaagaaacaatagaagtttatcagccaagtggagaaaagattcaacaaacagacaagaagcttcacgaccaaaaggcactcgccgagatctatctccttagcctaaccgatgaacttgtgacaagcacaaggtctacatttggatatgtagctcaaggtcttggaggtttaaagccatggatactctatagacccgagaaccgtacaactcctgatccttcgtgtggtcgggctatgtcgatggagccttgtttccactcgcctccattctatgattgtaaagccaaaacgggtattgacacgggaacactagttccccatgtgagacattgtgaggatatcagctggggactaaagctagtatgattttttgtgtgctttactctgtttttgattatttgatgtatcattttaacttcttaaattagctttaattaagtcaatttttgtgcttttgacattttctcttaaattagataaaacaagagcataaaggttgagtttttattaccaaagtctccgtttttttttgttgatgatctttttgcttattctcttactcttcctatgtaacaaatgaggaaagtaaaagggagagatcagatttgatttctatttccatttttgtttagatcttagggtttctgaataatgtatccctccagaagaagattatctctttccagagccattgataaagaaccggaggaacaattaggagtccaagaaaagaggtgcagattcttaggagcaatgagaattacagagatcttagctttgttcatggttttagtccctgtctcgctagtaatcgtagccatgtttggatatgatcaaggaaatggctttgtacaagcatctagattcataccaatggaaccaaatgtgacatcctcatcagatgattcaacattgcagagagatcaagaacaaaaaggtaaacttactttcttctttttgttttgaaatgtttctaaatctttctttgaatgtttcatcagattctgtagatttgtctctgcttggaggactacttgtatctggtttcaagaaagagtcttgcttgagtagataccaatcttacctctaccgtaaagcttcaccgtataaaccttcgttgcatctactttcgaagcttcgagcttacgaagagcttcataaaggatgtggaccaggaacaaggtcgtataccaatgcggaaagattgcttaaacagaaacaaacaggtgagatagaatcagaaggatgcaagtatgttgtatggatgtcgtttagcggattaggaaacaggattatcagtattgcttctgtgtttctgtatgcaatgttgacagatagagtcttgcttgttgaaggaggagagcagttcgcggatttattctgcgaaccgttcctcgataccacttggttactaccgaaggatttcaccttagctagtcagttcagtggctttggtcaaaactcagctcattgccatggagatatgctgaagaggaaactgattaatgaatcctctgtttcgtctctgtctcatctctatcttcatctagctcatgactacaatgagcacgacaaaatgtttttctgtgaagaagatcagaatctctcaaagaatgttccttggttgatcatgaggacaaacaacttctttgcaccgtctctcttcttgatcccttctttcgaggaagagctcggtatgatgtttcccgagaaaggaacggtgtttcaccatttaggtcgttaccttttccatccttcaaatcaagtgtggggactaatcacaagatactatcaagcttacttagccaaagctgatgaaaggattggtcttcaaataagagtctttgatgagaaatccggtgtatctcctcgagtcactaagcaaatcatttcgtgtgttcaaaacgaggatttgttaccgagactaagcaaaggtgaagaacaatacaagcagccatcagaagaagagttgaaactcaaatctgtcttggtcacttctttaacaacaggttactttgagatcttgaaaacaatgtattgggagaatccaactgtaacaagagatgtgattggaatacatcagccaagtcatgaaggacatcaacaaacagagaagctaatgcataacaggaaagcttgggcagagatgtacttactcagcttaaccgataagttggttattagtgcttggtctacatttggttatgtagctcaaggacttggaggattaagagcttggattctgtataaacaagagaatcaaaccaacccaaatccaccttgcggtagagctatgtcaccagatccttgtttccatgctcctccttactatgattgcaaagcaaagaaaggaactgacactggtaatgttgtcccgcatgttagacattgtgaagatattagctggggacttaagcttgttgacaacttttag

SEQ ID NO: 157747 - DNA, 606 bp, Arabidopsis thaliana landsberg
tgtccagcggttccaggagttgttcgctcaaacaaagtacaaggaggctgctgagcttgctgctgaatctcctcaaggaattctaaggacacctgatacagtggccaaattccaggtgtctatttcatatccaagcaactatgtgtaaacatgtttatttatgatgaaatgttggtaacaccaatttttcaactctataattttgcagagtgttcctgtacaagctggacaaactcctccattgttacagtattttgggactcttttgactagagggaaactcaattcatatgagtcactggaactatctcggctggttgtgaaccaaaacaagaagaacctcctggaaaactggttggcagaggataaactagaatgcagtgaagaacttggagaccttgtgaaggtaatcttgaaatggatgattttattcaaaatgtgtgatatgtctcctatggtgtgttgtgacgataaacctttctgttccagactgtggataatgatctcgctctgaaaatatacatcaaagctcgggcgactccaaaagttgtagcagcttttgcagaaagaagggagtttgacaaaatactgatttactcaaagcag

SEQ ID NO: 157748 - DNA, 713 bp, Arabidopsis thaliana landsberg
gcaaagccgatgcccggtgtgcttttcgatatgcaacaggacgcatcactgtatttggtagcgtgaatgtaaatgccctttctgcagtgatgtggatgctcctacagggcagcctcgtgggccagaaaataccaaggaagatgatgaaccgcagaggcagtggttgggccaagcacctccgcttcgccaaccaacattgcagccaccaaacgtcaacctcaaatcctgtttcaagaacccagtggatgacccgagcagtagtagcatcaatgtaagcggtaaccgcgcagcggtaagagtcaaattcatgttaggtggtaaagagaactcgagtaaagcgaacaacaaaccaccacaggtcccaatgtaccttgaatagaaacagtgggccttcttcatcatcatcatctgttccaatggaatttgttagtaagaagtttcaaaacgttgttcatcatcaacagcttcctccttctacattgcctccaattcttcctctccctccacaatacacaaaaccacaacaacttcccattaaaccagtagaccacgtcgaaccaccaatgccaccttcaagaaacttccgtggcccgagcccagcggttagcgctggggacatctctcaccagatgctcaaccttttgtcaaaatgcaacgaagtagtggctaacgtcacgggcttattgggctacgtcccttatcatcccttgtaa

SEQ ID NO: 157749 - DNA, 993 bp, Arabidopsis thaliana landsberg
atgtaccatgttattcataaagaagtttatgactggtttggtgtaagttttgacaagtttgggcgaacttcaactccagaacagactgaggtgtgccaagcaattttcaacaagttgtgggacaacaagtggctttcagagaacaccatgcagcaggtgaatgcttttactccaatgccagttagacttatttgatcgcaagtgcatacatatgttcttcgtaagtaaaagagtctacaccactcagttagcggggttttaactctcatgtctttgtggcccattgtatcttcagctttactgcgatacatgcaagaagttcttagctgaccggcttgttgagggttcttgtccgttcgaaggatgtaattatgattctgctcgtggagatcagtgcgaaaaatgtggaaagctcctgaatcctactgaacttaaagatccgaagtgcaaggtgggctatgcttctcttcttcatggccatcatcccattaagggattgtatttgtgtggttttatactgtttatagcaatacattacagtattcgtaaagtctctctgggacattgcatgcttcttcacgcctgtacaaattcccgttcacaaaaaagatcttgggtaccttctattgtagagatatcaatataacttaaatgtggaaacatgaggcgcaattgcactagttaacaagtgaagacagttattatgcagttctagtgttgtggccgtacagatttattgcatatgcttgtaatatattactggtaatggctagctgattttgtttgtctggagcatactttgtttttctggttcacagagttcactgtataggccattgtgtttgttgatatagctttctacagaggtgcaagactatgtttgtaattactgtgaatactaatgatttatcttttcaaacaggtctgtcaaaacacaccccgaattcgcgacacagaccacctgtttattgagcttccgttactgaaagatag

SEQ ID NO: 157750 - DNA, 12655 bp, Arabidopsis thaliana landsberg
acagctcgttgccaagcactgggtgtggtcgagtgacaggtcgagtaacagacagaaaatgtaacaggtattctcgactgcacagtctcttgccagacaactgggtagttgccaaacaactgggtggtcgagtatcacgcaaaaaatgcaaaaagtaaacaacatgcagcaagatgcagtaaacaaagcagattaaacaaagaaatcaattagatgagaaagtcccgaggatggggtaattgagtagtttcgtttcctcagtttacaggtgattgacatgctcaataaattatccctagaaaacaagttcgataaccaaatctaaatgccaccgcaacagagaccctcaagttaaaccagtcccagactcaatcaccattgacgagagctaacctaacaggcattacgaatcaacaagtaaagccaaaacgctccttgtaaccaatacctttgtacagagccatgaatgtctgggctcaaattccagttgatcagaaagcaataggcattaagaataactaatccataagggatatatcaatcaatactcaatcacctagcatactgagaattctacactactctaacccatcctcagaaacctattcactactcagacatcataacagaaagcataaacattgaacaagttgaaaacatgctaacaacagggtaacaaaaggatgataacagaatgaacaacaataaacgaaatcaagaacaaaagctgaatactgaatagataaagagaaatccggattacaaaaagtctagaacacaaggtctgcggaaataaaactaggtaaaaaacttcttgtctgcgaaaatgagaagtacatgctacttatagccaaatatcccgaaaccctaatactcaaaacgacgaagtatttggacgggttaagaactgtactcgacccaggtggtcgagtgagaggtcgagtgaatagctggagtcttcttttcttccttgtgctcgagtgtctggttgagtgcggaatgaagaaggctctgaagcttgtcatcgagtatgcagtcgagcggtgtgatggaggtactcgacctctaggtagagtgatgaggtcgagtattggtctagcagtgaaggtgaaagcactcgacctgggggtcgagtgaggtgatcgagtggtgtcagaagatactcgacttctaggtggagtgaagaggtcgagtggtgaagtgaagtggtgatgtcctatgctcgacctgggggtcgagtggtctcttgggatcttgaagctcctgctcgacctcttggtcgagtggtttgtcgtgatcaggtctgcttcttccagatggctcgtcaacagctccaaatcacctgaaatcaacgcaaatatgcaacatgcatgcaaaactatcctaaacatgcaaagtggtgacaaatgatgtgaaatggtataaaacagtgatgatatgatgctaaaatgatgacaaatggatgctcaaaacatgcaaaatacacacttatcacacttcagggtcgaattccactgagctctcgctgttcaaacaatagacttatgatgttattgaatgaagtaattgaatgtaaatgacaaataaacaagtaaacgagttgtagattcaagtgattaaagcatcgggtctaaggaattgtctcgggagatagataaattgtagatctagctaatattaggattgttatagcacagataaataactcaaactatgattctagagtaacctgtggtgttctgcgaaactttttatacttagagctaagataaccggagaagccgagaaatcttatactaaagcatgcatttttatcaagaatgattagttcacctagtatctaaactagagcccttctatgagcctatctgttctttcttaaatgcctaggctcatctatgatggatcaaatagcaagtacctatggtggacatacctattatctaatatcaagttctagttagctactctataactagcattaagaacaatcaagataaagaactctacagataacctaccaagggggcaatctactaaatcatctaaatccctaatgagaaaccctaaacctaacaagtgaattactcagacatgatcaaagaaacacatatcatagtctgaataaggaatcaataatagcaagaaaaagagtaaagaaggatcttctttaaagggagtctccacagggttttgctcccaatgtacaaaagagaaaagaagattagcctctccaagcttaggtctaaacaatgaccttaaaatctatatatataacctaaaacgtgatgggccttctttagaaataagggaaggttttcggccgaatttggaaatcttcaaaacttaaataagttgtgtcttttaattgcggtcaagtattggtgtcgctcgacaccaagggtagtctcaatcgacacctacgcgatttttagtctctagatttctttggcaacataaattctctgttttcctccagaatgctccattatctccaaatgaatcttaaacatgtaaagacctgaaaaggactagaaaagactctacaaataacaaatagactctaaaacctatacctaaaacataactaaaaccggtaaaaatagggttatatcaataatgttcatatcaatgtggaatggtgtaaccaaaatggctccataaaatatctatttaagtatatcaacaaaggaccagacaaaattttctttattgttgagcctgttaagcagactacaggtggggagtccaaaactcctgggcaagaacaaggttcaactgagaagaagaacgagataaagattggttcgattgcaagttaactaattactttgtaatttagttaataatttcttttggtataacattgaatcactaattcatgtcaaccagcataaattatttgcagatacgtttcagcatccgaaactatttggaggatatttaaatatccaattcaacatagatcaactcctgtttagaaattatcttctcatttagaagcaaaacaaccagcttattttgatctacatgctaatattgaagatgttctagaacgattagctaatgaagactctcagtttatggcttgtttcactttgaatagaaaaaatgcagttggaaggaatggtaagcgtgccagatattgtttatatgctcaaattcctgcctatttcacatgggatgaagaaaataaggcgtttaaaaagagatccaattgtttttctttgggtcgtattcactatattccaaggaaaatggaagatgaatactttcttagagttctgctaaacattgcatgctacaagaaaacagacattttacgatagatatttgcaaaagaaaagtttcctcgcaaatttgcaacaatattgcaagtatattgctaggcactccgccactatcgtaaaattgtcgcaaatttgcaatggacacggtcgtcgcaaatttgcgatgaaccttcgtgaaatggcaatgaatttgcaaagaacgcctgttctttgcagctccgtagcaaatttgcaacgaacttacgacgaatgttttcatagcatgacttacgacggaattgcaggaatagttaggtacgcacgttttaaataaaaattagtaggtgggtggcaggtagattggtaggtgaaatccctcgcaaatttcatgcaattccttcgcaatattttttgtttttcccctataaatacaatacgttagttgacggaaaatcacaactcaaacaaacacaaacacaaagaaaaaatataaaaacaaacacaaaaaaaaaaaaaatgtttggaagcggtggagaacatgatatatattcactccgacagtggatgtataatcatagagattcagttaccggtgatgtcacgaaggagtttaccgatggattgcgcgggttcatgtaccaagcaacaaatgaatcatttgctcgtgcaaatggttcaatattctgcccatgtcgtaagtgtctcaacgataaatatttggaatttaatctagtgaagaagcatctatataatagaggatttatgccgaactattatttatggttgcgtcatggggaaggttgtagagatagtgcgggcagtagtaatatgaattatggtgttgttgaacctactgattattatgaaaattatggtcatcatcaagaatctgatcaagggtataaccatgaaaatagatttcatgatatggttacagatgcatttcatgaaactactgctgcatttcatgaaaatattatcgaagaacccaacgtagatgcacaacgcttttatgatatgttagatgctgctaatcaacctatctacgagggatgtagagaagggcaatctaagttatctttggcatctaggatgatgacaattaaagctgataataacttaagtgaaaattgcatggattcttgggctgaacttattaaagaatatttaccagcagataatatatcggctgagagttactatgaaatacagaagttggtttcaagtcttgggttaccatcagaaatgattgatgtatgcattgactattgcatgattttctggaaagatgatgaaacctgcaggaatgtcggttttgcgagaagccgagatatcagcctactggtggaaggacgcgagtaccatataaacgtatgtggtacttgccaataacagatagactgaaacgcttataccaatcagaaagaactgcagcaaaaatgagatggcatgctgaacattcaacagtaaatggtgaagttactcacccatctgatgcaaaggcgtggaaacactttcaaacggtatatcctgactttgctagcgagtgtagaaatgtgtatcttggcttatgtacagatggatttagtccatttggtatgtctgggaggcaatattctttatggccggttattgtgacaccatacaatcttcctccaaatatgtgtatgcaaagcgaatttctgttcttaagtattctagtgccaggcccgaagcatccgaagcgagcactcgatgttttcttgcaaccgttgattcatgagctgaagaatttgtggtacgaaggtgtccagacgtttgattactcgagcaagcagaatttcaatatgcgagcaatgctaatgtggacgattagtgactttcctgcatatggaatgttatctgggtggacaacacatggaagattatcgtgtccatattgtatggatcggactgacgcgtttcagctaaagcatgggcggaaatcatgttggtttgattgtcatcgtcggtttctttccatgcatcatccgtatcggaagaacaaaaaattatttaggaagaataaagttgtgcgtcttcccccaccagtttatctttctggaaatgatttgtttgaaaatattgattattatggtgctcaggaaacatgtaaacgtgggggtaactggcacactccggcgaatatgccagacggatatggaagtgcccacaattggcacaaacagagtatcttttggcaactcccatattggaaagatctcctcttgcgccataaccttgatgtgatgcacatcgagaaaaatttcttcgataattttatgcatacgcttctgaatgtgcagggaaaaactaaagatagtatgaaatcaaggttggatttggcggagatatgcaacagacctgacttgcatataacacgagatggaaaattaccggttccgaagtttcgattgactacagagggaaaaaaagcgttgttcgaatgggttaaagctgaagtgaagttcccagatggatatgtgtcaaaattttctagatgtgtagagcaaggccaaaagttctcgggtataaaaagccatgattgtcatgtcttcatgcaacggttacttccatttgtatttcttgagctgttgccggcaaatgttcatgacgccattgcaggtctgataatttaattactcagtacttttattatacgtatattaaccaataattaggttaacaattataaattctatttgtaggcataggggcatttttcagggacctctgcacaagaacattaacaaccgacggcatacaacagttagacgagaatatcccggtgttgctttgtaatttggagaaagtctttccgcctgctttttttgacgtgatggaacatttaccgattcatctaccacatgaagcagctctaggaggaccagtgcaatttcgatggatgtatccttttgagcggttcatgaaaactctaaaaggaaaggccaagaatcttgctagagtcgagggatcaatagttgccggaagtttaacagaagaaacaagccactttacatcgtattactttagtcctaccgtgagaacaaagaaaacccgtccaagacgatatgatgatggaggcgttgcaccttcatataatgttcctgatgtcccagatattttttcccagataggaagacttgcgggaaagttgaaggaagtttggtgggaagaccatacctatttacgagccgcacacaattatatcttgcggaatttagattacattcaaccgctcgaaaggtatatatgctttcttaaattttaaattctaattaagttattttttctatttattaattatggaaactagctaataaacttttttttataggatatttgatacccagattcgtgaagcatatcctgatttagaagaaaaagattatgaaacttataaagaccgggattttgctggatggttaaaatattatgtaagtattttatatactcagttacaataatacttatacacatatcgacttaaacattatgatatgtgcgtataggttgaaaatggatgtggaaatgaacccttacctctttggttacatgagcttgttcaagaaccaagaggaaagataaccactgctccgatgtatttcactcgtggatatacatttcatacgtattctcatggaagtcaaagagctacagcaaattacggaatctatgttccagcgggtgatagcgatttttatggcgttttacaacaaattatagaagttgaatatccaggactcctgaatttaaagtgcatacttttcaagtgtgattggtacgatccaataatatggcggggtgtccgagtaaataacttgggagttgtcgatattaatgcgaacagaagatatgggaaatttgaaccttatgtcttagcatcacaagcagagcaagtgagttttcttccatatcctcgtttacgtgtaagacgtgaaatgtggttatcagttgtcaaagttaatccgagaggtcgtataatcggggtaattgatgatctcgtgatgcaacaagaaagagtcggggaagtttccattccaaacatttcaaccgaagatgtttcccatatagatccacaaaatagacaacttgaacaggtccaagatgtctctgacgaagaggttgacataaacgaattcgaagaatctgattacggagaagattctaatgacggagattctaatgaggatgaaaattctcatgaagaagattatgaatccgattgaattgtattactaaggccaatattatataatttaagtaaaattatttgcttcttgacaaaaaaaaaattaaaacacaagaaaattttcttgcaagggttttgcgacggaatagtagaattaataagttggttaagtaaaccatagcatttccgtcgcaaagtcaacgatcgaattgcgaggaaataaatatatatatatacagcagacctagtttgagctctgctcaaaccctattcgcagccgtttcatccagaaaccctaatctctccttctctcccccgcgtcttcccttctcttctccggcgaatccaaacgcttctccggtggatccaatctcttctcccctcctttatcatcgaaaccctggttctctcctccttgctcaaacccaaatcgcagccctaatctcttcttctcttctccgcgtcttcccttctcttctccggcgaatccaaacgcttctccggtggatccaatctcttctcccctcctttatcatcgaaaccctagttctctcctccttgctcaaacccaaatcgcagccgtttcctaacgaaaccctaatctctccttctcttctccgacgaatcccttctattctccagcgaatccaaacgctttcaacatagatctgaggtttctccactcaatcgacgtttttctcaacccaatcgaaagatttgaaaggttataacttcttcggttcaaatccttcttctttggtttataggttcttgtctgaatgtgtatttcgatttgttgttttctttgtctaatccgatttatgttttcgttgaagatgtttgggggaaacgattatacccgatggctctctcagacaagtggttcaaatcctgtgggtggtgatgctacttctccaggtaacacatcggcggtccaagataatcgccaagcccactctcgccattcctgtcgtcactccggttcgcctgctatgtccaccggttcgcctggtatgtccaccggttcgcctgctcaatccaccggttcacctgccatatccaccggttcaccagttcttttcagtggttctccgtcgtcaccagccacaggatctccttctacaccagccagtggttcacattgttcaccggccaatcaaacgtctcagccaccatcttcacggctcaacaatctaaccttggatgagttactcgttagtcctggtcgtgagcatttaaaaaaactgcatccaaagcgtcctccaggcactctttggtaagatgttaacttctatttttagtaactgcagtttagttaagtttgttgaatgcttggtcagatgttagttttgtctgtctctgtcagtaaatgattgttatgtttgtttgttaaatgcttgctaaactcaatgttacaactagggctgtaaaatattattgtagatgtaaagctataaatactcatcttattgttttgagaaaggtagtcgtttttgtataagttgataaatactcatcttatactcatcttacttatcttacttagaatactcatcttatactcatcttacttagaatactaaaacacttagaatgctcaagtttctctaaccttcaattaaagctgtgaacctcaacaacttttatatgctaattgtattgttgatttctttctaggtttggtgaagatggggaagtggctgccacagttcgcagcatttttgaaaaagatttcaaagagcctcatgccaattggacacagacccctagtaaagtgatagacagatggtttgaaacctttgcggtaagtcactagtcacttgtgtcttttctctttgtcttgctttgacacagtctaagtaattttctttttttttaagcaaacatacaactgggacagatctataaatgcaagagttagaagtgagtttgatagcaagctgaagtctaggatgtgtgatcaagtgtgtcgctggaagggaaagtggagggaaataggtgatgatgcaaagccgaagtggatagatcctgaggtatgggctgcacttgttaagttttggctcgatcccaaatcagaagcaaagagtatcaacagtcgtaaagcgaggtatcatgatcctgatggtaccggcatatctaaacaccgctcagggcaaacatcttttaaagctcgtgcccggaaacatgtaagttgtttcagttactttttcagacaatgaacttatgtccactaatgttgactgattaatgaactctcttttgcagtctgaaaaaaccggtgaactaactcctgatttccttcaagtcctagaggagactcatagaaagcctgatggttcttttactgatggaaagtcggagtccatatacaaggaagtctcatcaaggatacaagagctggaatctgagctttgtgctggggagaatgagagtagtgggtctggtgggctgtcgattcatacaaagaacaagatctacacagaggtaaaatttaaagttaagattatggctgttctttgagtctttgttgtctggctggaataactattgttgctgttctttgagtcttgttttgtttctggaaaaacagcttgagctttgagtcttgttgtgtctgaaaatagttgtaagtagttgtgttcttctgtctcgcatatagagattgttagtgctagttgtgtctgaaaaacagttggtctttgagtctttgttgtttctgaaaactagtgtaagtacctgtgttgacctgacttgcatatatagattgttattgctagttagttcacagatttttattgcccttattatttaattgtctgattttgatgatgatgatgcaaatagttaggatgtatgcttagcagtttacttgttgtaatgctccatcgatttaaagattgttagttttgaatcaaagcttacacatggattgttttgttggcaggttgctccgagaaagaaaaatagaatttatggtgttggttctttgcagcaagaagcagcctctgcccatagcggtcctcctcctccagctgaagatcctgttcttcttgcggagaagcttgcacacgctgaagcagctcttcaagctcaggcgacacaactacaaaagagtgccgagaagatgcaccaagtctttgagtaccttgccaagaaagatcctgtgtttgctgcaatgttagagtctgaaaacgagtcaacggccaccaacacagaagcaaaccgagttagcactcctcagactacaccggtgacacctttgacgggagaaaacatgggagacaaccccggtaatggtaccgcaaccgcaaccgcctctttatctaagtccttttaaacaatgtcactctttcttaacttgtttccttgtaaccaactttctaagacttttgaatttcagtttttgtatccaacatttgaattttcaatttcaatttcaattccagttcaatttcttctcagcttttgaattgttttctcagcaaaatcaaattaccaaataagagaaacagactgtaacagttcagcttggccttgcatattcgtcgcaaacacatgctacgagattacaatagaaaacaaaaacctagcaaatgcctcgcaatatttgcgacggacgtacgacacaaaattagcaatgacattgcaagtaatatattcgtcgcaaaatacaaggcgtttgcgacgaaacaccggtctactgttcatgaatttgcaacaaaagcaatgtcgcaaatgcctcgcaatatttgcgacggatgtacgacacaataattagcaatgctattgcaagtaatatgttcgtcgcaaaatacgaggcgtttgcgacgaatattcttccttgcacagtttgcgacgaaaacttttcgtcgcaagcgtagcgacggattagcaacgtatcccgatttgcgagaagcgtattgcgatgaatagtatattgttgcaattcccttgcgaatgaccttttgcgagggattacctacatattcttccattgcaaaacggttgttttcttgtagtgattatcctaaaacaccaatcatgtcgttgtagtattttaggttgtcaatccaaatgggtgtgatgctaacaatcaagacgcaatcagagttcagagagtcaagccaagcaataacaggttttggtgtgttctagcagtcctaagtgaacatgcaaaaaacagaaaatcaagtagaaacaataaaacactcgaccaacacagctcgttgcagaacactgggtgtggtcgagtaacaagccgtaaaggaaacaaagacactagactgcacagtctgttgccaaacaactaggtggtcgagtatcaggtcgtgtaacaggaaagaaatgcaaattctaagcaacaggtaacaagatgaagtaaacaacagaagagtaaacaaagaaatcaatcagataaggcattcccgaggatgggataattgagtagtttcgtttcctcagtttacaagtgattgacatgctcaacaaattatccctagacaacaagttcggtaaccaaatctaagtgccaccgcaacagagaccctcaagttaaactagtcccagactcaatcaccattgacgagacctaacctaacaggcattacgaatcaacaagttaaagccaaaacgctccctgcaaccaataccttggtacagggtcacgaatctctggaattagtggttcaggcatttcatcgaacaccttttgggcgcggaaatgtctgggctcaaattccagttgatcagaaagcaataggcattaagaacaactaatccagaagggatctatcaatcaatactcaatcacctagcatactgagaattctacactactctaacccatcctcagaaacctattcactactcagacatcatgacagaaagcataaacgttgaacaggttgaagacatgataacagcagtatgataacagaatgaataacagtaaacgaaaatcaagaacagaaactgaatattgaatactgaatagataaagagaaatccggattacaaaaagtctagaacacaaggtctgcggaaataaaaactaggtaaaaaaaactctcttgcgaaaatgagaagtacatgctacttatagccaaatatcccgaaaccctaatactcaaaacgacgaagtatttggacgggttaagaactgtactcgaccaacgtg

SEQ ID NO: 157751 - DNA, 399 bp, Arabidopsis thaliana landsberg
  unsure (1)..(399): unsure at all n locations
gtttttttttttgtgtttcttcaatggcgatcattgnaaatgcgttgcgtcaagcgtttatgccaaagcaagagtacgagagccttagggaagaagatagagcctggattaagcttcagaggccgactttagtctcgatcgtggctttcctttgttttgtcatcttcacttgcacgatcgtcagcttgaaaattgtatttccttcgaatgttcttaagaggccattttgcagcgacataaagctacaacctttgcctatctatggcaaagctcgtgactccgatctgtttcccggtgctttttacttgaccgatcaagaaactgttgattattactggatggtcgttttcgttccctcgactataatcttccttgtatcatctatttatcttgtagcag

SEQ ID NO: 157752 - DNA, 1535 bp, Arabidopsis thaliana landsberg
  unsure (1)..(1535): unsure at all n locations
gaacgagagataagttcgagtagattcgcggctgtcgacgcttctgatttgaagtatttggcgttttttggaagagttcattgcttctttggttgaggattcttcgtgaatcgctgggattttgtgttctaaggtttttaaagcaagctttagcttagggaaaattttaagaatgaaaggtgaaagagaagtgaagaatggtgtttctgaggaagagagagaggtgaagaggaagagagtgatggaacggtntgattcgccacctccaccactaggtttcaacaatcctcttttgccgtttgctaatgcttacgatgatgataataaccagcagaataaatcgcaaactcgttgtaatgtagttgcgaaaggagagggaaatggtaacaaagtgaaaggagaagctcaagtagaggtcgatgacgacgaagatgatgatgatgatgcttcgaaggggagaggaaagcattcacgccatgttgaagttcgtcgtgattgtccttatcttgatactgttaatcgtcaggtatatcattgaccaatttcttgtgtttggtacttgtaatgtatctaatctatggtggatctttaagcttctgctaggttcattatattgctggtttgagattagcgtttaaactcatatcttatggttgatttcaggtgttggattttgatttcgagaggttttgctctgtctcattgtcaaatctgaatgtgtatgcgtgtcttgtttgtgggaagtactttcaaggaagaagccagaagtctcatgcttatacacatagcttggaagcaggacaccacgtttacatcaatcttctgacagagaaggtttattgtcttcctgatagttacgagatcaatgacccttctttggatgacattcgccatgttttaaacccaaggtatattagatcttgtgactaactacatcatagttcttactgcattttgggtattgatttgtgaacatgtgagcctttgcacgtagttaacaacaacaaaattgctttgactattatctcaatcagtttcttcttactagttctctgtatcatctaccatctatttatatttttttgcatgatagcttgaacatattactcttctttcatgttttgtcaatttttctttgatttttcagttcctttgtatgaaggcttcggtgctatccatttacaggtttagtagagcacaagtaaacgagcttgacaagaataggcagtggtctagggctcttgatggctccgactatcttccaggaatggtaatcctttctctttgattacacttgatcttgaaattaatgtctcctaaaggttaagcttgtaaatatgtaggtggggttgaacaacatacaaaagacagagtttgtgaatgttacaatccagtcgttgatgagagtgactcgtgtaaggaatttcttcctcattcctgaaaattatcagcactgcaagtctcctcttgttcaccgttttggggaactaactcgcaagatttggcatgctcgaaactttaaaggacaagtctga

SEQ ID NO: 157753 - DNA, 431 bp, Arabidopsis thaliana landsberg
atggacgtcaaaagcatagatgacgggtgagagttttgattcttctttatacacacttaaattgttctataaagcctcattctcactgctaaacaaacaccctctattttttttttggctcatcagttcatttctgctagagagaacagagttcttcattggcaatgtcacaaatgcagtggtaagccaagtcatgttggtggtgagagagagaaatctccagctgatccgtaacattcccacggaggtcaaatccatggctgtctacggtgaccagataaggctccaacaggttctcgcagaatttctgctaagtattgtcccgtatgcacccatggaaggctcggtagagctccatctatgcccgactctgaaccaaatggctgacggattctccgctgtacgtttggagttcaggtacattccatcat

SEQ ID NO: 157754 - DNA, 1117 bp, Arabidopsis thaliana landsberg
aatacaatttgcaatgagaaggaagcattggctaataatgttgcaagttgtgacttggataagaagcgaaaaaggagcagaggaagcgatgttttgacattccccgtttcacttcctgaccttaacggagagggaaacacttctggcactgacaaagtccctggctttgacctaaaccagatctcggtaaagccaaacaacttgtgttattttagtgtcttccttttggtagagtctatagaactttattagtttgatttgtgttttggttgtagagagaagaagaggagccggaagtgaatggtgaacatatggtcgcggaagcaatgaagaatgcaatgcttgataacaggatcagtgatctacatgttgaaagaaagttacccatttgcggagatgtggagaaagagttaaatagagcagtgaagaggaaggttacatggcaagatccagtggctttaagtgtttagggtgtttagtatgaaataggatttgagataatgatttgtcgtcccaatatgcacatatgcttatacaagtatatagatataagatttgatttgatgacttagaaagtcattacttccatatgtccaacataggaaaacctttgaataataactcttgtcataagtgactacattatccttttaatccaatttggtaattagggaatctcatttgttgttggatgttcttactcattctcttaatcaaagtcgaggagcagaaccgttttgctccaacttcaaactgacagaacattaatataaactggatatcaaaattggaaaggttactaatgaccaataaaaaaaagctctgttttgtaataggtaaagagcatgcttgattatagaagctgaaaaagtctcagcatttttgtttccattgactacatttattccattgacgataaaaaaagtctcaacatttcaagtctattcgtactcaaaacgacgaagcgttcttcaatcctatggaagtcaacggcggggaaggaaaggtggagatgggatcgggactctaccctgactggtctgagttgactcgagaatgtcttcttgacatcttctcacggctaagccaggaacaaagatggattggaccgatgctg

SEQ ID NO: 157755 - DNA, 377 bp, Arabidopsis thaliana landsberg
atgttcatattcggggaaaaagattctacttgccctttgaaatctatcctcaagattcacagtcctcagttttactggaaggtaatttatgcataatacaataagagaagtttgaaaagcctttctatagctcttgattcttgattctcttctcttaggttatgacacaagcagatttaggactcgcagatgcttatatcagtggagatttttctttcgtcgataaagactcaggacttttgaatttgattatggtacatgttacatactctacttgtgcatatatggatacttacttcttcgattgttccagttatttctaatgttgatttgcagattctcatcgctaacagagaccagcgctcaccaaaatcaaa

SEQ ID NO: 157756 - DNA, 1612 bp, Arabidopsis thaliana landsberg
tgatcatgaaggtgcaaatgttagtgctcacactggtcacctggtatgtatatactctccatgtgtcaattttaaaggattgacctacctgaagtttctaatggttcttttgctaaaaattcttgttcatgtaggttggtagtgcactttcagacccatatctgtcatttgcagctgcattaaatggtttagctgggccactccatggtttggctaatcaggtatcctcccttgtctatatcttgaataagtcttaaatcttcaatctacaatagagcttcgtaagtggctttttgtattttatctaggtaggttgtgatagtttgatgatacaaccataaattggagagaacaaattcttagtctttttttattattgtttcaacaggaagttttgctttggatcaaatcagtcgtagaggaatgtggagaagacatatcaaaagaacagttgaaagaatatgtttggaaaacattaaacagtggcaaggtaaaaacaggaaattcctctgccttgacattctttactttctggtcttgtacctgaatcccacttttgaagccagccaacaagactgatggagcatgcgaaaatgaattaacatcttgtctactagtcatcataataggctaatatttcaatttattgtgtgatactgttatgggtcctcttatttacgacctcatagtttggtcagttgctctaacagaatcctagtaagtaatactgccataagagctttggatcctgtttttccctatcctagtttaccttgtggatgtaatgttacaaggatagtctaatgatgatctattgacgagtcttgttttgtctctaggttattccgggatatggtcacggtgttctgcgcaatactgatccaagatatgtatgccaaagagaatttgccttgaagcatctacctgacgaccctcttttccagctggtactttttttctttctcttttctcttttctgttcggttctcaaaattctatcaatgttcagtagctaacaaaatccttccaactctgtaggtgtcaaagctttatgaagttgtgcctcctgttctcactgagcttggaaaggtagtatctctatccttcgtttaccatggtgatccttcaatattccaccaacaactccacaacaccttacctacatgctaggggcttatgaatctcttgcgaatcaattttttatttacttgcgaatccgatgatggcttgttacaggtgaagaacccgtggccaaatgttgatgctcacagtggggtcttgctgaaccactatggtctaaccgaagcaaggtaagaagtagacacctccttcaagtatcattgagccttaggatagcactcaaatataatatctgtgcgttttataggtactacaccgtgctctttggtgtttcaaggagtcttggcatctgctctcaggtaacatatatatatttacacattacgcctttgttactacataacatttaaaacagaactcatatgctctccattctcatttgtgtttaattcacagcttatatgggaccgagctcttggacttgcacttgagaggccaaagagtgttaccatggactggcttgaagcccatt

SEQ ID NO: 157757 - DNA, 349 bp, Arabidopsis thaliana landsberg
agattctactactctgctcgaaagtgattcatctaatacagctatcattcctgaaactagacaattaactcttgaaggcttttcattgagcgtcccagctgatcagatgagagtgattcataacattaatacgctgattgctgaggtagtttttatggatgattgatttgatgttttctttagctgtgagaagcaatactttttaattctcaaggtgctatcattttctcaatctggataataacgtgatgattattttgtttcttcggctgcagttggcaattgagaaggaagaactggtgcaagcactgtcatctgagttatctcgaagtgcgcatgtgcaggtaca

SEQ ID NO: 157758 - DNA, 393 bp, Arabidopsis thaliana landsberg
cgtgagatcagccatttgcggtatgatacattcgattatcggaggtcagccactgcttattctcggtgttgcagagcctactgtgattatgtacacattcatgtttaactttgcaaaggccagacctgaattgggacgagacctgttcttggcgtggtctggatggtgagtttttttttttttttttttgcttataagagtgatcagggtgttgaaaactgtttgaaatctgtgtgtagggtttgtgtttggactgctttgatgctgtttgtgttggcaatatgtggagcttgttctatcatcaataggtttactcgagtagctggagaattgtttggactgcttattgctatgcttttcatgcagcaagccatcaaagtgcgaaccctttag

SEQ ID NO: 157759 - DNA, 1345 bp, Arabidopsis thaliana landsberg
ttcccgattgagtgttcactaccatggatgctgatagactacattctggaagcccagaattcaggccttcttgagagtgttctgctaccttttgacatttataatgactcagctcaacaagctctggttgttctgaggcagagattcctctatgatgaaattgaagctgaggtaattagatttcaattctgatctcaacaggtataatcctataggtcttcttgaatgaaaaggttccttgaacaatactatcgtttcttgtctcctgtcttctttctgtaggtggaccatggttttgatatatttgtttcaaggctctcggagtctatattcacatattacaagagttggtcagcaaggtacctaattacacggtttttgatatatttacccccttcactgttaactaatgaggaactaaacccttttatcatccattgtcgagttcaacagtgagcttcttgatccatcatttctctttgccttggacaatggtgaaaagttctccatccagcctgtgaggtttactgcgttatttaagatgacaaaagtaaaggtgaataataatactactctcctgttatagagaaagtcacaattagttgaatctttagctccattgttatgacctaacataggattagattatgtttcaagcagtggttctaattatgtgtggcttggcatgtttaaacaatcttcttactgagttttggtgtgacatgcagatacttggtagaacaattaatttaagaagtttgatcgctcaaaggatgaatagaatctttagagagaatctggagtttctttttgaccgttttgagtcccaggacctatgtgctgtagtggtaagtttgttttcctttttcataatcttgattctgtatgtataacaagtttcgtttaaaatatacaaaagtggatgctctctttaattgtaggaactggagaagctgatagatatcctaaagcactcgcatgaattgctttcacaagatctttccatagaccctttcagtctcatgttgaatgaaatgcaagaaaacatatctcttgtctcattttcaagtcgacttgctacacaggtcagccatacaaaatataagtcctgagtctaatttttctcaatctttgattttttttttttttgttgcctgctagatttggtcagagatgcagagtgatttcctaccaaacttcattctttgcaataccactcagcgatttgtccgttcatcgaaagttcctcctactcagaaaccatcagtgccttctgctaagcctagtttctattgtggcactcaagtaagaacaatcttttaggccatttttttacttttaattt

SEQ ID NO: 157760 - DNA, 535 bp, Arabidopsis thaliana landsberg
taacttctgaagttgtccgtgttggtgacagagtcaatggactacgcaaaactgattctggctctgagaaaatagaagaagcaaaggtttgtgtgcatattgctttgtacttggtcagccgtgtttacgaagtgtgatgttctcatctaagcagacataaacatctttcatataggttgtgaagctaatgaaaaagaaaggtacaaccatagtttcaattgacgctgctggggctggtgatattatctgtatggctggtttgacagctccatcaataggtcacacggtggctagtgcagaggtaatatccgaatggactacttccctgttttattcttagatatataattgaattctgcttttaacataacttcttccattgatccctatttgaatattaagacgcttgaataaatgcttcatttttattgtctttcaggtcacaactgcactccctactgttgagttagatccaccaacaatttctatgacgtttggtgtcaatgactctccgttggctggtcaggatggcacc

SEQ ID NO: 157761 - DNA, 423 bp, Arabidopsis thaliana landsberg
gcccatttttagcccaatgcaaatgtcgcatttatccccacatcgccacaggtaagtcttataaataaagatctaatcctcactatccacagaagtcttaccattacattctcaacaaaaactcgctgatttgatctctcgtcgatataacaatagaggtgtcttacgcgtgatctgaaacctagattcgattcagtcagaacttttgtcgaagatggaaagacaaatcatggcttcttctaaaaaggtacaacgggaagagaatacgaaagaggaatatttaccaaacaagcaagtttcagatgaatcagaacatcttgagaagagttgtttgacagaagaagaagatgcgtgtttgtctgatgctagttgttgatgactaacacactaggtcgaaaatgggatctctagggaaagaagaag

SEQ ID NO: 157762 - DNA, 1073 bp, Arabidopsis thaliana landsberg
gatcagcacttgagtgtgttgaagttcaaaatggtatccaagaagctgatgttccaaatggtagtgaggcacatgatagcaatgttggaagtatttctttgtttgaagttgacgtacgagaaagattgcaggcctttttgcagtcttcagatctatatgatcctgaagaaatcttggaattggtagaaggatcagaactgtggttggaaaaggtttgtctgtcaaatttgtttccttcgattttgaatggttcttaaaaagtgtcatttagatgtgtatgcgcacataggatgcttcatgattatgttggtgcaccgattttttattcaatggattttttactgtcaaaattatgtgtgtttgcccatttgtcatgtgtaatttttttttatttgataggcaatcctataccgaaggattgggaaggagacattggtcctccaaattcttgctctgtaagttgatttaaataccaagaagtgataaagaacaaaactgaattgtctatctgattgtgtgagcaaatatagtttattttattgtgaatttgaatgtggttactgataagatcttctctggttgggcgccaggaagcttgaggattgtgcagctgcagagcaatattgtgtagagattggaagaccagatgcatttatgcagtaggttcttttccttcatttcgttacttattgtgaatgccattgtacgatcttttttccttgtgaaatccctttaaacaaaaagtttatcttaggttgcttgatatgtacctggatcctcaaaatggtaaagaacctatgttcaaggctgctgttcgtctgctccacaaccacggggaatcccttgatcctttgcaagtattggacgtaagaaacccagtcctcctccatatgtgaaaaagacactgatattgcctcttatcctacagctttttcatttggtagttgtttgatgatagagctgatatctttttttatatgcagaaattgtctcctgatatgcccttaaaactggcatcagatacaattttgagaatgctgagggctcgggttcatcatcatcgtcaaggccag

SEQ ID NO: 157763 - DNA, 1801 bp, Arabidopsis thaliana landsberg
gacagagtggaatcccaagtaccaaaacagatttcttgcaaaaaaacaatggaggaaacaaataagagtgtggttaatgattactttaccagtgctatggaacttacagagtcaggtgaccctcacgtgcctacccgttacattcttccaccttcacaacgaccaatgctcggtccaagcattggcaccagtaccatcaatcttcctgtcattgatctctccttcttacacgatcctttgcttagactatgtgtcatccatgagattgaattggcctgcaagggatttggtttctttcaggtaacactcgtgttttggctacatacactacacatgtctgttaggtaagacacatggcaagttctgcgactcagattcatgcattgttacaatccaaacaaagagaagtttgatgcttaactgtcctattcatgtgtctatatttctcagatcatcaaactcagccatgagtttcatttctcaggtcactaggactagtatggaatgtacttatcacatctaccaatcatgcttgatatatgacttatgagaaatgcagtttttatcttttgcatttctatcatacccaacaaagtcccttatcaaaaattaaataaatgaaaaagacaaagtccttggtttctgtctttattgaggataaaacaagtagagagccatgtgaagatgcttatcttcattttctacacagatgtcaagtatactgcccagtttctttaaaaacactacactagtgtcattttcatccctcttattaattacattactctgatcttctctacaggttataaaccatggaatatcatcagcagtggtgaaagatgcacaagattcagctacaaggttctttgacttacctgccgatgagaagatgcatctggtttctgataattttcaggagccagtaaggtatggtaccagcataaaccattcaacagacagagttcattactggagagatttcataaaacattactcccatcctctctcaaactggatcaatttgtggccttccaatcctccctgctacaagtaagtaaacctatctaggccaacttcactatctgataataactcaaatttgttctctttttactggtctaagaatccaattgctcaatagatgtttcagaatttgcaagaaatttgtatctaaagaatgtgactcagaactgatttgatcatctcgaaatatcattttcctatcagggaaaaggtggggaaatacgcagaagcaacgcatgttttacataagcaactaattgaagctatctcagaaagtctaggactggagaaaaattacttacaggaagaaatagaagaaggctcacaagtcatggcggtaaactgctatccagcttgtcctgaacccgagattgccttgggaatgccaccacactcggactatggctcgctgacaatcttactccagagtagcgaagggctgcagataaaggactgcaacaacaactgggtttgtgtgccgtatattgaaggagctctgatagtccagttgggagatcaggtagaagtgatgagcaatggcatatacaagagtgtggttcatcgtgtaacagtgaacaaagattacaagcggctctcttttgcaagtcttcacagtctacctatgcacaagaaaataagtccagcaactcagctcgtcaatgaaaataaaccagctgcatatggagaattcagcttcaacgattttcttgattatatatccagaaacgatattacacagaaaagattcattgatacactcagaaagaaaaacctctga

SEQ ID NO: 157764 - DNA, 993 bp, Arabidopsis thaliana landsberg
ataccatgaagctagtgagaatgcaaaagctcgggtgttggaactgttgcgcgagttatccgttaaattgcaaacaaaaataaatgttcttgtctttgcatctatgcttctggtcatttcaaaagcattattttcccatgcttggtaagtttgcggttaatcaattctcattaagaaatttctgtagttttaatctaagtactgtgcacaactacagtgaagggagaaggcgaaagtgggtttttccaacgcttgtcggattcagtttagatgaggtaactgtgcttgctagtcgttgagtttgtagacagatgcgtgcaatttctaagaaatcacaaaacatgctgggctgtcttattcttatatatctcatgcacctattttgatatattttaatatagggcgcaaaaccattagatggtgccagtcgaatgaagctgacaggcctgtcaccttattggtttgatgtatcttctggaaccgctgttcacaataccgttgacatgcaatcactgtttcttctaactggacctaacggtggtggtaaatcgagtttgctcagatcaatatgcgcagctgctctacttggaatttccggtttaatggttccagctgaatcagcttgtattcctcactttgattccatcatgcttcacatgaaatcatatgacagccctgtagacggaaaaagttctttccaggtatatatataagcatacaaatctagaattcaccaaactgtttttttttctttaattgtaatgtttgatatcctctcaactggttctgtgccatcaggtagaaatgtcggaaatacgatctattgtaagccaggctacttcgagaagcctagtgcttatagatgagatatgccgagggacagagacagcaaaggcacctgtctcgtggagtgtggtagagagtcttgacacacgtggaagctgggtatagatctactcatctccatggatcttcagttaccttttacaggga

SEQ ID NO: 157765 - DNA, 1519 bp, Arabidopsis thaliana landsberg
aggtgttagcttcttcttcattcaaaaagtcagcgatatcattacggatgcagagtctatgtgctcctcctcctctacactttccggccaccgcactccgtcgttgtcgtaatctgacgaccgcagttcgttccgtacgagcagagcgtagagaagagaatgagccttcgattcaatcagctttagattcggcgtcccttcgtctgcgagaaaccaatcgaacaggtaagcaatttctgtctttttctactcaaaagagttcatttttcaatttctgtaagatcatcccagcaaattctcctgtaaaccgttgattactgtgtcttgactttctcttaggcatttcgtcaaacacataccaatatagcttgatcaaatagtttcttgaagaaatttgactaaaagctttctaatttctgcacgcagagcctcttttcatcgacccatatgccgcttgtttcttacctccttacacaaagaaggatttggacatccatgaacaacaacaacattactgtcttgcaacaaagttcatcgatgataagttgttagaaatagctaaacgcattgatgggctaaagcaggttacttttagttacttctactgtcagagtttgagaattatacagtgaaagttaaattgtttatgtgcaagtgatatcatatctttgcaggttgtcttgttcacagatgggatggatactcgaccttataggcttaattggccaacttccactatgatctttgatgtatcaccggaaaaagttttcgaaatagcatctgaaaagcttcaaggtttgtgctttcctttgcgttgaagcgtccattttgattacaaacttaatttcccgggacttgaatgctccctagttttgtttgggactgttaaaacattccaagggttagatattgtttctttaactgatccaggtgtgggagctaggatccctaaaagttgcttattctttcacattcccgtggaattcgagaacatagagcaacgtttacgctcaaaagggtttagtgggaatcgccctagtatatgggcaatgcaggtatatgagttattcatcaaacctctcttctccaggcaatttacatgatgttgacatgattctttctattcataacagggcttacctttggagtcacaatcaggttttgaagctattctatcggccattagtagcttggccatgaatgaatgctatctcataggagaattgcctacaaatataacactacaggtcactttgatctcttgacgatctttggacttctaccttaaaagcatctatctttggtttgtaaattgtaatctatatgtggtgttgagtgcagtcggatttgtcaaagtggatggagaaactgttcatgagcaatggttttcgggtgaaaatagttagctatgaagagattgctgcaagtttaggtgtggtattacattcaccagtaaaccatgacacggttctctttatcgcacaacagctcaagttttcagatgatcaggtaatgaatg

SEQ ID NO: 157766 - DNA, 464 bp, Arabidopsis thaliana landsberg
atggaagtacgaatcccctgcttctcgaccaagcagaagtccaacaccaagaacgtgacagtcacaaactcttacgagcatttccatagccaagacgtctctgcagccatctcatggcctggaatggcctcaacagaaaactgggaacccaaaacagagcggggtttaacggaagcaccaataacttggacaatatctccacagctaaccatccgcctacaccggtagaccagctggggactgtggagcgattaaacagtccacggaatgggatcatatcgagcgcaacaaacggatactttttcgatagaatgtcagcgacttggcctgaagagaaactgttgtttgcaaggaacagaagtgggaatcgtctgagtacggatatgtcgtcgtcaaatggaaactcagggaatgtatcggcttcttggggaatggtgattgtcactgcaggtctcagaggagag

SEQ ID NO: 157767 - DNA, 784 bp, Arabidopsis thaliana landsberg
taacttgcaagcttcccatcaatggcttctcctttgtcttcttccaccgtcgtctctcaccgccttttttttctccatccttcacctctcaatcgcaaattcctcttcgtaaaacccaaattaccctttaatcgaaccaattccggagatttccgcatgcgtctgcattctacatccagtaaaactggcactaaggtcgggttttaaaattctcgcgaatgcgtacaatgctctatactgatttcacattagggttttacttagtttacgcatatctatcgttaggcaaaaaaatcgttttttaagggtttatggattagtgataaaattgttttcagcagtgcaggaacttatacattcctgcaattcttcaattgattcgaagttgaacacttttgaagctggatctaaaaacctcgagaaattggttgcaacgatattgatatttgttcaagtatggtctccattgcccttgtttggtctagactctgcttacatttcacctgcagaggcagttctttactctccggacactaaagttccaagaactggagaacttgctctaagaagggctatacctgctaatccaagcatgaagataatacaggctcgtcactctcttagactttctatgtggtgtatttgcttttggaaatcattgattgttatactattatgtgttgttgttccttaggcttcgttggaagatatatcatatcttctcagaattcctcaaaggaagccttacggtaccatggagagcaatgtaaagaaagctctaaag

SEQ ID NO: 157768 - DNA, 615 bp, Arabidopsis thaliana landsberg
ctcacgggtgaagaggtgtctcggccaaaaggtgtaaggtcgagcgagtaccaacgaacagttgcatcaccaaaggatacaaagaacggatgtgacctttcggaaggatgtaaggaacggatgtgacctttcggaaggatgccaggaagggatgtgatgcttcgggaagcatccattcgccccctatataagggaggacgcccaaggcctttggaatcatctcacaacattcaaaacaccacaaaacattcttaaaagagtcccaacacatcctgaagttgttggtcggaaaggggtgcggctcggcgagtataactcgaccgaactgatgcgcatgctacctcccggtccaacggttcgatggagtgtagaggatggagagggtagaccgttcgtcttagagacgaatcagatctggtagaccgatcgttggatcggatcggccagaccgatcgtcagacggatcggatcggccagacggatcggacagaccgatcgtcggacgggtcagatgggataggccgatcgtctgacggaacaggtcggacagaccgatcgtcggatgggatggatcgagaaaagtgttcgaggaagcacaaggataagtgcatctga

SEQ ID NO: 157769 - DNA, 649 bp, Arabidopsis thaliana landsberg
tccctgcgccagagtccgaatccgatctaccaccactactccttccgcgggtcattaactgccgccgatttcaaactatccgatcattttcggcgatatccaatcgcagactgatgttgttagtaagtttcttttgtttacttccgccgataaatttcatatttacgagagcaatctagagaattttctaggtcgctcgacttctaggtattcttaaatcgatacgatagagataagttcgatagttcttcttctttgtagataaattgaatctgtgcaggcgcttcgatttatctggcttttgcttaagaaaattgcaatttgtttgatcgtaggtgaatctgtggttttgatcagttattatctttgtcactctttgaaaatggctgtgtaagttcttcttttgccctattttctcgggatattattagaaatctctcatctataaaaggtatcaatattagtgaattctgtgtgtttaaaaattccttgatgcagtgttgcttctgctcctgggaaagttttgatgactggaggctaccttgtactcgagaagccaaatgcagggcttgtgttgagtacaaatgcacggttttacgcgattgtgaagccaatcaacgaagaagtcaagcttgaaagttgggcatgg

SEQ ID NO: 157770 - DNA, 2917 bp, Arabidopsis thaliana landsberg
gtatctgaagtgttctggcgtttccatgaaattttgggttttgaagaggctttctcacctgaaaaccttgaacaggagcttatcaatccagtgtttgatggtttgtttcttgataaacctgggaaagatgataagagaagtgagattaactttactgataaggattctacagctactaaacttttttctttgttcgatgaatctcgccaaccttttcctgcaaaaaatacctctgcttctgaactaaaggagaaaaaggcaggggattcttctgattttaagatttcagattcctctcgtgggtcgtgtgtgggtgcacttctaacaagggctcacatttcgcttctgcaagtgctaatatgtgagctgcaatccaaggtagctgcatttgttgatccaaactttgattctggcgaatcgagatccagacgaggacgaaaaaaggatgacagtacactttctgctaaaagaaataagctgcatatgcttcctgttaatgagttcacttggcctgaattggcccgtaggtacatcttgtctcttttatccatggatgggaacctcgaatcagcagagattgctgcacgtgaaagtggtaaggtattccgttgcttacaaggggatggtggtttgctttgcggctcgcttacaggagtggctgggatggaagcagattcaatggtatgtttttgttagttttctgattatttcctggattatatatcttgcttgtattactggatgatgggatcacaaattcagtttcacttttggaaacgccgcctatgtgctatttttcttttctcttcaaatgttctaaagcttatttgaagctatgttccacttgtaggtcactctagagtaattgacctttctttctcttcttggatcttgttagatgtattttgacatttagaggctgtttatcttgatatcttgaaggccctcttatatttatactgactggaaaattgggttactttgtgtttcaaatgagttcatgagctacctccactgaaagagaatgatcgttggatttacgtgtttatattaactctttatcttcagttacttgcagaggctattaagaaaatatctggttcgttgacaagcgaaaatgatgttctttctgtggaagatgatgattccgatggccttgatgctactgagacaaacacttgcagtggtgatattccagagtgggctcaggttttggaacctgtgaaaaagcttccaacaaatgttgggactagaatcagaaagtgtgtctatgaagctttagagagaaatccaccagagtgggcaaagaagatattggagcattctatcagtaaagaaatatataaaggcaatgcatcaggaccaacaaaggttcaaaatctctgaaaccaattctcttccctcctgaaatactgtacttgcaattttaaagtatttcttgttttctcaaattcactttgtttttctgtctcttgttcttgcggtgatgtaatctcagtctgatgatgcatgctactttcttagactcacattaattctgagattagttatttccctcttactggacacagaaagctgtcctctcattgctagcggatattcgaggtggagacttggtgcagaggtctattaaaggaaccaaaaagcggacatatataagtgtatctgatgtcattatgaagaaatgccgtgctgtattgcgtggtgttgcagctgcagacgaggataaagtcctttgcactttactgggaagaaagttactgaattccagtgataatgatgatgatgggctcctgggatcacctgcaatggtttcgcgtcccttagacttcagaactattgatttgaggttggctgctggtgcgtatgacggatcaactgaagcttttcttgaagatgttcttgaggttggattttccctcttatgtctgatttttctttgtgcaattgatggtatgatgctttttgtgcgatttaacaattagtttctgaatgcttatactaaaactgctattcattttgggcatttcatgtttctgctgttagtttaacactgctggtttagatgcgtaagtgtaaagtatcacaagagccagatttatattaggaatacttttactttctctttatgtcacagaagtatcaggttaaacggttgaacgccaaaatttttgctggctcatttgataactttagatttgaatgcatgcaacttgattttttatagatgacatgctaaatataactttctaatttgcagctgtggagtagtatacgtgttatgtatgcagatcagcccgattgtgtggacctggttgcaacattgtctgaaaaattcaagtcgttatacgaggctgaggtttgtcttctctctcctttttctgctatgctctgcacaatagatatattcattacttagtagcatcttgaagtggagacagtcgtttatattttggcacttttgtgaaataaatgtgttaagatttatcatttctgaaagttataggccgatcaaagaagcatctggagatgtccattaatgctatatgctatgctttagaagggttcttccttttgtctgcgtgtatgattttcattgtgttcgcctttcagaaattgtatgcatggtctcctttttctatgagaatagttgcagtatcggggtgctattattttctcaagtttcaagcctttatttatttgctggtataggttgtaccacttgttcagaaacttaaggactacaggaaattggaatgcctaagtgcagagatgaagaaggaaattaaggacatagttgtttcagtaaataagcttcccaagccccgtgggatagggggtatgtaaagtatgtggcgttgacaagatgatgacagtgttctcttgtgtgatacatgcgatgctgagtatcacacat

SEQ ID NO: 157771 - DNA, 406 bp, Arabidopsis thaliana landsberg
  unsure (1)..(406): unsure at all n locations
acaaacacttttggatcttcttcttcttcttctctctcaatactcacaaatcctccattttctctgagtttagtttcttcttcagacactaagattcaagtcctctctttggtcggagaagatgcaggtagtctcgagcttcgattttcagtcttcgccgttctcacacggcgccggagagattctcatttctccggtagaccaccgagagttatcctcacacggtgacgcgcttgaaggcgcgtgtgatgactcgactagattggcggcggtgaaagtacagaaggtctacaggagttatcgtacgcggcgtagattagcagactctgtcgttgtcgccgnagagctctggtaattatttataaccttttcaactaaaacactgtaattagatatttaatggaga

SEQ ID NO: 157772 - DNA, 1937 bp, Arabidopsis thaliana landsberg
aatcatcaaaaatacgaagtgtgtataggcaaagaagatgtgaaggcaaagactctaaaggagaaagaggatatgagaagttacattgttcataagcttgtcatatggtatggagactcaaaagtaaagtttcaaagatttcgagatgcttttgagttttgatattacttttgatagtttacttaagaaaatcaacagtttggtggtataacattttttgtaatgtttcctctcatggatgtgattatcattacgatttgccccggtccatttttatttgtttatttgatgaacaaaatacgataaaaaaacattttgtagttttttcttgtcggaaacattttgtagtttggtatatatatgatgtgtgtttcaaactttcaaagaaaaaaaaaaatgtgatctcaactgtgctggttaaggaccggttattatttgttagttgtattaatttgatggtgaagactgaagaaggagcatttggcctaaccagccagtttagagaagtctagaaaaacggcacggcgttttactctctattgtggaaacagcaaagctaatttggttcttccccagattatcaccgttctgtttgttcatcagtgttctgaaaactttttccgatacacaaaatcggaggaagaagaagatgaagctcaaagtgtatgcggatcgaatgtcacagccatctcgtgctgtcctcatattctgcatgtaaactccttcttcttcttccttgttaattcgcgatttcagcctttttgtttgttctcttatacatgacctactttttgtgtgaagggttaacgaaatccaattcgatgagatatagatctccttgggaaaacgtcaacagttatcccctgacttcaaaggttcgtataaatagtttggtgatttcggatttggataaaagttgaaacttgaattagtattcattgttatcagatattaacccaatggggaaagttccagctattgtagatgacagacttaagctctttgagaggttctctttaacacaaagttgcttcctttgtatcgaaaccattgtttatgaataatcttaaccgttttcgtagtcacgctatattgatatatctttcctcagcatacccaagtatagttgatcattggtaagtttctctacttcgttttgacacatgcatgttcttgatttcaaaatgtaatcattttaacttttagtgtaatcattttacttttaggtacccgaatgatctttccaaaagagccaagattcactcagttttggattggcatcacaccaatttacgccctggtgcatgtattacattttgatattcataacaatagcgatgttaagcttatggttacgtttctgattacggttatttaacaatctctcagctggatatgttctgaatagcgttctagctccagctcttggtcttcctctgaatccgaaagcagctgctgaagctgagcagttactaacaaagtctctgtccactctagagactttttggcttaagggcaatgctaaattcttgctcggaagcaaccaaccatctatagctgatctcagccttgtatgcgaacttatgcagctgcaggtactcacttaatttcactgttttgtgcgtttttttaattcatcgaaataccaatccttgctatgttttggcttttgattgtaaaatttatgcaattttgtaggttttggatgacaaagatcgtcttagattgctcagcactcataagaaagttgaacaatggattgagaatacgaaaaaagcaacaatgcctcactttgatgagacccatgagatccttttcaaagtcaaagaaggattccagaagcggcgagagatgggaaccttatctaaaccgggtcttaaacccaagatctaagaacttagaacaaaacttggcaaaaccggtttcaggggtcagtc

SEQ ID NO: 157773 - DNA, 1126 bp, Arabidopsis thaliana landsberg
gctctctcaacttccagaagctataggcaacttgagtagactagaagtgttgaggctgtgttcttctatgaatctctctgagctgcctgaagcgactgagggactcagcaacttgcggtttctggatatttctcattgcttaggattgagaaagttgcctcaagagattggcaaactgcagaatctgaaaaagatctcgatgagaaagtgttcgggatgcgagttgccggagtcagtgacgaatctagagaatctggaggtcaaatgcgatgaagaaactggattgttgtgggaaaggctgaagccaaaaatgagaaatttgagagttcaggaggaggaaatagagcataacctgaacttgcttcaaatgttttaagtgaaagaacgttatcgtagtagcttctgtggatcttgtaatgtttgttattcattattttcgttgttatatacattataatggctactgagtccaagtacagagaaaatgtcatgccaaagaattttgtgtaggtcaatcttttaaaaccatttaagagtactactaaatccttgatccttatctaacttgaatagatttgaacagagttattcaccaacatttttgacaaactataaatgtaatattcaatattcttaatgttaaaaatataatgttggtaaattctttgaaaatcctaaaatgtgaagtcaagtctcctttttcctttgctagctaaacttctgttctgggattcaaacaatggtttgtttgaaacttcaaagtaccgcgtgacttttccgttataaatttgatctaatggcttttgtgaagagtcacgttttttataatcaaagaaagagtcagtcaatagattaaaatttctctcaaattgcttggttttcatcttaattcataattctcctctcccttcataggaaccattatgaattcgacttcgattcaaagctttgatgacttgccccacaatcttcgagagtgtttcttggacatggcctcatttcttgaagaccaaaggataatagcttccactataattgacttatggtctgcatcatacggtaaagagggtatgaataacctccaagatcttgcctctcacaatctccttaaacttcttcctattgg

SEQ ID NO: 157774 - DNA, 6408 bp, Arabidopsis thaliana landsberg
ttattttgcatactgatgcattgaggatcatcttgcatacatattgcatgttttagtaagttttcaagtgcagaaggagcttacaaggattctactcgaccctctactctatcaaacacggagggaagcagcagagcattctactcgaccagttcactcgatccagacagccacagaggaggctgcaattcactcgacccctttactcgatcaaggcagcctcaatggaagcagcaaattgatcttcggatcctcctcattccccactcaaccagacatctgagcatacagataggagaggaagaagcatctactcgaccaattgatcactcggagcatagacataaaggcgcaaactttgcagcaccctctttactcgatccccaagatcgagcactagcccaaaccgcctcaagtttcttgtcttctagtgaatctaggattttcaatatttttgtataaatatgtcactttggggtttttccaaaggaacaaatcatttattctgtagtttttctttgtgttttagaatcttgaaaccttaattactcttaatctatttcgtttatgcatttagttctttgattaaagttgtttatcttgtttagatatacattttgatatgtttagagtaatttatgggtttgtgttctagattatgttgcttgagtagtgattagggttcttgagtatggattagattagggtaatatctaggttagtctggtggttaagattaggttagatcccttctggattcgttggccctaatgcatatttagctcagttaagtttggaattcgacccaaggtattccagcgtccaaaagacgttcaaatggatatctgatctacgaattccagagatttgtagactctagcccaagagattgggtgtttagactttttattgactttcgtatattgttgcttaaagcctgctttgctatgtttcatcaacgagagttgagattaggaattggtaaagttatgaggttctctgtcactatagtgatttgatctggttttgaatctatcttctagggtatccgcatttcgcctgttggcctacctgatgaaccctagagttgcccttattaatgaatccatccttagggattctattcttcttagatttatttgtatttacccttgattgcacttttatttacctgttatttgagctaccagttgattggattttagttcttaaatttttcaactggttgttctaattgacccaatgattgagtagggctcttaagttctcatttttgttgtttgaatcctgacctaggattgttactagaaaccaaccatcattataatctggcttgacttaggtgcttctgtacacatcttgattgctagcaataacagtggactggattgacacccctctatagctgcatcgacatgttagtgtttaaggggaattgaactgaacacacgacattttagcacataagtaggcctgaaaaacctacttatcaatttggtgtcgtaagtaggaactaaggataatgatcaaactgaagaatgtgagggagttggtcgaaaatctagcacaatctaatgggtgctacaatgaagactatgatcgcttagtgagaggaactggaggacctgaggataaccagagcaaagatatcaaggctctgaatgaaaagctagacaagttgttgctggctcagcagaagcagatacactacatcactaatgaagagcacttccaaatgcaagaaggggggaatgatcaaactgtagagttgtgctacattcagaacaaaggaggtttcaacaaggggaacaacaactacgatcccaacccaaacctctcataaagaagcactaatgtagctaacccccaagatcaagtgtatccacctcaacagaatcagtccaagccttttgttcagtacaaccaaggttatgtcccaaagcagcagtttaatggaggctaccaacagcagaatccaccaccagggttcactcaacaaacacaacaagcctcaacagctcaagatcctgaaattaagcaactcatttcaacacatcatccaaggacaagctacttgagccatggcttttgacaagaagatagctgaattacacaacaagatcgattgttcttacaacgatctgaatgtcaagtttgaagctctgaattcaaaaatcaagtatgtggtgagttaatttgcctcaacctctgctccgaagcatcctcggcaacttccggggaaagcagtccagaatcctaaggactatgctactacaaatgctatcacaatccacaaagaagatgagtctccaccaaatcatcagactcccaatactgaggacattatgattcaagaagggggggggattcaactcaaattgctgcacctgccacccaacaattcatctggactatagagcacacacctttgctgaatactcaccatcctggaaaaaagttcataattgaaaaacttaagaaggatcagaatcaagagacgattagcagtgcctccactcaagaaacgtacaagaagaaagtcatccaagaaaagcttgatgatcccagttcattcactcttccatgctctctaggaccattgatttgggagtatttgtgatttggtagcatcatggaatacaagttctgcaacttagccttactcttagttgatgattctgttgcacatccacatggtctaataaagaatctgcctgtcaagattggaaatgttaagatacctacagattttgtggtattggacgtaaatgaagaaggaaaggatcccctgatcctaggcagaccattcttagcttcaactggagcagtcatagatgtctggaatggaaaaattaatctgaaccttgaaaaaggcatcaagatgaagtttgacattagagaagcttcagggaaatcaacaacaggagttcagaattttgggattcagaacatggatgttgatgaagaagcagaagctagaaccccaccaagagttaactatacttctcaacttagcaagctgaagagaacttttgaccacaagaagagagcaacagaaaggctagctcaaactgaagatcctacagaagatgactggtatgagatgagaaaattatttaaatggcaaagcagagtcatagaaggattattttcaagggtgatgaagctgaaagatcaattatggatgtttgaaaaaaagagttaataagttttcaatgggtattgatctagagaagatggaaactgcactagctatcaaagaggacgaagatttcacaacagaatggtttgcaccagaagatcagaaaggagttcacttagaggaaagaagcctatagagcaagtttgtgagtgacgaggaaatccctattccaacttattctccaggagtgcctaaacagcccaccaacccctctactgaagaagaacactttattcctgattcttttgctgaaaaactcctagagctttgagttggatataaagctcaggaggatacaattggaaaattaactcataagatggaagagttaaatagcacaattctggaacttcaagaaatggttaaaggctaccccagttttgaaaatgaggattggtcaaagtagcctggttcagaagaagaagactactctgctgatcagaaagaagtttatgttgaagaaaaatcaaatgaatactcatcctaccatatgtcaagagaggatgcagagtatgattcacccactgaagatgaggacttctatgttcctctcttcaaccttttttctgactaagctctgtaagagtcaacctcagtgacttaaaacaagctcactttggaggaagttacatgtttatccatgtatataactttctattttccttgttatttttgatgttttgtttaagtgtttcaggtttatttcattgaccatgaggaagtcaacggtcgagtaaactcaaaccaagtcaaaagatgatctccaccgttgatcgagtaaaatgaggaggagtgttctgagccgcgcgattgaatgaccaaatgagagaaatcatccccaccgtttgatcgagtgacttcttgaggtttattctggtccgtttgatcgagcgttttaaagagtgaaacattccccaccatctgatcgagtattacgcacttcatgggatgctcgatcctttactcgattgtgaatgattcggcgaccaaagagtaaggtcgagtggcccacttgtctcccttcacttcattactcggtggacaaactaattacccataccctcactgttgtttccaactcacttttctatcccttccaaaagaaaccaaagaccatcctcctccacccattgaaatcgccaaaccacctttgaaaccttctctctttcatcctttcattttcgcaaattctctatctctcacaaagcttcaaaattaagtttcattccaaactctccctatcactcttcaagaattcgttctcaccttcaccaatacttcaccaaagttactcgatcactcccaagtctatcctcacacatttaatcggttttaagcacaaaatttcatcaccaaagaaaccgaatccattccattttgataccccttggagagttgttcttgtttgccctgttgaagctcaccaccaatctccatggattcaaggagaaagagttcatctcggggtagaagatcctccgttgataacgaagaagttgaggcgtttgacatgagtggcatgactgaacgccaaatttgccaagatcgttgtgctcaaagatcaagcttgattctaggtggaagctcaagccgctcagccatgttaaaagaagaagtagctcggggaaagagggttgttgaggttgaggaagtacaccgtgaagaggcagtctttgaagaagcggtcatgaggaagaggttgagatcatcgggaatgatacactaggcccggttggcaaaagaaaccgaccaaggaggaagagagagccaaccccaagtgagtactatcaatacttgaaggagttaaagtttgagcttggtatttgtggtgatgtggaatacttgatggaattggccaatcttgcaacgttcatgacctgccaatggggaggatttaaagaggagagctgccaactcctttcaaccctcaaggttcacttttgtgttgatgattcggagaaagaagaaagaggagggcttggttacataaatttcaaggttgggggtgtcgagcttgatattagccaccttgataccatttttgggtttccaagtggagaaagaatccgccaagactatgaccaagatgagataaaatctctttggacaacaattgccggtccaaagccctactcgcccgccaagagcaagagttcttcaattcgaagtctcgtgattagatacctccaccaatgtatcgccattacccttttcccaaagaagactaccagattcgtttatgaaggagagctattcatgattgctcaagctttggtcttcattctgagagagaccgaggatgggaggaagatggcgggtgatagagtagacacttcgttgactgtcgttcttttggaccacctattgagctatagagagtatgttgcaaccatccatctctcggggatttgcggaagtctttgtgttggtggtctcttaacaccaatcttaggagcttcaaggaaacaatttggaacccctgacgtgttccccaagttcatcgacctcaactatctcaaggggaaggattttcttgagaaaacaactccggcagatcgctatctcttcaagttcaaccactcggagcttggaccttctcttctacccctaccatgctagaatcggacttcggtgaagacaaggcgcaacatcaatttcatgccatctccctttgccttgaacatcgacattggaggagctcgggaagatgaaccagaatatagtccagccgactatgagcaacatgagtactttacccaagttgattatgaggaacaaatcgagtttgagcaacatatacatcagccggagcacgggaccagcgaacaagagcaagctcattatggagaaggtactgaccaagggggagatgagtttgctgaagttcacaagaagctcggtgtacttgaagagcttgggaaccttcacaggaagacaatgaagggtttcaagaagaagatgagaacaatgaagaagtcgctgaagagtatggctgctcaactcaaggacttctagagcaagccaaggcaaccgtctcccaccccctaagtaagaaggagcggttcaacgagctcagctgcatggagagctgaaaggatcgattaaccccgagcttcatcttttcagcctcgggaagtgatctccgagctgagagagccaaggagtcggcagatacgagcttccacacgctcgaccggacagaatga

SEQ ID NO: 157775 - DNA, 763 bp, Arabidopsis thaliana landsberg
gagttcaccttatggctcaatggccttacggaagagcaaaagcatgctgcaacaggatttttcagtgttataaaaaggcgaagtgaagctaatttagatgcttctgatcatcttgccagcagcacaaagaagttaccagactctaattccgatctgtatagtattccttattcagagatatatcgacctttcctcaagaaagcttctgaattcttgcagaaagctggggacttggtcagttcgccaaggtatatatttcaaacagtttcttacccttaccatataaaatgtattcacccattcgattggcttagtatattgaagtattcacccacaatgctttctcatagtttgaagaagctactgcacagcaaagctgaagccttcctttcaaatgagtattatgagtcagacatcgcatggatggacttggtaactcttctctgttcatacatggtcttctagtcttctgtaattttccttccttataaaagaggatagctcttgtaagacgagctctggctattttaatggtccgtaattttctgtcacatatcagtcatgcattatagttttgagtaacttttgctttgtcttatcatcttttgtaggattcaaagttagatattaccattggtccatatgagacgtacgaggatgaaatctttgggtataaggtaagactttacataagcatgtgctttcgcaatgatttgcttatgctgatgctcatcctcgtctttacataaccttcataaattgc

SEQ ID NO: 157776 - DNA, 476 bp, Arabidopsis thaliana landsberg
ctagaagcctagaactcgctgtcaacgactacaatgtctacattattttcaccgacacaatttacatcttaaccaaaatttggatattggaccaatcgttcgtttatataacaaccacacgtatcaatcaacacacagaagacaatgacatgtaacaaacagtgtaaaatattgaaaataacttatcaaaaaactttagttcataacacaaaaactttcggctattttttattgacttctatgtagtctttttgttgcacttactatttttaaaagcaatatgtatgtttccagcagattcttagtttttacaaaattttgcctttaatattttttttgatatacattgtcattctttatttcattttcttctacaatagtatcaaaattttacaaaataaaacttcaaaaaacatacgaaaaagttaacaaatattcaaaaagagaatgattttaaaaaggatataaatatagag

SEQ ID NO: 157777 - DNA, 1149 bp, Arabidopsis thaliana landsberg
cctctccggttattcaaaatctgatcccacccagatatcagagtttgagaacaaaaaaaacgatgccgttttgcgaggtcgtgaaagaagatgtcggcccagagacgacgcttaacaatgccgcaatcaaaatcttctacagaacgtacggtcatggtcctatcaaagctcttctcatcataggtctgttgtaatctgcatctttcccatttgattagtttccttagcgattccgagcttgatttcaattgggtttttctaattttgttcaggtttagccggaacgcatgagtcatggggtcctcaaatcatgggattgacgggaacggataaacccaacgacgatgatgacgacgacggaggtattgtttccgatgattccggcatcgaggtttgcgctttcgataatcgtggtatgggtcgaagctctgtgcctacccacaaatctgagtacacgtgagccaatttcattactgaagaacttaaaattctctgcttttgtgttcttaatcacggttttaataattgcctgtgaaattggttttgttagcttcttcagtcaatttggtttttgttttggcgcagaacaacgataatggcaaatgattcaattagtttgttggatcatttgggttggaaaaaagctcatataattggtcattctatgggtaatttgttagatgatcattcaagtacaatggttctgttctgtaagtacttatttattcttatttttgttctcttgggtttttgattaacaggagctatgatagcttgcaagttagctgcgatggtgccagaacgggttctttctttggcgttacttaatgttacaggtggaggttttgaatgttttcccaaggtacttgaatgatatacgtggcgctattgttgaatcttttttctttgatagcaatgacttgttcatatgtgtgttggtttcttatatgaagacaaactgttgttttcttatttgtcacgatttgtcacaagatgatgtttcatttggatacataaaatctgactatggccttttgtttttatgtgatttagcttgaccgcaaatcgctttccattgcgatacgttttaaaaaagcaaagacccctgaacaaagggcagctgttgatttggacacacattattcaaag

SEQ ID NO: 157778 - DNA, 433 bp, Arabidopsis thaliana landsberg
cgctctcttctttcaaaaaacgttccaaaggatagcttacatcacgaggaacaaatggttgaaagtggggagggcgatacatccaaggtgactgttgaaaatggtgattttgatcctcaagaggtagctcacaaaggggaacaacaatcaccttcaagatctgatggtttagttagaggtgggttaaataacaaggagtcagcgaatcacttgccgcatttaggtcatactgtttctcagagtttctcctctaaaaatcatgcagcctcggttagagcagatcatcaacaaattagtcctcagatggctccatcctggtatagtcaatatggaactttcaagaatggactggtgcagcccatgaatgatacagggaaattaacccccttgaaaataggagaacaatcgtctaatgttgagagttcggttgatg

SEQ ID NO: 157779 - DNA, 526 bp, Arabidopsis thaliana landsberg
gaacttcctatggagcactgagcaactcaaagctcacatttagtcaaaatatcaaattgagtgtaggcatcaacaaacttgctctgcttagtactgcagtgggtcttccggttagttatgatcttgcttctgttagaacatctcacaatgaaaataaagatggatctaccataggaaagaccataaagttcgtgatgtccattattttttggcagaacgctggtgtgcattatgagacttggaatactggtattctagggccagtcacattgaagggagtaaactctggaacatgggacatgtctaaatggaagtggtcttacaaggttctcttgaacatgtgtttgataaaaacaattttaccaaccacaacaatactaaactaaatgtgtttctttttatttgtgatgagtagattggtcttagaggtgaagctatgagccttcacaccttagctggaagttcagctgtgaaatggtggatcaaaggattcgtggtcaagaagcaacccttgacctggtacaag

SEQ ID NO: 157780 - DNA, 1287 bp, Arabidopsis thaliana landsberg
aatagattgaccggtgaactccctgaagcagtaggaatctgcagcggcctctcgagcattagaattgggaataacgagcttgtgggagtcattccgaggacaatcgggaacattagtggacttacttactttgaagcagacaagaacaatctttcaggtgagattgttgcagagttctccaagtgttctaatctcactctgctgaatctggcagctaatgggttcgctggaaccattccaacagagcttggtcagctcattaatcttcaagaactgattctctcaggtaatagtctctttggggagatccctaagtcgtttcttggaagtggaaacctaaacaagcttgatttgagtaacaacagacttaacggaaccatcccaaaggaactctgcagcatgccaaggctacagtatttacttcttgatcaaaattccataagaggagacatacctcatgagattggaaactgtgtgaagctacttcagctccaactgggtcgaaattacttgacgggaaccattcctcctgagattggtcgcatgaggaatttgcagatagcactcaacttaagtttcaaccatcttcatggatcattgcctcccgagttaggaaaactcgacaagctcgtgtcattggatgtctctaacaatttgctcacaggatccataccgccactactaaaaggtatgatgagtttgatcgaggttaatttctcaaacaaccttttgaatggtccagtgccagtctttgttccctttcaaaagtctccaaattcgagctttttgggaaacaaagagctttgtggagcaccattgagctcttcttgtggatattctgaagatcttgaccatttgagatataatcacagagtctcctacagaattgtgctcgcagtgattggttctggtgtagctgtctttgtatcagtcactgtggttgttcttctcttcatgatgagggagaaacaagagaaagcagcggctaaaaatgttgatgttgaagaaaatgttgaggatgagcaaccagcaattatcgcgggaaatgtcttccttgaaaatcttaaacaaggaattgatcttgatgcagttgtgaaagcaactatgaaggagtcaaataaactcagtacgggaactttcagttcagtttataaagccgttatgccttcggggatgattgtttcggtgaagaaactcaagtctatggatagagccatatctcatcatcagaacaagatgatcagagaactcgaaagactcagcaactttgccatgaccatttgttag

SEQ ID NO: 157781 - DNA, 805 bp, Arabidopsis thaliana landsberg
ggtttgacaatcttcgaattccaagagagaatttattgaactcagttgctgatgttttagctgatggcaagtatgttagctcaattaaagatcctgatcaggtatatgctataccttggaacttggaacaaatgcttaggataaattttctcatgtttgtggcaatgtattctatttgtttcagagatttggagcattcttggcccctttgacatctggtcgtgtcacaattgcttcaagtgcaatttattctgcaaaggtacaatttttggtatttctatattcacatccttacatacatcttttatcagatatcaacttgattatctctggactaaatgttattgattaagatttttactatgacagctcggattagctgttgctattagatactcactatcgagaagagccttctcagttgcagccaatggtcctgaagttctccttcttgattatccaagccatcaaagacgacttttaccactcctagcaaagacgtaaggatctttctgaccattttgttttccctctcggaaatatatgtgctaaatccttaccattaaaataatacactcagcagcttgctgtttcctccactctgtcttatttctgtcaaagttaatgcttggctcaaataaaacagcttaacttacggagagaagtaaaaaagcattcatggcttgagtgtggggattttgggatgggttatcatttttaaccaaatcttatgccccctagatatgctatgagttttgctgtaaaaaaaaagaagatgatttacgtgaagaggacaccagagacc

SEQ ID NO: 157782 - DNA, 991 bp, Arabidopsis thaliana landsberg
attgggaattggtctagatgccttgcagaaatgttctccataaacactagagattcagttgaagaaaatgatccaatagaaagtgagaaatctttcagtttgctaaacgaactcagtgatctacttatgcttccaaaagacatgcttatggaccgatccactagagaagaggttttgttatctttcattatcacgctttaagttcttgattaaactttcttgaccacagagcctttattcttggttgatttataggtatgtccatcgataagtcttgcgttgatcaaaagaatactctgcaactttacacctgatgagttttgtcctgatgatgtccctggagctgtcctagaagagcttaataacgaggtaaaagctctaaatccttcattcatctgtactctgcttagctctcactatactttttttttggtttgtttcttcatcagagcatttcagagcagaagttatcaggagttagcttcccttacgcagcttctcctgtttcgtacactcctccatcatcaaccaatgttgcagaggtaggagacatctctagaatgtcgaggaatgtgtctatgatacaaagaaaaggatacacaagcgatgacgagctggaggaactggattctcctcttacatccatcattgaaaacgtatcgctgtcaccaatttccgcacagggcaggaatgtgaagcaggaagctgagaaaatagggccaggggtgacaatttcaagatatgagcttcttagggaagtgtggtctatgtgagtgattggaagtcaaatgttgagctttttaaggaagccctttgttaccatctactactgaaacaaaataagttttgtccaagttttatgtagccgtaagtatttgatcaaatgaatatgctcctagaggattgtatttaacaattagctatctttatttctggacatttcttatgtttctttgttgtttttcctcctcaataaaccatcaaagatact

SEQ ID NO: 157783 - DNA, 2097 bp, Arabidopsis thaliana landsberg
aacaacacagagccaaaggttttttgctcgcagtaaagaagaatcacactgtgaagaagaagaagaagcgaaacacaaaatcctcaggaaagaaatgctaagtttgaatctctcggagtcgcttcgcattccattccaaaaccctaggcctcccaaatccgatttttcttctacttcttcttctccttcctcatcgtcgaggagatgcgtctccgcttatccaattccgatcgggttttcggttcgtaatcaatacttttctaggtaaatttgataattgattgttcatcggcttttgaatttgctatgcgaatggaatgtagccatgtaggagtttacgtcttttcacaattctgtgcagatgtttgactcaattgcgtcgaaatgaatctcagcagctaggttttcgatgcttccaacgaaacgatgcggcttgttacctcgaggtgattctgatttttgttaccttccaccaatctttttttggtagatttttgaatttttttagatgagattctgttaaggcctacaggagatttttgaattgcttgttctgtgtggatttacctaaaatggtaatgtaggtttattataatgatgattgattttaaggttgaacaatagtggagagaatgtgtttaaatgcataagctgaataagttgttgtgtttgctttgttcagaaagctgagtctgaagagcatgatagaaatcttgatgttctggttgagtcatcgatagctcactcaagaagagagattcagagagttcttatgttcttggcggtatcaggttcggttgcattactaggcactgatccagcttttgcagcttcgtcaattcccaatgtgacacagtcacttgtcacttcttttggagaccttggagatattagctcaggttttgcttcggttagagaatcttccttttgcacagaaccgggaactatctcttcttcaattccagtacttttaaattttattttttgctctgtctatgtctgtgtaggctttcttgcttatctttttctctgaacttggagacaagactttcttcattgcggtatgatcttgagatgttaatctacgctttagaaactctctttgtcatcaatgattctgttgattgtgataagttttcatgtttgttggttaggcccttttagcagcaaggaactctgctgctaccgtattcgtggggacttttggcgctctagggtatgctttctttctcaaacagaggcgttattatggtccgtgaatcttgtctgaaaccaaatgttactttgaaatctgtagagcaacgttataaaacttggtaattttgcaggataatgacgataatatctgtagtgcttggacgcactttccactatgtcgatgaagttcttccattcaggtttgagtattctggcaaaaattattaagcaggtttaagttccatgatgatgctgaacgtcaatgcttgagaacacaggtttggtggaaccgatttgcctatagatgatattgcagcagtttgtcttctggtaaatctctttattcacctttcttagcagagtcgtactaaccacgggtgcttggtttggacctttcttatgtctagcaagtatatcttcctaagtatatgatgtctaccaagtgaaaccaaatgtagctgtaacccttttgttatgagttttgttttggttttggttcagttttcgattcgaagggtcttaaaattgtcatgaagtttataagtttcaggctctattgggtttggatttttatgtagaaaaagttactggtctaacaatgaagatgttgattggttttcaagcctggtttatggttcattttgggttggatcatattgtacagagcatagtcttaaccatgaaacagtattaaccacttttgttacatttaggtgtacttcggtgtttcaacgttattagatgctgtttcagacgagggtaaagctgacgaagaacagaaagaagtaaaacctctttagcctttcgttcactctttgtatatttccatgcaaccttcaagaagtcaatatttatttacttattatctacaggcagaactagcggtttcagagctttcag

SEQ ID NO: 157784 - DNA, 624 bp, Arabidopsis thaliana landsberg
aaggaatcacggatcccggactttcttgcattggtattgtctcctttctgttcttgtccttttgcttaatctgtttaagatacaatccaaggttggttaacgaaagtttggtgttgggaaatgacagttaaatggacttcaatacaaagggatggattttgaagagttttgtgcagcttccattagcgttcatcagcatgagtctcttgattgttgggagcagagcattcgtcatgcttatgagctatttgaaatgaatggaaaccgagttatcgtcatcgaagaactcgcttctgtaagtttataagaaattcgacacttgcttctgtcatgcttaacaatttattcagctaattcctaaacgaagggaacataaatgttttgtaggaacttggtgttggatcatccatcccggttcataccattctaaatgactggataagacatactgacgggaagctgagtttcttgggttttgtcaaactgctgcacggtgtctcgactcgacaatctttagcgaaaacgcgatgaggaaagtgactcggtgttataacggattcgaaagaggaagaacattcaactgcaagaagcaaatgggtggattggggttgggaatttgaattt

SEQ ID NO: 157785 - DNA, 465 bp, Arabidopsis thaliana landsberg
attcacttgtatggagatataactgtgataagtgacatttgcaatgcagcaagtaatagtaggttttgatacgatggagatgatcaaggacatggagctgagcagtccatctggtattggttttgggattgaagaaatcgaagatggtgaaagtgaagttgaggatgaaaacaagggcgatgaggatgaaggagaagacaaagatgacgaggtttgaaaagctttcgtggtcttattgaggaacttcacatggaaaaaacctgtcttatgcttagcatgcttcacaatatactgtgttcttgactccaggaatgggttgctgttctagaagatggagatgacgaggataactatgtctcagactctgatgaatcacttggagactgggcaaacttggaaacgatgcgatattgccatcctatgtattttgccaggaggatggccgaggttacttcagtccaagct

SEQ ID NO: 157786 - DNA, 2424 bp, Arabidopsis thaliana landsberg
gcttgatagtacgggagttgatggaaaattcaaaagtgttagagggcgcttgaagaaggtttacgggaagatgaaaacactcgaaaactggaggaagaccgtcttgttagcttgcgtggttgctttggctattgatcctttgtttctgtttatccctttgattgattctcagagattttgcttcactttcgacaagacacttgtagcagtagtttgtgtcattcgtacttttattgacacgttctatgtgattcacatcatttattatcttataaccgagaccattgctcctcgttctcaagcatctttgagaggcgagattgtcgtgcattctaaggctacactgaaaacacgtctcctctttcacttcattgttgacattatctctgttctccccattcctcaggtattgctctcttcgttttgtgtgtgacatctacttttccatgctttttattagagatgtacatgcgtaattataggtggtggttctcactctcataccactgtctgagagaatactgaaatggattatacttagtcaatatgtaccaagaatcattcgtatgtatccgctttataaagaagtgacaaaagcctttggtacggtagcagaatcaaagcgggtcggagctgctttaaacttcttcctttacatgctgcacagttatgtaagtctttgctcttgatcccacttcccacccactgttggtgttgttgttgttgcaactgtgcatgatggatggctactatgtatataggtgtttggggctttttggtacttgagttcaatagaaaggaaaagcacatgttggcgtgccgcgtgtgctaggacatccgactgcaatctcacggtcacggatctgctttgtaaacgagctggtagtgacaacattcgttttctcaacacctcatgcccattaatcgaccctgcccaaatcacaaactctacagacttcgactttggtatgtatattgatgcattgaagtcaggggtgctagaggtgaaaccaaaggattttcccaggaaattcgtctattgcttttggtggggtctccgtaatattaggtactaaattgtattatgctaaactctctgccgtgagacatatatcaatccacttgatagattaatccgctctacagtgctttgggccaaaacctggagacaagcaactctgcaggggagattttctttgctatcatcatatgtgtctctggtctactcttgtttgctgtgctcattggaaacgttcaggtaatgttcataccttagaactaaagtttgatctcataaagctgattcttaatagatgtttgtttttggtgatcgcagaagtacttgcaatcatctacgactagagtagatgaaatggaagagaaaaagagagacacagaaaaatggatgtcctatcgggggataccagagtatttgaaggaacgtattaggagatttgaagattacaaatggagagaaaccaaaggcaccgaagaggaagctcttcttcgtagtcttccaaaatacctcagactcgaaaccaaacgctatctttatctcaagtttctcaaaagggtaaccttttattttgtcccatcataacttaaccaactcctcttgaattcactgttttgttttgtttcaggtgccttggttccatgctatggatgatcggttactagatgctctatgtgctcgtctcaaaacggttctttatacagagaaaagttacattgtgcgtgaaggtgaaccagtggaggatatgttggttataatgagaggaaatttaatcagcaccactacttatggtggcaaaactggattctctaattctgacgacttagttgctggtgatttctgtggagatattctcacttggggattagatcctctcagttcccagttccctatctctagtagaaccgttcaagctttgacagaagtcgaaggctttgttctctcagctgatgatctcaagtttgtcgctactcagtatcggactcagtatccccgcctccatagcaagcaactccgacacatcttgaggtaagactttcaattggaaaaatgcatgttgagttaattataaaagttaacatatttggtaatgaggacatatcatatatctatctcgtttctcaagttaccttcaacataataacccaaaatctttttatcacctaccttgtatcttgtttctcaagttacctttaatattataacctaaacaactttttgtctccaggttttattcagtgcaatggcagacatgggcagcatattttatacaagcagcatggaagagacattgtagaaggaagctctcaaaggctttacgtgaagaagaaggcaaactacataacactcttcagaacgatgattcaggaggcaataaacttaacttaggtgctgcgatttatgcgtag

SEQ ID NO: 157787 - DNA, 791 bp, Arabidopsis thaliana landsberg
atgcccttctctccttccttcttcctcttcctctcctccttcttcctcctcctccacctctccttatcctctccattcagtacgtctccttctctctttctcctctccgtctagatctgactatgaactgaaactgaattcttcctctgttttgcagatacttctttcttcattgactgtggaagtcccgaaacttctacagacgtattcaaccgtacatggcttcctgatcaattctactccggcggaagcaccgccgttgtctccgagcctcttcgattccatctaatcgccgagaaaaccatcaggtacttccctctttccttcggaaagaagaattgctacgtcgttcctctccctcctggtcgttactatctcagaactttcaccgtttatgataactacgacggtaaatctcattccccgtctttcgatgtctccgtcgaaggcactcttgttttctcttggagatctccttggccggagagtcttctccgcgatggctcttattctgatctctttgcttttatcggtgacggtgagctcgatttgtgcttttatagcatcgctactgatcctcccattgttggttccttagaagtcttacaagttgatccttcttcgtacgacgccgatgggactggtcagaatgttttgttggttaactatgggaggctctcttgtggttcagatcagtggggacctggattcactaaccacaccgataatttcgggcggtcgtggcaatcggacgaagattttcgatcggaagattcgagatcggtggctag

SEQ ID NO: 157788 - DNA, 677 bp, Arabidopsis thaliana landsberg
gtgacagcccacctatgttttgatgtatattaggcagcagcaatggcacttcaagttggtgctacaagttcatacttaccacatttttcggcgttgtgtttgtctgtcggtggcactcttgtgtaagtgtttattgaaaaactgaaatatgtttacccataatttgtttgttctaaacaaaattgtcatttctgatacaggtttgtgctaacattcgccttaggagctggtccagtaccaggtttactcctccctgagatcttcccaagtcgaatcagagcaaaagcgatggctttctgcatgtctgtgcattgggtaacaatagtaaactcgttgattttatcatcgttgcgttttcgttcctaaggttgcttaacattgttgaatcttgttggacaggtgataaatttctttgtgggtttactctttctgagattgcttgagaagcttggtcctcggctactatattcgatgttttctacgttctgtttaatggcggtgatgttcgtgaagcggaacgtgattgaaaccaaaggaaaaacacttcaagagattgagatttctctactagccaaaccatgaatgtgttttcagtctctcatcttgttggtcactgttgtataatcaaataaaaagattcgagttttcggtagagttcgttaaatgttacatttcac

SEQ ID NO: 157789 - DNA, 739 bp, Arabidopsis thaliana landsberg
caggcaaagagaaaatggctaaaagatggagtcttcagggtatgaccgctcttgtaactggtggagccagcggaatcgggttggtctttctactctctagctataatttttgacccatattgttctggattatttaagacgtcgttatatatgtgtttttatgtggaatggtttaggcatgctatagtagaggagctagccggtcttggagctagaatctatgtatgcgatatatcgaaaactctgctcaatcaaagtttatccgaatgggagaagaaagggtttcaagtgagtgtttcagtctgcgatgcatccaatcgtctcgaaagagaaacacttatgcaaactgtcaccataatattcgatggcaagcttaacattcttgtaagttaatcttaatttaaagaaactaagcatatctttaagctatttagaaatgacatgaatatatactcttttctgttcaatataggtgaacaatgttggcacaattcgcacaaagccaacaatagaatatgaggcagaagatttttcgttccttatttcaacaaacttggaatctgcttatcatctaagccaactttcacatccactcctaaaggcttcaggcaacggaattattacttttatttcctctgctgcagggatcgtatcatttgatgctgcatccatttatggtctaacgaaaggtaaccatagtgaaaagtttaatactagaggaagttcattgcaagaatga

SEQ ID NO: 157790 - DNA, 1004 bp, Arabidopsis thaliana landsberg
  unsure (1)..(1004): unsure at all n locations
gtatccttataaattcttaataccttggcttttgcatggattcttcttctatgtcaaagcaatactaatatactaaagaatacttgatttttggttgcattgctgtactaggaattaatgaaccatatcgtactagatttattcctgtttaaccttaagccacgtgcagagatcttaatcactcgaaccagtatgttgtaggactcgctctctttgctttagggaatatttgttcagcggaaatggcccgtgatcttgcgccagaagtagaaagattagtccagtttcgtgaccctaatatccgaaagaaggtgaagtgttttcatattcatatacagggtcccctagtcgctgttttgtctcttcattgctgttacgattaaagttgtatcatatgcaggcggcgctttgctctactagaatagtaaggaaagttccagatttagtagaaaactttgtaaacgctgatgcttccttgcttaaagaaaagcatcatggggttctaataagaggagttcaactttgttatgaattatgcacgattaatgatgaagccctagagtacttcagaacggtaagtcaataaatttatacagaacactctacttatgcatacaggagcatcgagtaattaaatatgcgtacatatgctactaaattacctgtatgatgcttttgtgtactatatttctcttgcaataaagtttgatatctgtggtatgatagatcaatctgctcaaatgaggcagaaatcaggttgttatttttgttttatcagacaggcagttttgacaaacccttttctttgttttgtctctgcagaaatgcacggagggactgataaaatttttgagggatattactaattgtgcatatcagcctgagtacgatgttgcagggatcacagaccctnnnnnnnnnnnnnnnnnnnnnnggttcttgcgtgttttaggccagggtgacgctgatgctagtgatttgatgactcatatacttgcccaggt

SEQ ID NO: 157791 - DNA, 1318 bp, Arabidopsis thaliana landsberg
atgcgtagaccggagatacgatcggagattcgtccggagagttggagacgaggaagacggatctcagtgacacggtggttagtacagccaacgccacgccagtcacatggagctgctggtgttgaaggatcccatgaagttaaagcaccgagagggtcatggaggttgagtttaaacgccgtgagagcatcaatctcggcttgagattcatcggcgtatgagactaacggcgcgtaaatgaccaggaaaatgaagaacagagatatatccatggccatagatctgtggcagtgaacaaaatgaaaacttagcttgaagaaggtgagagaagtgtcgccatgagtgtggtttttttctgggagagagaatgagcagaaaaagagtaaagttaaagtaaaagaaatacaaaaatctggttctgtagataatttgaagtccgcactataatccatgcatttactaaaaaaatgatactatttgttggaggggaaaaaacattattctaatcattatattgtccttgcaagtttttttttttaaaaacaaatacaaacagagaaaatcacattattttgttttgttttctggtccactcgttttaaactacggcgatcgattttcacggcgagaaatgtcgtcggagcttggctttgctttacttaccaccttcacggtgctcttgtcgtatttaagtttttctaatgggttactgcaacctcgtaggatttctcatggattgtccaaaagtagcaagtacttgacgagggatgagctctggttcactcaaaccttagatcactactctctatctgtaatcaatcttcccaacttcgtttgctagtcgagtttaggttctgtttctctttcgttattgttatccagaattagtggcagtatcctagttaccagttccagctgtttctaattttatttcaggatcatcgcaaattcagacagagatactatgaagatcttgaccatttacgagttcctgacggacctatctttctcatgatttgcggcgaaggaccttgcaatggaatcaccaataactatattagtgtaagatatttttccgtgaaacatatccatttgattgattaatttattctcataatctctgaaatttgcattggttttgtttgttaaacatgttcttcaggtgttggcaaagaagtttgatgcaggcattgtttcactcgagcatcgttactatggaaagagctcaccatttaagtcgttagccactaagaatctctagtatctttcttccaaacaggccctttccgatttagctactttccgccaatattaccag

SEQ ID NO: 157792 - DNA, 454 bp, Arabidopsis thaliana landsberg
agggttacggagtcttggactttctggatcacttggattcatgcttgataaattgacttctgttactgagttgtaagatttatcttccatgattctccaaagtttctacttttgtgtatttagtggtgtggcttatactcatggattgtttttggtgaaacctgcagtgatatgagcaacaataaccttggaggcgatttgccttatcagcttcctccaaacttggagcgattgtatgtttgatgattctctctgttatatgttctacaaatttctatgtttgttttgcaagttgatcaatttctgtatttgtctaggaatcttgctaataaccagttcactggatctgctcaatattccatttctatgatggctcctcttatgtacctgtaagttcttcaattgtttaatctcaaacatatccttggagaaagaatggttatttaatgctcca

SEQ ID NO: 157793 - DNA, 384 bp, Arabidopsis thaliana landsberg
tttgaactggcaacatcagctttgcaagaatcctaggcctaacccggatataaaaacactatttgttgaccatacgtgtgggcatcccaatggtgcacacactccttcccctacaactaatcatttaatgggttcagtccctaaagttggaggcttcccaccattaggtgctcacggtgtaagttgctctaagattacagcttctgttggattagtttttagcacatgaatttaactttgctagtttgtatgctcttgttcagccatttcagccaacaccagctcctcttacaacatctcttgcaggatggatgcctaatccatcggtacaacaccctactgtttccgctgggcctatcggcttaggtgcccccaacagtgctg

SEQ ID NO: 157794 - DNA, 348 bp, Arabidopsis thaliana landsberg
aaagacctgattgcaacatatgagtcacacactcacatagagaaaaagattccaatcgtatcaaagagtgaaccgtattgtggtttagtcaatttgacacaaaaccggatcaacccaatcgaaccagcctcaatgacaattttgggaccgacttttaaagacgtgtgtctctttattgtcgccgttcaattggtaagaggccacggcgtaatcgtaggacgacgacgaaacatatttttctttagtgtttattttattttttgtgttgggtttcagtttcaaagagtcccaccaatgaccaaaaagtgctccaatgcatgattattacgttggagcctcttccataga

SEQ ID NO: 157795 - DNA, 395 bp, Arabidopsis thaliana landsberg
aaacaaaaccatgtcttctctgatctgcttcattttccttttcctcttctcctttctcactagcttcagagcttctgctcaaaatcctttttacctaaatcatgattgtccaaataggacaacttactcaagtaacagcacgtactccaccaatctcaaaacccttttgtcctcttttgcttcccgcaacgcctcttattccaccggattccaaaacatcagggcgggacaaacccccgacagggtcaccggacttttcctttgtcgcggagacctatccccggaagtttgcagtaactgcgttgccttctccgttaacgaatcgttaactcggtgtccaaatcagagagaagctgtgttctattacgaagagtgcatactcagatactctcaca

SEQ ID NO: 157796 - DNA, 2166 bp, Arabidopsis thaliana landsberg
atggatgtttatgttatatgtagagatggggacttctttgctgtcaaggaagtttcacttcttgatcagggaagtcaggcacaagaatgcatacaacaacttgagcgggtatggaaatggaagtttcatatacatgggtcaatgatccgtatcatttatcacttctgtcattatctcatggagcagtcaaaagtaggttgctaatccaccttacctttgccatatttttcattttctacaggagattgcactacttagtcagcttcagcatcagaatattgtgagatatcgtggcacagccaaggtgtggtcctgttctctctttctttttcttagttgcagttgcctaactatttcattgtgcaataataactcatttcgctgttttcaggatgggtcaaacttgtacatttttcttgagcttgtaacccaagggtcccttctaaaactctaccaaagataccagcttcgggactctgtagtctccttgtacactagacagattcttgacggtttgaaatatctccacgataaaggttttattcacaggttagactagtaaactctcttggtacagctgtaattcccaagcatctatctaatttcctgcatctcatgggttacttatttttatcattttatgcaacaaagggacatcaaatgtgcaaatatattggtggacgctaatggcgccgtcaaacttgcagattttggattggcaaaggtttttttccataaatagatatttatagctttgctctaaagtaattacttggtccatcgtttagtaccctgatatgtttgtcatttttttttatttaggtttcaaagtttaacgacattaagtcctgcaagggaactccattttggatggctccagaggtatggttttgggaaactttcccagtgatttacattaataaaaatgttctggtctgggctttataacctcaaaaactcctggttatgtttgcttcaaatatttggtgaaattttctttatatcagttaatggtttttgataattgtaagtatgtatgttaatcgtacgtaacagatgtggattcatttcactttcattgtacttgaggctatacttgtatggttatatctaaatagaacataatcatttgatcaggttattaaccgaaaggatagtgatggctatggaagtccagctgatatatggagcctcgggtgcactgtgctggaaatgtgtactggtcagatcccctactccgatctcgaacccgtaagtcttcaagattttcaaacttttgaactgtcttaataatcttaaacgacatttgaagtgtctactttatgggattttatgagttaaaagtcagaatttgtgcaaacgcgcaggttcaagccctgtttaggatcggaaggggtactcttccggaagtacctgatacgttatcactagatgctcggcttttcatacttaagtgtcttaaagtgaacccggaagagcggccaactgcagctgaactgctgaaccatccatttgtgagaagacccttaccatcctcaggctcaggatcaacatctccgctaatccgtagatgaatctaattttattagattgcctccataggtgaagcctctagttccgttttattgaaaatatattacgatcaaacgctatattctaacattgatatcttaatgtatgagagcaggggtaaccagaaggtttatgagatattataccccatagaaacttttggggagatcacgagatatgattctttgatacatatgctgttttggtagcgcagcaagagctaaactttctcgagacatatcttcaggtagtttctgtctcattcattggttgcttgttgtaagttgtgtcacttgtgtgtgttgagcttatatttaaaactgaagagccttcgttaaattagagttttgggtgcataggtttgtttagttttgttaaattatagtatcatgtaatgtataagaagaaccttagttgaattagagtttcgggtgtataggcttatttggttttgttaaattatatagtgtatacatgtaacccatatcatgtaatgtgtaattatagttggctcttatatagttcctgcttgttgcaactgtttacacatctcatgtctcgatggattttatcttcaatttttctcatatatat

SEQ ID NO: 157797 - DNA, 177 bp, Arabidopsis thaliana landsberg
ctcttgagaccatctccgaactcaaaggaaactagaaacaatggaagtgatgagcttgactgccccatcttctccgagacaattatctggctgctttttaagcgcaccaacaagccctagaagattccatgagttttatagagagttggaagaggcccgtaacaagaaaactttttc

SEQ ID NO: 157798 - DNA, 227 bp, Arabidopsis thaliana landsberg
aaagaaatgaaatctctctgcttcatttctacagctccattgattcgttcgcctccatttcttgatctttctccaacaagcttgaatcgatttacccttaaaattccagcttctctctatgtatctcatccaacaagatgcagcatttcaaacccgtcgagctctgaggaattgttgaattccaatggtggaatgtctagggcatcgattagtgtcttcggaggtac

SEQ ID NO: 157799 - DNA, 958 bp, Arabidopsis thaliana landsberg
gcgatttctttgccatctccgggatcatctccgttgtcgtcgtcgccggcgatttctttgccttctctgtggcggcgccatcgtgtccaaagtcacttgaatcttcttcaatcaccgtcgtgaccactcatctcaacctcccttccttctccgccaccaaaaccgccaaggtccgtcttaatttcttagaattcatattacttgtagagaggattcaatttcttgactcttaattttaagggattgcatgtagacttaataactcatctagctctttgattcattttaatgtatttgtgtttgtgtttgaaattctagattaagacatagttagatgaatttcgttttttcatacttgtaatttagggcctcaattttgggtttaaggtttgattttaacttgggcattttagtctttgaaagctttactttttacgcataagaagctttagttgatttgaaggtttatcttgtttatacatttggtgtttatatgtttgggatctcgtcatgatgtctttgattgtcacaattttctggtttatttctcctttaagtggctctttcttcatctccttgcttacaagcaaatctctcacagcttgattcgaatgtgtcgtcgttaacagagaacatcagccactgaacagtatctcttcattgtgagttctcttcttggaatttcttttaggactcttgaaaccttttgactttttttttctgtttctctgtgactgtaacttgaaatttttggatagagatgtgtgttagagaaagagaaagttatactagtatatcttagtagatgagaaaaaatatcatgaaattttagttgatatatacaattattatcctgtttctatagtgcgaatgcgaagttgatgtagtctttgtttatactaacgttatattaaacaatatgagaacaatcaattatataagatatatctgctgaaga

SEQ ID NO: 157800 - DNA, 1104 bp, Arabidopsis thaliana landsberg
atctctatctctctcttcccccacaagggtggcgattcgaggagtttccatggtggaacagaaaccctagagcctttatgctgccactaattatcactcttcactattgaattggggatggactcagagaaaatcctcaatccaagacttgtttcgattaatagcaccagccgcaaaggtatgtccgttgagttgccgcagaaaccgccgccaccgccgtcgttgttagaccggtttaaagctttgcttaatcagcgtgaagatgagttcggtggtggtgaagaggttttgcctccgagtatggatgagattgttcagctttatgaggttgttttgggtgagcttactttcaattctaagcctattatcactgatctcactattatcgctggtgaacaacgggaacatggtgaaggaatcgctaatgctatttgcactcgaatccttgaggtttgctttcttcttagttgtttccactttctagccttattgtatagtatgtaagtgtagaagtgggaaaaaaattaggtttttgattgtcagagattagtgtttggtttgtggtttagtgaaatggctgcttctgagttacctgtgggtgtatatatgcaggctcctgttgagcaaaagttgccatctctgtatcttttagacagcattgttaagaacattgggcgggattatggtcgctatttctcatcccgtctacccgaggtgagcagtctacaagaagatgtttacttaaatgatttgaatagggctgaagcatacccatgagctgttttgatcctattctgctttaggtcttctgccttgcatataggcaagcacatccgagtttacatccgtcaatgcgtcacctgtttgggacttggtcgagtgtttttccaccacctgtactacgcaagattgatatgcaattgcaactttcatctgcagcaaaccaatcttccgtaggggcttctgagcctagtcaaccaacgagaggtatacatgttaatccaaaatatcttcgcaggctggagccctcagccgccgaaaatgtaagcctttctctttgtcattatgaacagagatgacattctttttttaggtgcatctgca

SEQ ID NO: 157801 - DNA, 2320 bp, Arabidopsis thaliana landsberg
  unsure (1)..(2320): unsure at all n locations
atgaaagatagcagtacatcttctggtgagcaaggtcggaatatggttgaccctcaaaacggcaaaggatctctttgttctcaggctgcagaaacccatgctcatgaaactggaaaagttccagctttaccctggcatccttcaagttctgagggcctggcgggtcataattgtgtccctttgttggattcagacttgaaggactcacttttaccccgtaatgattccaacgctcctatacaaggttgtcgcctttttggagctaccgaattagaatgtaagactgatacaaatgacggtttcatcgatacttacggacatgtaacttcccatggcaatgatgataatggtggtttcccagaacaacaggggctgtcatatattcccaaggattctttgaagctagtacctttgaatagtttttcttctccttctagagtgaacaagatttattttcctattgacgataagccggctgaaaaagacaaaggagctctttgttatgaacctccacgttttccaagtgcagatattcctttcttcagctgtgatcttgtaccatcaaatagtgacttacggcaagagtacagtccctttggtatccgtcagttgatgatttcttcaatgaattgtacaactccgttaaggttatgggattcaccgtgtcacgataggagccctgatgtcatgcttaatgatactgccaaaagttttagtggtgcaccatccnnnnnnnnnnnnnnnnnnnnnnnnnnnntttcacctgtgcttgatagaagaaaagacaaaaagcttaaaagggctgcgacttcctccttggctaatgatttttcgcgcttagatgtaatgcttgatgaaggagatgattgcatgacctctcgtccgtcagagtctcctgaagataaaaatatatgtgcctccccttccatagccagagataacagaaattgtgcatcagctcggttatatcaagaaatgattccgatagatgaggaaccaaaggaaaccttagaatcaggtggagtgacttctatgcaaaatgaaaatggatgtaatgacggtggtgcttcagctaaaaatgtaagtccgtctttgtccttgcatattatctggtatcagttataaaatcccagtcatctcattctctgatgtctatagctgtaaggtgcaatgtctggtacatggttattgagtctattagtgaacttcttgttgcttaacacatcatctagtatgttgaattctcttcatgtgagatcgtatcaatcacatttgctcaaacagatagcatctagttatttcagctgtctttgtagaggattatagttttatagttggtctaaatctccataacgtaatcttataagctttaatctctaaatctcttacttgcccttgtaccaggaccaagaaacttctggaagtttttttgagttacgactgtgttctcctggtatgactcgagctagaccagataacaaagttaatgcaagtgcgaaagatctatcaaaccagcacaaaatatcattaggtgattttccaacagaagaaatgtcatcagaacctctatgcacagtggactctattcctttatctgcaatcgataaaactaacactgcagagaccagctttgatattgaaaacttcaacatgtaagttttacttttcctctgtatgtgtttgatagctcattttgctattgaatcatattagctcgaaagttctaacctaagttgtcttggtacaactcgttttccagatttgatggaactccgttcagaaaactccttgataccccatcaccttggaaatctcctttactctttggttctttcttgcaaagtccaaagttgcctccagaaatcacatttgaggtaaatatgagatggaataaatttagtttctggatgttttactttttgttttaagttgaagcgcctgttaatggacgtatcttctttgttgtttatcattttttcttcccaggatattgggtgttttatgagtcccggcgagagaagttatgatgccataggactgatgaagcatttgagtgaacactcagctacggcatatgcagatgccttggaagttctgggtaatgacacacctgaatcgatactcaagaagagacagctgaacaagtccattcaagggaaagaaaatcagcaccagcctcatgatcagcttgggaaccgatcccaggtttcagcttcaacttacaccttatatatcatacaaactctcaataagtttcaaattgatcaagtcctctaatcaatacacctggtctagcttaatgttgaaattggatcttgaa

SEQ ID NO: 157802 - DNA, 1108 bp, Arabidopsis thaliana landsberg
  unsure (1)..(1108): unsure at all n locations
aatcttcataattgttaattcatcctccattagaatccctagggttttcttccatacacaatcagactcaacgataagtaccaatcggagaagagatcacaagtggatgatgagttacgaaggcaacggagatggtgtcgctgtctccaccgaaaaccacaacgagaactacatatctctagagagctcgccttttcatgaagactccaagtctcgagtatgttacactttcttctttacatatcttgcgtacgattctgtagcttttaggcttatgtcgtgaattagattggtaatcataatttgttctccacttgtattgtaattttggtacaattctcggattctgcttgttgaatttatgtttttgatagtttgatttaaaggattcactggatttagagcatattttatcatgttaagttcatatgttctctttagaaatctggggatagtatatgagagaagccttttgacatttgtttcctgcaggaatctcatgatcttcggctggcacgcttgccaatggttgtgctggcctaagagacgccttggcatctgatagtgtgagatttcaaaggtaacccacacaaatattcttatcatctgcggatataaaatcgtggaagattcttgaattgttgctcattttctttattcaaattctccaggaaagccttaaacttgttgcaatatctactgcaagaggatgattcagaccgcagtattgccactggacttggattcccccgagtgatgatgcatcttgcctctagtgacgatgctgagatcagagaagccgctcttcgtggattacttgagctttcaagagagaaaaacgatggaagtagcagcatagataaaagcgatgagaaactgaggcagctactagaagaacggatcaaaggaatcaccttgatgtcacaagaggatcttgaaacggttaaagaagagagacagctcgtggatttactgtggagcatttgctacaatgaaccttcttctctgagagaaaaaggacttgtcgttcttcccggtgaagacgcattgcctcctgatgtcgctagcaagctctctgagcctcctcttagagcttctgcagcanacc

SEQ ID NO: 157803 - DNA, 825 bp, Arabidopsis thaliana landsberg
  unsure (1)..(825): unsure at all n locations
cttttcctctcatcactcatctctcttcttaaagattccttctttgcttcacgaaactaaaccgaaccctgatttccctttcttacatgctcaattatcttcaattttcgtttaattcttaggggttttagtcattttcgatcgttcaattccatgtccggcaaaggtctatctccggcgccgttcaacnnnnnnnnnnnnnnnnnnnnnnnnnnnnacccgttacgttttcgggtcggcgaacaggatcctaaaacccgtgaattcgctgcctttatcggcgaccaccggtatttcgcggcagcagcagcagcagccgccgcagctaatccacatcctcatctcgagttccgtcagaatttctactcggagaaacccattatcggaaaccctaacgacagtggtggatccgacggcgaggatgacgttgacgtggaagaagaagacgaggatgatgacttagacggaaacgaaggtgacatcggcatgaacaaagacgctggtgaagattctgtatctgcaggagctggtatgagaatcacacaaagtttatgtttttttgggaattctagttttgaaaagtttctacttttggagtattgaggcagtggactaaaatggtaatgcagtgatagtggttggacaagacaacgcagcttactattcccagcattttaagacagtggaagcgagttttgtttctaggaatgaggaatcatcaatcgctgcggataatgggtgtgatttcagtggcagaagagacctttcttcttcttcgagcaattcgatcgagtcattgagaaccattttgtctgatcctacaac

SEQ ID NO: 157804 - DNA, 893 bp, Arabidopsis thaliana landsberg
gtttatgtatgggaagccggatgtgcctaaaccttctccagaagttatcgctgaggcccatgatatgctagttggttttcaaaccgaatataactgggacgcagctgtggagttggtggtcaattctggtgatccaaaagcttcttctttacctcgtaatgattggtacagactacgccgtagcctcgagatactcaaggtttgacaattattaacttcaactgttgtcttgcccttgtagataaatgatttcttgcctgataggttgatgaactatcattgttttattttggattgtatgcaactatgcactattaatcttgctttgaatgtttttcctggcagtcaactggatcgcctccgcttcctttcgcattccttatgattcctttcagtaaatttagttgctcctgatgctgatgacttccttgaggacggttcatctgccgatatctctatccaaaacatagagacagatttggactatgactttctttgttttttcttgtcaagcccacgggttgctctctacagatctattgatttcagatgtgaagacatgctttcaggtaaaaataagtgctactacttaattagtaataacttgcaagaatacaattgcagccccattgcatggcaccttacagtaataagtcttttcttatctgattcttctaattataacccaaaaaagagacaatttgcatgctctttgctgtgtcgtatgcaattttgtatatatttgcttggcattgcttctgagtttatctttccttggtgctttgtctctcaactcaggacccaatggagttttgtcagaagctagatggcttcttgatcttggtcttcttccaaactcaaatcctgcaactcgtgccattgggtacagacag

SEQ ID NO: 157805 - DNA, 2769 bp, Arabidopsis thaliana landsberg
atgtggggaggcgcaggtgagccagcagattcttactaccaagttcgtcctgagtgcaccgatgtccccaagaccagattcaaaatcaaggttacttctttcgatcccttcttcttcattttctccgatttttgcttattctagttttgcttcttcgttgggtcgtctctgttttatgattacgaatacgatatgtgattgctgattcggttccaattacatccagattctctggttatctatgttttcgaaaatgcattgtctctgttgtgaacttgttcctgacattgtaatgttcataaatctgattccttatgaggagatattgatcttaggagctgttcagggtctcatatatattcttgatcccactggatttttttttcagtagcatcacatgaatgattgttttagtgagattgtcactttttccagacataagcttgaaaggattttaacttcttgactccagggtctttaggaagatacataagataggaagataggttatgtgcttgactggtactaatttggaactagattgaataattttgaacctttacattacaggccataaaagcctatatcattccatgtcttgtggtcataatgtatcatgaataattgcatcatgttgaggccaggaagtttttgctatgttgctgacaacacgggtcatatttatgatgtttgtgcagcctggtaaaactctaagtgtaagaaaatggcaggctgtatttgtacaagaagggtctctccatattggcaagactctaagacgcatccgaagaggggtatgtttgtttggataagtctttgtaaagactgatttatcctttcatttgttctgtatctttgataacttatgttactttaatattcctttacaatcaatctatagggaatccatccatcaattagaggcgaagtatgggaattcctacttggttgttatgacccaatgagcacattcgaagaaagagagcaaattcgacaacgcagaaggtagaattttgtcctcatatcctatatatatgtatcgcatttggcataattacatgtttctttcagttcattcataaaccatcgattcagttttgtgaatcctaccgctaattctcttctttcagattgcagtatgcttcttggaaggaagagtgtaagcaaatgtttcctgtcattggaagtggaagatttactaccgcacctgtaattactgaaaatggtcaacccaactatgatcctcttgtacttcaggaaataaatttaggtaaaattttgcctttctattacggaaatttaatgttgaactcttacataaacttgtaataggcatttgaagttttcatgtggctttctcaggtacaaactcaaatggttcagttttttttaaagagctcacaagtcgtggacctcttgataaaaaaattatccaatggctgctaacacttcaccagataggttagcgactgatcatggcctcctttatcgccggctagactatactgaatatctggttcactcagttgcttaatgtatgtttttcaggtcttgatgtgaaccgtacacacagggccttggtattttatgagaaaaaggagaacttatcggagctctgggatattctgtctgtttacgcctggataggcaacgatgtcgggtattgtcaaggtaagcagttaaatataaagaaagaacagggtttatcctttgttcaagccctgattgattcttatgttttgatctatctactctttcttctgagtaggaatgagtgatctttgttcccctatgattatgcttcttgaggacgaagctgatgctttttggtgtttcgaaagattgatgcgccgattggtactatacctctatgttttgtgttcatataagtttgtcttgactctctctgtaatcagataatactaaaggttttttattcttcttttgaacttgaaagcgagggaattttcgtgacacggggagatcagttggagtcgaagcacagcttactcatttggcttcaatcactcagattattgaccccaaacttcaccatcacttaggtactacagtactactactactgcaatttctttgcatatatgtatatattcagcggttaatcgagtgctgggtcataaatgcagagaaattgggtggtggtgactatctctttgctattcgaatgataatggttcagttccgaagagaattctccttttgtgactccttgtacctttgggaggtaatgatactgattttttgtctcactctctcttatatgtatttgatctcatgccaaacactattcctgcagatgatgtgggccctcgagtatgaccccgatcttttttatgtatatgaggcgcatcaatgcgggaatgagaaaacagaagggttaaaaggtaaaccgaagtcaattaagcaatgtggaaagtatgagaggcaaaacatgaggaatggaggaaaaagtgcagaaggtcctttacctatatcggtatttctagtggccagtgtcttgaaagacaagagttataagctaatgactgaagctcgtggactcgacgatgttgttaagatacttaacgatacgactgggaacttggatgccaaaaaaacatgttctggagccataaaaattcacaagagatatctaagaaaggttatttctatgtttctttgatctgcctgggcttctgtctctctcaaagttttgtctgaaagttctctcttctgtggtcttctctcttattgcaggctaagaaatag

SEQ ID NO: 157806 - DNA, 928 bp, Arabidopsis thaliana landsberg
tttttgtttttttgtttttttattggctttcttctgcaaaaaccataactttattttttctgggtttttcttcgtaaagaagcttcccaaaacccagttttttgtataagctcaattagtagcaaacaagaaaaaacaatcttaaactcaatttcacaaaatctctgattcttgtgaaaatttgtatattgcaaaactttggaaaaaaaagagaaaaaatatggggaagcaaggtccttgctatcactgtggagttacaagtgagtgtctccaattcctatttgttgatgtgaaaattttgttatgaatatgaatattcaacctttgtttttttttacttctgggtgagatgttcttttttctgggaaaatgatttgatgatatgctttttgtgtagcaaattgtaataatgattgaagtgatacagcaaagacttcctggactcaagaatatcagtgaacattttggaattatgttcctttaactatatatattgtttctgttgaatgatcttaagtaacaactgtttgtgacttgtgttgttgttctcagtatgattagaactaatggattaggcaacaaagacatgatcttgggatctgaatttgtgtttatgattcgcaattgttgtacaaagaagctaaattttgttctggttgctgcttaaagactttaagatgtttggtgttttgagatcattgttcttctgattgatttggagtttgaatttgcagtattaagtcacatttcaagtgttgtctgatgttgaactcttatgttgtcttgatttcaaagctcaaatttgtgaaattttgtttctttcattgaaacagacacacctttgtggagaaatggaccaccagagaagccggtattgtgcaatgcgtgtggatcgcgttggaggacaaagggaacacttgtgaactac

SEQ ID NO: 157807 - DNA, 1516 bp, Arabidopsis thaliana landsberg
atgatgaacccgtttctcccggaaggctccgatccaccaccaccaccacaaccaatggagggtttacacgaaaatgctccacctccatttctgaccaagacatttgagatggtggatgatccaaacactgaccacatcgtatcttggaacagaggaggaacaagttttgtcgtctgggatttgcattctttctccacgattctccttcctcgtcatttcaaacacagcaatttctcaagtttcatcagacaactcaatacttatgtgagtcttctctgctctgtattctctgaccaaacacaaaacagagcattcaaagcagaggaatgctctgtttttttcttttatttttttaactttcatttcccttgttgctggaaaattaccgcgaagtattctgaatgttactatataattaacttggtaatggaaaaaagtcattttctacagcagaatctgttgttaatttagcattctagaaacatcgaaaatgtagattccgtaatggctagtggagtagaagaaggtttagtaacttccagaagcaagtttcgtgtcaacttgcttactaaaataatcaaaagaaacagtcagcgatcttatcccaatttccattgtttattcactaatcagctttaacgttgcccacttgttccattctttaacatataaaaacatagaaagagttctcactccaattattgatgtttgtgagaatatgtagactttcaaaagattagtttttgaatacttatgttaaaaaaattacagggtttcaaaaagatagaagcagagagatgggaatttgcaaacgaagagtttttgttaggacaaagacagttgttgaagaacatcaagaggagaaacccttttactccatcatcttcaccaagccatgacgcttgcaacgagcttcgcagagagaagcaagtgctaatgatggagatagtgagtctaagacagcagcaacaaacatcgaaaagctacatcatagctatggaacagaggatagaaggaacagagaggaaacagagacaaatgatgtcgtttctggctagagcaatgcagagtccttcgtttttgcatcagttgttgaaacaaagagataaaaaaattaaggagcttgaggataatgagtcagcaaagaggaaaagaggttcttcttcgatgtcggaattggaagttttggctttggagatgcaagggcatggaaaacagaggaatatgttggaagaagaggatcatcaactggtggtagagagagagttggatgatggtttctgggaagagttgcttagtgatgagagtttggcttccacctcctaactagatggatttctttttggttttgtttttagtttcttctactttcaagctcattttcttctgtcacaaaaaaaaaactttttctgtttgtttaattaatatgcagtaattttgttatcaagtagtagtagtagtagtgtaaacaaaaaaatggttaattctttcatatatgtgtatatgtatgtgataa

SEQ ID NO: 157808 - DNA, 104 bp, Arabidopsis thaliana landsberg
gtttgatcgtgactggaagaagattgaagattttgttgaagatcatcttgcagtgattaccactgatcacttcatggaccgtatggctgctattcatgttgaag

SEQ ID NO: 157809 - DNA, 405 bp, Arabidopsis thaliana landsberg
atgtgtagtaaccaagttaaacactgtgcagtacaacaaacagctgctgcagtaacgaaagaagatcggtgtaacgcccgtgaaccggaaaatcggttagggtttgtttttaaatcatccggtttaattggttgggttaattggaaaccctagagtgtgcctataaaagaaggaaactcgaaattagggctttagttagccatttttcgttttataaaggagaaaaagagagaaaaggagaatgagcagaatcgttagggtttgggagaaatcagtttcgtcatatcaaatcgtggtaaaaggtaacgaaatttggtagagttattcccaagtcctttatcgttattctccagtttacagaattggatttggattaaaattggttgagttattcgcagtttcgtg

SEQ ID NO: 157810 - DNA, 1751 bp, Arabidopsis thaliana landsberg
agtgagcaaggttctgctgcatgcaccatcagcgagtaagctatgcactgtagctaagccccactactctttcgaacgtacactcttcttctttggaatctgtttcgattgaagtttgtttgtttgtgataaatttgattttttttgttgttttgtgtgtatacagtgaggttgagatgtactggtgttgatcctgatgatcatcgtgtaaaatctgaaattgtatgtgtctttggatgttttagttctcttattatcttgttaacttaatcaaaatggtatcttttgttgtttgattgatggtagtattggttttgtaggagcggataaacgtgtacagagagaagtttcagaagtgtgttgatcaaagtaaaggtaaagattgattttctggtgcctggattgatttgtagagagatcaaaaacttgtttggttctgtgtgtcttttggtttaaaccatttgtttcagtttgaattggccattgtattgtctcgtggattaagcaagtttttttggctttctcttttcattggagaattgctgctttcaattacctttgttgggggataatatttcaaccatgttcaaggattatgctctcagcttagaatttatttagcctttcgtaattttagaggctaataggtgctaacgatttcttaagcgttaaatgatatcctctgtgtaccttattgttgattagtacattttgaggacatgcgtttctgatcctttgtttgttgggattatgtatctgccttatatagttttccttgttttgttcgatgcttagtgttgatactatttttcgtagatatgatgattttctttaaaagactctttattgcttgtacccatcttaaatgcagggaagtagtgtttccattagaaggctttctcttttcattggagaattgctgcatccatttaccttataaagttgttggggataatatttcaaccgtgttcaaggattttgctctcagcttagaatttatttagccagtcttaatattaggcagataggtgctaacctcttcgttgattagtacattttccgaggacttgcttttctgatcctctgtttgttgggatgatgtatctgctttagattgttttctttgttttgttctatgctcagtgttgattttatttatttttggtagatatgatgattttcgttgaaagactctttattgcatgtacccatcttaaatgcagggaagtagtatttccattggaaggctttctaataatgaatcgcgcctaatccattgttctggacttatcttttagtcaccttactattgcatctacctatcatcttatattgaaaggagatttcctcgtagtctattgaatgaaattagggagactgattcgtgatctagtttctctgtatttgtttttccgttgaatagctttaaaatcaaagtggatagtttcaactttgttttgtcaagatttacttccatttagacaacttatttgatttgaatttatttgtggctcattgttgatgttaatgtttcgctatgtttttcgaagttttttcttattgtggaagatccatttgttcttgtctactatctcaaattttggaggctagtgtcttatctttgtttatcaacgagcttttatattccgtttagaaagtgcttactcaattggtaacgcttgtgctctgcgtttttgtgaaatgactcgtgggcctttcgggcaagaatcgttttgtcgatatgctaccgg

SEQ ID NO: 157811 - DNA, 486 bp, Arabidopsis thaliana landsberg
agtggtagagatgacgagaggcgtcaaatcaaaaggcctagtgaccatgatctcaggaggaatgatgggcgtcaccgatcacggttggcatatgagaaaggggaactacgggaggaagcagaggttcagagaccctctgagaaaaggaggaagttttcacccatcgtgtggaatgcagaaaaagtgggtagagctccatctagggagaagaccaagtctcctttccctgttccgactacaactgtgatatccaatcaggctgttgctggtaagactacttcaaacgatcaagtgaatgccttgatgtcgccagaacctagttatcttgctccagtgcagccttcagaagccctgctggctgtgaaacatcctgttgatgatttggaggagggtcagttggaggaagaacaggtgatgcaggaggatgtaaaggagggtctgttggaggaagaacaagtgatgcaggaaccaaatataaagacatct

SEQ ID NO: 157812 - DNA, 1819 bp, Arabidopsis thaliana landsberg
gtcgaggatttgtgttaagaatttgccaaaacatgtgaaagaggatcaacttcgagatcacttttcacagaaaggagaaatcactgacgccaaattgatgcgttccaagtatacttctactactctatcaaactccattgttctcgcaactaaattttgtacttttattgattgttttaatctgaatcacactctgttttttttgtgtgctttttgcagtgatggtaagagtagacaatttggttttattggattccgtagtgctcaagaagctcaacaagctattaagtacttcaacaatacttatcttggtacttctcttatcattgttgaggtttgtacttaaaactatgacactctgttttaacttctgtactagttaggaactctgatttagactttcatttggcttatagattgctcacaaagttggagatgagaatgctcctcgtccgtggagtcgtctttcacataagaaagaagaggaagctaaaaaatcttctagtgaaggcttaaaagatggtaatgctaaaggaggtaaaaagaggaaagcagaggttgatgatcctgaatttcaagaatttcttgaggttcatcagaggagtaagtcgaaaatctggtctaatgacatgtcgattcctcctgctcctgaagaaactggtaaagagaaggtcttggtgaagaaagcagatgagcaaatagtttccaatggtgttgagcctaagaaagctaaaaaatcatctgatactgaaaagactaaaaagagcaaagttgttgctgccagtgatgatgtttctgatatggaatacttcaagagtaggattaagaaaaatctgtctgattcggagagtgataatgaatctgaggatagtagtgaagatgaagctggtgatgatgatggtaaagctgagacagatggtcaggatgctgatattcgttattttcctattgatggcgatgttgaagctggcggagttggtaaagatgatgatggcgatgccatggaagtagaaggtgatggcaaggtggctcaagaatcgaaagctgtcagtgatgatgttcttgacactggtcgccttttcgtccgtaacctgccttacactgcaacgtactagatcttcttgttcatctcatacacttgttttctgtttatctttctgttattcatcttatacatctctgattgttgtcaataatctcatgcaatagagaagaagagcttatggaacattttagcacatttggtaagatatcagaagtccatcttgttcttgacaaggagacaaaaaggtccaggggaattgcctacatcctttacccgattccggaatgtgcggcaaggtattatttatgtcaaaaagtagttttattactgctggtaaccccttgaggtctaagtgcatgcttttcaagaagtagccttgtgttgagctctagctgttagttcaggttttaaaacatttgatggtgatgcagggcaatggaggaattagataactcaagttttcagggccggttgttgcatattttgccagctaagcaccgagaaacatctgataaacaagtgtcagtggcctaccctttctaagtttgggtcttccaacttgcaaattttttttggactagcttttctgttagttgtttaacatggcctttttcaacaggaatgacacttctaacctgccaaaaacattcacgcagaagagagaggaacaaagaaaggcatctgaagctggtggagatacaaaggcttggaatagtttattcatgcgacccgatactgtacgtttttcctgtgtaaagaatgcatcctttagtg

SEQ ID NO: 157813 - DNA, 2218 bp, Arabidopsis thaliana landsberg
atgtttaggatagttttgcatgcatgttgcatatttgtgttgttttgaggtgactcggagctgttgacgagctaattggaacaagcggacccgatcatgccaaaccactcgaccccaggtcgagtagacgcttcacaacctcaacagaccactcgaccccctggtcgagtagaggacatcaccacttcacctcatcactcgaccccctggccgagtaccatcacgagagacactcgatcacatcactcaaccccgaggtcgagtgtcttcacctccaccacctgaccaccactcgatctctgtactcgaccccctggtcgagtgtcttcacgtccaccacatcaccatcactcgatcacacgactctacctggaagtcgagtatcaccatcaccaccactcgactacatacttgatgtcgagcttcagagtcttctccattccgcactcaaccagacactcgagcacaaggaaaaaaagaagattctagcttatcactcgacctctcactcgaacacctgggtcgagtacagttcttaatccgtctcaatactgcgtcgttttgagtattagggtttcggaatatttttgctataagtagcacgtactttacattttcgagaacaagttttttctaagttttattccgcagacactgtgttcttgaccttttgtaatccggatttctctttatctattcagtattaaatattcggtatttgttcttgatttcgtttactattgttcatcctgttatcatcctgctattactctgtttgttatcatgttttcattctattcaacgtttatgttttcttcaatgatgtctgagtagtgaataggtttctgaggatggattagagtagtttagaattctcagtatgctaggtggttgagtttgattgatagatcccttctggattagttgttcttaatgcctattgctttctgatcaaccagaatttgagcccagacatttccgcgcccaaaaggtgttcgatgaaatgtttaaacaactaattccagagattcgtgtccatgtaccaaagtattggttgcagggagcgttttgcctttaacttgttgattcgtaatgcctgttaggttagctctcgtcaatggtgattgagtctgggactaggttaacttgagggtctctgttgcggtggtacttagatttggttaatgaacttgttgtgtagggataatttattgagccatgtcaatcacctgtaaactgaggaaacaaaactactcaattaccccatcctcgagaattctttatctgattaattttattttttactctaccgttgtttactgcatcttgtcatctgttgcttagtccctgcaattctttgctgttactcgacctgatactcgaccacccagttatctggcaacagactctgcagtcaagtatccctgttacattttctgtccgttactcgacctgtcactcgaccacaccctgtgttgagctgcatcgagctgtgttggtcgagtgttttattgtttctacttgattttctgttttctgcatgttcacttaggactgctagaacacaccaaaatctgttattgcttggcttgacttagtgacttctgatcacatcttgattgttagcatcacacccatttggattgatacctaaaatactacaacgacatgattggtgttttaggataattgactaaaaacctattatcaacccagaacatgtgggggaaaactttgcttaccactaactacatccttaataggataccacataaggtgactgcaaagtcaccacattaactttggaaaggtacagtaccctcgtacaaatacctaaaagtgtgggggtgtctaacaaaagtggctgtaccacctcccaaaaaggtcacaattgggcctaagactatagactatatcttcatcggatatgcgcacaacagcagtgcttatcgatttcttgtttataaatcggatattccagatatccatgaaaatacagttatagaatcaaagaatgcatcgtttttttgaagatatttttccttgtaggaaaactcaaaaacgaactcgtgatcaacaagatgcagcaacctcgaaagccactattactgttgaagaaacaaaacatgaacctgaagaacaacctaggcggaacaaaagagctcgcaaagagaaatctttcggtgatgatttcttgatggcgtttttagctgaaaac

SEQ ID NO: 157814 - DNA, 348 bp, Arabidopsis thaliana landsberg
tgggttgagatatgacggatgtgctcctggagacaccgttggagaatgtataaccgcaacggttgaggaggaggatgaggaaggagttgaggcggtagtccggcggattctacaacaaagaaagtacttaagctacaaaactttgcagaagcagccaacttgtgatggtagaattgctggtaattgcatagggactgttaatccaaaaggtgcaacttgtacttactaccagagatgcaaacgtgccgcatagttatttatcttcgtgtcttttttataattgtaattatgttgcctttttcttcttaattatgtgtgttttattaaaatgtaaaagattttttgatt

SEQ ID NO: 157815 - DNA, 445 bp, Arabidopsis thaliana landsberg
atgacgcttggagctatcttacttgctaaagagaaaacagctttaacgtacttctctccctcaccaaaccactgcacgaaatctcaagtcaagtctaatctcaaagaaaacattatagagtcaggtagccgttttaagtaatcaatacctttgaagtaatgctggacattgaaatattgatagaaatttgccccagcctcggttgctccagcatttgccagcattgtcttctccgtagcaggcggtccaaacaatagtatgccctttgtaggttgcatgaaaaacacagttatacttcaggttccattgaatattgaatgaaacaaagatttgaaaataaaataaaaagcaagaaaggtacctttgtacgttgccctttgccaaacaattcgggtctttaaagagaaagcatcaccaactcgttcaaggtatttttcccattttc

SEQ ID NO: 157816 - DNA, 858 bp, Arabidopsis thaliana landsberg
tatatgacacaagaaagtttgtttatttaaggtaattgatatttttgttttgttgttattgccattttgaaggtgttggaaataagacagaagctgttagctctgtttctccatggtgtcaagatcttgtgctaattttctagacttatcatcttgggaccttttagattttcctcaaactccacgatctcttccacgcgtcatgactgttccgggaatcatcaccgacgtagacggtgatacaacctccgaagtaacttctacctccggtggttcacgtgagaggaagatcattgtagctaacatgttaccactccaatctaaaagagatgcagaaactggtaaatggtgttttaactgggacgaagactctctccagttacaacttagagatgggttctcttcagaaacagagtttctctacgttggatcacttaacgtaaacatcgaaactaacgaacaagaagaagtttcacagaagcttttagaggaatttaactggcgttgcaacgtttttgtctcaagagttgcaagaaatgttctatcttggtttctgtaaacatcagttatggccactctttcattacatgcttccaatgtttcctgatcatggtgatcgttttgatcgacgtctatggcaagcttatgtatcagccaacaagatattttcagatagagttatggaagttatcaaccctgaggatgattacgtttggattcaagattatcatcttatggttcttcctactttcttgaggaaacgttttaataggatcaaactcggtttcttccttcatagtccgtttccttcttcagagatttaccgcacattgcctgttcgtgacgagattttgagag

SEQ ID NO: 157817 - DNA, 8204 bp, Arabidopsis thaliana landsberg; identical to SEQ ID NO: 936
  unsure (1)..(8204): unsure at all n locations

SEQ ID NO: 157818 - DNA, 845 bp, Arabidopsis thaliana landsberg
atggccacagtttttggaatggaggaaagtcgaggcaatacgatctggatagctgaaaccttgtaagttctgctcatataaccgataaacctgaatttcgttaatccctgctctgttttttttaacctgacttgtacgttttcagcgtttacatgtctcccgagtatgcggtgcatggcaaattctccatgaaatctgacgtctacagctttggaatcttgattcttgaaattattagcggcaagaagaatagcagcctctaccagaacgatgaaactactactgctggcaacttggttacctatgtacgcataaagacctgaactgttgcattttttactaacgctaaaaatttgactaagcatcttactttagagttaactaattgtacgtacattgtgttaggcttggaggctttggagaaacggctcgcaactaaagctgctggattcgtccataggaaggaactatcagagtaatgaagtcactagatgcatccatattgctcttttatgtgttcaagagaatccagaagaccgtccaaagttgtcaaccattgtctcaatgcttaccagtaacacaatcagtgtgccagcgcctggcataccgggatttttcccccaaagcaggcgtgaactggacccattatctgagggattagagtcgggttaatatatgaacgagcaggtttttcctcatcatgtctgaaaataaaataaaaacaaaaaaaatagccagacatcatttgattctccacaaataaggaacatagtaagtttctctgaaattttaggctgtaaactatacattatattcagttcagtaagaaaataagtttcggtgat

SEQ ID NO: 157819 - DNA, 253 bp, Arabidopsis thaliana landsberg
atggtaacatgtttgaacattgctcaggccagtatttatcggcaagagaagaatgtggtggatttgtatatcatgcttcttagatattcaaggtaaggataaaagtatctctatatgtcgttttatatttgtgtatgttctatgaaagagccccaagtttgttgttttttcttgcagtttgatatctgaaacaattcctttccatcgagattaccaggcatcgcttccacaagaaagtcttgggagtaggaag

SEQ ID NO: 157820 - DNA, 566 bp, Arabidopsis thaliana landsberg
aacgcgtgcattaatataaatatacgtaaaccaaccatttcagacaagagagagaatcgaattaacaaaaaaacaaacgaatcttttgagtttaaaaccctttttcacttaccggagaaatggagagatcgacgccggaacatgtctcctccgcacacaagcgcataagcgtgagcttcctcgtgtctctcatggtactttgtgctagacacgcaagcagagtttccaagaagcttaaacccaagaagactcggaagcaaactcatcttgaagactatctcgaaagccctaagtctaacggaaacggtagcgaagacggtagaggaggaggaaggtttggatggagtccggcaaggactttttctcctatgagggtgcgtcctaaggagctctacacgaccttgagcaacaaggcgatgactatggttggccggaaaaacaaagcttacgacggtggtccgacgaagaagacggcggtggagatggtgatggaggaggatgaggaagagtacggcgtttggcagagggagattttgatgggaggaaaatgtgagccgctggattac

SEQ ID NO: 157821 - DNA, 4757 bp, Arabidopsis thaliana landsberg
gaaacacaaccactccccaaaacactcaccttgagaagatccagcgaatcggcggccatacgtcctttactaggaagaccaagacgaatctggtcacgctcaacgacaacagcggccggagcaggagctggagaggaaccgtatgttgcgacggagctttgaacggtggagacacaagaagtaaccaatctgagacatctccgactaggtacgatgacggagaaagcggaggaaggaggcggagataggataggtgttgaagatgggaaggaggaagaagaagggtcttgttgcaaatccgtaaggagatggagcgacatcgatgtgtggcttttggagagtgtaatggtgatttctaataccacatattgaattatttcatgactaacactcacctgtctttgattttgggagaggcagatactgactttaatataattgatgcgattataacacttagggcttatccatgcctatgtttaatttttttgggggctagatgcatattagtggaatcttgatgagcaaaaacggctatgaatatatatatgaatgtgaaatcctgaattggcgctaagatttatatatgtgttgcatgtattattgataagcttgtgtcctatagaactctctggtatccctcttgttgatgtacgaatcacacaagtatgttttgttcagttgaattgtttgactttactctctatattgtttcttcttgctcggaaatcatgaccaacgaaaacggtacaacaactactgtcgttgctatgcgtgtagaagactccacattctctatttcgcctaataatccaggaggcatgtgatctgtctgttcttttaacatgagaaaactagaaagaatgggtctgctcttcgagctaagaagaaaatggcaagaattcaaaactaacagctaaaatcacaaattcaaaatcatagacttgtgtggagtccatggttattggatggttacgtaggtctatcatacctcttggttgctccactgttctgtttctcatttatgcacacgagctggtgttgtccactactcataaggtaaaatattagacaaaccaaactaaaaatctataaaataaattgtaaaacaggacatcatctgataaaagaaaaacttttatttgcgctcaagctcgaatgccctatatctcttagagacgcgatcaacaccaacttaaatttatgtcaatggacgtcaaatttattaccttcacactgaaagatttaccattcgatcaatcctacgttggttaagcttatatcttcgatattgacagtaatatgaaaaagtgtggtgtcatgcgattggactgttcgatttacacatttgcataatttacaatttattttctttcatttgtggtggtaatttgaacgatacgttataattaaaaattttctcttcccatgtatttgtgaaccacatttgcaactgtaaacggtacaaaatcccgaagtatgactgtcaactgcttttcattttttttttaaaaagaaactatatgagtatcttttgaatgaattatataataggggttacgttacctattaaatattaatacgattctttctctaaccacacttatctccctcatatcgtccaatccacaaaccctacttgtctatcactttttttttttttaatattaattcattcttttgaatttttcacgttttcaaaaataatttcaagtattaaaaatttaatgaaagtcacaacaaaaaggataatgaagctcatggttcaggccttcaagaatctaataatcaaggctcctgctcacaaacaggaatttactctccatctgagttgacggtccacaccaaatcccaaaaatatgacggtccaaaatgttctccatatttgttttctgaaactttttgacagaattatatgaattggtttcatctacaaataaataccattctttctccaaatagaaactcatttcgagcatttataatgattggagaacagttttgtatcttcattctatttccgctgtactcaaatctacaccgttagtctcgtctgttccgcagtcgcattctgacaacacttgtaccattcgatccacaccgtccaattcattcttcaaatgttgcacaaatcctacacccacttccttttttctcaatttttaattctttctttcacgttttttctcataaagattccactaaaataagaaaagccaccacaaaaaaaaaaaaaaagcatggatcaggcctaagtgttaaaatggcatcaaaaatctaatagtcagaatctgcctctcccagagtgaaagtgtgttgtgtcttattccttatataattcattctcgggtctaaaagaaaccctttcactctcgaaaagccacacaacaatgtctctccttctccctacgaatttacaacaatacccttcttcttcctccttcccatcttcaacacctatcctatctccgcctccatccaccgctttctccgtcatcgtacctcgtcggagatgtctcagattggttacttcttgtgtctccaccgttcaaagctccgtcgcaacaacaggttcctctccagctcctgctccggccgctgttgtcgttgagcgggagcagattcgtcttggtcttcctagcaaaggacgcatggccgccgattcgctggatcttctaaggtcaaatatttgacattgcgattgttaatctcagatttaagtttttagctccacactcagcttgtatttagttcttagagactgagattattgatagagactgatttatgatttttatattagctctctctgattctgtgttcgtcattctctttcactatataatttgattccctgcccttttgaaaacttcaaatgggttctaaagaaaacttattttactatactttgttttgttgtgcttttagtgttaagttttggttaattagttggaacaagttgggatctttaactgatataaattggtttgatttgaatcctaggcatgtgaagtgttgtttgcgtttgatgatcgctttcttgaatagttgccaaagcttcatttgaactcttttactcactgacatgtttttttcccttacttttgagtgaattgttatctcatggcttgatttgacttttctcatttgtggtttcttttatgaaggactgtcaactgtttgttaaacaagtcaatcctaggcaatatgttgcacagattccccaggtatcgtttccaagcgaattcaaaaccatagtgtgttttgtggttttgtgtaccatgacttatgttggtatttttgtatgtccttcagttaccaaacactgaagtctggtttcaacggccaaaagatattgtcaggaagttactctcaggagatttggatctaggtatcgttggtcttgacacacttagtgaatatggtcaggtaagtgatgatcataaaaatattcttttgaagagctttgatatcatgttcaaaatgctggaattagcagtggtgatttttatcattatcattatgctggaaccagtttacttttattctctcatcattagtatgccatattgttgctttagcgtatagtgtttaaaatttaaagtttccctttgattgtctctgataagcccccttgcatcataatttagatgtttgaattttctttctaggaaaatgaagatcttatcattgtccatgaagctctcaactttggagactgtcacctgtctattgcggtatgctttaatctattgtggttgaggtcctcaggtcattaccgtggatggttttctgattgtatctcaaatggtcacagattccaaactatgggatatttgagaatataaattctctgaaggagctagcgcaaatgcctcaatggagtgaagagagacccttacgcttagctactggcttcacttatgtatgatgagttacagattcttctttggtgcgctgttgtcatctaatttctctcagagtccatttcgcttcaacataatatttgggaatgattcaactggtttttgcagctcggccccaaatttatgaaagaaaatggcataaagcatgtggtgttttcaactgcagacggagcactggaggcagctccagcggtgagattttcaacgaaaagcttaacatttggcattaagttgcttgtattcttttctaaaaacaagtgttaaactgatatgctctgtggaggataatgttgtcagcttgtagtgtcctgatttcatatcttactgtgccttaccagcataatctgttgacacatatgctcttgttaattagatggggatagctgatgccattttagaccttgtgagcagtgggacaacccttaaagagaacaacttaaaagaaattgaaggaggggttgtgctggaaagtcaggtatgacatgaagatctttggaattgattattttttcgcacttggcaaccggtgtaccaatttttttttctttttacgtactatcaggctgcactagtggcgagtagaagggcattgactgagagaaaaggagcactagaaacagtgcatgagattctcgagagattagaggctcatttgaaggcaaatggtcaattcactgtacgtgcatattaattgtgatgtttcaccttatttctacttttgctttctttcatccgatgttttcactccaggtggttgcaaacatgagaggaacggatgctgaagaagtggctgaacgtgtgaaaacccaaccatcactatcaggattgcag

SEQ ID NO: 157822 - DNA, 660 bp, Arabidopsis thaliana landsberg
ttaaaacaacaacggaagttatacgaagaatatgtgccaatgaaatacagacactacaccaggaagatgaaaaagtgagacatttttattttttttgatagtgtcaacgagtgataaattattctccgattcattcttttgctgatacattttggacgcgactagacatggtgaatggggagatcatgttactcttcaagctgcagcggatagagtaagttttcaaagagataccatcctttgagtttactataatagactacaaaagttttacaaacataccttaaagatcagatcttctttgagcaactgcatcttgaagactcatcaacaaattttacctttattcgctcacatttcgttactttttttacttgaatgactggctgactcagcattactgcagttcgaagccaaaatctgcttagtcacatcctttcgggatcaatcctacatcgagattcttcctcataacaagaaccctcttagaggtacaaagccctctttctacctttatgctctaggacaagtttactcgttcctaaccgtcttgaatccttttgttgtactgcaaaggcttggctcagcttctggagcgaagtgcattacaattctttatacgctaatggaggtaaaaaacttagttcctgcactcaactc

SEQ ID NO: 157823 - DNA, 702 bp, Arabidopsis thaliana landsberg
gtcgctgctcaacaagggacttaccttgcaaaatgctttgatcgtatggaagtatgcgagaagaatcctgaaggtcccattaggattagaggagaaggtcgtcaccgcttccgtcccttcaggttggttcctagtatctgcatcttaggaggctttagtcacttttgagattgcatgttttgtgaatttctcaatactgattatatactttatagtaaggagacatgagacaatgaatatatatgttatacaggtatagacatttgggacaatttgctccattaggaggcgaacaaaccgcggcgcaacttccaggagactgggtttcgataggacacagcagtcaatggctgtggtactccgtttacgctaggtaacgttaaatgactaatgaaatacgaaatgtattcatatgatttttgtatttttttgtaactttttggttacaagtttttgtttttaataatacagtaagcaagtgagctggcgaacgagagtcctggtggtctcagactggatgagacgattcatcttcgggagggattcaagtcgcatttgaaaatctcatgtctctcttactctctcgtttgaattatcatggatagtcttattgctttttgttttttactttcaaataaaagaataacaacgggaagatgttaaacttcatttggttacttctgttttggaatggtacgtgaa

SEQ ID NO: 157824 - DNA, 295 bp, Arabidopsis thaliana landsberg
ctaaaaccagcgcctgtaatggcttcattttcttcaaaaggtccaagcatagtggctcctcagattatgaagcctgacataactgctcatggtgtgagtgtgatcgctgcctacactggagcagtctctccaacaaacgaacagtttgatcctcgacgacttctgttcaatgctatttcaggaacctctatgtcttgtcctcatatctctggcattgcgggtcttctcaaaactcgttatccttcttggagccccgcagctatccgctctgccatcatgactaccggtagagaat

SEQ ID NO: 157825 - DNA, 628 bp, Arabidopsis thaliana landsberg
ctcaccgaccactaccgatgatatgttgagggaagccttttccggctacggaaacgtagtagatggtgaatgccttttggatcgtcctccaattaatatttccgagtttcttgtttatgttgttgagtgtggtttaagtttctcagttgtcactacaccaaaattattattgtttgtgcagcaattgtaatgagagacagatacacagataggtccaggggttttggatttgtcacatacagcagtcactccgaagctgaagcagccgtgtctgggatggatggaaaggtttggatggctctatttgtggtataatagttgtgtgtctgtctatatgtggtcagacttagtattgctttcgttttaaatttccaggaactgaatggtcgtatagtgagcgtgaaactctttggtattggtgatattgatgatgaatgacgatgatggtgctgacttgaaaggtggaacacatctctatccaaaactcaaaaccattcttgtaatgtattgtgtgctttcatgtgtttgcagagtctgtttttgtctcctttcaagggtttgtttccaggtctgctgtgatttgattcccgtgtatgatgacttaataaagacgtttacttttccttta

SEQ ID NO: 157826 - DNA, 697 bp, Arabidopsis thaliana landsberg
ggcttatgacaaggctgcaatcaacactaatggtagagaagcagtcacgaacttcgagatgagttcataccaaaatgagattaactctgagagcaataactctgagattgacctcaacttgggaatctctttatcgaccggtaatgcgccaaagcaaaatgggaggctctttcacttcccttctaatacttatgaaactcagcgtggagttagcttgagggtaactaactttcaaataccaatctctcatgaattcaaaacgtacgtttcttatcgtcttttaaacaaactgcagatagataacgaatacatgggaaaaccggtgaatacacctcttccttatggatcctcggatcatcgcctttactggaacggagcatgcccgagttataataatcccgccgaggtaaaaacatagaatcaaagtgaaacaacacaatgtagtcgcaagacaatgaaacaatgtttgttttttcagggaagagcaacagaaaagagaagtgaagctgaagggatgattagtaactggggatggcagagaccggggcaaacaagcaccgtgaggccgcagccaccgggaccacaaccaccaccattgttctcagttgcagcagcatcatcaggattctcacatttccggccgcaacctcccaatgacaatgcaacacgtggttacttttagccacacccttaactt

SEQ ID NO: 157827 - DNA, 223 bp, Arabidopsis thaliana landsberg
catacagaaagacactttcacatttcacacttacagagagagagaagagagataaagagagcatttagatatcttgaggaagacgaagaagaagtagaggagagatatggttccgagcaacaatagatgcaaatggagttccattttcttgtttctgctcagtgtctccgttgccgtcttagtcgccgtcgctgaggataagtctccggcggttgaggatggt

SEQ ID NO: 157828 - DNA, 1102 bp, Arabidopsis thaliana landsberg
atcttttgacgtttttctctcaggtatgaactttggaaaccaaatctcagagcccttatggaacatgatatgaatgaagttagcgttggcaggaagaccaaagctgaagttcttgaaacatgtttgcagcaaatgaaagcttgtttcttagatgtgagtcagctgttttttattagactttttgtcttctctctgtggccaaatctgttattgctgaaggtgctgctaacacagtaggctggaactgaatgccgtgtttttctaattgtcattcacaaatttaattctcgcaggcaagagtaaaaaaatcaaagctcctagaagcaatgacaattttctttgaaaggtagtctcgttactttgttcagtactgtgtagctgaagtctatttcttcgtaatataatatgatactgcatgtgcagatctaataacactgatgagagtgaaagtcagacagctggtgaagttgtccgacgatgcaatctctgcaatgaatcagatatggcactcaggaagaaccgggtatcatatattctgtctgaacaatattttctctgttctccctattgttaatgggaaccacaggttaaacgttctattccctttctttgcaggatggcaatttcatggttgggtgcatgaattatcctcaggtcagaatttcaccgctctttacataccatatatattgttggaaatttaaactttttgctctctgtattgtaaccttatttctgaagattatgatctaatcatttgacatttcagtatttcttcgtttatgcttccttgcttacatctattatattaatttcacacattttcctttctctagtgtcggaatgcagtctggcttcctggaccgacattggaagcatctgtcactactaatgtttgtcaatcctgtggtccaggtatagccacagattctccagtataacagtgaattgaatttcaaaaactaaattacacttggatgacacagcgtgtacatgtgtctttctgcctttattattaaatggtgccctttctctttctgtaggcccggtctacaagatacttatcaagttcccgtcaaattggaattccaccaggctttga

SEQ ID NO: 157829 - DNA, 1401 bp, Arabidopsis thaliana landsberg
tctaaatcagaagagtaagaaaaatgtatgaaaacgggataagctttataatctctttacttatatgtggatgtgtgaagagtgaggagatgatgaagcaacatttcgtgctagtacatggttcgtgcctcggcgcgtggtgctggtacaaggtgaagccgctgctcgaggcttcgggccatcgtgtaaccgccttagacctagctgcttgtggtatagacacaaggtcgatcactgacatttccacatgcgaacaatattctgagccgttgattcagctaatgacttcattgccgaatgatgagaaggttgtgctcgtgggtcatagctatggaggtttgactttagccatagccatggataagtttcccgacaaaatctctgtctctgtcttcgtaacttctttcatgcccgacaccaaaaactcaccatcgttcgtcctggaaaaggtatacctcgtttttaagcgaccaaattttgttcaaaaattgatcaacataacaattccttttgatctatacgtccgattagtcagtccaatcgttccattaaatcgagattttattttgtagcctttaatatttgtggtgtatatgctattatcataggtcatgtgttagataatctaaattagtccgtctgtggtggtgtatacaacgagtttggttacatctaaattagtaaagtcaaagtagtgtcactttagtggtaattagagttttaccaccatatcatcctaagattcaactttgttcttagagattaaattgtagtgtttcggacatgtttcatattcatggttgtcactaggaagattactaccgtatggttatctacttgtatatttaactgtattgagcttggaaaataagtatgaatgtgtttttcttttcctaatgtaaaagtttgcaagcaccatgacaccagaagattggatgggctctgagctcgagccgtatgtggtcttcagcgctgagttcacgaagcaccgtatcctccaactttctcctattgaagtaatttatatataatcatcattataacaaaaaaaaaggaagtaatcatcattatgatgatgacatatatatagtactcatgaatatgttaatcttgatttaggatcttgagcttagattgcttctaaagaggcctggttcattatttcttaatgatttatcgaggatgaagaacttttctgaaaaagggtatggatctgttcctcgagcttacattgtgagcaaagatgaccacaccatctcagaagaatatcaacgatggatgatcgataactatccgccgaatttagtgatagagatggaagggacggatcatttgccattgttttgcaaacctcaactactaagtgaccatctattggcaatcgccgacaaattctcttaa

SEQ ID NO: 157830 - DNA, 845 bp, Arabidopsis thaliana landsberg
cttaagatctttgcttgcatcttctgtgcctttcctcaactcttttcagattctttggtggttgttttgatgtggttcgttttatacaacggtactcgctacttttcggagcttttccagaggtaaaacacttgatgatgctctttgcgcacaccttaagcttgttaaggtttccttgacactaattttgctattgttgtaacaatttctggtacttatctagttctttttgctagcttggtcttatggtttcattagcgggtttctaagtgatgagtgttatgatacaatatgctgtttggcctcatcttcatctctgaaacaagtttcacggtttcccatgattcgtagtatatgttttcacaaaaggataagtccatcatttacttaaacattatcctaccttctcttgtgcatttagttagggtagatattaagcctccccagaaggtgattggattggagttagaaaagtctttagtttgcctgatggacttactgctgctgcttgctatctgaatcttattatgctgattgttcgaaacttttgagaagcaaattgaagctctttcatgataatttcttgtatcctcgcattgcaggcatttgacatgaaaacatgtcttgtttctcgcacagtagagcacgaaaagcctagatcatccaaaggcatgtacgtttggttccaatttctgagacgtataccagcaaaaatccctctttcggcgtcacctctgtttttgttaattttcctccaaaggctctaggacagttcttatgtctctatattatttgttcccatgtttttgcaattaacagaaatgattttgtagactcgtaagatc

SEQ ID NO: 157831 - DNA, 515 bp, Arabidopsis thaliana landsberg; identical to SEQ ID NO: 13589

SEQ ID NO: 157832 - DNA, 577 bp, Arabidopsis thaliana landsberg
atggtaagttcaatcttgaagacacatacagtgcttcaaaaatgtactaatattcatgactatgttctgtataaccttgattaaacttgacaaatgcgtaaaatgttaacagggaactgcaatcgtagacagtatccaagaaaggttaatgagacaaaagtcggcagagaggctggagaacggtcaggatgatgacacagacgaccagttctatgaagaatacttcgatcatgacatgggtagtgacgatgatgaagatgaaaaattctacgacgaggaagaagtaaaggaagaagagacagagaaaaccgttatgacggatgctaaagacaacaagtaagaacaaatttggcttgcagaaacctcagattagctctacttatggccacttctactaaactcccttaagcctcgcactctctctcgaaattcatctacttaacatataataccaatgtttagaaagagagagtgtgtgatgtgtttgtttgtgtgtgttgaacaaacgaacgtgcgtggttgtctttggtgagttggtctcatctttgttgatttttgaatgcgcatgtattttttt

SEQ ID NO: 157833 - DNA, 482 bp, Arabidopsis thaliana landsberg
attaatatttcaaaccccctcatgtagaaaaaagattagagagtttaattacattttggttcatgatgctttagaaaactaaactaaataaatacttttcacacttcaattagctctttcatgacttgtccatctttcacaccaaaagatccattcgcttcagcatcagaactcgcatgaacgccataaaacaaatacacgagcacgatcaaaccggagaagaatccaaaccggacgtaagagggtgcgtccaacgaaccaagcaaaaaaatgttcaagaatatcgacacgcacggggtccacggcatgaacgggactccccacaactcgggtttcctagcctggggaaccacgcactgaaagctcagcacgatggctatagccaccaccgcactggcaccgagcatgaaagctttaggcttaccttccggcacaagtttccagatgagggtgaagacgagagaggttatggagaatagtgt

SEQ ID NO: 157834 - DNA, 1000 bp, Arabidopsis thaliana landsberg
atgagaggactcaaagtacttgatctgtctttcaacgagttttccggcgaattaccggaatctctgacgaatctatccgcttcgttgctaacgttagatctcagctccaacaatttctccggtccgattctcccaaatctctgccagaaccctaaaaacactctgcaggagctttaccttcagaacaatggcttcaccgggaagattccaccgactttaagcaactgttctgagctggtttcgcttcacttgagcttcaattacctctccgggacaatcccttcgagcttaggctctctatcgaagcttcgagatctgaaactatggctgaatatgttagaaggagagatccctaggagctcatgtatgtcaagaccttagagactctgatcctggacttcaacgatttaaccggcgcatcccttccattatacctgactgtaccagtctcatctggatttctctgtcgaataaccggttaaccggtgagattccgaaatggattggccggttagagaatctcgctatcctcaagctaagcaacaattcattctccgggaacattccggctgagctcggcgactgcagaagcttaatctggcttgatctcaacaccaatctcttcaatggaacgattccggcggcgatgtttaaacaatccgggaaaatcgctgccaatttcatcgccggtaagaggtacgtttatatcaaaaacgatgggatgaagaaagagtgtcatggagctggtaatttacttgagtttcaaggaatcagatccgaacaattaaaccggctttcaacgaggaacccttgtaatatcactagcagagtctatggaggtcacacttcgccgacgtttgataacaatggttcgatgatgtttctggacatgtcttacaacatgttgtctggatacataccgaaggagattggttcgatgccttatctgtttattctcaatttgggtcataacgatatctctggttcgattcctgatgag

SEQ ID NO: 157835 - DNA, 866 bp, Arabidopsis thaliana landsberg
ggtgaaaaagcaattggatctttggaaattcttatttcaagtatttcggcggatttacttactgatgttgtgatggctaatatgcataatattccaccaaattgttcttcttatgctgatggcaccgatgagttggtgatgaacatgtgtatagttggcagtgatgcacaaattaaatatccaccatcatttgtagcgggtgtcctttcattgtcaaccgcattcccaccaattgctgccctgataaatcctcacaatgtatgggtgctctttgctcgatttagtatttctatctgtgttatattttatgctccttgttttaccttctcgtctttaaagttgtattgtacactaaaatctcaccaataacaggaagatgaggaagtctattctgttcatgtggaccagcaaatgtttccagctgaagatgcaagaactccacctggcttattagctacctgtgatacttcttttccagaaaatgaagaaagcaatactgtgtctccacaaaatgtgcattacatagggaatagagaaagtggaatacctggactggaatcttctgctcaacatgatgtgtcaggagcccttgttactaatgtattgagttctacgaatgtggaggctgcaagcaaaaatcaaaatgcgagtttcagtggaaaacttcttgtcgatgtaattccctcaatgtctgtggataagtcggaggaatttagtccaaaggcggttggcacagttgcttctgcgagtcagtttgtcttacctaagatatcagcacctgttgtcgacctttctgatgaagagaaagacagtttacaaaagctggtttttttgcgcattgttgaagcatataagcgaatatcaat

SEQ ID NO: 157836 - DNA, 7081 bp, Arabidopsis thaliana landsberg
  unsure (1)..(7081): unsure at all n locations
atggctcacgaacagaatcaacaaaatggccctgccaacattggtgctggagatgcaccacgtgatcagcgtcagcggaaaggaattgcacctcctgctatccagaacaacaactttgagattaggagtggtctcatatcgatgattcaggggaacaaatttcatggtctgcctgtggaggacccgctcgaccaccttgatgaattcgataggctctacaacctaacaaaaatcaatggtgtctgtgaagacggattcaagctccgtttgtttccattctccttgggcgacaaagcccacatctgggagaagaatctgccccttgactcaatcaccacctaggatgattgtaagaaggcttttctatcaaagttcatcttcaacgccagaactgcaagactcagaaatgagatttctggtttttcacagaagactggtgaaagcttctgtgaagcatgggatcgtttcaagggttacaccaaccaatgccctcatcatggcttcactaaagcgtctctgctcagcactctttacagagaagttctaccacgcatctgaatgcttctggataccgccagcaatgggaatttccagaacaaagatgttgaagaaggctggatttgcagcaaccaccaactggatttgctggatttgcacctcagcaaaaccaaggtccggctgctcctgacgctgacatgaaacaaatgctacaacagctgcttcacggagaaacctctggctccatggagatggcaaagaagatatctgagttacataataagctgaactgtagctacaatgatttgaatgtcaaggtggaaacactgaataccaaagtcagatacttagaaggacattctgcatcttcctctactccaaaacagataagccaacttccaggcaaagcaattcagaatccataagaatatgctcacgctatcactctacaaagtggaaaagcacttccaagtagagaggaaccaaagacagtcactgaggatagtgaaggtcaagatggggaggatttcagtcttggtaaaaatcgagctgacaaaccactcgagcatccactcgagcatccactcgagcaaccactcaaccacgttactcgaccaaccttcccagcgacatcaccaactgctctaaaaccagttgctgtcaagaacaaagaaaaggtctttgtccctcctccttacaaaccacagctttcatttcctggccatcataagaaagtattggcagataagtatggagctatgtttgccaagaacatcaaggaggttgagttgcggatacctcttgttgacgctctagaagtgcaagggatggtagtattgagtcatgaatgcagtgctatgagagagaagaagatcattccaaagaagcttagtgatcctggttcattcactctaccatgctctttaggtccattgcattcaagagatgcctatgtgatttaggagcatcagtcagtctcatgccactctccgttgcaaaaagattggggttcaatcaatacaaatcttgcaacatatcccctatcctagctgacagatcagaaaggatccctcacggttttcttgaaaacctaccaatcaggattggagttgtagagataccctctgactttgtagtcctggagatggatgaggagcccaaagaccctttggttttcggaagacatttcttagcaactacatgagctatgattaatgtcaagaaatggaagatcgatctaaaccttggtaaagactttaggatgacctttgacgtcaaagatgtaatgaagaagcctactatagaagggcaactcttttggatcgaagagatggattagttagctgatgagttactggaagagtttgtagaagaagatcaccttaataatgctttgaccaagaatggtgaagatgggtttctgcatttggagactttgggctaccagaagcttttagactcacataaagcgatggaagaatcagaaccctttgagaaattgaatggggcaacaacagaggtaatggctatgaatgaagaagggtcaacacaggttcaacttgctcactcgaggacataaatcactcgaccgcatccatcagcgacattgtggagctgatcattccaacttcagatgactggtctgaattcaaggcaacgaaggttgatctcaaaccacttcctcaaggtttgaggtacgcattccttggttcaaactctacttaccatgtgatcattaatactgagttaaatgatgatgaagttaacctgctattttctgaacttagaaagtataggagagcaattggttattcattatctgacattaagggaatttcacctaatttatgtaatcataggatccatcttgaaacgaatcctattctagcattgaaccacagaggaggttaaatcctaacttgaaagaagtcgtgaaaatagaaattttgaaactgcttgatgttggtgtcatataccctatctctgacagtacctggatttctcgagtgcattgcgtccctaaaaaaggtggaatgactgttgttaaaaatgaaaaaaatgaattgatcccgactagaactataactagacataggatgtgtattgattatagaaagcgaaatgctgcatctaggaaagatcattctccgttaccattcattgatcaaatacttgaacgcttagctaatcatccatactattgctttcttgatggctatagtggtttcttccaaataccaattcaccctaatgatcaagagaaaaccactttcacatgtccttatggaacattttcctataagagaatgtcatttggtttatgcaatgctcctgcaacatttcagaggtgtatgacctctatattttcagacttaatcgagacgatggtggaggttttcatggacgattttttggtctatggcccctcattctcctcatgtttgttgaatcttggcagggtattgaccaggtgcgaagagacaaatcttgttctcaattgggaaaagtgtcatttcatggtaaaggaaggcatagtattgggtcacaagatatcagagaagggtatagaggttgacaaaggaaaagttgaagnnnnnnnnnnnnnnnnnnnnnnnnnnnnnnnnnnnnnnatcagaagcttccttggtcatgctggattctatagaagattcattaaagacttctccaagatagccagaccgttaaccacactattgtgcaaggaaaccaaatttgaattcgatgatgactgcctcaaatcctttcaaactatcaaggacgctttggtatctgctcggttgttcgagcgcctaattgggactatccatttgaaatcatgtgtgatnnnnnnnnnnnnnnnnnnngagctgttttaggccagaaaatagacaagaagcttcatgtcatatattacgccagccgaacgttggatgacgctcagggaagatatgcaacaactgagaaggagcttccagctgttgtattcgcatttaagaagtttagaagctatgtggttggatccaaggtcattgtctatacagaccatgcagctttgaggcatctgttagccaagatggatactaagccaagacttttgagatggatacttctgttgcaagagtttgacatggaaatagtagacaagaaaggcattgaaaatggtgcactgaccatctgtcaaggatgagaattgaagaacccattccaatagacgactcaatgccagaagagcaactcatggttgtagattctttagtgggagctacaacaggaaagagttccaccaactgaacgctgttgagggaagatctccatggtatgctgatcacgtcaactatttggcattcgaagtggagcctcccaacttgaccagttatgaaaggaagaagtttttcagagacatacaccattactattgggatgaaccttatttctacactctttgtaaagataagatctacaggagatgcgtcccagaagatgaagtagaaggcatcctgctgcattgccatggctccgcatatggtggtaattttgcaacattcaagacaacatccaaagtttttcaagcaggcttttggtggcctacaatgtttaaggatgctcagaagttcatatcgcaatgcgacccttgacagagaaagggaaagatcagcaagcgtaatgagatgcctcagaaatttatcctcgaacttgaagtcttcgattgttggggtatagatttcatgggacctttcccaccttccaacaagaatctctacatcctagtagttgtggattatgtctccaaatgggtagaaactatagctaatccgaagaacgattcagcggttgtcatgaaactcttcaagtctatcatcttcccttgttttggagtgccagcatagtcattagtgacggaggtaagcatttcattaacaagattcttgcaaaattgctttacagtatggagttccgcatcgggttgctactccctaccatccacaaacgagtggccaagttgaagtttccaacaggcaaaatcaaagagattcttgagaaaacagtgagtaaggcgaaaaaggagtggtcctacaagttagatgatgcattgtgggcttacaggacagctttcaaaactccacttggaaccacaccttttcatcttctatatggtaaagcttatcatcttccagtggaattagagcacaaagcagcttggggagtcaagatgatgaatttcgacatcaaatctgctggagaaaggagacttattcagttaaatgagcttgatgatatacgaattcatgcctatgacaactcgaagctctacaaggaacacactaaagcttaccacgacaagaagatcctcattcggacctttgagcctaatgaccaggtacttctttatgattctagcttgacaatatttcctggaaaattatcttctccttggtcaggtccctacacaatccactcggttaggccatatggaacagtcattctcaaaaacaacaatggaaaaccatttgccatgaatggaaagagagtcaaacactattggctgaagccgagattccagtagaaaagcctttggatcttctggactcacctgttgattaagcaagtgcagagtcaagctattgactataaacaagcgcttagtgggaggcaacccactagtaagtatttctctttttcatcatttcattcatttgatttttaacttaggattttttattttataggatttttattgattaaaagaaaaaaaaaccagtgttaaccaaaaacgcaatggtgtcgatcgacaaggtaagtcattttaacctaaacttcatcttcttcatttcagatttttttcaaaaccgccgaaatcacacttttccctctagattcttcgattcttcactgtttcttgtgatttcaggctctaaactcatcaaaatttcatcctctatcttcctcaaatgtcaattccatcgatctgcaagatgacagggcagaaaaagaaggcgaggaagagcgttggaccttcctcctccttcgccaccgctcaccaacgctggagcttctccaccgccgccggtctccgcccctcccaaccgcaaccacaaggcgtagctcctcaacctcctgtttatcaatttccatggccaaagctttcaaaagagagaattccttctgaaagggtttggaagaaagatgtcaacagggaattcactaaaggtgactatatcaatcgccctttttctccagattgggatgattatgatactatattctataatgcctggatgagtgtagaaattttgcctaatcggtttgcggatttcggtttgatgcagcgtttgcagatagagaaatcttttttaggactgctagatgatataggtttgggaaccatctgttgtaggcattacgatttgtaccctgagctggttagataattcatggcctctgttagggtttcttatttgcatgaaaggaaacgcaacgctcacgaaggagctcttatcttcttcatttgcggtgtccgatacagtttaccactgcgagatttgtgtgacatatatgggtttgacaatgatctcactggagtttccttgcctggtcagtttaaggattctcagattttctggagcaggtttggtaatggaatctatgattccaaggacgtagttcactcagagatccgccctcctgttctgcgatatttggttaggctgattagtagcacactgttgtgcaagatggatcctggcaagatgagactctctgagttgttattgctctatcatgctcttcatgacttctttcctgacagccttggatttgagcaggttgaccgtaatgtcaactttggtgctgtgttcgctcatcacttggtttctctcaagaccaagccctttacaggtagaggacacaaatctgagagagttagcagtcttctcactcccatatttgagcatttccgcatcagctttgagggcgaagaagtcaaccccacgtgtttcactatggataagactaacctaaagaactctcactggcttaaaggcaacctactgtggtgcttcagagatgatacatggcaacatatgatttagttaccttgccctgcgctttcagagattataggagagcatgaggagattagttttcatctcgatccttcccttctgcatttcgcgccacgctctaggagatagagaggttcagcttcaggatccgcaccaactcagactgaggataagtttatcgaccctgctgggggtcctcgagttggctcttcctcttcagctctcccatatcatctgccttctcctcctcctatcccgatggagccacaggtctttcagcagaacgtcatcgacatctttaagagtgtctggaacgccatagctacactctctcgctgcggttgtgttgctcccactcgtcgccgtcatcgctctcccgcacccacctccggctcagagcatgaggattagccaacctccctatcttgctttgttttctaactttgttattgctttatttcagactatttgttaatttttttggaacttgttgcacttattttcttatgctttgtggaact

SEQ ID NO: 157837 - DNA, 1916 bp, Arabidopsis thaliana landsberg
actaacctattgacatttgagctttgagttctaaatctctacaggagaatcatgagcaattacagtggcagttcttctgttgatcctgactacaacatggatgagacagagtcgtcatcttcaaggctagagagagatcagagagaatatgaaagcttcagaaggaaagctgagatagcccgaggaaagagagcgatgacagagaggtttgagcttatagacgaagatctggaagacaagtacatgcttgaacagactcgcagagctaccaaacttctgcacaagcccgacgtattgcctgttgaggaatatgttaggcttttcaagctgaatgagttctatagcacgaggtatccttgctcgacctcacttgcacaactcggattgttggaagatgttcagcacctgtaccaaagttgtcatctggacactctgatggcttatccgtatgtagcatatgaagatgagacaatacaattcctctccacgctgcaagtagagctctaccaaggtatgacctctgatgagttggattgtgaaggattgggattcttgtgattttctgtgtatggtcatgagtataggttatcaatcaagcgattggaaggattgtttggcttccccagtggaacgggatctaagccaaagtatgaaagagaagagttgaaagacttgtggatcaccattggcagctctgtaccgttgaatgcttccaggtcaaagagcaatcagaaaagcagccctgtcatcaggtacttccagcattctatagccaatgtactctactcccgagagatcacagggactgttactaactctgatatggagatgatcgcaatggccctcaagggaactcttcgccaaactaagaatggtatgtctctccaaggtgaaatcaatgacacacctctctctgtacttcttctgatccatctgtgtggatacaagagttgggctgtcagcaataaccgcaagagagcaggaggcgctctgtgcataggtggtgttgtgacaccgattctgatagcttgtggagtcccaatcatatctgtcggactcgagccgcgagcaatggatatcgagcacctacgtcactgtgaattcctggagtttgcaatggttgacgacttccacaggttcaggtttgagcactctacaaacaggagagctaacatccttctccctagccctgaggttacacgaataatagagggagataatattgattttcgacctgaggttggacgcctctactatgagaacgctccgccattagatgaggaggatcttctagaagaggctgctgaggatgggatggatgaagacagagcagtggagttcgacactagcatgtatcactttggtgaacatgtgcctccagcaagagagagcaagagcttgagtgaagctcataggaacaacagtaaactgcaaaagtggtgcaagaagcaagacaagttgcttgccaagtgttttaagactatcaagttcctgacagataagctgagttgttcctcctccactactgctattccacagggacaacctcctatggagatgccatcgaggagatttgatgagccttagcacaggcctgagcttagcgagcagagagtttcacatgtcccggctaggcattcgtcattcgagtcccgagagcacaagagaagaaggaaggctacactcactcgatctagcagcagatcacgcctcattcagtcgaggagatcactcgaccgcggtgctggccacaacaaaagaagggaggtcgagtatccccagagcggtgctggccaccatagagctgatgaggtcgagtaaccacctgctggagctgatacggaacaagtcggttcgtctatggcctgggagaaatacaggcagccattgacgagcaattacgctcattcttcaac

SEQ ID NO: 157838 - DNA, 223 bp, Arabidopsis thaliana landsberg
ccaacatatctttatatttttttctataggctttcagtccaggaaaaagttaaccatgatggtcattcctagtatttttattccagaagactggtcatttacattttatgaaggacttaatagacatcctgacaccatctttaaggataagactgtttctgaacttggctgtgggaatggatggatatcaatagccattgctgctaagtggttgccttcaaag

SEQ ID NO: 157839 - DNA, 639 bp, Arabidopsis thaliana landsberg
gtttactacaagtcccctccaccaccatacgtctacagttccccaccggcaccgggctattctccttctccaaaggtttactacaagtccccacctccaccatacgtttacagctccccacccccaccgtactactctccatctccaaaggtatactacaagtccccaccaccaccgtacgtctacagttctccaccaccaccgtactactctccttctccaaaggtttactacaagtctccacctccaccatacgtctacagctccccaccaccaccgtactactctccttctcctaaggtatactacaagtccccaccaccaccgtacgtctacagttccccaccaccaccgtactactctccttctccaaaggtaaactacaaatctccaccaccaccatacatctatagctccccaccaccaccatactactctccttctccaaaggttaactacaagtctccaccaccaccatatgtctacagctccccacctccaccgtactactccccttctccaaatgtcgactacaaatctcccccaccaccatatgtctacagctcaccacccacaccatactactctccttcttctaaagtcacttacaagtctcccccaccaccatatgtctactag

SEQ ID NO: 157840 - DNA, 425 bp, Arabidopsis thaliana landsberg
tcaatgcaaaaaatctctaatgtgactagatccattgtgagaatgttgctttgatataatcgtatgtttttatacaagcatgtgtttatcgatgtttaatgggactttaccattcataaaaatgtgattttccctttttaaatttgtaaacaattgtttattttgggcaaattataaattagaatatttgttttcccaaaagtcttattttattttattttatggttttagtttaaggtgaattaggtgaataacataaatgggtaaagttattaaataaataacgctataaactgaagaatgcagaaagtaacacaagtggggtgtgtaatgacaacatactccttcacccagctctttcattcggctttaaggcgcgtgaagaaaacagaagcgcagtgaattatgcggacgtggccttttga

SEQ ID NO: 157841 - DNA, 13433 bp, Arabidopsis thaliana landsberg
  unsure (1)..(13433): unsure at all n locations
ctggtcttagccctctttctgagatccctaaggtggcgccttctatttcaaaggtctccgatggaggtctgactagtctgtgtgtcgaagacattcggtccacaagggatcagctaactgatcctccttttcctcctcctcctggttggggtgcgatgtccaataaggagaagaagaagcaattaaaaatgtggcacaaccggcaacgctcattacaagagagagttcttgtgtctaagcttgagactgtgactgactctgggatcccccgccagtcctctctttccattgattgttgttcccattatcatcttttggggttacttatggcgatctttttttggaatgttagaggccttaatagccgccctcgccaatggatagtaagaagctggattgcttcgaataatctcctggtacgttattttttggaaactcacgtcgctcaggacaatgctatttctgttttggctgctactctatcaggttggaggatggattctaattattgttgttcatagctgggacggatctggatagtttgggatccgtcagtttctgttttggttttcagcaggactgatcagttaatggtctgctcgattaaaattcctgatattgctcagtcgtttgctgttacttttgtttatggaaggaataatgaggctgagagacggtctctttgggatgatactaccaggttgtctgcttcctctcctctttgtaattctccatggcttcttgttggagactttaaccaaattgcttctatcacagagcattactctctcatgccgtctaatatttccttacgaggcttggaggacctgcaagcttatatgagagacagtgaccttgtggatctaccgtgtaggggtgtgctgtacacttggtctaatcaccagcaagataatccaattctaaggaagcttgatagagccattgttaatggttgttggcttgctaccttcccaacggcgnnnnnnnnnnnnnnnnnnnnnnnnnnnnnnnnnnnnnnnnnnnntatggtcattctcaataactctccgcctccttcaaaaaagaaaagctttaagtacttttctttcttatcgaggcatccagattttatctcttctattttggctgcgtggcagaaggagaaagctgtgggttctttcatgttttccttaggagaactcttaaaagaggctaaaaggcctgtagagatctgaatagacgtggcttcagttatattcagcagagaacaaaagaaagcttgtcttccctcgaggatattcaagctcaattgatgtccaatccgtctgacttcttattcagggctgaacatgttgcccgcaaaaattggaatttcttcgcttcttctctggaatccttttacaaacagaagtccagaatcaaatggttaaaggaaggtgatgctaacacaagatttttccacagagtggtgcttgctcagtaggctcagaatcttattaagtttctcagaagggataatagggatcgtgtggttaatgttgatcagatcaaaggcatgattgttgagtactattctaatcttttgggatccgaagatagtaccaccagacctaactcgcttgatagaattcaggagttactgataagtgtgtattttgcatgttttgagcatatatttgtcatcactttagcatcatatcatcactgttttataccatttctcatcatttgtcatcactttacatgtttaggataggtttgcatgcatgttgcatatttgtgttgatttcaggtgatttggagttgttgacgagctaattggaagaagcggacctgatcatgacaaatcactcgacccagaggtcgagtaggagcttcaagatttcaagagaccactcgacccccatgtcgagtagaagacatcaccacattacctcaccactcgaccccgaggtcgagcgtctacatccccaccacctgaccatcactcgatcacatcactcgaccctgaggtcgagtgtcttcacctccattacctgatcatcactcgaccacatcactctacctggaagtcgagtatcaccatcaccaccactcgactacatactggatggtaagcttcagagtattcttcattccgcactcaaccagacactcgagcataaggaagaaaagaagaccccagctattcactcgacctcccactcgatcacctgggtcgagtacagttcttaatccgtcccaatactgtgtcgttttaagtattagggttttcgaatatttggctataagtagcatgtcttcgtattttcccaaacaagtttttatctagttttattctggagacactgtgttctagacctttgtaatccggatttctctttatctattcagtattcagtatttgttcttgatttcgtttactgctgttcatctgttatcatcctgttgttacactgttgttgtcatgttttcattttattcatcgtttatgctttctgctatgatgtctgagtagtgactaggtttctgaggatgggttagagtagtttagaattctcagtatgctaggtggttgagtttgatttatagaatttgagcccagacatttctccacccaaaagatgttcgatgaaatgtctgaaccactaattccagagatttgtggctctataccaaggtattggttgcagggagcgttttggctttaacttgttgattcgtaatgcctgttaggttagctctcgtcaatggtgattgagtctaggactggtttaacttgagggtctctgttgcggtggcacttagatttggttatcgaacttgttgtctagagataatttattgagcatatcaattacttgtaaactgaggaaacgaaactactcaattaccccatcctcgggaattctttacctaattgattactttgtttgctttgctgttgtttactgcatcttgttacatgttgcttcgtttttacatttctctcctgttactcgacttgatactcgaccacccagttgtctggcaataaactgtgcagtcgagtatccttgttacattttctgtctgttactcgacctgtcactcgaccacacccggtgcttggcagcaagctgtgttggtcgagtgttttactgtttctgcttgaatttctgtttcatgcatgttcacttaggactactagaaactctaaaacctgttattgcttggcttgactatgtgaactctgattgcatcttgattgttagcatcacactcatttggattttctacctaaaatactacaacgacatgatactgctttaggtttaattgactaaaaacctattatcacctttgaggtcacaccaccaccgccacctcccatccctacaaatgatcaaatcatgggagacctcagagatgctactctccaatatgtgagatgtgcagatccaactgaaagtgcagcaagaaaacgcagaggtatccaaggggaagagaaaggtctcatggctgaaacagcctcaattatgttggaagctgttattgtctcaaaccaaacttaccttacttcagaagaaacagacgcccaacaaactccctcgctgcacaagtactctatgctgaaccaagatctgccaattcatccggctgaactgaccacaatcattgctgctcctgcaaaaaaaaaaaaaggagacatcccccctaaataaatcccagaataaaactttattaccccaattaggatcaaattcaagcaaaagaaacaaaggaataattcaaagttcccccaaaagaaaatccacacctgagaagaataattcaaattctcaagagcctgcttctactagcagaaaacctaaatcaaagtaaaagttgtatcttcaggcgggtagctcctttccctcctcaagtcagcctaatccaagagtgaatcttattcctccaagagtgaaagagaaggtggaatttcaacatccaccaactcagattccttaaaagtaccgaggtggaactattgtgggttggggaaccccacaacaggctagcgtctgcgtgagattcactccaaaatctcaccagaaatcttgttcctcatggagagaaagaatcgtgatgacttggtccttacctctctaacttgaatgaattaccattcacaccatcttgtttccccacacagcccaggagtaggtggactggacctcttttggaagcaagaagtggaagtgactattctgacttcctccacaaatttcattgacacacatgttaaagctgcgaattattttttctttgcctctttaatctatggtgaacagatagagcaaagagaagagcaatttgggagaaacttactattgtagggaaagacacaagtgatccctggtactttacaggagacatctcatttgaaaagcaaggaggctgtaacgctcgcgatcctcaataggatcgttggctgggacttggtccgaggaaaaaaggtggagtctcggacaagttgggaaggagctggccataagctcggacaaagggatatcatgcagactaagctaggatcgtaagagaatcagcagggtcagctcatccgaagctcaagctcagctggaatgagtgaaggttacttgagtcaagtgatagtccagttcgggcagctagatgagtgacaattgagcacgaggcagctggtcgactgtccgaccaactgggcggttatccggacggttatttaggcggttatggtcgaacggttgcttgcccaaagggtggataagggcgagcagttacgggcgaaaagatgcaactcttcggaaaggtgcaactcttcgaaaaggtgcaaggaacagatttgttgattcggaaagcatctattcgtcccctatttaaggaagggcgcccaagatcatttgggataccacaacacacaaaaaaacaccggaaactcaccaataaactctcgccctctcgggagaataaatagtcggaggttcggtagccggactgtggccggcaaggaagaagaagcgtcggatcgaccgaacaacgtgaaggaaggtaagggaatcctagacctcgagtctaaggattctaggatgcgttatagatgagtcgggagtccttgaaaggaacgactagtgggctaggtagaatcaggtcatgtgcatcctacacaagactcggtcctggcaagggatcggctaaggcggggacgcggctcggcggaggaccggcgggtcttaactgacctgccgagaatcggccggactgatgcgcgatcttcccctctctgaatcctctccacggatccgagtagtgtatggcatatagagcattgctttgacttgcatatgactaactaaatgagattacttatggctctatgactttcaggaacgaatggtgatcgtgggaaggactttgcttaggcgcgagagactcaaggctggaatgatggctggtgatagttcggatagtctagggatcgattatatgacttataatagcatatatgcaaactcataagttgtatcgaatcctttgcttaattaataaagtattcgattgtttgtttactctattcgtctcatatatagaatctgggaatcatatgaaacggattagactaggaaagaacctcataaacggatagggccgagtcacttagtggcttgggtcgagagatctcgcctggattttaggcagtccagatcggggccttttaagttggtaccagagcatgcttggttctaggactaggtgttgggttaaggggtatcaccactcgtcgacttgagaatctcgcggtagttgttctttactcttttacgattttactatgagttatgtggattaactttggaggtttcgcagatgggtaagagcaacaaaacgggaaagagcaagaaggacaagggcattgttaaggacactttggttgaggacaatggttgatgagacagattcggccggacctgaggccgggaagaagtccataaatgaggaagcaccggagagtagtggtgcaagggacaacacagataaccggaacaatactccaacgacccaagaatagtgggatttgatgaaaggaatgatggcgcaactagccacattaaccaaggccgttgtagcagatccggtggtcctaaaaggggataaccaaaaggacgatgactcggaagttgtggaagtgaatccacaaccgaattatgggcggaaaaggggagactatctgagtcttcttgaacatgtctcaaggctgggcacgagacacttcatgggcagtacggacccgattgtggccgatgagtggaggagtagactcaagaggaacttcaagtctacccgctgccctgaggattaccaaagggacattgcggtccacttccttgaaggagacgcccataattggtggttaaccgtcgagaaacgcagaggggacgaggtccggtcctttgcggatttcgaagacgagtttaacaagaagtactttccaccagaggctagggacaggcttgaatgtgcgtacctcgacctagttcaagggaaccgcacggtacatgaatatgatgaggagtttaaccgccttaggcgttatgtgggacgcaaacttgaggaggaacaagccttggtgcgccgatttatccgcggactaaggatagagatctgcaaccattgtttggtccggacattcaactcggtttccgaatcggttgaaagggcagcaatgattgaggaagggatcgaggaagaaaggtacttgaatcggaagaaagctctgatccggaacaatcagcacaccaaacccgtggataagaaaaggaaatttgacaaggtggataacagcaagtttgatgctaagaccagcgaatgtgtgacatgtggtaagagccacagcggaacttgctggaaggccaaaggtgtatgtggccggtgtggaagcaaggaccatgcgatccaaagctgcccgagaatggaaccaggacagtccaaggttctcggtgaagagacaaggacttgtttctattgtgggaaggttgggcatctaaagagggagtgcataagcttactgcggagaagcaagccggacaaagggacaatcgtggggaaacgtactgccgcctcccccaaagcggcaagccgtggcaccgcgagtttatgagttgtcggaggaagctaacgatgctggaaacttcagggcgatcactggtacgttctcgcaacttcctattcattatttctataactgcatttgcattgcatcatgcatatgggaaaggggaggtactcaacattctaagggaatgtgtagggaccttgagagtaggtgacatagaaacgcacactctatttgattatggggctacacattgttttgttagtccggaattggttcaatcaggtgggttcaggaaagaaccaaacacggattatggaatggtacgagcggccggcagaaaggcaatgtatcctaccgaacttgttcggggcatctcggttgtagtgaacctaatcattgttccactaaagaaacacgatgttatcttagagatggactggttggggaagtacaaggctcacatagattgtcaccgaggacggatacaattcaagagggacgaacgtatgttaaaatttcaaggaataagaagaacctcgtgaagcttggtaatctcggcaatccaggctgaaaggatgatcgggaaaggatgtgaggcatatttagccacgaatcacaaccaaggaagttggggccgagtgcggagtttgaaagaccatccggatcgtcaacgagttctcggacgtgtttctgctcgttagtgtgtaccaccggaccggtcagacccgttcacgatagaactcgagcccagacaacccccatatctaaagctccgtaccggatggcaccggcggaaatggcggagctaaaaaaacagttggaggagttgttggataaaggattcatcaggccgagtagctcaccatggggtgcgtcagttctgtttgtgaaaaagaaagatggtagctttaggctatgcatcgactatcggggattgaataaagttacagtgaaaaacaaatatcctttaccccggatagatgagttgatggatcaacttggaggtgcatagtggttttcaaaaatcgacttggcctcaggatatcaccaaattcccatagagccaacggacgtgaggaaaacggctttccggacaaggtacgaccactttgagtttgtggtcatgccattcggattgaccaatgcaccagcagcattcatgaaaatgatgaatggggtattccgggatttcttagacgagtttgttatcatcttcattgacgatatccttgtttactcgaaatattgggaagctcaccaagaacatctaagggcggtgctggaacggctaagggaacatgagctatttgcgaagttaagtaaatgctcattttggcaaaggagcgttggttttcttggtcatgttatctcagaccaaggagtatcggttgatccggagaaaatacggtcgataaaggagtggccacgaccaaggaatgccaccgagattgggtcgagagaactcgtccggactttaggcagtccggcgacgttgtactcaagttcgcgccctccccggccgaacctcttaatttttcgcgttttaacatagaattgcctttacgaggctaaattctataatcgctctcttattacacagcggaagtctttctaaccttggtttaattctaaccaactcttgtaccggttacatcgtctttgtcccttagacttacatcgatcctttactcggtcaagacatgcatatattcgctaaccattctaagccaaacaatcgcatattcctttatcctactttcacggtcagttaccaaacgtctatcttaactaataagctagatcgttacataccttggccaatatgcagatttgattccttagcccgtttgtcgccttactccattcgttcaaggactcgtcatcggtcgtgaattgatgaaccaagtccctatcgttacttagacatacaaccaaccaaccccactggtctaagtacaacgatagagattggggatcgtacgattctcttggttcacgatgagcgaatcaatctcttggcttattggtccatctgttctccaaacgtacgccctccggcttcatggtggacgattgagccctcggcttatcgaaccatccatgtttccgatctggtcgttgaacactacgaccgcccacggttttctaaccgtttactcgtccggtccatggtggtcggtaaagctttcgacttatcgagccatccatacaatcggaataatattcttatcacaccaaagggtccgtgaattcatccatccgatcatcgtaggctagcccatgaaatccttcttccgtcgtccttaggtttgctcgcgggtccaacatccgttttgtccatcggttttaacgtagactttcccgttggttattcgtcgagtcaccctttggtcttaccgatctccgatccgtttcaccatggctgaggagatagatacatgaaggcggccgcgatattgatcctatatggtgaatcacgttccttacccattcttggtgctttctccctttatcggtgagattgcatccatgggcgacccttgggtgtgttcggatgcacttatccttgtgcttcctcgaacacttttcttgatccatctcatccgatgatcggtctgtccgacccgatccgtccgacgatcggtctaccagatccaattcgtctctaagacgaacggtctaccctctccatcctctacactccatcgaaccgttggaccgggaggtagcatgcgcatcagttcggtcgagttatactcgccgagccgcaccccctttctgaccaacaacttcgggatgtgttgggactcttttaagaatgttttgtggtgtatggatgatgtgtgagatgccttgggcgtcctcccttatatagggggcgaatagatgcttcccgaagcatcacatccgttccttgcacccttccgaaaggtcacatccgttccttgcacccttccgaaaggtcacatccgttccttgcacccttccgaaaggtcacatccgttccttgcattcttccaagaggtcacatccgttccttgcatctattgggtgatgcaactgtttgttggtacccgctcgaccttacaccttttggtcgagacacctcttcaccagtgagctaccacagtccaccagctcgagtgtcagctgactggaccacccagctgggtcagtacacgatcagctcaccgagctcagtcgagctgtcggtcagctcacctagctaagctagctagtcttccagctggtttagctcacctagcttagctagctagttcatccagcttgtccagctcacctagctggttcggcttgaactttctcgttcttcctactaagtattttggtccgttcctcgaccatgatatagttttccctaaaacaaaccggccttttttatgaacgcgggacgcgtcgttacaagtctaccctccttaaactgaattcgtcctcgaaattcggcgggtgagagatcttgtttacgccctaacttgggacacgggcgttacaagtctaccccccttaaactgaattcgtcctcgaattcggcggatgtaagatcttgtttactccttaacgttttcccatctttagtctctccgagactttagatatcatatttgatcaaatctctatttccgagcttgatcaagtttcctgatctaagtctttacgacactcgatcacatttctgatcctggtcctttcccggactcaatcactattttcgatctttgtcctttcatggccttgatcattatttcccgatatttgtcctttcctggacttgatcaatgttttccgatctttgtcgtttcttggacttgatcaacgttttccaatctttgtcctttcctggacttgatcaacgttttctgatctttgtctcttccgacattcgatcaaatttctgatcctggtcctttcccggactcgatcattatttcccgatcctggtcctttcctggacttgatcatcatttcccgatctttgtcctttcgtggatttgatcaatgttttctgatatttgtctcttccgacattcgatcaaatttctgatcctggtcctttcccggactcgatcatattctcgacttaagtctctttccgactttgtcagtatttccaaccttggtccccaccggactaggtcaatatttttgacttaggtctatttccgaccttgtcgtttttccttgatctttgtcaatctatgataagatcaaaaccccagaaatagtcaaatcccgactaagtctgtacccgatcttagtcaagttccgactagatccaatttccgttgatatcggtccatctccgaatatatcaacctactttccagtcatgttacaagttttgactacaaggataatatcttggttcccgatcgtgagttgggtaactatttccgtttccaaacacatcgatccctcaacttcctcatccgccaaacccttactaagacgttttcccgagcacctatccatcctaggatcaagcatgctctgataccaacttgtgagacccagtcccggacgtctcggcctccggcgaccgtttactcaagttcgcgcctctccccggccgaacctcttaatttttcgcgattaaccatagaattgcctttacgaggctaaattctataatcgctctcttattacacagcggaagtctttctaaccttagaattgccttgcgattcaactcttgtacaggtttcatcgtctttgtcccttagacttagatcaatcctttactcggtcaagacatgcatattgttcggtaaccattctaggcctaacaatcgcatattcctttatcctattttcacggtcgattcccaaacgtctatcctaactagtaagctacatcgtcacataccttggccaatatgcggatttgattccctagcccatttgtcgccttattctattcgttcaacgatttgtatgcgatcgtgaattgatgaaccaatccctatcgttacttagccatacaaccaaccaaccacactggtctaagtacaacgatagagattggggatcgtacgattcccttggttcacgatggccgaatcaagctcttggcttattggtccatctgtcctccaaacgtacgccccttcggttccatggtggacgattgagcccttggcttatcgaatcatccatgtttccgatccggtcgtttaacactacgaccgcccacggtttactaaccgtttacccgtcgataaagctttcgccttaatgatccatccatgcggtccgaacgatatccttatcacacccaagggtccgtggattcatccaccggattattgtaggctagcccatgaaatccttcttccgtcggccttaggtttgctcgcgggtccaacatccgttttgtccatcggttccaactgtggactttcccgttggttatccgtcgagtcaccctttggtcttaccgatcttcgatcggtttcaccatggctgaggagatagatacatgaaggcagccgcgatattgatcctatatgttgaatcacgtttccttacccattcttgaagctttctccctttactggtaagattgcatccatgggcgacccttgggtgtgtttggatgcacttatctttgtgcttcctcgaacacttttctcgatctatcccatccgacgatcgttctgtctgacccgttctgtcagacgatcggcatgtcccatccaacccgtccgacgatcggtctatccgatccaatccgtctggctgatctgatccatccgacgatcggtctggccgatccgatccaacgatcggtctaccagatccgattcgtctctaagacgaacggtctaccctctccatcctctacactccatcgaaccgttggaccgggaggtagtatgcgcatcagttcggtcgagttatactcgccgagccgcaccccctttccgaccaacaacttcaggatgtgttgggactgttttgagaatgttttgtggtgtgtggatgttgtgagatgatcccaaaggccttgggcgtcctcccttatatagggggcgaatggatgcttcccgaagcatcacatccgttccttgcacccttccgaaaggtcacatccgttccttgcatccttccaaaaggtcacatccgttccttgcatctaataggcgatgcaaccgttcgttggtacccgctcgaccttacaccttttggccgagacacctcttcacccgtgagctaccacagtccaccagctcgagtgtcagctgaccggaccacccagctgggtcagtactcgatcagctcaccgagctcagttgagctgtcggtcagctcacctagctga

SEQ ID NO: 157842 - DNA, 6138 bp, Arabidopsis thaliana landsberg
ctggtacaaccaaacgacaaacccacctcaaatgagataaaagtcaacgaaaaaatacatcagagaaatctgagagaatgaaaaatgaaagagagaagagagagaaaccttagaaatttgatagtttatacatcaaaaatacattaaaataatttagttttaaattgtaatgctacttgccgtaaaaaaaaaaaaaaaaaattttgaaatactacttagtaatttaaaaaaagaaaacaatattcaaaaaatttccatgttagcgcaaaaaaaaaaaaaatctataatcaaaccaaaccaaaccgaaacaaccaaaaccaacattaaacctaaatctcatgatttttgatttgaataaccacgagttcaccaatccctcttctacattcagtatttaaaatctttataaacacagttagacacataaacgtttctgaaaatcttgaataaccaaaaatgatccataatgataatgatgttacattgggccataggcccgttaaaatatttttctcttgctgttattgggcttggtactttatatatacattatcaaaagacgagaaaatctccgtcaagatgcagagatctactacgcttgagtctgctaaggccatgcattcgactttgattcagcggccaaaaaccggatctccattactgatgctgtcttcagaaaaggatggttgtcgctgtaatagtgtgtacaacccagaagatggtagggtttacgagccgaagagtgacttttccgggtatcaattcctgggaagctcaggtaagtggtttctggtggtagattctcgaatgaaactctatattatagatgtatttagcgagaagaggatcgaacttccaccactagaatcatttaagggtagcctttttaagattttgcgtgacggagaggagaatgtcaagcatatgcaaatggctgataacgatccatttcgtgatgaatttcctcatgctgccgaagatctgagaggtcgtttgtgggttgaagacaagaatggaaactacgttgttgtctggcagtttgaaaagaaccaatttctagggttttgcaggacaggggatgatcattaccgcgagattccaacacagctcgaggttcagagggagttacgaggtttatacgatatggtacttaaaggttacaatctttacgtctttgccacccgtgagttcattcgacacttggatttgtctggacaagatgaagatggtttcaaggatgtgtccgagaaacataggcttccaatgtggatgccacgtctgactatgaaggaacgttgttgaaccaaggattcacacaatagatttgtttagagagggaaaacaaatctagtaatttctcttcattaggtattctatccaagactcgattacaaaagatgttctaatctcttatgaaatacattagggttttaaaaaggtatagctgcatccatgatagattgcctacgtaccctgtgaagggatcaagccattcgtagttctcactaggtataaagttatgtgtttcttctgagtatccaaagatccccttttgtgaagtccctgagacactttatatagggtcgttaaaccgcctctctagcgatattcttcggaagattcttatttatccttaggtcggttctagaggataatcgtcctaaggatattctccttattcttcggaggttttggggagatttcctgatttcgacattatcttcaaagattctcctttatcatttccgaaagtcccataaaagatcctattttaccggaaatgatccttggagaatgaacggtttttacaagtctttgcctcgcgtgttcttcacggctcggtggtcgtttgagaggtggcttcggggcaaacggtatgtaccggctcggggcgcgcttgatgactccgttaagctcagttggctgtctcccgagccgacatagatgtttcccgcagcgttctcatgattggctcgggctgtgttcatatgattaacacccgagccattttgcaaactctcttcgggacggtcgatcgaataaggtcccgaggtgctttgttcttagctaggggccaatcatatgtttaatcatgaggtgattgttattcttagactgtttggctcggtcttgcttgtcggggaatccgaccctaacagttagccccccagctcgttggttaagagttaatgcgacgagcttcatgaatggtgtgaccgagccagctgcttccgcatctaaactgactgatccgtatcttttgagagtaaggcttgttttttcttggtgctacgagattctgttcttgacgggtgttgctatctcgaactcaaaatgttagctgttgacaagttgtgagctaggaaagctgctaggagacttgttgaagaactccaagctgttgacgagctgttaggcgggcaatagcaagctaggaaggctgccgacgagctgttagctgggcgaactacgagtcagaaaaactgcagacggactgtggtggttggctcgggtacaaattgcctgagtcaaagctgggttcagtatacttcgttccgagctgatcgtctcggtaccaggttgttcgggataactggatttctaagcattgagaccaaagcagataagaaactgtatttagccgaagcaaatctcggcaccagtgtttatgataactgggttttagtttccgaggcggttgactcggtaccagtgtgtttagagtaactggatttcagtagacttgaatacccacggttgcgacccgatttgattcaatcttttaccagcgtttagaaacgagctggggcaccggtgttaagtataaccgggtttcagaagatagaattcatagcctgctcggaaaaacattcgagcagattcttatcttgaatatttatatagcacgctgtaaccgaagcggtgtaaatgaaactttggaaataataggccgtcgcccgttaaaatatttcaaagtaaaaagatttagaaatcaaattccaagaaaatttgaagtagaaaaatcgaagttcaaatttaaaccgaaacgagagtttaaaattgaagtgggagtatggatatacggaccccactcccccccctttttgctcggtagacgagtgtttttgcaagtttacgcaaaaaatatagcagagaatgcatatatatgattaagctgtacttgttagattataatagataacacttatcttattggtttggacatagagatgatgatatctacggcatggacgatctgaatctctgagattgtaaacgtcgttgtatgaaaatctacatttaagatgttgttcgttagaggagatctcatctttgcgtagaaagagagaagcaaggatgaatgcttgtgatataagtgaaaatgtcaatcaagcttaattaatatgtaagaaagtaattgaacttatcttttatgagggaggtcgtcgagacagaattggagatcgcatcattgatgaatgagtggaaaccttgagcgattgctagtgatgatccattgtcacttgttggtgtaatgtacttccttttgctgatttatagaagaactgataacttccgtttgaaccgttaaactattgatcccaccgttgaatctttagctgatagtcatacgaagattttgtccgaattttagtcagatcggatattgcctgaggcttctaccgtcttatgaagttgctgtgacaaagtgaatttttcttcctttgctatatttgtttttggtttcggttgctccggtagcaacatacgatcctcagtgaatataggaggcagtatccagtgatgcttactctttggctgacttctggtgatctttcttctttacttctctttcctttgaattttcattacacgacatgattttgtgagatctgaacaacgtcttgtgattaaggaagataaagcagaagctctccaaggcgaggaagggacgatttttcttagatatatgttgcgttctatgcctccatgacacatggtccgtggtgatgaggcgtggcgatgacgtgaagctttttaaattgaagaccatcggtgacgaggtgaagacgtgaagcctaagatgggaatgttggtggaatcgtcctggaaacgacgatggacgtaaaatcggtcacaaaggtggctgatctgatagccgcagacatgcatctttgggctacagccaggacgtgcttgtcgcagaaaaacagtaataacttttgttagacgtaatcaattgaggcaaggatgaatccgttagaaagaagccttgtagcttcaaaatgatgtgcagatcggctcctggttccttttagatcgccgggaaatcgatctcaaagcagacagatcacgtgtcgacagatcacgtgtagacggatatgcttgagagaaaaacctataactcggaagacagcaccaaatggagcaaaatcgatcttgttggaaagataagcctcagagcttcatgatgatattaagatgggctcttgatgttttctgaatcgttgggagtttgctttctaatccagttgctcccacagttcgaatctgcgatttgacaggtgtcatatgtttcattgaaacagtgataacgcttaataaacagctcggaattggatgaggtcggtctctattgaaagataagcctcggggctttcagttgatacttagatcgcctcgtgatgccttttagatcgccgggaatttgattccgaggtcaacagatcggatacagatcgatctgtattttgtcagtgtcttctgcagataaacggcagtatctccgagaaaacacaccctaacgaagtgagatcgggcttgttaaaaagaggagcctcagggctttaaattgatctgtagatcgtctcctgagtctctcaagatcactgggaaattgagcctgagttcggctggtcggatagagacgaatctgcgcttgaaagaaacgccaatatcgcttggaagatgataggttgaagatacccttggctttcatgaagaagaaagtgagaagtggaaggcgagctcgagtgtgggaagcaaaggcgagctcgagtgtgggaagcaaagctgagctcgagtgtgggaagcaaaggcgagctagagtgtgggaagcaaaggcgagcgagtatgaaagtggctaagagtaagaagtgaagtgttgtgaaacctctaattgttctagagggtttcactttccttctattgttgcgttgtcgtttcaattaaactcgagtgtatttaatggagcccaacctttagggttttccttatcttatgaaaaatcacattaatcatcttaacctaagtttcttctgcctctcatctcttctcttctcacctaactctatttctgctcgttgttaggcttcgtgcttaacagaccctttggtcactcgttggttgggtgaatgtcaaacgctctccatcttctaccagctagttcttggcacacgtgtctccgatatccgcgtccaagaggatcgttgtgtctgccatggagctctttcttcgtacaacgttgatgtcgtcctcaatgacgtcatcagatttgtgtccgagacccaatctgagatcataatcttggagataaggaccgagtttggaaagaaagacccttttgaattcgagacttacttggttgataaattaggtcaattcttgatacatcaagacgataacttgttcaacaagccggtatcagagattttgccgaaaagggttatttgcatctggaaacctagagaatctccgaagccgagccgtggtggaattctctggaactcagattatctaaaagataattggatcgatacggatcttccatggacgaaatttcagagcaatttgaagcatctgagtgagcagcaaccgatatcttctaggaaattcttctaccgggttgagaacacggttacgccgcaagcagataatccggttgtgtgggttaaacaggttactgatcggatcagaaaacacgctaggctttttatatctcagtgtgcttccaagggatatggagataagttacagattttgtccactgatttcattgaaggagattttgtcgatgcctgcgtcggactcactcacgcaagaatgaagggacagtttgataagatatctccaagttag

SEQ ID NO: 157843 - DNA, 1143 bp, Arabidopsis thaliana landsberg
cctcctctctgacctaaccttaaacccatctctctctccttcttcttacaagcttcatctacatgtattactagtgcagctccagtttcgtcttacatgtatatgacttttgtattacccttctcttaatttctctacttcagatttttttctccttagattaatttaattgagttattgtacatccctcaagctaagattctggttttgtgagttgagtggatgagaagaggagagattaactaaattagggtttcaattgtttactttttgtttgctttttatatcaagtaatggatcaggtctctcgctctcttcctccaccttttctctcaagagatctccatcttcacccacaccatcaattccagcatcagcagcagcagcagcaacagaatcacggccacgatatagaccagcaccgaatcggtgggctaaaacgtgaccgagatgctgatatcgatcccaacgagcactcttcagccggaaaagatcaaagtactcctggctccggtggagaaagcggcggcggaggaggaggagataatcacatcacgagaaggccacgtggcagaccagcgggatctaagaacaaaccaaaaccgccaatcatcatcactcgagacagcgcaaacgctctcaaatctcatgtcatggaagtagcaaacggatgtgacgtcatggaaagtgtcaccgtcttcgctcgccgtcgccaacgtggcatctgcgttttgagcggaaacggcgccgttaccaacgttaccataagacaaccagcttcagtacctggtggtggctcatctgtcgttaacttacacggacgtttcgagattctttctctctcgggatcattccttcctcctccggctccaccagctgcgtcaggtctaacgatttacttagccggtggtcagggacaggttgttggaggaagcgtggttggtccactcatggcttcaggacctgtagtgattatggcagcttcgtttggaaacgctgcgtatgagagactgccgttggaggaagacgatcaagaagagcaaacagctggagcggttgctaataatatcgatggaaacgcaacaatgggtggtggaacgcaaacgcaaactcagacgcagcagcaacagcaacaacagttga

SEQ ID NO: 157844 - DNA, 998 bp, Arabidopsis thaliana landsberg
ctaaggtatagagctttctttgtagatgcgtagtttcttgatttggaagacctcgtcagcagaagcagatgcggaactgagaagcgagctgagggatttgctggcagcgcaagaagcaggaactgcgtttatattgggacattcacatgtgaaagcgaaacaaggatcatcggtgatgaagagattagcagttaatttcggttataatttcttgagaaggaactgtagaggacctgacgtggctcttaaggttccacctgtttctcttttagaagtcggcatggtttatgttgtttgactcgttgatcttacttgatgtacaggacctaattccttgtttgtaagtccgtcgcgtgtagtcccagaattctaggtatccctgcttgttaggtaggggttcacatctgaacacttcttacgagctacccggtcagaggatccgaccatcaaaatgaaaactcttattgcctactgtcattgttgctcgtagccacattattattattggtgttattattttgatgactggaaccgttcataatggacgtgatcgctgccgctagagccgccgcaaagtttggatcggacgcaattgctgcactggcagcactaacgctctcggccaccgaggaagtggccgcgatctgcagtggctgagccggtaactgtaaaccagaaaacttggactgttgttggttattgtacatagcttgaccaaccacttgaggcaaaactgccgggttgaaaccgggccgttgagcgaactgcatcaacgggttattagtggtcatattagggttgttaccgttgggtgaattggtgaggtccaatgtgatggttgggaatggtgcggaggctgagattgtagccatgcttgaggagcaaggcaagatagctcgagctaggaggtttgttgggttcattaaaccgtcttgactcgacattgagcccgagaggagcatgcttgcagctgcggtggttgttgaggccatggccat

SEQ ID NO: 157845 - DNA, 1030 bp, Arabidopsis thaliana landsberg
tagtcatcatatcttgcatcatggctgctaccggcggcctcatgtttggttacgacgtcggtgtctccggtaagaatattaacatcccttagttatttttctatatgtataatacaatccttttatcttatattatacaaaacgtagaagaagtttttattttaaagatacataagtttttgttagtgcaagttttctcaaaaaacgattttaaataggacttgctcatgttttcaactaccgccaataacttctttggtagaactatttcacctaatacctaacttctttggtaatcaaaatgaaatttcagtaactagctcgatgttaattaatattggttaaagtaagaaaataatcaaaaaaaatcttagcttacaaaagtttggcagctaaagatctagaccgtccttgttttagttagtatattgacaaaagtagtgtcatataggttttagttcttctttttgttattttcttacaacacacatgctcgatgttgaatttgaacatgggatacatcaacatgaataaattaataaatttatgagtataatatcctatagggtttaacggtaaaaattgtattaacaaaaataattttccatcattgaaatggctatacgcaggcggagtgacatcgatgccggactttctcgaaaagttttttcccgtggtttatcggaaagtagtagctggcgccgacaaagacagcaactactgcaaatacgacaaccaaggactacaacttttcacatcatctttatacttagccggtctaaccgcaacgttctttgcttcatacacgacaagaacgctcggaaggaggctaactatgctcatagccggcgttttcttcatcataggtgtggctctcaacgcgggggctcaagacctagccatgcttattgcaggcaggatattgcttggttgtggagttgggttcgctaatcaagccgttccgttgatcttgtcggagattgcacctactaggatccgtggtggccttaatattctctctcagcttaac

SEQ ID NO: 157846 - DNA, 415 bp, Arabidopsis thaliana landsberg
tgcttgtgaccggattaccgccttctgcttcgtggcaggaccttaaggtaagggacactatatagtctttttctctgaatgttggttctctatatcatgttttggatttatctcttttctgaaatgatgttatttgctatttacgggtgattaggatcacatgcgcaaagctggagatgtctgcttctctgaagttttccctgaccgtaaaggtgagttgacattcgatagtttggataagcttttgattgatgtgttagtaaattagtctttgtgaaggagaataggtgttaagcatctgaactgctaaactcacattcagtatttctttgtaggcatgtctggggttgtggattatagcaactatgatgatatgaagtacgcagtaagttttatatctttgcaacgcaaatgt

SEQ ID NO: 157847 - DNA, 7746 bp, Arabidopsis thaliana landsberg
atggagagtgttggatcctccttccttgttagcaaaaatgttccaaccttttccaatgctgaagcgatagaacgagggatgccgttcttcaataacattcgtgttccatggacccttctgttccaggcgaggtcagaggcaagacgtgaagcggaagggttcctgtcgtgtgttgaatcgaggcacaaggagtaccgcgagattgtgagctactatgatgaacgcaagtccgacatcgtccataaaatggccatgttggagtcgcacccacgccattggatcaaaaataattttcagtggttggctcccatgccggatgtcctattgtcatactgcaatgattgtgcccaagatgccgttgtcgcctcgaaggagaagaatcccacaattattgctgatggagacttcattcccagaccgcttcctttgttctatcttggatcggctgcttccgacgccgagaccaccgtgtgtcagaacttcattaaccaggtgagaacttcgcaagtttaattattttgcgtgcgatcttcgagatcggcttttgatgacttgttaaagatcttaaagcaaactccgtattgagaatgcaaactttaattttattaagtattatagttgcatccttgagaatgactgcctacgtacccggtgaagggatcaagccattcattgttcgtattacataaatgagattggaagggcgatctgcatatatatctatatatataaatatatattttttttttgttctaaatctagttgtagtacctcttaaagtggactgcgttccatggattttctacttcttccagcttcatggtcatcagcagatagactcccaggtgaagtatgataagtgtgtattttcaatgttttgagcatccatttgtcatcactttagcatcatatcatcactgttttataccatttctgatcatttgacatcactttgcatgtttaggatagttttgcatgcatgttgcatatttgtgttgttttcaggtgattcggagctggtgacgagctaattggaagaagcggacctgatcatgtcaaaccactcgacccctaggtcgagtagacgctttaggacctcaacagaccactcgacccccttgtcgagtaggggatttaacaatttcacctcatccacttgaccatcactcgatcacgccactgtacctggaagtcgagtatcaccatcaccaccactcgactacatactcgatggcgagcttcatagtcttctccattctgcactcaaccagacattcgagcacaaggaagaaaagatgactccagcttatcactcgacctctcactcgaccacctgggtcaagtacagttcttaatccgtcccaatactacgtcattttgagtattagggtttcagattattttactataagtagcatgtactttacattttcgagaacaagtttttatcaaggttttatttcgcaaacactgtgttctagaccttttgtaatccggatttctctttatctattcagtattcagtatttgttcttgattttcgtttactgttgttcatcctgttatcatcttgctattacactgttgtcatcatgttttcattctgttcaacgtttatgttctctacaatgatgtctaagtagtgaataagtttctgaggatgggttagagtattgtagaattctcagtatgctaggtggttcagtttgattgatagatcccttctggattaattgttcttaatgcctattgctttctgatcaactggaatttgagcccagacatttctgcgcccaaaaggtgttcgatgaattgtctgaaccactaattccagagattcgtgaccctgtaccaaggtattggttgtagtgagcgttttggctttaacttgttgattcgtaatgcctgttaggttagctctcgtcaatggtgattgagtctgggactaggttaacttgagggtctctgttgcggtggtacttagatttggttaatgaacttgttgtgtagggttaatttattaagcatgtcaatcacctgtaaactaaggaatcgaaactactcaattaccccatcctcgggaattctttatctcattgaactctttgtttactctattattgtttactgcatcttgttatctgtcgcttagtttctacagttctttcttgttactcgacctcatactcgaccacccagttgtctggcaacagactgtgcagtcgagtatctgtgttatactttctgtctgttactcgacctgtcactcgacctcacccagtgctctgcaaagacctgtgttggtcgagtgttttacagtttctctttgatttctgttttctccatgttcacttaggactgctagaacaaaccaaaacctgttattgcttggcttgacttagtgacttctgatcacatcttgattgttaacatcacacccatttggattgacaaccttcagtactacaacgacatgatagtgctttaggtttaattgacttaaaaacatattatcaatttggcgccgttggcaattgggtgtttttttgttacatttgagatttcagaattgcttagatcaagttctttttcaattttcaatctggttgctaactgtgtgtttttcttgttgtcttcttgatccaggtacaccgctgctatattcaaactcgatcaacaggcaaccagaacctccttttcagcgataacatcgaccgcctagttcgtgaactcagagaaaggagaaacacagtcaaccttatacctcagcaaccactcgaaatggctgacgaacaaaatcaacagaatggccctgcaaacattggtgatggagatgcaccacaggaccaccgtcagaggaaaggaattgtacctcctgctatccagaacaacaatttcgagattaagagtggtctcatcttgatgatttaggggaataaatttcatggtctgccaatggaggatccactcaaccacttggatgaatttgataggctctgcaacctaacaaaaatcaatggtgttagtgaagacggattcaagctccgtttctttccattctccttgggcgacaaagcacacatctgggaaaagaatctgccgcatgactcaatcaccacctgggatgattgcaaaaaagcctttctagcaaaggttttctccaacgccagaactgcaagactcagaaatgagatctctggtttttcacaaaagactggtgaaagcttatgtgaagcatgggagcgtttcaaaggttacattaaccaatgccctcatcatgacttcaagaaagcctctctgctcagcactctatacaaaggtgttctaccacggataagaatgcttctggataccgccatcaatggaaatttccagaataaagatgttgaagaatgctgactcggaccataacagctgactcggatggcaaacacaagaaggagattaaagcgctgaatgacaagctggacaagattcttcttagccagcagaagcatgtgcacttccttgttgatgacgaggagtatcaagtccaagatggggaggggaaccagttagaagaagttagatacatcaacaatcaaggtggctacaaagggtacaacaacttcaagactaacaacccaaacctctcctatcgcagcaccaatgttactaatccacaggatcaagtgtatcctccacatcaacaacaaggtcagaataaactttttgttccctacaaccaaggttttgatccaatgtagcaatttcgggggaactaccagcagcaaccaccaccttggtttgcacctcagcaacaccaaggtcctgctcctcccgacgctgatatgaaacaaatgctacaacagctgctccaaggacaaacatctggctccatggaaggtggactgtagctacaatgatctaaatgtccaggtggagacactgaattccgaagtcagatacctggaggaaaattctgcatctacttccgctctgaaacagtcaagccaacttccaagaaaatcaattcagaatccaaaagaatttgcacatgctcatgctatcaccctgcgcaatagaaaagcacttccaaccaaaaaggaacctaagacagtcactgaggatagtgtatatcaagatggggaggaattcagtctcagtaaagatcaagctgacaaacaacttgagcagccactcgaccatgttactcgaccaccattcctagtaacatcaccaactgcttcgaaaccagttgatgtcaggaataaagaaaagttctttgttcctcctccttacaaaccccatcttccatttccttgccttcacaagaaagcattggtaaataagtatagagttatgtttgccaagaacatcaaggaggttgatcgtggagagaattcaagaagtgcaaggaatagtagtattgagtcacaaatgcagtgctattatacagaagaagataattccaaagaagcttagtgatcctggttcattcactctaccatgctctttaggtccattggctttcaacaggcctatgtgatttaggagcatcagtcagtcgcatgccactctcccttgccaaaagattggggttcactcaatacaaatcttacaacatattccttatcatagctgacagatcagtaaggatctctcacggtttacttgaaaacctaccaatcaggattggagttgtagagataccaactgactttgtagtcctggagatggatgaagagcccaaggaccctttgattctagggagacctttcttagcaactgcaggagatatgattgatgtcaagaaagggaagattgatctaaaccttggcaaagaccttaggatggcctttgatgtcaaagacgcgatgaagaagcctaccatagaagggcaactcttttggatcgaagaaatggatcatttagccgatgaattactggaagagctggcagaagaagatcatcttaacagtgctttaaccaaaagtggtgaagatgggtttctgcatttggaaacattgggataccagaagctgttagactcccataaagcgatggaagaatcagaaccctttgagaaattgaatggaccagcaacggaggtaatggtaatgagcgaagaagggtcaactcgagttcaacatgcactctcgaggacgtactcgaccagccactcgaccttgtctgccaaagaatctggggagccgatcattccaacttcagatgactggtctgaacttaaggcaccgaaggttgatctcaaaccacttcctaaagatctaaggtacgcattccttggtccaaactctatttaccttgtgatcattaatgctgagttaaatagtgatgaagtgaacttgctattatctgagcttagaaagtataggagagcgattggttattcattatccgacattaagggaatttcacctactttatgcaaccataggatccatcttgaaaacgaatcctattctagcattcaaccacagaggaggttaaatcccaatttgaaagaagtagtgaaaaaagaaatttcgaaactgcttgatgctggtgtcatctaccctatctctgattgtacttgggtttctctagtgcattgcgtccctaaaaagggtggaatgactgttgtcaaaaataaaaaggatgaactgatccctactagaactataactggtcatagaatgtgcattgattatagaaagttgaatgctgcatctaggaaagatcattttcctttaccattcattgaccaaatgcttgaacgtttagctagtcatccatattattgcattcttgatggatacagtggtttctttcaaataccagttcaccctaatgatcaagagaaaaccactttcacatgtccttatggaacttttgcctataagagaatgccattttgtttatgctatgctcctgcaacgtttcagaggtgtatgacctctatattttcggatttaatctaggagatggtggaggtcttccatggacgattgtatggtctatggcccctccttctcctcacgtttgttgaatcttggcagggtattgaccaggtgcgaagagactaatcgtgttctcaattgggaaaaatgtcatttcatgatgaaagaaggcataacgttgggtcacaagatatcagagtagggaatagaggttgacaagggaaatatcgaagtgatgatgcagttgcagccgccaaaaactatcaaagacatcagaagtttcgttggccatgctgggttctacaagaggtttattaaggatttctccaagatagccaggccgttaaccaggctattgtgcaaagagaccgagttcgaattcaatgaggactgcctcaaatcctttcacaccatcaaggaagctttggtatcttctcctgttgttcgagctcctaattgggactacccattcgggattatgtgtgatgcatcagattacgccgtaggagctgttctaggccagaaaatagacaagaagcctcacgtcatatattacgccagccggacgttggatgaagctcaaggaagatatgcaacaagtgagaaggagcttctagttgttgtattcgcatttgagaagttcagaagctatttggttggatcaaaggtcactgtctatacagaccatgcagttttgaggcatctgtatgccaagaaggatactaaaccaagactgttgagatggatacttctattgcaagagtctcacatggagatagtagacaagaaaggcattgaaaatgatgcagctgaccatctgtcaagaatgagaattgaagaacccattccgatagacgattcgatgccagaagaggagctcatggttgtagaattctttggaaggagctacagtgggaaaaagttccaccaactgaatgctgttgaaggaggatctccatggtatgttgatcacgtcaattacttggcatgcggagtagaacctcccaacctgaccagttatgaaaggaagaagtttttctgagacatacaccattactactgggatgagccttatctttacactctctgtaaagataagatctttaggatatgtgtctcacaagataaagtggaaggtagcctgctgcattgccatggctcagcatatggtggtcatttcgcgacgttcaagacagtgtccaagattcttcaagcaggcttttggtggccaacaatgtttaagggcgctcaggagtttgtttcaaagtgtgattcatgccagagaaaaggcaacatcagaagaagaaatgagatgcctcagaatccaatcttggaagttgagatctttgatgtatgggggattgatttcatgggtccattcccatcttcatacggtagcaagtatatactggttgccgtagactacatatcaaagtgggtcgaagctattgctagtcctaccaacgatgcaaaagttgtgctgaagctgttcaagaccataatcttccagagatttggagtacccaaggtagtaatcagtgatggaaagaagcatttcatcaacaaagtttttgagaacctcctgtggaatcatggagtaaagcacaaggttgccactccctatcatccacagacgagcgggcaggttgagatctccaacagagagataaaaacaattctggaaaagactgttgggattacaaggaatgactggtctgcgaagctcgatgacgcattatgggcttaacggacagctttcaagacccccattggtacaactcctttcaatcttctctatggaaaatca

SEQ ID NO: 157848 - DNA, 2186 bp, Arabidopsis thaliana landsberg
atgatcctggtacggcagaatatttttgtaagagttctagaaatgatatttctttgctagaatttctaatttttttatcttccagatggtagagttgggtcaagttcacatcagaagacacataattcttccgaaggatcccatattttggactcagtgttttcaccaacttatcttgtctccttggatacgatgaaggttgactcgtggtcttatgagtccgttctggctcaaagacatggacaaatatggtgcaagcactttagtgcctgcctagcctcatcaaactcgttttacaggaatgtacctgcaaaggaaaatgaaggtcgaattgtggtcctaggaaattcgaaaacatactcatcatacttcaggattaagcatagcttaatggttggtctttgttttctctttcttataagttaaccttaaattttgctaatatctagatgcagatctgaccaatgttttcttcttttgttgatattcttattatcatcttgcactgacctgcttggtgcattcgtagaatatccttaaacaaggttcagatgctgctgttgaacccatggaaatggctcttattattttctttcgggaagttgagcagtcagaaggcttgatccaggcaatgttgtttgattcctgtcaatattgtgttgtatcaaatttgactctcgttctaattttagtggcacatatttcaggccctttctttgctttcacaaggtcttgaaggtgacccaacttctgagattctttgggctgtttatctcctgatttaccatgcatatgaaggatcagatgggaaagatatgttttcttatggggtatgttatccccttctacgatattgcctgcatctacatagccacaccatttgcattttatgattgattgtttgtgtatgtttgcatatattcatatactaatccaacttggtgtttctgatagtgttttacaattttcaaacttctatatagatgtcttggcatgttattatctttttcagtttcgttgtctagttactagttaattttttatctttgctatagaatgctttttgatgcttcacagtctttccacctggtttatatgggataacatttcaactcttcaggtcaaacacagtagcagatcatacgtaatttggcttatgtacatcaacagtcgaggacaacttaatgatcaattaattgcatatgataccgccctctcagcactttgcaaccatgcatctgggtccattgacaggaatcatgccagcgcttgcatattagatgttttgttgcagatgttcaaccttttgtgcatttctgggaatgtttcgaaggcaatacagagaatatccaagcttcaggctccagcagcagtttctgatgaccctgacttttcactgatgtctcacattctcacatgcttaacatattctgacaaatgtgtgttctgggtttgttgtgtgtacttagttatttacaggaagctgcctgactctattatccgacgacttgaaatggagaaggaactacttgaaatagaatggcctactgttaatttggatggtgatctgaagcaaatggcgctcagactatttgataaagggatgcgttccgtagaacatggtaccaacaatggaatacaaaagcgacctgctgggctatttgctctgaactacgccctgtttatgattgcagtagatgagttagaaagccgtagggacattttgaaggcatctgttcaactctacccaacatgcttggagctaaaattgttagcagttaggatgcaatcaaatgagttaaaggatatgttttcgtctgggtttgaagagcttctcaagcaggaagcaaaagaggcgtcatgcatacagtgtatttggaatcagtatgctgaatatgctttggaaggaggaagctacgatttggcaagagaactcatgtcccggtggtacggttcagtatgggatgttttgtcccataagtataagacagtacgaggcaatgtatagaagaaggggatgataatatgctggaatcagctttatcagatctaaatgttgcatcggatcaggtggatgtgatgtttgcatatcataatctctgtctgcataatctactgcagcgtcactggactgaggctcgcgttggtcattgaccaatcactagaagctgcagctcctgagcatg

SEQ ID NO: 157849 - DNA, 4387 bp, Arabidopsis thaliana landsberg
  unsure (1)..(4387): unsure at all n locations
atgggtgccaagtgcccgacttgtcaactggtcaaggcggagcatcaagtaccaagtggttgttacaaaacctacctataccggaatggaagtggaccacataacgatggacttcgtcactggactgccaacgggatcaaatccaaacacaatgcggtatgggttgtggtagaccgattgactaagtctgcgcactttatggcaatctcggataaggatggagcagaaatcattgccgagaagtatatagacgagatcgtgcggttacatgggattccggttagtatagtgtcagaccgagacacaaggttcacgttaaagttttggaaggctttccaaaaggccttgagaactcgagtgaacctaagtactgcctaccacccacagacggacggacagtccgaacgaacgattcaaacccttgaggacatgttgagggcatgcgtcttggattggagaggaaactgggagaaatatctaaggttagtagagtttgcatacaataatagttttcaagctagtattagtatgtctccctatgaggcgttgtatggtctagcttgtagaacaccgttgtgttggacgcccgtgggcgaacgtcggttgtttgnnnnnnnnnnnnnnnnnnnnnnnnnnnagagaatgaagttcttaaaaatcaagttaaaggaagcccaagatcgacagaaaagctatgccaacaaacgtcgaaaggaattggaattccaagtaggagatttggtgtacttaaaggcgatgacctacaaaggggcagggcgattcacctcaaggaaaaagttaagcccaaggtatgttggcccgtacaaggtgatcgaatgagtatgggcggtggcatacaaacttgaccttcctccaaaactaaatgcgtttcacaaagtcttccatgtgtcacaattatggaagtgtctaagtgatcaagaagaaagcgtggaagatgtacctcccgggttaaaggagaacatgacggtggaagcatggccggtacggatcatggaccaaatgacgaaagggactcagggaaaatcaagggatttgttaaaagtcttgtggaattgtggaggccgtgaagaatacacttgggaaaccgagaataagatgaaggccaattttccggagtggttcaaggagatgggtaaagatcaacttgatgcggatttgaggacgaatccaattcaaggggggggagacttgtaacgcctgcaatcctcaataggatcgttgactaggacttggtccgagagaaaaaggtggagtctcggacaagtgagaaggagctggccataagctcggacaaaggggaaatcatgcaggctaagctaggatcgtaaagaaatcagctgggtcagctcgcccaaagctcaagctcagctggaaggagtgacggttactcaggtcgagttacagtccagctcgggcagctggacgagtgacggttgagctcgaggtagctggacgagtgacggttgagctcgaggtagctggacgagtgacggactagctgggcggttatgggcgaagagatacaactcttcggaatggtgcaactcttcggaagggcgcaactcttcggaaaggtgcaactcttcggaaaggtgcaaggaacggatgtgttgattcgggaagcatccattcgccccctatataaggaagggcgcccaggaccattccactcaccacaacacaccgaaaacacaagaaactcaccattaaaactctctccctcttgggagaataaatagtcttaggattcggtagtcgggctgtggccggcaataaagaaggagggtcggatcgacctaaggaaggtaagggctcctagactttgagtctaagggttctaggatgtgagttagtagtcggatccttgaaaggatcgactagagggctgggtagtatccgggtcatgtgcatcctacacaagactcggtccgggtagggatcggctgaggcggggacgcggctcggcggaggaccggcgggtcttaactgacctgccgagaatcagcgggactgatgcgcgatcttcccctctctgaatcctctccacggatccgagtagtgtatggcatatagagcattgcatggacttgcatatgactaaataaatgagattacttatggctctatgactttcaggaacgaatggtgatcgtgggaaggacttggcttaggcgcgagagactcaagaccgggatgatgggtggtgatagttcggatagtctagggatcgattatatgacttgtaatagcttatatgcaaactcaaaggttgtatcgaatcctttgcttaatcaataaagtatccgattgtttgtttactctattcgtctcatatattgaatcacggaatcatatggaacggattagactaggaaagaacctcataaacggttagggccgagtcacttagtggcttgggtcaagagaactcgtccagactttaggcagtccggatcggggcctttcaagttggtatcagagcatgcttggttctaggactaggtgttgggttaaggggtatcaccactcgtcgacttgagaatctcgcggtagttgttctttactcttttacgattttactaggagttatatggattaactttggaggtttcacagatgggtaagagcagcaaaacgggaaagagtaagaaggacaagggcattgtcgaggagactttggttaagaaggaaacaatgatcaacgagaaaaccagagtcgggacgatgctcgatgggacagactcggccggacctaaggccgggaagaagtccataaatgaggaagcactggaaagtagtggtgcaagggacaacacggataaccggaacaatactccaacggcccaagaatagtgggatttgatgaagggaatgatggcgcaactagccacattgaccaaggccgttgtagcggatccggtggtcctaaaagtggataaccaaaaggacgatgactcggaagttgtggaagtgaatccacaaccgaatcatgggcggaaaaggggagactatctgagtcttctcgaacatatctcaaggctgggcacgagacacttcatgggcagtacggacccgattgtagccgatgagtggaggagtagactcaagaggaacttcaagtctacccgctgccttgaggattaccaaagggacattgtggtccacttccttgaaggagacgcccataactggtggttaaccgtcgagaaacacagaggggacgaggtccggtcctttgcggatttcaaagacgagtttaacaagaagtactttccaccggaggcttgggataggcttgaatgtgcgtacctcgacctagttcaagggaaccgcacggtgcgtgaatatgatgaggaatttaaccgcctaaggcgttatgtgggacgtgaacttgaggaggaacaagctcaagtgcgccgatttatccgtggactaaggatagagatccgcaaccattgtttggttcggacattcaactcggtttccgaattggttgaaagggcagcaatgattgaggaagggatcgaggaggagaggtacttgaaccgggagaaagtaccgatccggaacaatcaatccaccaaacccgcggataagaaaaagaaatttgacaaggtggataacaccaagtccgatgctaagaccggggaatgcgtgacctgtggtaagagccacagcggaacttggtggaaggccataggtgcatgtggtcggtgtggaagcaaggaccatgcgatccaaagttgcccgagaatggaaccagggcagtccagggttctcgatgaagagacaaggacttgtttctattgcggaaagactggacatctaaagcgagagtgccctaagttgactgcggagaagcaggccggacaaagagacaatcgcgggggaaatggactgccgcctcccccaaagcggcaagccgtggcactgcgagtttatgagttgtcggaggaagctaacgatgccggaaacttcagggcgatcactggtacgttctcacaactccctattcattatttttataactgcatttgcattgcatcatgcatatgggaaaggggaggtactcagcattctaagggaatgtgtagggaccttgagagtaggtgacgtagaaacgcacactctatttgattctggggctacacattgttttgttagtccttaattggttgaatcaggtggattcaggaaagaaccaaacaccgattatggaagggtacgagcgccggcggacacgcaatgtatccgaccggacttgttcggggcatctcggttgtagtgaaaggtgtcaatatgcacgcgggcctaatcattgttccaccccagagacataataatatccccgggatggactggttgg

SEQ ID NO: 157850 - DNA, 597 bp, Arabidopsis thaliana landsberg
  unsure (1)..(597): unsure at all n locations
gcgagttcttctctgcgtttaagccatagataacaaaccaaactaaaaaaaaanagtttctccttttatcattccttctcttcccttgtataggtgtgatcctcttcaaggggatttctctggcgggtcatacattcgcaccgatcaaactcggattggtctttcttaacgcaatcttgacccgattcaaaaaatttctggtatcctttttaagaaatgaaattaattgattccttgtcttcgaaacgagtaaatcgactaattgattagattttgttcattagggtttgttagtgaatagataagaagataaatgggagctccgttagtgtgccacgggcattctcgtcccgtcgtcgatgtggcttatagtccggtgactccagatgggttctttctcattagcgccagcaaaggtatgatcttcgatcgatttgtatttgactatctatgatctttacttggaactgtgcctattttggattatgatttgcatagcgaatgtgctttgacgaatttgattttgctgccttttattatatatcgtctggagtttgatttgtggctgatctaatggagaaattaggatggtaagct

SEQ ID NO: 157851 - DNA, 576 bp, Arabidopsis thaliana landsberg
gatgggaggccgagactacaaccaaagcttccgcaaggatacattgggaacactctctttcacgctcgaccggtatcaccgttgggtgctttccacagagagagtttcagtgaacagtggagagagttcatagagaaataaggaaaatggacaacgagtacttgagatcagcgattgactacttggagagacatcctgatctcgaccaattagttcctggtgaaggtaatacaatcttcagctgcgcacaaacttctgcatcgtcagtctaatcaaacagaccgcgtacgaaatggatttcggatggggaaaagcttactacaagagagcttcacatttaaatgaagggaagggatttgtaactgggaacccagacgaagaagggagcatgatgctaaccatgtgcttgaagaagactcagcttagtaagtttcgaaagctattttatgagtttctcaatgtctccgcactgtgagacaatcagaagccttattttttagttttcacaagtcccacatcgttaacttaaaattgtatgtgagaaataagtagtagtataaataacgaggccacggc

SEQ ID NO: 157852 - DNA, 709 bp, Arabidopsis thaliana landsberg
tgtgatgataacaatcaagatgtgatcagaagtcactaagtcaagccaagcaataacaggttttggtgtgttctagcagtcctaagtgaacatgcagaaaacagaaaatcaaacagaaacagtaaaacattcgaccaacacaactctttgcagagcactgggtgaggtcgagtgacaggtcgagtaacagacagaaaataaaacacagatactcgactgcacagtctgttgccagacaactgggtggtcgagtatgaggtcgagtaacaagaaagaactgtagaaactaagcgacagataacaagatgcagtaaacaataatagagtaaacaaagagttcaatgagataaagaattcccgaggatggggtaattgagtagtttcgattccttagtttacaggtgattgacatgcttaataaattaaccctacacaacaagttcattaaccaaatctaagtaccaccgcaacagagaccctcaagttaacctagtcccagactcaatcaccattgacgagagctaacctaacaggcattacgaatcaacaagttaaagccaaaacgctcactacaaccaataccttggtacagggtcacgaatctctggaattagtggttcagacatttcatcgaacaccttttgggcgcagaaatgtctgggctcaaattccagttgatcagaaagcaataggcattaagaacaactaa

SEQ ID NO: 157853 - DNA, 589 bp, Arabidopsis thaliana landsberg
atgcaacaagccatcacgtttcttcaagactttaagcttggtcactacatgaagataccacctagaaccatgttcatggcacaggttatacaatctctattttaatgtcaactagtttatacgactctcttaatgttattattgttagttataatttgttcatgatttattggtttcagattgttggaacactcatctcatgttttgtttacctcacaacggcttggtggctaatggagaccatccccaacatatgtgattcggttactaactcggtttggacatgtccatcggataaagtcttttatgatgcatcggtgatatggggacttattggacctcgtagaatctttggagatcttggtttatacaaatccgttaattggttcttccttgtgggcgctatagcccctattcttgtatggttagcttcaaggatgtttcctagacaagagtggatcaagcttataaacatgccggttcttataagcgcgacaagctcgatgccgcccgcaacagccgtgaactacacaacatgggttcttgctggattcttatccggatttgttgtgtttaggtacaggccaaa

SEQ ID NO: 157854 - DNA, 263 bp, Arabidopsis thaliana landsberg
actagtagtaaaaagtaatagcttttataatttcagaagaaaaaactctgaaagatgtcgaccggaggaccccaaaaattagaagcacaaggaggaaaagaaggcaaagaatgggatgatggagccgaacacgatggtgtgacgaagatatacgtagcagctggtggtcttggaattgaacaaatcagattcgattatgtaaagaacggacaaccaaaggaaggatcttttcatggtgtgaagggtagaagtactatttctac

SEQ ID NO: 157855 - DNA, 350 bp, Arabidopsis thaliana landsberg
cttccacagaagaggtggaacgtttacaacttcgacaatcgagaaaaagtccgaaaggacgaagaagctgccgctagagaagagcagatcaaacgcgaggaagctagaaaacgagatgctgaatctcgtctcgaagtgcttcgtaacgtccgtggcttggcgcctctcaaacgagcgtctccggaggcagagaagggtaaggatgaagcggtggtggcggcggatgttgttaaatcgactgctgttgttgtggagagtgttgaatcggaggagcctaagacgggtcatattaatctgttcgaagggattaggatttttgatccgattgagatcaagaagaatgataagcc

SEQ ID NO: 157856 - DNA, 246 bp, Arabidopsis thaliana landsberg
taaagaatctgaatttcagaagacaggtgattcttcagcttgtgctaatgtagaaaaggctaacaaagttaatagtttggctactgatgatgttgataagagtaaaagtaagccgtttgaggtgtacaaaaggcgaacaaccgttgttgtttctcgtgaaatatttgtaaacgttgtttgtgatgccctggctgaatataagtatgtgggtcatgaccaaagggcagacttgattctggcgtgcag

SEQ ID NO: 157857 - DNA, 293 bp, Arabidopsis thaliana landsberg
gtgaggcatatgtgggttataaacggccaaatagaggacatggacgtgagatgatccaactcggtcttcctatagctgatacgccgcctgatgatgatagtatcaaaggcaagtcctttaaaatgttatttacttataatttctgtgtattggttaacatgagatatgggctttatgcagatcgaagaatagagccaatcccatcagctctttcagacatcattgaacgtttggtctcaaagcaaatcatacctgtgaaaccagacgcatgcatcattgatttcttcagcgag

SEQ ID NO: 157858 - DNA, 642 bp, Arabidopsis thaliana landsberg
tttgccaaatccaagtgacaaagagagggaagtaatggaactcatctctatcaatgatgcatttatgcaagtcgcgaccactaatgcagagtctttcgacgatgatacctttattgacgctaggtaaacaaaaaagagccgtaagaaatctgcgagggcaaaaacttctggtgcaaaaattgctgcacatgttcctgctgtagatacatccctccaaacaaactctgttgagaagggaaaaagttctcgtattctgcagcagcaggagaaggaagttttgccggctattccttatgggccttctctgggagattttgttctctggaaaggagagtctgtaaacaatcctccaccggctgctgcatggtcttctggtcccaaaaaatctacaaaacctagctcgcttagggacatcgtgaaggagcaggagaagatgacgacctcatctcatccaccccctagtccagtacctaccacccagaaagctattccacctcaggctcatcagggcggtgcttcctggtcgcgttctgcatcttcaccatcgcaggctgtttctcaatcttcctctcagtcaaaatccaaaggagatgatgaccttttctggggtccagttgagcaatcaacccaggacacaaaaca

SEQ ID NO: 157859 - DNA, 545 bp, Arabidopsis thaliana landsberg
gagggacagagtggagacggtggttaaagagctaatggacggagaaaagggaaagaggttaagagaaatggtgatggagtggcggcgcttggcggaagaagcttcggcgccaccgttgggatcatcgtccgttaattttgaaacggtggttaataaagtccttacaggtcacacgattagatcgacttaactgggctttacgtatccaaataggcccattataaacggcccatttgtttccaccatcatttgggctggctttaatcacaattttaaaagatgtactttacaagttgcaataatctatagttttcttctcacttggatcttataaattatgagtacatatccatattgaaactcccaagaaaaaaagtggatataaaggagaaaaaaatatttatgaaaaagcatgaatacaaatcatgtagcaaaaatttgaaattttaataaaataaatgagtaaaaaaaaatatgaataactcaaatttttaatatatattccgtcagaaaaggagcaaaatatgacaggaggtttctcttga

SEQ ID NO: 157860 - DNA, 188 bp, Arabidopsis thaliana landsberg
gttcgaagaccatttcttgttctttggacgaccatcggcgacagtgttaagtctagagtcttcttcttcttcggcgtagttttttccccggtaagtctccgttcatcgccgaatctgtatccctctttctctttttgttgacttgatcgtctctttcgattatgtatctcgcgatcggagtccgtcat

SEQ ID NO: 157861 - DNA, 608 bp, Arabidopsis thaliana landsberg
gcacaattgtagaggctctttgatggctgaatactatgattttaccttgcggacactcttttgtagctggagggatagaacaaagttaaacagatggtacaaagttttgctagcacaacctcttctttttctcttgcttttggctcatttcttctgcttaatggaatctattttccgtcgtgttcttagaaagcttgttgcacatgttcacaaccagtctcagaagactcgataaccccaaatctcagtcagtgaattacttgtgttcatgatttttgtatttggtattgtctgagagaactccttgtcattattttctctcgatgttttcgcagctttacgagttgcggtacaagcattctgccgagaagagaattcacagtcaaaccatccatgtaagagaaaacgagaaggattcgatcaagtaaattcaatactactatacatatgacctctcacatttgtttatgtctcaaacaagaggttccttttccatatacacaggagagacgtgcatttggtgtcacgaatcattcaggtcgttcaagaaacaaaagtaaccatttcccatttgctgtggcagatcgagttataataaaggtcagtcc

SEQ ID NO: 157862 - DNA, 1516 bp, Arabidopsis thaliana landsberg
aaaagttgcaaccaaagaccacaagctcgtttattggtttgcgggtggtgcagcagctctctcagttatgctggagaagaaaccgagacgctctgagcttgctctatatgttcttccccgagcaggagattctctgtgggagatacttgttaatcgccaccttcttcccgacattaaaaatgctgaggtacaatacaattacaaaccacttttgttatttccaactttcttcccctttgagcaatggaactgatgttttatacaattaatggaaacaggtggctttattctgtggatgcatgggaggaataatgtactacctcgaatatgaacctgatacaatggctccgtttctgaggggactcatccgtcggtttcttgctagccaaataagcaatcctagcagcaaataccctcatagttcgtcctattcttatctccagaccctagatgcattgaagaaaccgaaaacgcaggagagccgagaaggcgaaactccgaaagccgaagaaaagtataacttggaagcaattcccggtctttagaagtataagcagaagctgtctgatactatattagcacctgacgttgaaattgagcaaaccaaaaaggaccctttacggaatcatgattttgattgtgtttcaggaagttaatgtgaaactttccagaaagaaagggttcctccacacagaaaacttaagagattgaagtgattcataggatttaggagcctgttttttattttctttcacgtaataacaacaactccactgtctcttctttatttcaatgagaagtagcagaatgaagaagatttatggcaagcgagtcaagctgtcttgatttgttaacaccaacacagtgttgaaacttgaaacagatcactagatatattcctttttgtcttgttataatcttgatctattgcttaaaaactcacttcaagaaaaacacagttttgtttagtttcctaatgcaagttctctcaaccgatggagaaaaagtcaattcgtctaagatttgactctcatacccaaaaactattgtattactcaaattgttgaaatttcatctgtattggtcggagcggatatgaatttgcacatacgatgatctcagggtcagaaaaatcaaaagataaagtaatgcaaacaactgacacttgtaagcatttgttccactttaaggaatacttcatatgctacaaagtcaaatgtcaaagggagttttgtaatagaaaatttcaaacaagcgtcgtgatggtacacaccttcattgtatattcaactcgatcttctctctctctttcttctgcatcatcaccaaaatggatgcttttgagactcatttaccgaaggagatcgtctctgatcctctttataactccttcaacccaaggagtgaagagtatgtcgtcgccggaaagattctcaggcagcggtcagtctttgacttggacaaaaacgggtttagccctcttcatgcagctgcggcagccggacaagtagagact

SEQ ID NO: 157863 - DNA, 1489 bp, Arabidopsis thaliana landsberg
atgatgttgtctcccactttgacgagcttgcagctctgtaatatcccaagtttggtggagcttccttcctcatttcagaatctcaatcaactgaagtttttggacatcacaaattgtagaaatctaaagactctgcccaccggaatcaacctcaaatctcttgaccacctttgttgcaatggatgctcacagttgaggagctttcctgaaatctcaaccaacatctcaagactcgaattagaagaaacagggattgaagaggttccttggtggatagaaaaattctctaacctcattgagctaagtatgagccattgcagcaggctaaaatgtgtatccctacacatttctcaactgaaacatcttaagcaagctttgtttccagattgtgggtcattgaccagagttgaattgagtggatatccaagtgggatggaggtgatgaaagcagaaaatattgacacagcctgcccttggatcagaaaatattcaacttttcttcctaaagtcaaacttgatttcagggactgcttcaacttggatccagaaactgtacttcaccaagaatcgattatattcaagtacatgttgtttccagggaaagaagaagtgccatcatatttcacttaccgtactactggaagctcctctctgactattcctctatttcacgtccctctctcccaaccattcttcagatttagggttggcgcattgttaactaataatgcgcaggcagtagatctcgaggtaaaatgtgagttcaaagacagatttgggaacagctttgattatgacatttaattccaagctcgttatcataactgtattacggaggatgactatattctagctatattggactgtcgcatccctctaaacgaagaaaatgcccctctagctcaacggaactactacgatcatgtggagataaatgttcatataagtagtagaagttggagatcctttgaaataaaagaatggggtatacgactcttagaggactcttcatcagtaaagaaccgacttggtaatccaaacagtactcttccacatgtttctgaagccgaagaaggcaatatggggtataatacacctgttcaaggacttgttaatgagattgaacacagtggagagtctggagataacaatgtagagactgagagaagcacgaagcgcatacgggtaacattaattgaacatattactattcatctctcaattctttttgtatcaatgacaactgaattcttttgcagtaagtaatattatagctatattggactgtcgcatccttctaaacgaagataatgctcatctagtattcataaaagaggtcacaccacattattcttcctccaatattactttcacgcttaaaaaatgagatcaaatcaaaagaggattgctacaaattactattttttgcaagaaaataaacaaataaaattaagaacatatataattactcaaaactaaaacatgcata

SEQ ID NO: 157864 - DNA, 3442 bp, Arabidopsis thaliana landsberg
atggatgttcatttggtggaagagaatgtgtcaatggggaatcatgagataggagatgaaggagatgttgaacctagtgattgcagtggacagaacaacatggataactcgttaggggtgcaagatgagattggaattgcagagccatgtgttggtatggagtttagttcagaaaaagaagctaaatctttctatgatgagtactcgaggcagcttggttttacttctaagcttcttcctagaactgatgggtctgttagtgttcgagaatttgtgtgtagtagtagtagtaaaaggtcaaagagaaggctttctgagagttgtgatgcaatggttaggatagagttgcaaggtcatgagaaatgggttgttacaaagtttgttaaagagcatactcatggattagcaagttctaatttgcttcattgtcttcgtcctcgtaggcattttgctaactcggagaaatctagttatcaagaaggggttaatgtgcctagtggtatgatgtatgtttctatggatgctaatagcagaggagctagaaatgcgtctatggctacaaacacgaagagaacgattggacgggatgcgcataatctgttggagtattttaagaggatgcaggcagagaatcctggctttttctatgcggttcagcttgatgaagataatcagatgtcaaatgtgttttgggctgattcgagatctagggttgcttatactcattttggtgacacggttaccttagatacgaggtacaggtgcaatcagtttcgtgttccttttgcgccatttactggtgtgaatcatcatggtcaggctatcttatttggctgtgcacttattttggacgagtcagacacttcatttatctggctgttcaagacttttctaacagcaatgagagatcaaccgccggtttctttggtgactgatcaagatagagccatacagattgctgctggtcaggtatttccaggtgctcgtcactgtattaataagtgggatgtgctaagagaaggtcaggaaaagctggctcatgtgtgtcttgcgtatcctagttttcaggtggagctatataattgtatcaactttactgaaacgattgaggagtttgaatcgtcctggagttctgtcattgacaaatatgacttaggaagacatgaatggcttaattctttatataatgctcgagctcagtgggtacctgtttatttccgggattcgttttttgctgcagtgtttcctagccaaggttattcgggttcctttttcgatggatatgtgaatcagcagacaacccttccgatgttctttaggctgtacgaaagggctatggagagctggttcgagatggagattgaagcagatcttgacactgtcaacacacctccagtcttgaagacgccatcacccatggagaatcaggctgcaaatctctttacaaggaaaatatttggaaagttccaggaagagttggtagagacattcgctcacacggcaaacagaattgaagatgatggtactaccagcacatttagggttgcaaattttgaaaatgacaacaaagcttatatagtaacgttttgctaccctgaaatgagagcaaactgcagctgtcaaatgtttgagcactccggcatactctgccgacatgttttgacggtgtttactgtcactaatatactcactttgccaccacattatattttgagacggtggacaagaaatgccaagagcatggtagagttagatgagcatgtcagtgaaaatgggcatgatagctcgatacaccgctataatcatttatgtcgcgaagccatcaagtatgctgaggaaggggcaattacagctgaagcttataatattgctttagggcaactcagagaaggtggaaagaaggtttcagttgtcaggaaaaggataggtagagctgcgcctcctagctcacatggtggtggaattggtagtggtgacaagacctctctatcagctgctgacacaacccctttgctgtggccgcgccaggatgaaatgatacgcagatttaaccttaacgatggtggggccagagctcaatctgtttctgatctgaatctgccgcgtatggcaccagtgtcacttcaccgagatgatactgctcctgagaatatggtacccagaggaaacctttcacagacttatttctttgattctattggtgttggtcagtaacttgatttactttgtcttacaggtggctcttccttgtcttaagtcattgacttgggggatggagagtaaaaatacaatgccgggtggtagagttgcagttatcaatttaaaggtgtgcattatatgaaccagtaaatcttttctgtagggttttgcagtaacttttactgaaagttggtctgatgggatgctttatctaaaagagattagatttgtaagaataatgatcttgaagatttgaacaattgacattcgccttttcggaaaagttactggctatagtgtaggaaaatcaaagttgttgccattaatagtcttgctcgttcctgcaaaatagtagttgaccgctttactgaggattatttttcatgatgttttcagttgcacgattacagaaagtttccctcagcagacatggatgtcaaatttcagctgtctagcgtcacacttgaacccatgttaaggtccatggcttacattagcgagcaactttcatctccagccaatagagtagctgtcatcaatttgaaggtatgtcttttagactctaggctcgtagcttctcatgtagtcttcttgacttgactaaactccttttaatttattgattgtctttggtttgttctaacatagattccatctaccgttagtgtgtgaaacttctgtgttgtttgacttgtttaagctgattctctcattcatgttaagctgccatacgtttgattaccaaaatcaatgttttactccatattagggactcttaattgaactagaaggtttcaacagtgtgaaaaaatcttcttttgttttccttactccagcttcaagataccgagacaacaacaggagaatcagaggtcaagtttcaggtgtcccgagatacactaggtgccatgttgagatcaatggcctatatccgtgagcagctctcaatcgttgtaggcacactccctttttctttttctttttccaagtagtagttattaaataattacaaggccaatgatagttgaattagtaatagtaacagcaatcaattaggttcatatcgacctataattgttcctgaactattacttggtctatgtattgtcttatagagtatctaactgtatcttgcatttgcagggagagctacaaacagaatctcaagcaaagaagcaacgcaaatgatgttgagagagagaaacaacctctggaaaagaaaactttggaaaatggttgttaa

SEQ ID NO: 157865 - DNA, 578 bp, Arabidopsis thaliana landsberg
cattgttcgctgagttttggctcggagaagaaaaactgatgctctgccagaagctaccatcagatacttgcacaatctgtacgcacagattagggaactgaactgagcacaaatatcataatttgcatacaggcataatagagtagtattataaggtgatagtttctctaaagagataaaattgttcattactatctcctgatggaatgaacaacttgttttagtagagataccttccacaacatgtgggcaaaagaagaatctctttatgttttaagtcctctgaaacagtacttgcgtcgaagaaaccagagagaggaagtgattcccaggtttgactttcttgtatacaaaaccttgctttgttcactaaaacacaggcatcaacaaaacaccttgtccaatcaccggttactttgccagatacactttgcaacttcttggtccacgttccacaacctatatgcgagagcattagggttccagtagatcgatctgaagaatctcctggccagtttggacaacccatgactcctagcacaatttcattatctacaacaagggccaatcctacctga

SEQ ID NO: 157866 - DNA, 1086 bp, Arabidopsis thaliana landsberg
aaaaccgcaagaaagctcacaagaaatctcctcccatggcagattcaagttcttctctccctcctctttgcgagaagatctcatacaaaaactattttctaagagttgtggatctcacgattctaggccttctcttttctcttctcttgtaccgaattctacttatgaaccaaaacaactccgtttgggttgggggcttcctctgtgaatcctttttctctttatatggcttcttattaccagcataaaatggagtcctgcttcatataaatcatatcctgaaagacttgatgaaaggtatcaatttatattacacttacaattatatatacaatcatgcatattaaaagcatatgttcttttaattttgtataaaacctaagtcctagctagctgaaacctaactcttaagtttttttttcctcacgaaatatcattcatttttttctgttatctttctattttagtggactagctagtaaaaatttgaaaatataagactcttagtaattaaataatttcagggttcatgaccttccatcggtagatatgtttgtgactactgcggatcctgttcgggagccgccgattcttgtagcaaacacgttgctttcgctgttagcagtgaattatccagcgaataaacttgcttgttatgtatcggatgatggatgctcacctctcacttacttctctctcaaggaagcttctaagttcgccaagatttgggtaccgttctgcaaaaaatataacattaaagttagagctccttttagatattttttgaaccctccagccgcaacagaaagttctgaattcagtaaagactgggaaataaccaaggtaaattaaagggtttaattgttttttcggcgtatgagtttaattttgcaattgtgtttacaaattaaatgatttcgtttactttcaagaagaacacataatttattttcaatcaaacattatttgtaaattgtagaaggtaaagtagaagaaatcgttgatgtttcgaatttgtgttctttaaaacattatgacaatgctgtgatttatagaaagataaagaaaaacaaaatcaattaatta

SEQ ID NO: 157867 - DNA, 575 bp, Arabidopsis thaliana landsberg
caatacttgaaactattcttcgtcaacatgctacactttctttagacgatgttctcttggttaattatgggcaggtctcttacaagcttcaggttcttgagttaagacctgccactagcatttcagttctggagactgacattgaggttgatattgttagtccagatatagtttcagatcaaccgaatcagcatgtgttaaagctgttacaatatgggaaatctgaatctggaacagttgaggaaggacggtatgattactataagtttgtaattgacgaggctactgtagaaaaagtaatggcaggaagcgtaaaagtcattgtaaaggtcgatgtggagaaagatggagcagataccgatctctatgtgtcaaagcacccggttctattcccatctcttcaccagcacgagtggtcttcacacgacgtgggttcaaagaccttgatcttgggatcaaaggagagggctttgaactcagggacttacagtataggtgtgtacggcttcaaaggaacagtcaagtaccaggtctcagtactggtccaagaaagcatcgatggagctaaggttggg

SEQ ID NO: 157868 - DNA, 189 bp, Arabidopsis thaliana landsberg
cgaagaaaatgaaacatttcgtttgaaaacatttcagactgatactgcttctgtgcttcaagaggccatcacttacataaatttttatcaagagcaagttaaggtaaattatatacatacgcggtaaaatttacgaaaatgaaggtaaattgttgcatgtctatgcaagcatgactatcttagttgact

SEQ ID NO: 157869 - DNA, 382 bp, Arabidopsis thaliana landsberg
ctccaagcccacactgctcagtttcctggtcaaatggctacctcaaagactcgagtcttgttcttatctttgtgtctcatccttggcaaagtagttttgtctcagtttgatgagttatggctagtaggggacgatgatccactcaacgccttgcagacgaggcgtgaaagaagagaggagaggtgtgattactcggtggggaaatggacgttcgatgaaacgtatccgctctatgattcaagctgtccatatctgagttctgcactaagttgccaaagaaatggaagacccgactcttattaccagaaatggagatggatccctaaggcttgttcactaccaaggcacactccacactcctcttacttcttacattacttct

SEQ ID NO: 157870 - DNA, 55 bp, Arabidopsis thaliana landsberg
ttttcgcgggcagctcacatttctctccaccgtctcctcgtcttctctcaccaaa

SEQ ID NO: 157871 - DNA, 388 bp, Arabidopsis thaliana landsberg
gcaggtctatatgtctgatttgtcagaactcttcacttggacatgcgaaagatgcaatggtttgacaaaggtataacatttgttgaagcagatcactgtttgaagccgcactatgtcagtatgtataaagctaatagctttaattgggtattctaatgtctttaaggatgttgcagggttttgaggtaatagagataatagttgacgttgagcactgcttacaggtctgccctgatatcttaagctacatctggacatgatattgttttgttaaacaattttgttaatatcagtacgtgtaacttttaacgacaggcatatgttgggcgtggctaaaggatttgaatgctatcattattgcatttcggggaatcaaaaccaggtatta

SEQ ID NO: 157872 - DNA, 309 bp, Arabidopsis thaliana landsberg
tgagggaaattactttcaattatattgaacctgattcgccaaaagaatattacaacagtggcgatcagatcaagatcaagatcagttgtataaatcacctctatacattattaataaatgcttgagagactaaatgaaaatgagaatttacagattcctcttttgaaaaatcaaaagctcttgtttaaaagctcttcttcttcttcctttgcttattcactgctgagtattatcaatggtagtgtctttaccagaggatgttgttgctgcttgtcttgtttcaaacacagagagtcttctagatttccc

SEQ ID NO: 157873 - DNA, 748 bp, Arabidopsis thaliana landsberg
aaacctgttaatcgcccatccgtgaggcacgcgagtcacaaccatccgctgcgtgtctttaaagctcgagacgaagatgaggtcgtttgctctggatgcgagctcgagctaaccggacaagctttcaaatgcacaaagtcagaatgcgattacttcttgcacaagtcatgttttgagcttccacgtgagactcgtcacaaagctcacccggatcaccctttgacactgctgtattccccaccgtacgagtcaacttatacgtgtgatgcgtgcggtgagtatggatccggattcacttacaactgctctatctgccagtacgatgttcatgttggatgtgtgtccatgcctgagtccgtggagcgtgaaggacacgcacatccactcacattgctctaccgttctccttaccagaacggtttgatctttaactgtgatgtttgccaagagactgttccagataatctctggtcgtattattgcaaggaatgtgattatggcacgcatttacattcttgcgcggtagaggaagaagaagcagaagaagaagagccaaaaagaggaggcgaagtgcaagggaaacacaaagagtggtgggaataaaggaggaaggggctcagcggcatcggagttagctgcaatgttggaagctcaaagagagatggagaagatgcagatagagttacatatggagatgcaaagagctaagattgctaagaaagcgagaaaggcttgtctcaagttgatc

SEQ ID NO: 157874 - DNA, 251 bp, Arabidopsis thaliana landsberg
aagaaaacacacacacacacacatgttcttcgttgctgcttcgttgggttaaaaactttttttttgtttcttgctttttgcaaagtcaaagataacaaataaataaggtttgttccttctttcgatgctttctcgtttttgtttctcagatctgtatgttcttgatttgtttctatgtgtttgttatctaattctgtgttttgacttttgattactgggaattgaccaactctgattatgattcttgactc

SEQ ID NO: 157875 - DNA, 130 bp, Arabidopsis thaliana landsberg; identical to SEQ ID NO: 71888

SEQ ID NO: 157876 - DNA, 422 bp, Arabidopsis thaliana landsberg
ataggaaatttagagttaatggttgctggtcgtggtgaggataatgaaaatgaaatggggataatattgaggaagatgaagaggatgcagaggatgaataagcagagtctgatgcttcaacatttggtattattttcataatcttatttgttcttgattacgcaatgattgtagtttgtcgccataacttgaaagctggttgattggaatggagaagtttgcaacacaagcgttattgatgtctttttctccgttgattgcttttgcattagtatgattttgctttgactggctttgttctgatatttgttaacttctccattccaatttggtgggtttatgaagtgatgacgattaccattatatacaactttgatcctaatttgtattatttgtatcacaaatttcattttgattcaaaa

SEQ ID NO: 157877 - DNA, 419 bp, Arabidopsis thaliana landsberg
agtgaccttgctgatctctctgtgagatcacaaaaaattcaatatagcttttcctaaaaaaatctatcacatcccaaaagaccaaacacataatataggataaagagtacacaaaatcccccaccctccccaaaaactgtctttctttacgaatacaaccaatccaaaagaagagacgcaacacattgtatagtacacactttcttcataccataagagactccatcttcatcaaccgtaaccacacggtttcacaaggttctagggatgatctcttctgctaaaattcacaaaatctgcttcttcatttgaataacctttaagcaagcgactatgccaaatatttattgaacgagaatctctcacaaaaatgacaccatctgtgtatcagactctgactttgatccaaagcttaaaaa

SEQ ID NO: 157878 - DNA, 373 bp, Arabidopsis thaliana landsberg
acccaaggagaatggaaaaaacagagcttgaatccgtcttcactgacaccattgatttttgttaggttgcagagtctatcgaattcatcaaggtggtcgagtgaatcctccattggcagaccatggaatttgttcccctgaatcatcgagatgagaccactcttaatctcgaagttgttgttctggatagcaggaggtgcaattcctttccgttgacggtgatcacgtggtgcatctccagcaccaatgttggcagggccattttgttgattctgttcgtcagccatttcgagtggttgttgtggtatttggttggctgtctttctcctttctctgagttcgcgagctatgcagtcgatgttgtcgttgaaaa

SEQ ID NO: 157879 - DNA, 466 bp, Arabidopsis thaliana landsberg
aatcttggtgcatatatgatatatcatttgtttacatctttgttgtcgtcaagataagttattccatgattcttaaacaaaatttgtcttgcaaggaaaaacatatttattcgatatgaatactaatgggatggtttcagttctttctttttttacttctctatacttttgttttgttttgcagcgagtcaactatctttgaggagatgcagtaagcagtagactgaatggtgatcattgggttaaccccaacagctgatggcaatatacttccatcacaaacaaacaatccctctgcttcccagctctcaccattctcatccaacgcaccttcctccgcggtgactcccatcctacaactacccatctggtgagccgagaagtacgtcgtccaatactctccttttgtgccaaccccaccaacagcatcaacttcgtctagaaactcttccatggctaaatcaaa

SEQ ID NO: 157880 - DNA, 321 bp, Arabidopsis thaliana landsberg
tcaaatttcagaaattaacctgaatcgaaggataagaaacgagttgtaatggaccaacgacgaggatgaacatcttcatgacgtctttgtaacatttcaacatcgatgagaacgagtttttcacttttggttggatcttataccgattgaacaaatctgaggtggattgagccaattcgatgaaaacgagagggagaggaacgagagagaagacgaggaacaagaacaaaatgttgtgacagtagagatagtaatcggacttcgtggcggagtaatcgaaccatagagtttcgagacgtgtgaggtttcgtcccagtgcga

SEQ ID NO: 157881 - DNA, 328 bp, Arabidopsis thaliana landsberg
tgattccgggttctttttccttttttcagtactgtttgggtaaagcagagtgtgtgattccggtgaacaagagtacgttcgagcaagacaaaaaaggattcatgtcccaaagtcgagaagaagcttgcggtacaagtcaagtgtggccgtgacaagaagaactaaggatatatattttatttgcttcgctgaacggttttatacctaatgtttttgtagatactaaaattatgcattgattttttgttccatttttgaatttattaactaaaatgtttatcatacagatatatacgcgtgattgtatatagtgaagtttctaatcaaa

SEQ ID NO: 157882 - DNA, 403 bp, Arabidopsis thaliana landsberg
tgaaatttaccgatgatcctcctttgacacccaatgcagagatagccttgaaaaggccctcagcttgttgtttcatttgagactggaactctgaagacgacccttttgccgtgtttatgaaggacatgaaagctttcagctttgtgaagaaatccttgtactctcctttttccggagccatattctcaaggttgtccacaaaactaagcatacctttgtaagcaaaaggctcaaagtcttgggaatttttaggaaatttattcatgtaatgccttaataagaatacaccttgcgcttcatatatggtacttgatgctgctagtatcaacattagacatattgctataggaaatctagccattgttttgtttttttaaaattctattattatttttgggttttt

SEQ ID NO: 157883 - DNA, 492 bp, Arabidopsis thaliana landsberg
cgtataggtggggccgcgattttgctttctaaccggtctatagatcgtaaacgcgcaaaatacgagcttgttcacaccgtgcgggtccataccggagcagatgaccgatcctatgaatgtgcaactcaagaagaggatgaagatggcatagttggggtttccttgtcaaagaatctaccaatggtagctgcaagaaccctaaagatcaatatcgcaactttgggtccgcttgttcttcccataagcgagaagtttcacttctttgtgaggttcgttaaaaagaagtttctcaaccccaagctaaagcattacattccggatttcaagctcgcattcgatcatttctgtatccatgcgggtggtagagcgctaattgatgagatggagaagaatcttcatctaactccattagacgttgaggcttcaagaatgacattacacaggtttggtaatacctcttcgagctcatttggtacgagttggcttacacag

SEQ ID NO: 157884 - DNA, 967 bp, Arabidopsis thaliana landsberg
  unsure (1)..(967): unsure at all n locations
cgatctctganttcatctgaggttttatcaatctttgttgtttgattttgtttgtaaagctgtgatttttcgagtttctgtctcttattttccttttcgatttagttttctctagaaattgttgcgatttggtagataattattgacatttgggtttcgtttttgataggaaagaccaagaatgccggaagaaggaacttttattgcgagagtgatctcatacgttgcgaacgagttcatagttaatggtttggcaaacaggtactttcattccttataatcgatttagggtttgtactttttaatgatgaattgggtagatctcaaaaagtaagcttctttctctggctgattggattgaaaatatgttccttatcggctcgttcaatattgaagcaagattaatctcaacttcagctggtttgctacgtaatttaccatacgctgcagcgtaggaagtttgagacattttgttttttctctctgaaatagagtttggtttttgttttgttttagtttcttgagcctcatgctctgcatcttttggtgtatgcaatttgttcattccttttgcttctgctcaaagctattcgataatttgtaagagaacattttgtcttgagctttgttcacatgagttttgagataactcgtgttttactttgtattgattttcgatatttcaatatgtttttttttgtgtggattactgccggtgatgattttcgtaggcttgtcctgaacaaagacatgacgttaaacgtgaatctaagagactgaggctgttatttgtttgtttgtttatctttatgatcttcttttgatttacttgatgtgaagtctcagtgactccccttgcatactcactgacggatctccaatttgtttattttctgttgtggcagccatgctttccagagatttgctgtgaggacttcaaagagaatagaaaacctctctaaaatgg

SEQ ID NO: 157885 - DNA, 2848 bp, Arabidopsis thaliana landsberg
  unsure (1)..(2848): unsure at all n locations
atggctgaagaacagaatcagcaaaatggccatgccaacattggtgctggagatcaccacgtgatcaccgtcagaggaagggaatcgcaccacctgctatctagaacaacaactttgagattaagagtggtctcatctcgatgattcaggggaacaaattccatggtctgccaatggaggatccactcgaccaccttgatgaagtcgataggctctgcaacctaacaaaaattaatggtgtcagtgaagatggattcaagctccgtttttttccattctccttaggcgacaaagcacacatctgggagaagaatctgccccatgactcaatcaccacttgggatgattgcaagaaggcttttctatcaaagttcttctctaacgccagaactgcaagactcagaaacgagatcttcggctttttacagaaggctggtgaaagcttctatgaagcatgggagcatttcaagggttataccaaccaatgccctcatcatggcttcactaaagcctctctgctcagcactctttatagaggagttctaccacacatttttttgcttctagatacagccagcaatgggaatttccagaacaaagatgttgaagaaggctgagaattggttgagaaccttgttcaatcagatggtaattacaacgaggactgcgataggaccgtcagaagcacagctgactctgatgacaaacacaggaaggagatcaaagcgctgtatgacaagctggacaggattcttcttagccagcaaaagcatgtgcacttccttgttgatgacgaaaaatatcaggtccaagatgggagggtaaccagttggaagaagtcagctacaaagggtataacaacttcaaaaccaacaaccccaacctctcctaccgcagcacaaacgttgctaatcctcaagatcaagtgtatcctccacaacaacaacaaggtcagaacaaaccttttgttctttacaatcaaggttttgctcctaagcagcaatttcaggggaattaccagccgcaaccaccacctgggtttgcacctcagcaaaaccaaggtcctgctactcctgatgctgacatgaaacaaatggtacaacaactgcttcacgggcaagcttctggctccatggagatggcaaagaagatatctgagttacagaacaagctggagtgtagctacaatgatctcaatgtcaagatggaaacactgaataccaaagtccgatacttacagggacattctgtatcttcttcagctccaaaacagacaagccaactaccaggcaaagcaattcagaacccaaaagaatatgctcatgctatcacactgcgtagtggaaaagcacttccaactagggaggaaccaaagacaatcactgaggacagtgaagatcaagatggggaggatttaagtctcgagcaaccagtcgacctgtcacttgagcaaccactcgagcatccactcgagcaaccactcgggctgccactcgaccacgttactcgaccaaccactcgacctatcttcccagtggcatcaccaactgctccaaaaccagttgctgtcaagaacaaagaaaaggtctttgttcctactccttacaaactacaacttccatttcctggccgtcacaagaaagcgttggcagataagtttagggctatgtttgccaagaatattaaggaggttgagttgcggatacctcttgttgacgctctagagccaatcccagactctcacaagtttctgaaagacttgatcgtggagagaattcaagcagtgcaagggatggtggtattgagtcatgaatgcagtgctatcatagagaagaagatcattcctaagaagcttagtgatcctggttcattcactataccatgctctttaggtccattggctttcaacagatgcctatgtgatttaggagcatcagtcagtctcatgccgctctctatcaccaaaagattggggttcactcaatacaaatcctgcaatatatctctcatcctagctgacaggtcagtaaggatccctcatggtttgctcaaaaacctaccaatcaggatcgaagctgtggagataccaactgactttgtagtcctggagatggatgaagaacccaaggaccctttgattctagggagacctgtcttagcaactgtaggagctatgattgatgtcaagaaagggaagattgatctaatccctggcaaagactttaggatgacctttgatgtcaaagacgcgatgaagaagcctaccatagaacgacaactcttttggatcgaagaaatggnnnnnnnnnnnnnnnnnnnnnnnnnnnnnnnnnnngaagaagatcatcttaacagtgctttaaccaaaagtggtgaagatgggtttctgcatttggaaacattgggataccagaagctgttagactcccataaagcgatggaagaatcagaaccctttgaggaatttaatggaccagcaacggaggtaatggtaatgagcgaagaagggtcaacacgagttcaacctgcacactcgagcacatactcgaccagctactcgaccttgtctgccaacgaatttggggagccgatcatcccaagttcagatgactggtctgaactcaaggcaccgaaggttgatctgaaacaacttcctaaaggtctaaggtacgcattccttggtccaaactctacttaccctatgatcattagtgctgagttaaatgatgatgaagtgaacctgctattatctgagcttagaaagtataggagagcaattggttattcattatccaacattaaaggaatttcacctagtttatgcaaccataggatccaccttgaaaac

SEQ ID NO: 157886 - DNA, 153 bp, Arabidopsis thaliana landsberg
ccttggatgattctctcaacttgcttgatttctggtaaatatatataactatggatgcttaaagtttaacagaaatacaaattcatttggtatgttgtgtattggagcaatcctaagacttgattcgcgggtctagctaggtttgggatgatg

SEQ ID NO: 157887 - DNA, 162 bp, Arabidopsis thaliana landsberg
gttcattgtctttggtttctgcacacagcaggaaattcacaacaccaaacgtgacacgcctcacagatcaattcagtaagatcgccattgaaaatggcttcttcagacgtttcggagctcacaatattcaggtcaatggctccctcgctaagctcactctcg

SEQ ID NO: 157888 - DNA, 120 bp, Arabidopsis thaliana landsberg
tgagagagtgagaactccattgttgcagtgtgttccatgaactcctcctcaaacaactatggcgacgacaggttcactccaatccttcaccggacttcgtcaatcatcaacggagcaaac

SEQ ID NO: 157889 - DNA, 257 bp, Arabidopsis thaliana landsberg
ctttgtcaatggtaaatgagctgaggcagatagtttctatccaaggagacccttctcagagaatcgcagcttacatggtggaaggtctagctgcaagaatggccgcttcaggaaaattcatatacagagcgttggaatgcaaagagcctccttcgtataaaaggcctccagctatgcaagtcctgtttgaagtctagacattgtttcaagttcaagtttttagcagcaatcggtgcgatacttccgggatctaggta

SEQ ID NO: 157890 - DNA, 190 bp, Arabidopsis thaliana landsberg
cagcaaacaaaacaaagatttattgaaacctgtggcgatataacaataagtaaatcatccaagctaaagtagaaactaacctgaattgctgcgtaattgaagtgaccaagatcagcaaacatggcaaagcgcatatagatagattgtcaaagatagacaagtgacattatatatggcgacattaacaata

SEQ ID NO: 157891 - DNA, 261 bp, Arabidopsis thaliana landsberg
cctagtaatgaataggtgctctttggggaggatacacatttgcttaagtcttgtaattcgaatcaaagctggaagggaagaagaactcctaactttatgttcaattctttggcatattaagatgctttcttttcttgtctctaaaagaaatttccagcataactctattcattactttgggccttgtagcaataatctcaagcagcaaacacaaaattgttcttcctctcctggtatttgccttaatcccgtacagatgtc

SEQ ID NO: 157892 - DNA, 461 bp, Arabidopsis thaliana landsberg
ttacgtacataaaactttacaagagtttttcacacctgaacgggttacacacttacaacaaacacacatcctctaaaacatggacgcatgtttaaactctctctcacaacatacaagaacaaacaaacaaaaaccaaaccaagattttaaaaccaatcgactggtcaagtagcaactaacttatttccaatccagaccaagaaattcgaatctgatccattttaagtggagaggatgttaagaagagagactctagcttgtatcattaccttgaacaatccttcaagtccctcttcaagctcttccatggctgcctctacaccttcggatctaaccaatgcacattgaaccctctcagatacttcttcactaatctttttctcttcttcttgatcttcccttgtcatcatcacaacgagcttcccaagctcagattccatagcttcaagcacgagacaaga

SEQ ID NO: 157893 - DNA, 1204 bp, Arabidopsis thaliana landsberg
  unsure (1)..(1204): unsure at all n locations
caccggtattcccccatgaacatcgagttggaggatcctgcacggatgttaaccccatccatcctttatccattcttgactttgatcttgtccttggccaattaggggttgttgactgtgcttgaggatgaataacctctggctcagccgtaacatctcttcttccagaggacaagcgtttcattttaggatctattccacggacatattcagacggctcagtgctggcatgtgtgctgctacaagtgtctaattcgcctacgcttggggtcattatggagtcaatacttgataaactggaggctctaggaaatccttctctgcttgatctcctcattacatcagtgtagagatgttgcatatccacagcttccttttcaagtcgaattttgccttctgcatcctctttttgtgccggaagatattccacttcatagctatacttcggcaaacacatgaacttgaggaatcnnnnnnnnnnnnnnnnnnnnnnnnnnnnnnnnnnnnnnnnnnnttcagagagctccaaaactgcaaatagataatgacaagaaaaaccatgaaatttagttatagcaggtgaatgccacaaacattatacagtattcatgaaggtaattatatgtgcaataatcctgacgtcaaacacgagacagcgtccaatagctcaaactaatacatcaaacacacaccggagctgttaaagaaatggagagagatttacagccttttgcacaagttcaatgtatttgagtttatccatgatacgtttgaataactaggcgattttctgcttctaactcatcatcagaagagtgcacattctgcaatattctatgaaattatgtgtcttgggagtcagcatagtgttcacactgtgccagttaaaatatttagaagataaactgaaaaattacagtaaggaagatttaaaaactctcctctaaaatgcatgaaagatctaaacagttgcagacacggtgaatgaaacaaagaagctaggaatacagattcaaacctaactacacttgagaaactgtttatcattagaaaatcattacaagacaaagcacacaggtttcctcacttaccatcgctaacaaaaccatattaggaaacagtcattccaaagtgtataataccgttatgaatccattcaacattaaagacatcattatttgctagtccaccctttaccaaaaaa

SEQ ID NO: 157894 - DNA, 337 bp, Arabidopsis thaliana landsberg
ggcggtttctttgctttctgcaactctttcttttcattggttctgtagatttaaactcacacattccgtgttttaggacaacaaacttctcagacaaaaggggcacacatgttctagtgttctgtttatggtttagtagtttattgaagattggatctaattaccaaaagggtttttatctttctccctccttttgtcttcagtggaatctgggaatcttaggtttgtaaaaaggtttaaactttatttcctttttaagatccgtaggtttgattgctgttagtgtaggactcagattaatttaggggttttcttgagctttaattaagctggagaa

SEQ ID NO: 157895 - DNA, 337 bp, Arabidopsis thaliana landsberg; identical to SEQ ID NO: 21216

SEQ ID NO: 157896 - DNA, 129 bp, Arabidopsis thaliana landsberg
taatgttactatatataaaattaaactataaaatataattatattagagaatgatacaaatttgaaaaacgggtagatataataaataattcttaaattttaaaaattactacttaaaaaaaaaatcac

SEQ ID NO: 157897 - DNA, 165 bp, Arabidopsis thaliana landsberg
  unsure (1)..(165): unsure at all n locations
catttgctgcttcactcggatgatagggatcccaaaacacatatntatccctctcttcacacaaactcgaagtcggtccgcacggaagtatacccgcgtattgtcctccattaccgcaacaagcctttgtcgcacttttgaaccctaccaagtttacaaatccac

SEQ ID NO: 157898 - DNA, 1148 bp, Arabidopsis thaliana landsberg
attgtgtggtcctcagaaggtagcacatatcttataatggttatgaaaagctgaggaatggtttcaccattcagcaaaagcataattgccttcttcatggcatcaactttagcttcaacatcatttccttcgagagcttctttaatctcattagcaactgctggagtccctttgtcatagtgaacaagcatggtactagatttgtccatcttctccggtgctgcacaaaaagtgaaagagaaaaaaatctgtgagctcaaatgaaaaggaaaaaccattcacgaacaagtgttcctttgttaatataagaaatagaagatgaatagagcaaaattgttacaattgattaaagacataatgaagtatagatcacaagtaaaaacaagatatcaaaacttttaatatttctggcaatttcaagttcgaattactgaatataagcaccttactagtgtcctcatcagtgctagagtaagttctatacaagaagttcaacagtatcatcggcgataatccatacctctctgcttggatttcaatacattgaatacatgatctctattctcgaatccgtggtttatgagaaaacatcataatttcagaagaatattcggtaatgtccaattagagacccaaagatgcaaaacattgacaaatctaaatcctcagatccagcaatacacatcactgtactacaactacgaccaatataataacataaaaacgaaaaatcagttaaaacagcttcggatcaaccaaaattcaaaaaaaaaaaaaatgcgatctatctccccagattagatgaacaaacaatgaaatctacataattcgcagtctcactcagctgcacaaacatgaaaatcggtttcctaccggaatcagatcaatattcaacgagatcaaacaaagagcgccagaaaataattgaacattgtagattttcacaaaggaaaaggcaaaagtgggatcgatctctatgaaatctgagtcgcaagtttaacacagagagacaaacctcaaaggtacgagatccagggagagaggaggaggagatccacagtaacacagctttggatccaagagaagattttggatctcggaaaacaaaacactcgcaccaaggaagtgagagatcaaatgtgcttaat

SEQ ID NO: 157899 - DNA, 134 bp, Arabidopsis thaliana landsberg
aaaataaaataactggattataaaatatttttggatagaaaatatttcttgttttttttttcttttttttggatagaaaatattcatctcgtagcaatgctagatctccaaatatgaaaaaagagtagtgaaat

SEQ ID NO: 157900 - DNA, 658 bp, Arabidopsis thaliana landsberg
tcaaacctcgctactcacaacaacgatgatgacatcgataccaaaacaaaggtcttaattctaatcggtttcatcgttgttatcaccgtcttctatctcttagctattggatcaatcgcttatagtgtgtttcaaggattctatggtagacctgtgacattgaaatctgcagtgaaatttacctcttctcgctactttgacctcatcgaatctcatcgttttagggggttttctgattccagggattttagctttcttgttggttaagcttattgagatcattcccggtgtagaattcgattacgcctcttcgtacttccaaggtttcgtaaccctagtaacgattatctcgattgcggttgcggttaagctctatgtgaattggattcttgcttgggttgttgttgttgttgaatcggcttggggtataacaccgttgaagacaagtaaacgcttggttaaaggaatgaaatgtgcttctttgtcgattatcttcttcttcgcttcaacggaatcgattctcgtttggattagtaccttagccgcctatgctctgctcaacgataatgagaatggtgggaagtcgtggaaaggttctttcttttttgtacagaattggatcacgtccgcgctgctaacgctacttaatgattgtata

SEQ ID NO: 157901 - DNA, 1069 bp, Arabidopsis thaliana landsberg
tctctcaagttcttgattttaattaaagatgggtaaagacgaccaccacgaacaagacaaaggattcttctcacatcataatcatcacggccatgggtatccgccaggagcttatcctcctccaccgcagggagcttatcctccaccgggaggttaccctccgcaaggttatcctccaccacctcacggctatccaccggccgcttacccacctccacccggtgcttatcctcccgccgggtatcccggaccatccggtcctcgtccaggttattatttaatcaaaaatgttgtcttatgtggttatgtctcttagtcttagttaaacgcccttgctattaacaaattagtccgattggtgtttgttttgagtggtgttttatatagtatagttctcaaaaatattatgagaagacaaaatgtttctttaaagggatgcatatagttaatcttggttcattcaaaagccaaaataggttctttaaccaaatcttgcgttatgcgatgtgcaattccaaaaagtaaagcttggttttaacgaaaatgataataaatgatttatgctttgattttctaagtttttcaaattcgaacaagaatttaaagaaagtttcttgcgggttatatcaaccaaaaagaaaccaatagtaaaataattaatgtcttgatgaataattgattaaattctttttatgatataatatatgtggctttttgttcagttaaaaatgtttttttgttttgtttaatttagaaacatagaagaatgtggcttttgttcagtgttttttttttgtcaacatggctttggttcagtttagtatggattataaataatgctacaatgttttaatatggattataaataatgttggtctagttttataagtccaatttggtttgataggttcacatgccaagtaacctttgattgaatgctctcctcatgtgaatatgacagggcttggaggagaagttgcagtattgatagcaggagcggcatcagaaaaaacaaaaaacgatgggaggtctccatgcgggtcatcactgaggtctacgggcagggcgg

SEQ ID NO: 157902 - DNA, 282 bp, Arabidopsis thaliana landsberg
tatgtctatgaatgtcaataatatatgcatgaccagtgttgtatccacttttgaatgttgagtaaattactattttacatggattgcccatgcattgagaagatgctatgttttatgagagctctatgatattggttcgtttttcggctagattcacacaaacaactcttctcttttccttctcgatcactcttatggctgctctcagagtctccgttttcagaggccaaaacaggtcgcaggttgatggctggcaatggcagcatcgactgcttccggtgt

SEQ ID NO: 157903 - DNA, 293 bp, Arabidopsis thaliana landsberg
tcccatccatgctttaaacccctcgttcactcgtctttcaacgtctggtgtgaattccaacggattagcttcaagcatctccaagccctgatcatttctgttcccaaactctccttcgtcaatagttaaagcagctcttcttctaagggagaaagcagttccagcatacaagattactaaaccccatgaagaaatctcgtagcaccaaaacaaaggcacagaacagctgcttcctaatgtgaggaggaataaaccgagaaatatagcaaggagaccatagatgatagcaaaca

SEQ ID NO: 157904 - DNA, 223 bp, Arabidopsis thaliana landsberg
tggttttctcaatctctttgaattgagtctcccagaaagattgaagctgttgagtgagctgttgttgttgttgctggtggatctgatggtaagctggatggtctgaaccggttggtgtagtggtcatggcgttggtttgatatgggtttgaaccatagttcatagctgatgattgtccttgttgatccatttctctaccaaactaagagaaacatttttcaaa

SEQ ID NO: 157905 - DNA, 211 bp, Arabidopsis thaliana landsberg
ctcgagtcaatcaatctctctactttaatgtctttgacttgtcttcctcgttttcttctacctttttatattttctctcttttcagttttctctagaatatacactagtaatcagtttgcgtttgataataattgatgtggcaaactcttgtggaacttgatgttcaacattcatgtctccggtgattagtgaatccttagatccgggttt

SEQ ID NO: 157906 - DNA, 146 bp, Arabidopsis thaliana landsberg
tgaatttggataagaaaggagccgcctagagagaagaaggcgatccatggcggaatctgtcttctcttgtataccagaagacgtagcttcaaaatcttcttcaagctccaagacgatcaagaaactgggctcgctcgcttgcgtct

SEQ ID NO: 157907 - DNA, 244 bp, Arabidopsis thaliana landsberg; identical to SEQ ID NO: 60191

SEQ ID NO: 157908 - DNA, 125 bp, Arabidopsis thaliana landsberg
ccaaagcagatcttcttcaattttaagattttcatgatcactgttaaagctgactatcactgcggggaattaaaagatgatgctagtatacaaaaagagaagcatggtttcagattggagaatca

SEQ ID NO: 157909 - DNA, 2164 bp, Arabidopsis thaliana landsberg
tttgagtctttatgttatttctcgagtctttttagtgtttattcaggtattctgtcaagtgggacaacaatggagatgaggagacattttggtgcaagagctaagaaaaataaaactaaagacgatttcagattccagattcagagggagtgtccaccgacaccatttttggcccagaaaagtccatgacgctttcaagttaaccgaagtggaaatttgccccaaaagacttccctatttgcattactagtccctggacgttttatagggtttatatatagttttaaagttcattgtttagacctaagttgcttttatcaagttccttgcaattcctattttcataaagacattaactattcatcccttgttctttagagattcatttagttctcaatacagtgaagagatcccttcattctccaatcttatttgctgtgtttatgctttctatatcaaatatgttgcttgtttctttgattatgtctgagtagtttgcttgttaggtttagggtttctcattagggattcatatggtttagtagatcgcccccctgttaggtaatctgtagaattcttcatctttgattgttcataatgctagatctagattgatcacctagatcttgaatccagacaatagatatgcccgccataggtatatgtagttggatctattatttgatgagcctggtttatatgtgtgtaataagaatcggcctatctactaaggtgaacaatcgaactcgttaagaatgcatatttaggttaataatctctcggcttttccggttattcttagctatagatatagggagtggtccaactagctacactcagaattctcagttccagcaaccgcttcagaatagcaatagttttagcttcacaaggaactatgatcttgcttcataccaagccccccctccacccacacctaaaagcaagctagaatcattgttggaacagattctggaaggtcaacagaggatcttagagagacctatccatagatggaatgagagcagcctcactacttcttggcattctgcttcaatggaaagtgagtatgagttagtgaagattgaggagagtgacaattttgcagttgcagaggcagtgtctaacgacaccaacccttggtgtcgatcgacaccatcgcatatatacgagacatcaggctgtgacgaagcagaatcgaccaagctcgatattgatctccaaaatcactcgaaacacattgatagtgtcgaccgacacctcttgggtgtcgatcgacaccagtaccaacctgaggaagtgtcgacgtttgatggagcagaatcgaccgagattgacagagcaggatcgataccatatagtagtgtcgaccgatactcacctagtgtcgatcgacactggatgtagattgcagcgctgaattgtcaatatcctaagaaaagtcgagttgtagcacaagtgtcgatcgacaccaccactcgcgtcgatcgacacacatttttggttgaggaagagtcatctccgatagctacttttcaagttgggatcactgctgtcagtcctagcactactgtcacgtcacgcaatgcacctctcatacttcatccacctcctaaacggctaaggtactcatctcctcctcctaaacctccagatatcatcaataagactttaaaatttccaaagactattttacgtttaagcaagccacgagtttctcgtcgagcgcttgttctttctgttgatgattatgcaggaaaaaggagtattccacccatacctgagttccaccctgctgatgctcctctcttcctagatagacctaatacactaattgcttatacaccagtatggatgatgagaggtctttctccgcaatatttactgccaccatctgatccacctgatccccaaattccatcaaagtcaagctattgactataaacaagcgcttagtggtaggcaacacactggtttgatttttcttttccctttctttcttttcttttatttttgatttatttttcccaccttcttcgtgtaacacccgtcccgccatatagaccaagacggcatgttttcatctgatcttgccaaaaacgttttctttgaacttcacacacgaacaaaatattgcacacaactcttcacgcttactaacctg

SEQ ID NO: 157910 - DNA, 512 bp, Arabidopsis thaliana landsberg
attcaaagggtttaagccaaaacatgaatcaagccaccaataaaggacaagagttacttccccaatttcaagaacatcaaccagtatagtactttcagctatacgtagacagaaacacttgtacgagtggttgaatccttagtctaactgatacacaccctaaattacacacagcttttttatttatcaaaaccctattgcacttccttattcaagattatgccctttctcttgaagttcagtaataacctcattcctcattctcaaccacagtttctgagcctctttatcaaacttcttcttctccatttccttttggtaattatcagcctcaccttcggactcaacaattcctttcggtccaattgcagtaccaatcattcccccctttgcaacaaaatcctccatagcctctgtatcaccaggataaggaaactcacgccgctcatacaaatgagccaattctctctcttcctttggtcttggcttcagcgtccaccaacctaaaggag

SEQ ID NO: 157911 - DNA, 5893 bp, Arabidopsis thaliana landsberg
atggctgatgaacaaaatcaacagaatgaccctacaaacattggtgctggagatgcaccacgggatcaccgtcagaggaaaggaatcgcacctcctgctatccagaacaacaacttcgagattaagagtggtctcatctcgatgattcaggggaacaagtctcatggtctgcctatgcaagacccactcgaccacttggatgaatttgataggctctgcaacctaaccaaatcaacggcgttagtgaagaaggatataagctccggttgttttcattctccttgagcgacaaagcacacatatgggagagcaatctgccccatgactcaatcaccacctgggatgattgcaaaaatgcctttctggcaatctgcaagactcagaaatgagatttctggtttttcacagaagactagtgaaagcttctgtgaagcatgggagcgtttcaagggttacaccaaccaatgccctcatcatggcttcaagaaagcctctctgctcagcactctttacagaggagttttaccacgattagaatgcttctagataccgccaacaatgagaatttccagaataaagatgttgaagaaagctgggaatcggttgagaacctagctcagtcagatggaaattacaacgaggactgcgacaggaccatcagaggaacaactaactcggatgacaaacacaagaaagagatcaaagcgctgaatgacaagctggacaggattcttcttagccagcagaagcatgtgcacttccttgttgatgacgagcagtatcaagtccaagatggggagggtaaccagttggaagaagtcagctacataaccaacaaccagggtggctacaaagggtataacaacttcaaaaccaacacaccaacctctcctaccgcatcacaacctttgctaatccacaacatcaagtctatcatccacatcaacaaaaagagacagaacaaaccttttgttccctacaaccaaggtttcgttcccaagcagcaattccaggggaactaccattttccaccactacctgagtttgcacctcagcaaaaccaaggtcctgctgctcgtgatgctgaaatgaaacagatggtccagcagctgctacagggacaatcatctagctcaatggaaatggctaagaaattatatgaattgcaccataagctggactgcagctacaatgacctgaatgccaaagtggaggcattgaataccaaactcagatacttggaaggccaatcaacatctacctctacaccaaaagttacaggacttccagggaagtccatacagaatccaaaagagtatgcaaccgttcacgccatcaccatctgtcaggatcgagaactgccaactcgacctaaccctgatttcatcactggggacagtgatgctcaagaaggagaggcttctactcaggctgaagtctctgttgttgaatttaaccattctgctggttctcgccatctcattcaatccacctcggaagagaaggccgccataatggagagaatggggaaacgattcaaacctactccattaccctcacgtgctcttccgtggacattcaggaaagcgtggatggagagatacaagtctgttgtagcgaagcagctggacgagattgaagcagtaatgccactgatggaagttctgaaaggccccgatccggacgatcgcgggcgttacaagttctcaacctgattcctgatcctcacaaagatgtaagaaattctatactggaaaggatcaagatgtatcacgattcagatgttgaaagagatgccactccatctcgagctgctgaccagaggattgtttaagaaaagttagaagatcctggatctttcactctaccatgttccattggggaattagctttcagcgattgtctgtgcgatctcggagcctctgttagcttaatgccactctctgtggcaagaaggttagagttcattctatataaatcttgtgacctgactttgatccttgctgataggtcttctagaaaaccgttcggcatgctgaaagacctaccagtcatgattaatggcgtagaagtgcctacagacttcgtggtgctggatatggaagtagagcataaggatcccttaatactgggaagaccctttttagcgtcagtgggagcagtgatagatgtcagggaagggaaaataagtctcaaccttggaaagcatatcaagttgcagtttggcatcaacaaaactccacaagggtcaaccgaagatggaagaacctctggaaatgatagagcgatctcaggagaaggatatgagactgaaagagtgaaagaacttagaaagaagtctgataagcagaatgaaactatagagaagctggcccacaccattgaggaacttaggagtaagctgaatcagatgcagaaggaagctcaacctaaaggcgggattaacactatcccgagaaaagaattcacttcaagatggtctcaagatacagattatcctccagaagagaaggaagcctattttgaagaaagggggattgagtattctgctgcaaacctctccagggaggacgctgaatatgatgatggtatcagagaggattatgctaaccctctctacagttcattttcttcttgataagtgtgaggagtcaagctagagactttaaacaagctcacttgggaggaagtcccatgactatccttttaaataatttttactttcttgttatttttgatttgttttgtttgtgtttgtggttctcagaaagaaaaaaaaaaaaaaaaagaagtaacatgaagaagctacaaagtcttccagggagtctttcaagtttacagaggattgcgggatttcctggagtttttctaatgaacagagaatacagagaagagacaagaagacaacgagggacccgccgctgacgcccatgtcttccatgcaagagaccaagagacatggaatctcttcactcccactcaatcaccacgcaaccccaccttcactcgatatcaccttcatcactcgaccttgttttctcctccataaccaaataaactcgaccccatctttcttaaatcaacgctccctttttcttcttctactcgacctcaccatctttcttccccacgcactcgaccgctcctcgccatcaccacctctcaatcgtctcaacttcgctcgatcgcttcacgccatctctttcaagctcgtctctcatcaccaaacactcgactccttatcaccatcgttctctcatctctcaagtccagccatcactcgacaacaccaccgtttcatctcttccgcgagctcaagttcactcgaccgctcctctccttcctttcaaaaccactcgacttcgccattacacaccgcctctctatctcattatcactcgatctcttgaatcaccaccgcagctcgtctcaaacccactagttactcgatcgcggctccttcacagcttcatcgctctcaccgccatctctcaacatactcgaccttgcgtagtcactcgatctcgccgcttctcaacgcctctccatcgtttccatcgccgctgctctcatccccacgaaagctcgtcatcgccggttcactcgattaagcaaacaaactcgacctctttcaaaccgtttcaccatctctcgcctctaaaggtcactcgatcgccaagcacaaccaaggaatcactcgaccgcgagttcaccaaaccgaaaaaaaaaaaaaaaaatttggtacactcgatcggtttactctgttggtttgtgtttttggttttgttgggactaacgtattaacgtctatctttgagtttaattttgttttcaggttccgtaatgagtaacaccagcggagaatcctctatggaccctaattacaatgtggatgaagctgagtcctggtccgctagaccgagagagcaacatgtttaccagagcttcagggatgaatttgaacgctctacagcccgtcgtaatcagagaagagctgaaattgccagaggaaagagggcgatgtcaagtagatatgacctgatccctgaggatatcgagattgagtatgagccagaatcatggcgcagggagacgaagctgctgaacaaacccgacgaggttacagcggaggagtatatcagatttttttagatgaacgacttctggggaacgaggtatccctgctatgagactttagcccagctggggttactggaggatgtgcagcatctgttcgagaagtgtcatctggagacactcatggcttatccttacgctgcgtataaggaggagacaatcaagtttctttccacactgcaagtggagatgtatgagggtctcacggactttgagctggataccatggggttagggttcctgacgttctcagtggatgattagcggtatcagctttcgatcaagaagttggaagaactgttacgtttccctagtggaaagggaaccaaacataaatttgacagagaggagcttaaggatttgtgggcctttataatgttcaatctaccgctaaactcggggcggtctaagagcaaccaaatccggagtcctgtgatccgttactttcaaagatcggccgccaccgtcttttaattccagggagttatccggcgcccgtgtttaacacggccatggagatgatagattatgcgcttacagggattctcccccggacgaaggggaagaatgtcttgagaggcgatctcaacaacgcaccaccagtaatgcctctgttgatccatctgtgtggatgcaggaagtgcgcgttgacgaacgggaagaagaaggtgagaggagcactatgcgtgggtggcgttgtgacgccaattctggaagcttgtggagtaccgctcaaggaaccaggtttagcaccgaggatgatggacttggatcatttgcgcagatgtgagttcttggagtttgacatggctggcgactttcaccgctacaggttcgagcattcatcgattagaatcgccaacattcttctcccctgcattgacgctaccaggattcttgagggcaggaacattgacttcaagcctgcgcttgaagatctttatttcgagggcagtccgccaaccgaggagtttagtcacaccgaaggagctacaacagaagatgttgatgagacggatgatatagatgaggcggagtttgacacgagcatgtatcatttcagtgagcatatacctactgcgagggaaagcaagagtttgagcgaagctcatgggaacaacaagcaagctgcagaagtggtgcaagaaacaggacaagttactcgccaagtgcttaagggctatcaagtttctgaaggacaagatcatctgctcctcttccactacagctattccgcagggacatctccctcaggacatgccttcgaggagatatgacgcgcccgagccaagtcgccgcaggcctgagcctagagagcaggagattccgcatgtccctgcgaggcattcatcattcgagcctcgtgaatctgggaggaagaggaggaccacactcactcgatctagcagtaggagcagacaacttctgcagtctcgtagtttacgcgaccgcggtgctggccgcagcagaaggagagaggtcgagtatcctcagagcggtgctggccgccacagagctgatgaggtcgagtacccacctgctggagctgatacagaacaaggtggttcgtctatggcctgggagcaatcataggcagccattgacgagcaactacgttcattcttcgactgaggtaagcgcctcacttcaccattgtattatatcatctgttgtgatttgtttcttcattttttgtttctgtgattggatttgtcctgagtactctcttccaagtttattcgcacagtggactgtg

SEQ ID NO: 157912 - DNA, 428 bp, Arabidopsis thaliana landsberg
agctctctggaccattcctctgtatagatcaccctccacttgaatcccaattttccatacacactccaagtatctagcgttcaccttttgatcacccgaaaatggcctgcagatcattggaactccttcgccgatgctttctagtgtcgagttccatccacaatggctccaaaacgcccctattgcaggatgagaaagtacttccttctgtggagcccatttcacaatgtagctgatacatatgttttctacttgattatagggcaggaagctactgttactaagaaacctgcttttcctccattcccaaaacctacaagaaaactaataagtagctctgtaagctccgggcttatagattactctgcttctcatcttctttgaatgttctatatatacgagatatcagattctcgcttgtggacact

SEQ ID NO: 157913 - DNA, 276 bp, Arabidopsis thaliana landsberg
tttgccagctcgattatcggctgtgatcaaaaggctcaaagaaaagatattgttcttgcattggcagttgctagtccatgaccatgagaagtgagaactgacagattctgaacggctctaatccaatccacaccaccaatggagtggaggatttcccgggctcgttagggtagttctgtcatttgacagacaggtggcatgttgctccaagaacaagacccaactcctgaggatgccccaacactcatattcatatagtcatttcctatgtcatcg

SEQ ID NO: 157914 - DNA, 236 bp, Arabidopsis thaliana landsberg
tatagagagaaaaaaaaattgaatcaaaaccaaagcgaagcagtcaatggcagcattcagacagacaagaacatggtctctccagtttctatcttaattatacgtttctcaaaaaaaaaaagaccattcctttacgaccttcttgcatccaaggcaacaaacataggcgaagctaagagcttagtaccgtctgaaactgccatcatctcacaaaccctttttacttcgaagcgcct

SEQ ID NO: 157915 - DNA, 489 bp, Arabidopsis thaliana landsberg; identical to SEQ ID NO: 4050

SEQ ID NO: 157916 - DNA, 166 bp, Arabidopsis thaliana landsberg
ttggtgagaagagtaagtgggctggttttttattggagaaaaggcgttggtgaagtttctacttttgattctgactttttttttgccggcgatgccgacgccggtgactacggcgagagaatgcttgacggaagaagctgctcgtgccctcgacgatgctgttgtt

SEQ ID NO: 157917 - DNA, 203 bp, Arabidopsis thaliana landsberg
caaatatttttttcagttctgtcattcatgccgaacataaaacttgggtacaataataacaaaaaaaaagtaatgtgttagatttttccttgttaaccatttttctcttctcaaattttaaggctgttaataaatgagattaaaagaagcaaggacaaaaaaaccagagctctttcacatctaggaacagacctgagacctgt

SEQ ID NO: 157918 - DNA, 187 bp, Arabidopsis thaliana landsberg
gaagaagaagacagaggttaatgatgaagagagagatgtgagtttcgtgaagttgaagttaccaaagtgggaaattgagaaactgaggaaagagagtgagagtggctctgatttctccaacaagatcacacaactttgtctccttcacataccaagtggtttgattcatcaaagacagcatttgctt

SEQ ID NO: 157919 - DNA, 398 bp, Arabidopsis thaliana landsberg
tttgtttatcaaaatagatttttaggcttagcgattagaaaattataaactcagcagaaaatcaaaataagtatgatattatggagtttttatcacggtagagttacacctaaaacagttcaatctaattaaaaagtactccacaaacgaaacacctttttagccatgtgtgttcacagcttcccaaagcaagttcttcaacacaggattagtcgcatctctagcttgaatcgccgcgttcttcaaagtcctaatcgtccacacattagcttcccaccacgaaagactcctatacggaagattatgcttcttacaaagctccttaaccaccggtgatactgtccggagatgacaacgaggaagccgaggaaacaaatgatgctctaactgaaactgca

SEQ ID NO: 157920 - DNA, 477 bp, Arabidopsis thaliana landsberg
aaaataccaatataagtctcgttctctctaggaagttctaaactctcacagtattacgcaccaccaaaaaaattgcataaacggagagcgccctcacaaagtcagacatcttttaaacgtacatacaccagaatcccaattcgtctatccgggaaataaaagaagaaactccggagaagggatcatgacgagccctcatactgctcctttacggctcttgctgccgcattgtaccatgccgctgcagccattgcacctggatctggaattgatgcaaaaatctcagctgatacatagcttgatctcccggcctgttttacacaatctcatccgtcatttcaaaatatgaaaaccacttatagcataaacaatggcagaccgaaataatggtatgctaaactcacctgtgcttgcatctgtatggttgattccgctccggcagttgccgcttcgcctgatagaatgaaagcagatatt

SEQ ID NO: 157921 - DNA, 371 bp, Arabidopsis thaliana landsberg
gaaacagagagcttctcttctttctccattattcatcactttcttccccgaagatgcgtcctttagacgagaccgagacaaccgtcgtcttcgagaagctcttcaaattcgtcggcaacaacctcaagaagatcgtcgagaacccatcagacgaaggacccgaatctacacccggcagctactgcttccgcctccagaaaaacagagtctactacgtcagcgaagccctcgtgaagcgagccacaaacatctccaggaaaaacctagtctccttcggaacctgcatcgggaaatacactcacgccggtagtttccatctgacgattatgtcactcaatatcttggcggcgaatgctaaacacaaggtatgg

SEQ ID NO: 157922 - DNA, 209 bp, Arabidopsis thaliana landsberg
tacgactttttttctgtcttaaatataattatgtcactctctcaagccttgagttgagggatttgtttttaatttttatttcttataaacactatacgtatacatgtaatgtgtatcacatatacatatgcttccacttatttttataagttagcttccattacatcttttctctttcttgcttagtatcattctatgtcgtgttcttt

SEQ ID NO: 157923 - DNA, 623 bp, Arabidopsis thaliana landsberg
attttgacagagaagaaagtatttaccagttcaattcaaatgaagaaaagaaattacaaagcgtgtcaacaagaaccgaaattgaatttttttttcgtttccttctgtttttaaaatgaacaatttgaaacagagatttatttaagttaaagcaagtgcagttcttcttctactacttctaattaccatcatgaaggagaagaagaagaagaatgtggtaatggagaagagctttagtataaacggaacttctccttagtgttctggaaaacttgctccgcaatcgcagcaccatttccgtcagctttcttgatctccagactagatttctggtaaacccccgtgcctctcaaagcatcagctatgaagtcatcaaacccgatggctatagctgcttcggctttggctccataaaccaacctctgttcacaagtagagacatgagtactactcattttgatatttaaatgattagaagaagggggtttgtatgcagacattgtttcgacttcttaccttgagtctcgagagatggatggctccgaagctttttggacatggctcacaagatgcgtaaatctcgcattctgataactcgattttgttaagtttcttacatgcct

SEQ ID NO: 157924 - DNA, 495 bp, Arabidopsis thaliana landsberg
ctcatgattccacaaagtttttaagaattctgcagtttcagatttataatcgcttgcctaagttcaattcatcttcattccgggagaaaaagtctctagtcgcgatacttgagctactcagctttagggtttaacatgttaaggtctctgatttggaaacgatcacaggcatattcttcagtcgtcacgatgtcgtgagttcttcttctaaggcctttcgaattctatagaactgtttttcgaataaagcattgatctttattgctgccagagacgaatgaatcacttgtagggattttcattttggggacatagtctctgacccaacacttgatattactgaattgtgtgatttcttcataaaatcattgacaatgttgcatatactgatgatggtcttcttgtctttatctctttggcagttcaatcagtcagagaggaaatgaaaggcttttgtctgaagtcgctggttcacattcaagagataataaggta

SEQ ID NO: 157925 - DNA, 581 bp, Arabidopsis thaliana landsberg
gtctagagagatatatgctatattcaagttattttatctgatttagctcacgtttaaacaaggtttgatctgcagataaagagaagcaagtagcgaacacaaaaatgaggaacagagatagtgccaagcattatttttgtctgatttttgagcttgttcgtttcattaccgctggcggttgcggctgcggctgcggcaaacactaccgcctttatatatatattagtctttcgtctgattttgagatcagtttagttcatataacactattttgagctaaagaacttccaactatatatacacttaaaagcaaactcttttcattggtgaaaacttcattactctcgcgaatttcactaaaaatttggaattttaagaacttaatccaaaagtccggttttctcctctgcatcaacgagtgagttagcagaggcagtacgaggcccgcttgtggagaagctaagcgatctgctcagctcgttttgccaaaaatggttcctcaaggctttaagcttcgggttaaccgttgagaagctcggatccgacagcaactcttgcatcgctgtcttcccctctatgag

SEQ ID NO: 157926 - DNA, 926 bp, Arabidopsis thaliana landsberg
aatttccaaaagattaatttagggcacctctctctctctctttccctatctcttggcctcgtgctcgtgcagctgaagatccctgctctgattcgtcaaatccagtaagctaaatttcctcttaattttctggtctttaattactttatactccatatgaataatttcttcaatcgaatttttcatctttgggtcttaatttttttctcaactgattcagctaacattagtgattagctatttgctggatttcttcgattgcttgtcgtctctatgtttcaattgtattatgattacgacacattcttgttctgatcattgtcgatgaaaaggataaactttgaacaatcttctattacataaaattgaaactttttccaacatttctgagattttccaaatcaaattctcggagttgaattgaactctcaagtagcttacataatattcaaacttttgattatctaatcaaatctgtaattcttccttatctatgtggcagtggaagatgaggatgatccaaccacaaagaacagcaacaacacagatgattttgctatagagcctcgtgaagggattatatttgaatccgaggatgcagctaagatgttctatgatgattactctagacgattagggtttgtaatgcgtgtaatgtcttgccgaagatccgagaaagacggaagaattcttgcccggagattcggttgtaacaaagaaggtcattgtgttagtattcgtggtaagtttggatcagttaggaaacctagaccgagtacaagagaaggttgcaaagctatgattcatgttaagtatgaccggtctggcaaatgggtcattaccaaattcgtcaaagaacataaccatccactcgttgtttcacctcgcgaggctcgccataccctggtgagtacttaacttactta

SEQ ID NO: 157927 - DNA, 117 bp, Arabidopsis thaliana landsberg
accagctcctttagccactgcagattcaagatacgtgatgggcacagctctggctccgatcaccaccacggctagcactaaaatgcttgaccacatttgttttagtctcgtcattct

SEQ ID NO: 157928 - DNA, 395 bp, Arabidopsis thaliana landsberg
ggatttgtgggacccatatcggccataggatccatattagcagggatagattacagcggactggaccacgtgatggtggtggcgtgcggtggattactacccagcttctggcaggtgattaagagagcagtgaggttagagagaaggaaaggcagtgtggggatggtgctgggactagcgtgtgcggttgtgtgtctgactttcacgagacttgtgtgcttgcacacaccctactgcaattctgcacctgaggctgttaggtgatgactccttgtgaacacacacacacattctcttattccatgttgtaagatatgtatacttcaataccctgacttaactcgtgtctatacaaacttgtcggatgattggttgaatggaaaagaggatgtctt

SEQ ID NO: 157929 - DNA, 91 bp, Arabidopsis thaliana landsberg
  unsure (1)..(91): unsure at all n locations
gcctctaaagcaatatcccatatctaccaagcgtgttgtgcctgctgagattgagaaaactgangcgcaattgatgtagtgccctataaag

SEQ ID NO: 157930 - DNA, 163 bp, Arabidopsis thaliana landsberg
tgttgttgttcaccggagaaggagcttcgtggtgttttccggtggtggtatcggtggatgagccggtaagcatctgaacgacttgtttgaaagaagaagagtcagcttgaacaaaagttgttggataatgatttgagagatgttgatgctggtcatgatgatg

SEQ ID NO: 157931 - DNA, 240 bp, Arabidopsis thaliana landsberg
  unsure (1)..(240): unsure at all n locations
gcagtgtttcttcccacaatacgtcgttccttccatgcgaacaccgctctttgtcatcaacgccgccttcgattcctggcaggtccgatacatgcattatatacttttttgatatacacaaaacatttcaattcgttatataaatatacacaaatcggatacatttattgaatttggtaatattcttcagatcaagaacgttntggctccaactgctgttgatagggaaaagaatggaag

SEQ ID NO: 157932 - DNA, 601 bp, Arabidopsis thaliana landsberg
  unsure (1)..(601): unsure at all n locations
gtttcggatcatgactcttccactctcgagctcacctccaccgaatacctaatcgtcagtaacctccgtgacggcgtcgtttggcagacggataacaaacaacccggaaccgatttccggttctctgaaaccgggaatctgattttgatcaacgacgacggttctccggtttggcagagctttgataatccgactgacacgtggcttccggggatgaatgtcaccggtgtaacggctatgacttcgtggcggactctattcgatccttcgccgggattctactccctgagactgagtccaagcttcaacgagttccagcttgtttacaaaggnnccncnccgtnttggtcctccggnntttggtccggggnagccttcgtcggcgttccggtnatgncctttccttncntctcccggttccgtttcgttnncccttcnnctcccncggcgtcgttttggtncntcgtcccnccgttggtctccgtttccgagccgcggctgacgcggatcntggtcggcgcctncggccngctaaaaatgtacaattgggatccncaaacgcaaagctggaacatgttctgggtgcatccggagaaaccgt

SEQ ID NO: 157933 - DNA, 265 bp, Arabidopsis thaliana landsberg
  unsure (1)..(265): unsure at all n locations
agtaattggtgtngtcgcatgaacattcatcctttacccgacaacccccataaaaaatatgacttttttgtttaaactcttttttaaaaaagaataaaaaagtttcgttgaatccctcaaaaactttttggttccttacaatcgtcatttgtaactttcccagatcctctccctttttttgcatctctgttcttttagctcagggtttgtctgtcctgcaaaaagcaaaccctaaatcaaatctgggtttcgtctgtctgattcg

SEQ ID NO: 157934 - DNA, 178 bp, Arabidopsis thaliana landsberg
tatgtatctaataacccaaaatttatgaagacttttagattactttttataaatcttaaatgaataacacaaaactttaacatacttttaaaaaatcttgattgaataacaatagattttacatgacaatttatatcactaaaactgttctgaaatcataaacgaataacacccctaa

SEQ ID NO: 157935 - DNA, 214 bp, Arabidopsis thaliana landsberg
ctacatatgttgtatttattataaaaataacatttttaaacaaagttaatccaatacagcattatatgcaaatagtaaaaacattgaaaaatattatggcatcacttttatactatactattttttatgtaattcaaacaaagtatacaatgtaatttatataaaatattaatgtccgtggtgtatagcacgggttatatctagttttatgtaa

SEQ ID NO: 157936 - DNA, 289 bp, Arabidopsis thaliana landsberg
aaaaaaaacgaaagcgcaaagactaaggagaaaagaaattcttcgcttcttctccggtgtaatcatggtatagcccgcgatctcgattgtttcttattatcggtattcatgttatattagctagaattgtgttttgtacctccgatctgattcacagattcagtatgtgaaattcattattttgaggatttgatcgtcttatcaatgatttaatctatgtttgaatattgttgaatcacgggcaatttcgcatcacgccaaaagcattgtatctaacagatgcgaaaaa

SEQ ID NO: 157937 - DNA, 523 bp, Arabidopsis thaliana landsberg
  unsure (1)..(523): unsure at all n locations
aggattcgatcgaggatcaaggaaggtggatcaatttccaatctactgctcctacttcaccaacatttaaccttgttnnnnnnnnnnnnnnnnncattgatatgaaaaggtcagactggggaatgtccggaatgaatgggagaggggcagagtttgagtttgagaatggaacagttaagccgtgggaaggcgaaatgattcatgaagttggcgtagaagatctcgaactcactctcggtggcactaaagccagatgctgaaaaaccggtaaatcgaaacatgaaatcagtttgaaaatggtggtaaaagatcagatcagtctccttgtggaccataacagagaaaatcttcagcattgtacagtacattggagccggagctcgcatggtcgaggaaggtcgaaaagggtcgaaccttaaacataccgttacattctccgtttatacttaatttatcactctgatgatgataatgttcttagagatatataatatcttaattgatcacaggaaaaaatcggttt

SEQ ID NO: 157938 - DNA, 85 bp, Arabidopsis thaliana landsberg
attccaatgcaaacttgagctctctcttagggcccatacgtgggtatccaacaatgtgtgaagccattttgattttcttttactg

SEQ ID NO: 157939 - DNA, 180 bp, Arabidopsis thaliana landsberg
taagaaaaaacttgagagaagagcttcattttcaaatgtaatacaacacatcagtttctcaacgaatcaagaaagagttaacattgattaaaaacagaaacataaaacactaactagaacaaacacactcatgacaaattaaattaccaatcggcaaaacatttaatcagtatgaatata

SEQ ID NO: 157940 - DNA, 205 bp, Arabidopsis thaliana landsberg
ggaaattgtttaaaatttaaactaaatgattatttgttattaaattagattgaaattttcgaattatctaataacatattaccaaaataaataaatttacatatatacaattcgaattaaaatagtctgatatgttatggaaacgtttttaaatgatttctgaaaatattgggtagttacaaatttattgattttaaatttgatt

SEQ ID NO: 157941 - DNA, 356 bp, Arabidopsis thaliana landsberg
aaataggttaacttgagagtctctgctgcggtggcactttgatttggttaatgaacttgttgtttagggttaatttattgagcacgtcaatcacctgtaaactgaggattcgaaaccactcaattaccccatccttgggaattctttatctgattgaattctttgtttactctactgttgtttactgcatcttgttatctgtcgcttaatttctgcaattctttcttgttactcgaccttatactcgaccacccagttgtttggcaacagactgtgcggtcgagtatctgtgttttattttctgtctgttactcgacctgtcactcgacctcacccagtgctctgcaaagagctgt

SEQ ID NO: 157942 - DNA, 312 bp, Arabidopsis thaliana landsberg
cccccaacactccacattcatttacataaaccagatctacaatttctcagattccgacaaccggaattagaaaactagttatctccgatccatagaaagatcaatagaaacagagcaaatcttttagaggctttggagatataagtggttttaggagggtttatagattttagacaaaaaggtatttatatagaagaaaaaaagactatttgcttgattatgtaactgaagcttctactaagccacgacgagagttcctgtccgtactttgtttccggcggcttattctttagtttcaggggaatttttccg

SEQ ID NO: 157943 - DNA, 1188 bp, Arabidopsis thaliana landsberg
aaaaaaatatggatagtttttagtaacaaatatattttttatagtatccatatgttttcttagtaacatatatatatatatatatatatatacaagtggaaagtatcaatttgatataaagctagtcaagtttagacaacaaaaactagtcaaacaagataatagaatttgtttttagatatttattatgagttttaaaaatattagtgactgctttacaaacaagtaaagataaatattattatattttcctcttgatcaaattaatattttgtgctggtaggaaaaaaatcaaattaatattttgttgtttttcattttaaatatcatatgctctctttctcgtataatagtttcaattctctttttattatcatggaacactgaaaaaaatagatatagagaggtaaaatccgattaagtgtcaaagttgctatgtaggcaattgtatagtttatctaagattataaaataatcctacgctttgaatcgttgaaaatgtttgacacatgtatggtctcgtctcgtctttctaaagctccaaaagaaatttattaaaagcgagagactttagtcaatacttgcatttattggattgagtcatattggtctataactacaatattaaaattgatcaatacgaaagttgggcaataattcagacggtcaaccacaacaacataatttggatgattccaaatcaagcctttaaacttccttcacaaattgaaatctttgataaattttaatggatacttttttaaatgataaatgactaaatcagacactgagaaaagaaacaaaataaaaaagtttaccgaaggtagaaaaatacatgttcaagtttaacaaactcattaaaagattttcgtgttttttttctttctaaccatgcttttgctttcttctaatgtgtatgtacctgaagacaaatagagacatgaatgctctcttcaccattcgtgtgattacagtgcgttttattttccgtttctgttcacacacgtctcttcttttctcagttccattccaacgccatgatcttgatccttgggttttgtcgtcaaacttccttcacggtttgtgtaatttgaacccaaacactctttgaacatagttttgtgttgccttcgctggcttgagatgcccataagtcatcaggaacagatgtggaaacgttgtcccaaa

SEQ ID NO: 157944 - DNA, 223 bp, Arabidopsis thaliana landsberg
ggtgtgtgtggatgtgaccgcttcactagtagttctattagccatgtacttagaacgatagtgaaaaaagatggatacagaggacttctaaggggatggctcccgagaatgctcttccatgctcctgcagcagcaatctgttgctccactctatgaaggagttaaatctttctttaaagacttaaatgtcgattcaaacactgcctgaaaaaagacaaaaggg

SEQ ID NO: 157945 - DNA, 140 bp, Arabidopsis thaliana landsberg
atttttcttctccaagaaaaaaccatagcgaaggagtaaaaaacgaaggccggaattatcagaacgggacagtgacaagggtttccctgagctgacggaccctttcaattattcatcctcgtgagttctctcaccgtcgt

SEQ ID NO: 157946 - DNA, 105 bp, Arabidopsis thaliana landsberg
gggacactggttcggttcctcgggtcggttctggtgttggcatgtttctgagctgcccagtccaagctgtgagtaatccgtgtgaatcaagcgaaggcttggctc

SEQ ID NO: 157947 - DNA, 287 bp, Arabidopsis thaliana landsberg
ttgtaacctaagtagggacaataagatggtgggacaatggtttggatccacgggtcggttctggtgttggcatgtttctgagctgcccagtccaagctgtgagtaatccgtgtgtgtcaagcgaaggcttggctcagacgacttctaaagtcggagggcaatgcgtgaggctggtttcacagagcagcgactacttcccgcttacagcagtggacggatcacagtttagcgtcgctcagaaccactatggcctgctggtccgatctcatatgaaccaccattttttt

SEQ ID NO: 157948 - DNA, 641 bp, Arabidopsis thaliana landsberg
tcgactttagtaaaaaaaaaaatcggaatctgaatccgatcaaatctgaacaacaccggcgacgaatctctgcggcgtagatttagatttcatcccggggagacttaaattgatgcagtagtgaaatatcacggcgaagggatggtttgttggtaaaagagccaattgaaatcagttatgtcatcgggaggagccggagagtacaacgaagacagacatctgttacgatccaccgacggagatgaagtcggcattggcggaggagagggtgatctagatgttgaatctcagtctccggctatcagaagtggagctggaggagttagggatctgttcaagcatatagatcggagattttctctttccggtcgtcgtttaagttttaaacggatggagaatatcagagtcgatagagagcgccataatccttcttcttcttcagcgttttcggctgctggagaagaagatggtggtggtatcagtaatttacatagcgttgatgatcgaaatgacgagtacgggtttgatgaagaagttctcggagatagtgctccacctgagtgggctctgcttctcattggctgtcttattggtgttgccgctggaatttgtgtcgccggcttcaataaaggggtacggtc

SEQ ID NO: 157949 - DNA, 248 bp, Arabidopsis thaliana landsberg
ttctgggccgccacggctggtgttccttctgatgttcagattcgactggttcttgctggtttatcactggtatcagctgcttctgcatatgctttacatgaacaagagaagaactttgtgtttagagattatgtacattctgaaatcgagtagatttgttgtgtatatgtataatcatcatacaaagtacaaacattgtaaatcaaaatccagaggaacttttagcactataaaaccgatttaaccgt

SEQ ID NO: 157950 - DNA, 550 bp, Arabidopsis thaliana landsberg
gacagtactctagcttctccggcgactccaggagcgcctcttcgcaccctctcttcttctctcgctctctgtttctgaaggtttggtcgaatatctcatcgatagtatctttgtataatcctctattcattaacgatgtacgaagacattgataacggatcgtcgattgctgattcatttgtgcataggtttaggtatttttgttcgtcttgatgtatagatgatagcgattaagtaaccattttctaaggaaatcatcattagggaaagtatttaggggttttgatttagtagtgagtgagtgattaattgattgattgtctgtttaagagatatttagggcttctttcatgttgaatgactctgttctctaatatctgttcttagtgagtgttaataaaaatgaatactcactctgtttgattttcttatggtttggcaacaagttccacatgacagttcttattattctagaccttggtgatatagtaattgcccttccctcgaatatatgcccttttacttgcaagaacttccttaagctttgcaa

SEQ ID NO: 157951 - DNA, 97 bp, Arabidopsis thaliana landsberg
taaccaactaacgcatataagactttagattcaacaatgtgcttaagaaagtttgtctattgaaagtaaaaagcgaaacagtgttactgctcgttag

SEQ ID NO: 157952 - DNA, 83 bp, Arabidopsis thaliana landsberg
gctagacgaactgcgagctaggaaagcttcagacgaactgggagctacgaaggctttaggtcggttgacttatgtcgaccacg

SEQ ID NO: 157953 - DNA, 213 bp, Arabidopsis thaliana landsberg
aacacatgaactcttaagctgcttatgcatacatagcgcattattttacgactcagctgcgtgtatatacccaccaccaatatattgcaggattcatcatgacaggagcttttgctcatggagctatcttttttattagaaattacaatccagaacagaatgaggataacgtattagcaagtaatgttagaccataaagaagactatcagtat

SEQ ID NO: 157954 - DNA, 119 bp, Arabidopsis thaliana landsberg
ttattaacttattataaattcacgatgcatttacatatatcttttgcagtgaatagatatatatacaaaaagaaaagaaatgaaagaatatgaaaatatacttagacaacaataatatt

SEQ ID NO: 157955 - DNA, 213 bp, Arabidopsis thaliana landsberg
tttgtctctccaaaacgttcttcctccaacatctcaacgagtggtagtaatggatcccaatgttctcaacgttttcaatgctgtatttgacccggtgttagatactaggtaggtcgtcggagaaggagaaagcagagaattgcatttggagcttaaatttgataaagaaaagattttaccatagcctagaggaagaggccatggctgaagtaa

SEQ ID NO: 157956 - DNA, 181 bp, Arabidopsis thaliana landsberg
attgttgatacatcaattgggcctcaatgatcagccggcccatttcaaggaataacggcccagccccgaccatcactttagaacccgaaccagcccattgagtcgaaacccggcctggtcgagatgagagtttggctgcgcaaaaaggggcactcccgggaattcaccttgcgtaccctac

SEQ ID NO: 157957 - DNA, 258 bp, Arabidopsis thaliana landsberg
attgggtttcgacggtgctcatgatgttgagcattgtcttgctgattctggtgtcgtcaaggatattattcgttatacaggagaagcggaggagattcctttcgtttattctcttccccgtttcccttttaacagaggaaaaagaccagctcctagcttttccgatattggagtagaagccaccagatgagcatattcctgtttggcttcctgcgtttcctgaaaccaagatgtctaacgggtcagaggagattaatg

SEQ ID NO: 157958 - DNA, 348 bp, Arabidopsis thaliana landsberg
caagtgtataaagcaagtcctatgtgaaccaaacaatcatcataatcatggacctgaagcaaacattccccaatcttgttttgtagttaccggtaaaaagcctagtgggattgcagaatggttcttatgcccaatgtggtgtgttgtggtggattgaatgaaagtggaaacaagcgcgttctcttctctttgagtcgcccttggaatacaaaaatgagtctataagatagaaatggaggcttgaactctgacaaagatgtctgtaaataggaacattttgactgcaatctatagaccagcatcatgtgctggggggactctgtggatggatataaaatgtgcgccacg

SEQ ID NO: 157959 - DNA, 148 bp, Arabidopsis thaliana landsberg
cggtaaaacggtaaagccaatctctttattcagatgttttattacaatccaaaacaaaaagttctgatacagccgtttaggcttttttttttttttaacctgcagtagaaaatctaaagacttaagaaaaagaggaaagaaaaaaaaa

SEQ ID NO: 157960 - DNA, 349 bp, Arabidopsis thaliana landsberg
gtcacaaggtttccaattttcgattcacgatggaaatggcggaaggggaaggaactacagaggagaactacgacgtagacatcgcgaccaccgcttcttcattaggcggctccggcgtcttccatatcatcaatgacatagtcggattcgtcctctatatgcaccagcagatcccttcgtatgttatctcttcctatcttcgtatctctatgcttcgatgtatccttcgatctggtgatgatgtatctatttggttggtcttcaatctctccgttaatttctccgattagtctgttggttacgaatttatcagaagaaaaatagttcgggggtatgaatttatggattc

SEQ ID NO: 157961 - DNA, 842 bp, Arabidopsis thaliana landsberg
gtatgactaagctccggtatctcgctgtatctttgagcgaaaggtgcaattttgaaactctatcgtcatctctccgtgaattgcgaaacctcgaaacgcttaatttcctttttacgcccgaaatctataaggttgatcatgtgggagagtttgttctggatcattttattcatctaaaagagttaggattggcaggacctatgtcaaagattcctgatcaacatcaattacctccccaccttgcacacatacatctattttattgccgcatggaagaagatccaatgccaattctagaaaagttgcttcatttgaagtcggttctattgagaaataaggctttcgttgggagcagaatggtgtgctcaaaaggcggatttactcaattatgtgcgctagaaatgtctgaagaatcagagttggaagagtggatagtagaagaagggtcgatgccatgtcttcgtactttgactatacatgattgcgaaaagttgaaggaacttcctgatggactcaagtacataacatccttaaaggaactgaagattagcggaatgaagagggagtggaaggagaaactggtaccaggtggagaagattactacaaaatccaacacattcccgatgttcaatttatcaactgtgaccagtagcaggtaaaagataaactgtatagtgtttttttgttgttgttggattcgtgtgaaagtcatttggacagtctcaactattatacattgttttaacatcgatcatctttgaaatagatgcaggaaagaacaacaaggtatccaaattctcttatattggtagagatagaggttacttcacaaaagtcatct

SEQ ID NO: 157962 - DNA, 159 bp, Arabidopsis thaliana landsberg
aaaaaaagaaaaaaaaaagaaaaaaaaaacaaaaaaagaaaaaaaaaaaaaaaagaaaaaaaaaaaaaaaacagaaaaaaaaaaaaacaaagaaaaaaaaaaaaaaaaaaagaaaaaaaaaaaagaaaaaaaaacaaaaaaaagaaaaaaaaaaaaaaa

SEQ ID NO: 157963 - DNA, 140 bp, Arabidopsis thaliana landsberg
aatcctgggagtgttcctgctgcttcgaattccagactatcacctttgcctccggaacctgctggttttggttatggtcgtactgttgacattcctcttgacagaccagggtctggtgcacaggtttgattgacaatgga

SEQ ID NO: 157964 - DNA, 253 bp, Arabidopsis thaliana landsberg
ttttccccttctaaaccaaaagataaagttttctccacatgattaaccacttctttttcggcatttcggggccttaatcaggcaacatgacataaaataggcctggctttggattagagaaaagctcccttaaacattttgtatccctttttacttttattccatgtttaattgtcacatggggaaaatatgtgtaccaatgaaacaaacttgtcattttgtagaatgcagaagaaacaaaaaaggataaact

SEQ ID NO: 157965 - DNA, 708 bp, Arabidopsis thaliana landsberg
  unsure (1)..(708): unsure at all n locations
tcccggaaatttacttttattgggctaggcccaaaactgtatatctttgaatcatcgaaaaataattttaagatttttttttatctttacaaccagagattaagattaccaacctaattacatatattcccccacccaattaatctaatcacccaatcaaaaaatcccgaaccctttttgatctttgagcttggcatcttaagaaaaacgccaacagctttaagaaacaagagcttgttgtggtttccttgtcctgtccaggcatcacgacattgtaacatttcctgtactgttcgcttcttcaactcttttagaagaagaaggagcttcttgtttcataaataatgcatagaagagctcgttccacgtgtcaggaacaccgggaaggcaccagtggctacagtcttggcgatgaagcggtgcaggaccatgcggaccgagatagtagagtgatgggtgaccatcttttctttgagcagccattgccgttatgttaaacagtttcactttaacagtctctgatctgtttgagtntatgtgacaacacatcttggaggatctttaactgttcccaggtctctgatgaagccaatgaggttccaatttctggtaatgtctccatatgacatgttcctcctgttttccaatctcctcccctgtttcatacatacaacgacgaagatatattgaaactaaatgcagaacatt

SEQ ID NO: 157966 - DNA, 379 bp, Arabidopsis thaliana landsberg
aatcatctctctctgcctagcaacaatcctagcccttcttctcctaaaacaatttctgaatcgaacgtacactgccaaagtcaacctaccaccgtctccgtggcgagttccggtaatcggaaacctccatcagctaagcctccaccctcaccgctcccttcgttcccttagccaccgctacggtccactcatgctccttcattttggccgtgtcccggtcctcgtagtctcttcctctgacgtagctcatgacctcatgaaaacacacgaccttaaggttgcgaaccgcccgcaattaaaagtggtggagaaaattttcaacggtgggcgagaaatggttttctccccttacggagaatattggaggcagattaaggta

SEQ ID NO: 157967 - DNA, 249 bp, Arabidopsis thaliana landsberg
ctttccgtctaaagaaatatcctcaccaaaataataacatgtatacctaatcaatcaatcattatctttctttaaatttctttaattttttttttgtttttttttgcatattgcaaagttttgaacgcgagcgaattctccgcggagttggggttaaaaggaagaactattagggtttttgattcttcgggttttctcgtgctttgattcctttcaagtcaaagcaaagcattaccttttctcgtccat

SEQ ID NO: 157968 - DNA, 572 bp, Arabidopsis thaliana landsberg
aaaaaatctttctgcatttctacaagcttctgatggctagatgatattgacctaaagcctatagctttgatgactgaaggcttcagtggagctgatcttcaagctcttctctcagatgcgcaacttgcagctgtacacgagtatctgaacagagaagataaacccgagaccggaactacaccaataataactgatcctcttctgaagtcgattgcttctaaaactaaaccatcggtttccgaaaccgagaaacaaaagctctatgacatatatagccagtttctggattcaagaaaatcggtatctctctcatctccactctaattcctcttcccttttatacaaacccagttgttgattactaacaacatcaaaatcttattttgcttgtagtcaagagaagcaaagggcaaaagagcaaccttagcataatcaaaggtattacaaagacacaaaaaggaatggttacattgtagaaatcacatcatgttgtaaaatttgctttatgatagatatgcccagttgttagcattagagtaaaagtggttgaagtttggaataaagatagttag

SEQ ID NO: 157969 - DNA, 133 bp, Arabidopsis thaliana landsberg
ggtccttgccattactggttgggtgtctaattgtggcaggcggtaatgatagtatcttgtacctgaaccggcggctcactttaataaagtaatggggaaaaggacccaaacatgccactgagggagtctactg

SEQ ID NO: 157970 - DNA, 175 bp, Arabidopsis thaliana landsberg
aaacttggtagcaactaaaagcttcttctctccaaaatttgacatttttccaacttctgttattattattaacatatgtaaaaaacttaactgtagtagttaaaatacgtatagatgcaacggtctaagcttctcgctatgtatgaatgccaaagcaattgcaaatgattgcaga

SEQ ID NO: 157971 - DNA, 475 bp, Arabidopsis thaliana landsberg
  unsure (1)..(475): unsure at all n locations
gtgagcttcgccgttaaactttctccggtaccgggaaattaacgaagaaagcgaaaagtcactgttacactaatatcacaaatctctctctgtctctctctctctctttgtcgaagtcgtgcgtgatgctagttacggtggtgaagcagcggttagtgtactctcgccggagaaattggttatgaccggaatctcacctnnnnnnnnnnnnnnnnnnnnttcgttttttatcggtacggggaaatggaaaaacaggcgaagctaacgaggacacagtcgtcgttactccggtcatcgtcgaatctccgttcgtcatatcaaagcttatcttcaatcgtcgaaggcgagcaagatctataagccggagagaaagaagagaatcagagaagaacgccacctgaaccattcggctcaccccctgctaaaaccggtttaaccagaatcaatcccggtttacctttgacaatggaatctc

SEQ ID NO: 157972 - DNA, 245 bp, Arabidopsis thaliana landsberg
  unsure (1)..(245): unsure at all n locations
tcaggatttgagaggtttgtcagagacaaatacaccattctgcctgaaactcgtgagcgaatgctggccacagaggttaatgcatcttggaggtatgtgttaattagtgatgttacatttcttatttgtgattgattgttggaaccgacatacacgttcataaacacaacaactcgtatgagtcngttgcgngcattccacttaaagnctctnctttagcgagtagctcatgcncgttaagnnag

SEQ ID NO: 157973 - DNA, 858 bp, Arabidopsis thaliana landsberg
aaatgtgttgtcaactaattgctgtgaaaggatcacactgaacctcgagctagctggacatatgccttgttctagtatgaacgaaactttctctgcaacgccgagaagcatgaccatccatagatataggtagaaatctcctagttgattgattgtagatttttttttgctgacatgtgtatgcagtctaagctaataagacaggtattttgttggatgatgtgatcgtatctgtttaggagaatcgaaggctgccctctctagttttcatcatcttttttttttttttgtaatctattattcagtttgacagaaagatgtcttacagctgttttattggaatttgtataggatgaaaagaggagcccttagacgaagggctagggatatctctgttatgcttgttgtacttgtttgtgcaactgtagtcatatggacatgggatagaactccaacctcggcctttcttccacctgaaagtcactatctaaagctgcaatcaggtttaactatgacattaagctctctttctggcaacattttgttaggccgtttgaatactggaacaatactatagagactttgtttaatttttaaattcattctgtacttgacagcgaaatgtgtcacttctagtttctgctgtttatatttctcaggtcttgaattgttttttgtccaaaagtttcaatatttttttctttcacttgttgtttctcctgtttatgtttcacaaattactgtagatgtttatgaaaccaattgtacaattatattctggggtacatctgacctaattctttctcatttgcagaagaaaaggttgagaaattacctactgcgctgaatactgaaact

SEQ ID NO: 157974 - DNA, 508 bp, Arabidopsis thaliana landsberg
agagcaactcttagtttttatagaataattacttcgctgactttaaggaaaattattaagaaacaacactcgataatttggcaacaaaagacaccgtacattttgttacaagcaagttatttcccaaacgcttagaacgacacaaactgaaacatagagaatatataaggagtatgttacatgcccttaagaccgcgtttgcatctggtgtagacaagacaattcttcttattggcatatttaacggttccactacaaggattacatgcctgctgaggtcgcaagaccggataggttatgtacgacgaaccacctttcatcattggcgccgcaaaagaactccaaatcacttcatcgtcatggacggctgtgagattataccaaccatttatcacgttatcggaggttgctacggcaaagagcaggaggaggaagaagaagactattgacttcatttcttcaattatttgtttttctgtggtgtgaggagtgatttgcttgaggagtg

SEQ ID NO: 157975 - DNA, 60 bp, Arabidopsis thaliana landsberg
tacgtcgtcagatctgctcgttttttcgctccatttttgggtcaccattactcagcttcc

SEQ ID NO: 157976 - DNA, 487 bp, Arabidopsis thaliana landsberg
taaaacgtttctactttcttgtacaagtaatttaatttgccaaataccaatcgctagccgctttaaccaaaatatattccacatttcaaactaaaccgggttttgtaccaatgtagtaagtaggtcactctcaggttagcttcctcggcaagttataggtctttttcagaaacttagtcgcaggttcatcgtaacggtaacacaatactcttaaaagtgtgtttggttctgtcggactccacggaccagaagtcggcggtaacggaagcttccctctgtcagaaccatgattctccagacacactgctttaaaccgttcaatcaaagaatctgtatccgtgcgcagcagcggaagtatactcttgacagtcgtcgaaaccttctcgatcaaatccaaaggcaatccgtctccgtttgaccagaaaagatcgcatagaaacttgaaatcctcttctacggcagcagagtcttgaattgtgaagccacg

SEQ ID NO: 157977 - DNA, 719 bp, Arabidopsis thaliana landsberg
atctagattcagtttttttcatcaaaaaagagcgtcttcataaacgcccttcgtcttcttccctggaaatctagtttctttcttccacgaaaatgagagagtgcatttcgatccacattggtcaggctggtatccaggtcggaaatgcttgctgggagctgtactgtcttgaacatggcattcaggttcgtatctagatctgtgcttcttctatatttttcgtaattttataattcagatctgagataatttggccatgcattgaccttgttctccggatttctgatgaattcgtatatatttagtacgtaattgtttagatctgtgtttgattccgatgtcttacaatttttttatgtggtttatgtaagatccgtttctcattttagaaatatttttgacatacctgtttagatctgagtttgacatagatttcttgttggttgattcaagatctgttcgttgaacaaaaaaaatattctaggtttgtttagaagatgcaaatcgatctatttcccatatacttaagcttctatatgcttagtgcatactgtatgagtttgtattgatatgttttggatctggaatgttacagcctgatggccagatgccgagtgacaagactgttggtggaggtgacgatgctttcaacaccttcttcagtgaaaccggtgcaggtaagcacgtcccacgtgctgtctttgttgatcttgagccaa

SEQ ID NO: 157978 - DNA, 79 bp, Arabidopsis thaliana landsberg
cctctggtgagagtagaacgagggagagctaaagcttgatggatcattattgagtgtggcggactaagtctctcgcatt

SEQ ID NO: 157979 - DNA, 85 bp, Arabidopsis thaliana landsberg
taccgtggaaggaaatagctcagcagtactgtaaactcctgacaactttgcagttcgcaagtctctccccaaggcttattacaaa

SEQ ID NO: 157980 - DNA, 499 bp, Arabidopsis thaliana landsberg
ttgcattcaagctaatggatcagcaatggctttcaatgcgtgcctcatacatggagtttaacgtaagtaatagtcgttacaaagcattgacattagtttggtcatatacatacatgcgatgttgatgctttgccttggaatatattggatgacatagacggttatgaaatcaacaaggagacagctggagagagagctgatgctggaagacataatgcatcttgaggacttaccctcctacgctcttctcaatcaatagcccttatgatgatattaaatagtaagaagagtttctaacctcaggataacacaaggttgctctactctctctctctcttcacttttcatcttcaacgctttcggttctacctcttcgttgaccttttcttgtgtttggtggttctaagaaacaactccaacaccgagttgttacttgttatattaaaacaagaaaaagagtgagagagagacggagagaggttgggataagtctcaattt

SEQ ID NO: 157981 - DNA, 247 bp, Arabidopsis thaliana landsberg
ctcgtgactactttcagcttacctttttcttctccaagtcccatcttcgtctccgtcatcttcacggcacatcctccaaaaacgcttagcttctctctctgttacgtttactcaagtcttttttagtctcctccttaactctcaagccttttccaagtttcaagcggctccaacggttcaatttcgcactttccgatttgtggcttcactttccggtaacgtactgatctcaatacatgtagatcta

SEQ ID NO: 157982 - DNA, 265 bp, Arabidopsis thaliana landsberg
ttgcgtccattgtcgagaaccttagtttcgcgtgccgtcgttaactactcgtctgcgccgttcaatgcgacgattccggctgcgaaaccccagttatgttccttcttcggtggatcgatgactcatttgaggttaccatggattccaatggctaaccattttcatagcttaagcttgactgatactcggctcccgaagagacgacccatgactcatcccaagaggaaaagatccaaattgaaacctccaggttcgctattttgtg

SEQ ID NO: 157983 - DNA, 122 bp, Arabidopsis thaliana landsberg
cctaagcacatcggccacgatgaatgggatgttgctatggaaagacgcgacatgatagccgtggagacagctgcagctactctctcatgatgcgctttatctcttttgtgtacctcaggtgc

SEQ ID NO: 157984 - DNA, 269 bp, Arabidopsis thaliana landsberg
acgaagcaaatctaaaccaaagatctccattttcgtagtttctttaagctttttcagtatcatagagacactttttttttattagaaatggctttagctggtacttcttcttcaactgcaatctctggatcgagtttctctcgttctggagcttcttctgaatctaaaggtactaactgtctctttcattctctctggaaaataaccaaaatcgattctttgattgctcattggtatacccatttgctggattcatgtgaatctaatcg

SEQ ID NO: 157985 - DNA, 547 bp, Arabidopsis thaliana landsberg
caaattcagattttattcgaggacttactgttttttttttttctttagttacacccaaatatacaaataataaaaaaagaaaagagattataccacaccattacttactttaatcacaacataaataactatataagaatttatttatcaaaggagctttaattacaaagctcaattcacaagtcctgggtcgaaactaacgcccgttgacggcaaccatatattcccgtcaataaaactcgccacagtgaatttttccgcttccgtcaccgtcaaagacggatgacacccactccatttaacccgacccgaaaccgatgatccaggacccgaattcccatattctccgtaaaacagagatttgagaccgaaaccacccgaccaaggagaccaacccgacggatgaatcgacccgccgataaatgattgcatcaccaccgtcctcgaatactccttccacggccgaccaagataagtcatcgattccgccgtgatcctgcagttttgaatcgcgattccggtgttttgacccggattgctccgtcct

SEQ ID NO: 157986 - DNA, 496 bp, Arabidopsis thaliana landsberg
caagaaccgccatcatctccccttcgcgggcttcacctgaaataccattcaatagtatcttagtgttcaccgaggaatcatttcctgaccttctgcagcaagcgaggggattaaacttcttctggatcttcacgctgtaggtcaagtcagtgaatgaaagaacaaacggggaagaagatatagaagaagcaggagcagaggcccatgaattgaaagaggatgcagcagaattgataggtgaggcaattcccagagcccggctacttgcactttcatcattccttgcatcctccacgttcataagatgctcggcgaatgtgacagagactctagtcgtgtcgcttggacgtccttgaggctccacggacatcgggtttacataatacataggaagatcattgttgccatcaacccgtttggccggagatgattttccgagcaagccagacattttctatgtatttttgtcttaatcttctcaggttatgtgggttat

SEQ ID NO: 157987 - DNA, 832 bp, Arabidopsis thaliana landsberg
atctctccgatgtgatcgccattcgtgacgttcgggcttataatctcgagtcagagtttgacctactcagaggaatcgtcgaagattacccattcatctcaatggatacagaatttcccggcgtgatttacaaggcggatctcgacgttctccgccgcggaaaccctaattatctctacaatcttctcaaatccaacgttgacgctttaagtttgatccaagtcggtcttactctttccgacgccgacggaaacctcccagatctcggcggtcaaaaaaaccgtcgatacatctgggaattcaatttccgtgacttcgacgtggagcgtgatccacacgctcctgattcgatcgagctactccgtcgtcacgggatcgatttcgagcggaaccgtcgcgaaggtgttgaatcggagaggttcgcggagctgatgatgtcatcgggttgatctgtaacgagtctgtgagctgggtgacgtttcacagcgcgtatgattttggttaccttgtgaagattctcacgcgccggcagcttccggtggcgttgcgtgagtttttagggttgcttagagctttcttcggtgatagggtttatgatgtgaaacatattatgaggttttgtgagcagagattgtatggtggtttggaccgggttgctcggtctcttgaagttaaccgggcggttgggaaatgtcatcaagccggttcggatagtttgctgacgtggcaggcgtttcagaggatgagggatttgtatttcgttgaggatggggcggagaaacacgccggagttttgtatggtttagaggttttttgagggatttcttttttt

SEQ ID NO: 157988 - DNA, 79 bp, Arabidopsis thaliana landsberg
gaagaatcatttccacacgattttccctgtgatttcttcatttccttcgacttaaaacggtaagtttcgtggaaattga

SEQ ID NO: 157989 - DNA, 360 bp, Arabidopsis thaliana landsberg
atgactctggccctctctctcttctctctctcaaaattttcagagagagagattgacatcaaaccaaaattttcgacgacggtaaattgatgtcgtcggtgatggttgaattgccgtccggtgtagtatccggctttcgtctgacatatattggcttccacagcagtacatggtcggcccttgtctagcatcatcggctctttcagcggtgatggctagctcacggtgttaatccggcgtagttcggttttcttttccttttggtttatatcacggttacgtttcgaccgttgattgtctttagataagaattcattgggtatgtgtgttggtgatggcgttggttttcagtccaagctt

SEQ ID NO: 157990 - DNA, 697 bp, Arabidopsis thaliana landsberg
cttcgattaggttaatcgtatctgggttccaccggactcaacccctaaaatcgccggtaaattctccgagcgtcttcatctccgtacctaaattcttcaactctgagtcaaaatcgacgggaactggttcaagatccgtagcaatgagcagcgttgagaaaaccgggtcggattctggagcaatagagaatcgagcgagcaggatgagagagaagcttcaaaaagagctcgaaccagtggagttagtgatcgaagatgtttcgtatcagcacgctggtcacgccggaatgaaaggtagaaccgacgatgagacgcatttcaatgtgaagatcgtttctaaaggattcgagggaatgaatttggtgaagagacacacgttggtctatcatttgctccgggaagagttggatactggattgcacgctctttctatcggtttcaaaacgccggctggatctgcttctaaagaatagtggactggtactgtttaatgtgtcttctgtttctgatatagagtttctatcaaactcttttcgattcaaagattgaattttccccatcaaagtgctctgttttggattttcttgcggagccaaagtcttcatttttacatacgcttgaggttgtgtgttggtgtttctggaattgtgtgttggaacaaagacacttgcttttagttcaattcgagttctgtctt

SEQ ID NO: 157991 - DNA, 467 bp, Arabidopsis thaliana landsberg
ggaatagaaattctcactttggtagaggaaacttgtcgtttgaaggaaatgattgagcggctggtagtagataactaacctcagttttcctcgtacttgttcggctcttttgttaacatagaaggcttcgcatgcccatggggaggtggttttctcactaaggtcttctctttggagttagtcgacttcttcgagagtaaaattataacggtctggattcattcctggatggcttgcttttgttggatagatatcctcattcttcttgaagggtaatgatatgaagaagtccaggttcttccataaaggtgatgaacatttggtgaggaactctgaatgtgtgtagcacaagaagtattgataatcccgtctttgatggggttaatatctccatgggatagagatgggagatagtagtccatggtagcagttggttcttgtgcttaagtccctttggatgccaagat

SEQ ID NO: 157992 - DNA, 405 bp, Arabidopsis thaliana landsberg
actgaatcaaatataattattgaaacactgcgagggatttgctaggcgctctcgcagttccctcgcaatgtaaaaagcattttgattagtttaaaagacggttcctcgcaatttcctagtaaggtttgcgagtgacttgcgaggaaatatattcttatatatactcgataacctagtttgagcggagctcaaacctgccgcatcaaaccctaaacctaatttttttcttcgattctcttcttctccgatctgttttcctcgtcgccggcttctcttcttctccgatctattttcttcgccgccgcctctcttcttcttcgatctgattacgtcgccgcctctcttcttcttctccgccgcgtctcttattctccagcagccgccgcaactcttcttctccagctt

SEQ ID NO: 157993 - DNA, 443 bp, Arabidopsis thaliana landsberg
ctctcatggctgttgtcgttgcagagacgtcgttgattttcgatttcgatttcaagcttttcacgtactcattggaacgatccaatctcaaaagtctctgattttgggagagagcttcgttaaactcagcgcgaattgtaatttcccttttgccgcgattttggattacaaggtacgaggtttttgatttctcatcttcaatgattgaagtttgatctgggttctagaattctaattctgtgtgttgccctttgttttattcggcttattgaagatgcttgacttcgttttatgaagttcgtatcttttttgattcagttctcttctagggatttcttgtgttagagctctgaattttggtaatttttttggtaatgaagtttgattatggtggaaacacgaattttcaggagaagggttaggccaattttatacttttgctt

SEQ ID NO: 157994 - DNA, 258 bp, Arabidopsis thaliana landsberg
  unsure (1)..(258): unsure at all n locations
aacacttgcttctctttatcaactttaaaataccccaaacttaaagccgaatcaagaacatgtccgatcaccagaaannnnnnnnnnnnnnnnnnnnnnaagcgccgccacatccaacggctccccttgttccacgtggttcctcaagatcggaacatggtgatcctaccaagacacagcaagcagcaccgttggatcctccgagggagaagaaaggatcaagaagttgttggtgcagatgcgtgtgctacacgcttc

SEQ ID NO: 157995 - DNA, 354 bp, Arabidopsis thaliana landsberg
agaaagaacatgtaggctcatagaagggctctggtttagatactaggtgaactaatcaagcttaataacaatgcatgctttagcacaagatttctcggcttctctggttatcttagctctaagtatagaaactttcgcgaaacgccaccggttactctagaatcatagtttgagttagagaactgtgctataacaatcctaatattagctagatctacaatttatctatctcccgagacaattccttagacccgatgctttaatcacttgaatctacaactcgtttacttgtttatttgtcatttacattcaattacttcattcaataacatcataagtctattgtttgaacag

SEQ ID NO: 157996 - DNA, 321 bp, Arabidopsis thaliana landsberg
cacttaatttggttaatgaactcgttgtctagggataatttattgagcatgtcaatcacctgtaaattgaggaaacgaaactactcaattaccccatcctcgggaattctttatctgattgaattctttatttactctactgttgtttactacatctggtcatctgttgcttaatttctgcaattctttcttgttactcgacctcatactcgaccacccagttgtctagcaacagactgtgcagtcgagtatctatgttttattttttgtctgctactcgacctgtcactcgacctcacccaatgctctacaaagagctgt

SEQ ID NO: 157997 - DNA, 88 bp, Arabidopsis thaliana landsberg
aaaaatagatcccaaggcctctctcctctctctctttttccctataaggttcttggaaataatttgaaagaaagatgtcaatgatgag

SEQ ID NO: 157998 - DNA, 218 bp, Arabidopsis thaliana landsberg
gcactgcgtaagtaaatcagaagggtttctcggttggtttcttcttgaagatggcttcccaagccaaagacggaaatggagcccttttatccatgaactccttgacagccttaacattaacggcaaatcctttttggtttaaggtatcaatagcggactgggcttgttcaaccccctttactctgcacaaggcatcaaccaattcaacgaaagtgggg

SEQ ID NO: 157999 - DNA, 393 bp, Arabidopsis thaliana landsberg
ggatgcttgaaatcatcgcctgaagctagaactaatgaggtcaaacgatgtctgggtttataaccctattacattgaagtaactaacaacaagcactacaatttttgaacttattgttggagaattaagatctctctactattcctcggtaacaacaacaccaatctcgcctctctcaagcaaatcatagaagactcttgttttcctctgctcgttccagtgatgcatcttccatagcccaccagccgctagtcccagtgtgagaccaataactaactccttcacaacacttgggccttttaaagttgcgtgtgctatcttgtgcccagccatctctttgccactctcctgctcacactaaaccaatcaaacattgcaatagatcatgaatat

SEQ ID NO: 158000 - DNA, 848 bp, Arabidopsis thaliana landsberg
tcttctttgccatctccatggagccagaggtttctccgtgaagcagctgttgtagcatttgtttcatgtcagcgtcaggagcagccggaccttggttttgctgaggtgcaaatccagcaaatccagttggtggttgctgcaaatccagccttcttcaacatctttgttctggaaattcccattgctggcggtatccagaagcattcagatgcgtggtagaacttctctgtaaagagtgctgagcagagacgctttagtgaagccatgatgagggcattggttggtgtaacccttgaaacgatcccatgcttcacagaagctttcaccagtcttctgtgaaaaaccagaaatctcatttctgagtcttgcagttctggcgttgaagatgaactttgatagaaaagccttcttacaatcatcctaggtggtgattgagtcaaggggcagattcttctcccagatgtgggctttgtcgcccaaggagaatggaaacaaacggagcttgaatccgtcttcacagacaccattgatttttgttaggttgtagagcctatcgaattcatcaaggtggtcgagcgggtcctccacaggcagaccatgaaatttgttcccctgaatcatcgatatgagaccactcctaatctcaaagttgttgttctggatagcaggaggtgcaattcctttccgctgacgctgatcacgtggtgcatctccagcaccaatgttggcagggccattttgttgattctgttcgtgagccatttcgagtggttactgaggtataaggttgactgtgtttctcctttctctgagttcgcgagctaggcggtcgatgttatcgttgaaaa

SEQ ID NO: 158001 - DNA, 507 bp, Arabidopsis thaliana landsberg
ccaaagatgatgggttcgatggtcattaccaaagtgcaggcgataagaaatctgctggtcgcaacggtaaatcagacaccgcttggaccggcggaggttttcagtaagggtaagcaagctttagctcatgtagctctaacagttaatatcacagtaacactttactcatctttatttggataggtggtgattcagaatctccgtgagaagtgtataattaattaaagctgggaccgtcgtgatctgaatataagatgagattggtcttcatcttaaaaccatgttcatgcttacccacaggtctgcttttttcttcataagttggcagtttcttgatatctttttcttcatgtgttaaggagtaacatatttgtacaagatccatagccgattgtttgctaaagattttcggttttagtctttcacaagttaaatttatcttcaactgtaatcacaactgaacattctttttctccaaattgccttacttgttggtagcgtgataat

SEQ ID NO: 158002 - DNA, 384 bp, Arabidopsis thaliana landsberg
tgaggactctgctgatcacagcagaacgcttatgatttacattgatgatgcacttcaggcaaagcttctcaaagagaagctccttatggtgactaaagactactcaggtgcaatcactgagactggttatattctcaaggacgatgaaaataacctcgaggcgaagctcctacgtggccgcgcctactactatatggcggatcatgatatcgcccaaaggcctggtctaacttcaaccttattttcaatcagagagagtttggggcccaaaacagatatacttaagtaaactttctgtttcaggcattaccaaaaagggcttcgtcttgatccggaacacagtgaactgaagaaagcatactttggattgaaataactgctcaa

SEQ ID NO: 158003 - DNA, 134 bp, Arabidopsis thaliana landsberg
aaaatttcgaagaagattatattttcgattttttgctgatatgtaaattttttgaatatacttttgtgttcttatgggattacatcaaaataagaagatgcgatctttttgagtttttgctcaatacttacaat

SEQ ID NO: 158004 - DNA, 474 bp, Arabidopsis thaliana landsberg
aataccacatttttatttgttgttgttgtagagtctagtctggttattggttaagtattatgatttcgcttagaagtttttttctgttttgataattgttatgttttcttttgttgaagtttgaaaaagaggttcttgcttaaaattgaaagagctgttgggatgtatatgtttgctgtgttgatcccattgagattgcataaattgttatgtgctttatcgttcgtgattcccttaaaagttggcagatgtgtgattcccttcaatttaaagttagcatgttattagtataagcggagcagaagagtaagtttgttatgctactaaaagaaagaagactaggtttgttaaaagggatgtgactggtcaggtgtttaagtggattttgagtctgttacaaacaacatatagaagaatgtgtactaagaagctaaaaaacttctttaacgcctttatatggaacatttcttagat

SEQ ID NO: 158005 - DNA, 434 bp, Arabidopsis thaliana landsberg
ttcgaatgacactagttgctaagattcaataaaaaccttactaattacatctgaatcacctaagtgattttagattcaaagaaaggggaaaaaacacaaccctaagttaaaaaatgtaaagagcatatcaacaccaagacgcgacgaattttgcactttacagagatattgctagaaagaaaaagaagtcaaaaggataatgttaaaataagggattcctttgcggttttgttgattagctttgtagacttgtttgttgttgttgttggggttcttctggatgttcaggttgaggaaccgaaacacctccattcattcttgcacgtgcttctgcaaacatacgttgttgctcagctgctgcttcctcctcagtcatttgagctccagggttccatttcacgctcctctgtgtgtcctgctatagagtcacaaat

SEQ ID NO: 158006 - DNA, 179 bp, Arabidopsis thaliana landsberg
gataataccatgaaattagggtttacgaagctattaatcgtctctccttcccaatttcttccaggtagaatctctcaaaaacattgagattcatcgattcatgtgttgaatttgacgcgaatttgatttcagaaaggccgacgaagaagactctctctggcaattagatattgcaaacg

SEQ ID NO: 158007 - DNA, 674 bp, Arabidopsis thaliana landsberg
acaggtttatgtttttggcggaaaaattataggtttacgtttttggcaggaaaattacgagtttacgtttttggcgggaaaattacaggtttacttttttagcagaaaaatcatgggtttacattttttgcggaaagattacgggtttacatttttggcgggaaaattacgaatttacgtttttggcggaaaatcacgggttttcgtttttggtgggaaaatcacgggtttatcttttttggtggaaaaatcacggatttacatttttggcgggaaaatcacgggtttacgtttttggcgggaaaatcacgggtttacatttttggcgggaaaatcacgggtttacgtttttggcggaaaaatcacgggtttacgtttttggcgggaaaatcacgggttttcgtttttggcgggaaaatcacgggtttacgtttttggcggaaaaattacgggtttatattttttgcgggaaaattacgggtttacgtttttggcggaaaattatggatttacgttattggcgggaaaatctcgggtttacgtttttggcgggaaaagcacgggtttacgtttttggcgggaaaatcacgggtttatttttttttttggaaaaattacgagtttactttttctcaatttcatcgcttgtatatttaagaaatttggaaaaatat

SEQ ID NO: 158008 - DNA, 381 bp, Arabidopsis thaliana landsberg
gagataaaacagagtatgaagatttctgtaacaatgaattgaaacccatgttgcaaaacttgacagctgatgatgtattagctgagcctgtcgcgggttcagcggttgatgaaaccgcgatcccgaattctccaaccatttctttcttgccgtctgacactgaatagaaggacttgatggaagaccacaaagccagagatcatgaggggtatgtatgtacactgtatgttttgggttttgtaaactggattgggaaagaaaataagctgcttacggttggtgaaatttagaacctgattatatgtaatacttatgtttatgttggagaggatcgttagagaaattgagttatgttttttactaaccctttactagtttttt

SEQ ID NO: 158009 - DNA, 183 bp, Arabidopsis thaliana landsberg
aagctctgtttcatggaacagagtatgtaagtttgatgaagtttcagatcgagaaaaaaaaaaagacagtctcaagaccgtttaactttctttcttttttgacactgattgaatttactaagagttaacgaactcctacaactgataaaccaaacttaacggcacttaactagaacttaacgg

SEQ ID NO: 158010 - DNA, 1004 bp, Arabidopsis thaliana landsberg
ctttcagcacttggagattcacaagtttgtcggatcaatccattttaactccggtaagccatacttgcatgattcgttttgtttccaccgatcacatgttatcgtttatactccatagcttaatctttgactcattcatgatctttttttggtttaatgttaaaacccatgcatgatcttgtttctgcatatttttgttttggttcagtgtaaaaatttctgcataattttggttctacaaaaatagctactatgcaaaagcaagatcacggggtcaaagattaagctatggagcttaaacactacttgtatttgactatttgtttctacgtcatttgcgtttgatttgaatctaaaggccttttaatcgatttcttgtcatgtgtttgtaagggttcagtgttttatgtatcttacaaattgtgcttctagtgtatccattttggatttgtgaaagttgtttagggcttatatatctaaaattgtaaaacctattttaaattaatataacaaaacagtttcggacttttaactcataatatctcttcgaatttagttcattttccaactttgaaattcgttggcttgtgatcttgaagccttgttccgtccggaatttatgttacttagtcaccagtagagttacaaacgatgagttattttaatcttttttctaaaaggtccttgacaatggtttgacgagaaaaatcgtttttcctttttgcagatccatgactacgactaggcggaaaaatacacattggtgtcatacttgtagacgaggaatccatcttcaaggagaaggcagaagagaaggagcttgcatttactgtggccacacctttcttgaaaggctatatgaaaatgttgaactaagcccttttgatttattcggattagcctacaaagaagctcgtaaccggcgcaacaacagaagatcggatattggagaacaacttaggttggaaagagtgattaaccggatcccagcactacaagaccgt

SEQ ID NO: 158011 - DNA, 644 bp, Arabidopsis thaliana landsberg
tgattttgtttttgctttatttcagactatttgttatttgtattggaacttgttgcacttattttcttatgctttgttggaactattgatgtgtgttttagtgatttaacagtctaactcgaggatccatgtcaaaacactacccaaggctctacaataatgagctgaattcgcaaagctaagcaaaacgaccagagtgtcgatcgacaccattatggtatcgatcgacaccactcttaggtggcaactcacgtttctctaactttttaacttttgcttctttttccttcgatttctctagcttaataacactagggaccctgtcatataagtctgggggagtcagtaactaacttcaacttttcttttcttataagtcagttgtgtcattttaacttagagagtcgttttattgagtcaaattttttgtctgaaattttgatctctctttcgagtttattgcttagattgcttaagtacttcagattcaaatcaatccgactaatgggaaagccaaccgacaaacttaagcacatccattcccaacataatctacaaaggttggacctaatctcactgctcttccttttacctcatcaaaacggttagtgttcatagaacttgactctttgttcatacctgat

SEQ ID NO: 158012 - DNA, 86 bp, Arabidopsis thaliana landsberg
ttcaagaggttattatttgtttactaatgtttgctagtccatgtaaaacagtaaaagtaacagagaaatgttattactggatatca

SEQ ID NO: 158013 - DNA, 127 bp, Arabidopsis thaliana landsberg
aaatgtatcacctcatttgcagcagccttgaagcgaacatatataacagatgcctcgacaccctccgagacagatgttttgtttccacctgtcccacgaaatgctgtctgaacctgacaatggaata

SEQ ID NO: 158014 - DNA, 689 bp, Arabidopsis thaliana landsberg
ctgtaaatgtgtcatccattagcggtatccccgtgaaccttgttttagcccatggaccgcttctataataaggcgttgatcctttcgtaacaagcacctgcgttggcacttgtggcgtaatctgaagcacaaagtcgccaaccgatggatcagtgtaacttttccaagaactcaacacctgcttctcgccagtggcgaggttatacttcagggttgaggaaggaagcatagtatcaccaagatggtcaaagctttgccatagagttcttcccgaaaaattgtctatgacaataagatttccggtgtctgaaagctctgcacgagacccgttagaaacaagagcttctccactggaccatgcaacgccatgtttgccattaaataacagaagacttccattgttgctgatagcgagatttgccgtggaatctgtaacaggcttttctctattggccacccacacaaccacccggggaataatacccttgaaccagattccgacatactgattctgggagttattaaaattgaagaaccccagttcataaaaaccattagaggagctgagagtttgtcctattggcaaaggactttctttcgttatccctgcagagctagaacttataaagaagctagataagagcaaataagcaaagaacacgatccacttcttccccatatttgttatt

SEQ ID NO: 158015 - DNA, 290 bp, Arabidopsis thaliana landsberg
ttgcttgtatctgaaatcgcaggtagcatcctgatcatatgaactgttaagaaaacaatctcaagacacatctttgagattaagaacaatccgagattaagaataatcatttaaactcatctgtttgaagtcattttttgttccccacgcagtaaaattctgcactcgcagctatgtctgccatacaaacaaaaaaaggtacaaaaaataagacctggactagtcaccctgccccattatctcaatggatgtaaaagaaaccatcaaaaggtttctctgtcggtgttcat

SEQ ID NO: 158016 - DNA, 129 bp, Arabidopsis thaliana landsberg
cgtagactgatagattttctttacggtttatgcctcgggatgcttctatgaggttgacgatcgtggggatgttcattatgctctggaaacagaacatgaggcatagcggtttgtttgaacggttcgtct

SEQ ID NO: 158017 - DNA, 316 bp, Arabidopsis thaliana landsberg
gcttgtgacttaatgtgatatggttgttgatgtttcaggaacaaacgcgtgtgcttggacttattcagaatgatacagaactttcggggttaaaattgatccaatcgccattgctagacgcagagataagaggggttcccgcacttaagttcatgggtgatctcatttggaaataagatttttttttttcaactttcgtttccagtgcataacaataagttaaattcttttgctgtcctaagatctaaaaagtcttgctgatgagatgaaacaaaataccaatgttattaactttaagcaaagaaagtaatggaag

SEQ ID NO: 158018 - DNA, 431 bp, Arabidopsis thaliana landsberg
ttcagataacatgaacaatattattaaaactaggccacaaggttggggtacaatgtcttaaacaaatagtaaagccagaaactttaaagaagagaatcaaacctactaattaagaaagcaacatactaattaagcttcagtgagatggaaaagccttcctacaaatcagtagatcataaagtcaaaagctaattctaactcattgtccagaatgttgatggttcctgatcctgcttgaacgtctcacaggtgttatcatctctttctcttcgtgaccacttctcttttgtatcttctcatatgttgtgaaacttccatatgaaacagaacctatggagtactctgatgcagaggaagccatggattcaccgctatcattactcttcttgcctcctcctccgctttgatgttctttaagatcatctttcttg

SEQ ID NO: 158019 - DNA, 342 bp, Arabidopsis thaliana landsberg
aatcccaatcttggccctaattctctgattaaaccatctttctgaatcccaaatcgaaggcatgtctctctgtatctgtagatttatttcatcccgtttgttaacctagttagttttcttttagctgtcgttaatccattgaactgtttggttcttaatcacaggatttatgggtttctctaattcgattcttcaaattttttagcttttgcatgtctgtgttctttgcaaaattagaactgtttgtttatgtggtttgatttaggcgtatctggataaatagaatgcacaattttgctttaagaaattttagatttttagatttttgcaaaacttctcgag

SEQ ID NO: 158020 - DNA, 385 bp, Arabidopsis thaliana landsberg
ctttcgaatttttcgatcagatcattgccgttaagcaaatataaaacaaatcaggagcaaaccttattgttcttccttaggtatgcatgtgcacctcttctgttcttctgttaactcctatattatccacaccaaaataaaccaactcataactctttttactatatactttgttgactaatcatttttaattcatctattgggttcctctaaaaggttttgtgtgtatatatattaacttagataatttacctggatctgcctttgaagaactttcacgtattctactgcttcttctaacatgtctgcagtgttggtttgctgcaacaaagacaaaaaagttaaccgatatactcaaagcctagattccaaatctccatatata

SEQ ID NO: 158021 - DNA, 272 bp, Arabidopsis thaliana landsberg
tttttttttatattttgtttttttttttatttgtatcatgtattttttattttgtatatttttgtttattttaattttaatttttattattttatttttagtgatttttattttttatttattttttgatttctttatttttttttttttttaaatttttattattattttttatggttgggccttcctgtttttaatttaacttgtcttagtttttttttttgttttttttaaaattaaattttttttttttttttttttctttttttttc

SEQ ID NO: 158022 - DNA, 310 bp, Arabidopsis thaliana landsberg
atcatgtcaaattttatattcaatagtgctcgtctcttatacgaccagtatcaaagctttgtttttcaacagacaaaaaacaaaagaatctgctgttattatccaagtgggaggatgaaaaccgagagctcacacaatgctttaatacaaaaagaaactgatgtcgtcgtccattcacattcacacgtcttcgtctctactctgatgctccaggagcaattgttccaactcttccttgcgtcgggctatatccaaaataagggtcaatgacttagaaaccatttgagtgatgagaataatgatgcaaata

SEQ ID NO: 158023 - DNA, 771 bp, Arabidopsis thaliana landsberg
gccggcgattagcagaggcggtggttcgatagagagaggaataaattgaagcgattttcactcaattttcatcagatcgtatcggtgatttagggtcccttggtctcgttttgttcggtgactgcttgagtttcacgtttttggtgagttctgtctatctattattatcttaatattttgatgattcaggctcatggtttgtgaaatttgctctaatttattccagaaaagattcaacataagcgaattcgtgtgtttggctttaattgaaccctgaatttagatgataacaatatttctgatggttgattcattgtatataggttttgatttcttatgggagattcttcggtttcgacaagttcatgggctgccattgactctgctaatagttttcaggtataagtcatttctggatacatattttttaggaattttttgggtctgtttctagttgtgttgaatagactataagaagtaagcagaactgaatgtgcattccttttgtttttattgacaattgtgagttaacatgttcaggtgtcgagcgttatgggtgagtcctctggatcaagcagttcattggctgctataaattcgtccaacattgggtttcagctcctaaagaagcatggctggaaggaaggcactggtcttggaatcgctgaacagggtatattggtgcctctacaagcagagccaaaacataacaaacgaggactgggagctaaacaaccagctaagagaaaagtggctcagcctcaggctaag

SEQ ID NO: 158024 - DNA, 427 bp, Arabidopsis thaliana landsberg
taaatgtattcatttatcattgcacaagcacaagcacaagatacagggttcaactttcagagagatgaaaagataggcacaccgggcaatgtagcaccggaatcaacaatgtatgtattcccggatatatattgagaagagtcatgaatgagatagcgaaccagagaagtaagccccggatccacagtctgttgcatctttaatggtacaatcttttccgtaaccttctcgagccactctttctggaaaagaccttgtgtgatctctgacctgaaaatcccgggtgcgatcgagttcactctgatattatgacacctaactcaatagccatcatccttgtcatggtgtcaacaccgcctttggaacaagcataagcaagtccaccgggcaacataccccggaccccagcaaccgatgagatgtttat

SEQ ID NO: 158025 - DNA, 108 bp, Arabidopsis thaliana landsberg
ttttttttgtttttttattttttatttgtttttttttggttttttgttatatgttgttgttttgtttttttttttttgtattttttgttttttgtttttttttttttt

SEQ ID NO: 158026 - DNA, 145 bp, Arabidopsis thaliana landsberg
atttttgtatccaattttgtagatttcgtttcagaccactccgttgaatgttcaagatccaacaaggatgatgaatttggatcaatcttcaccagttgcaagaaatgaaactcagaatggaggaggcattgctcacgctgagttt

SEQ ID NO: 158027 - DNA, 204 bp, Arabidopsis thaliana landsberg
tatcagtattcaagcactaaactcgagatatatgatccatatcctctctcttcatgttaatagacttacaataagatgagtctgttgtaatctctattaatttcacatcacaactgaaataagatatgtatccacagtcaccgtcacattctttaatgttttgaaaaatattcagtagacaaaattaaataatgagtaattata

SEQ ID NO: 158028 - DNA, 297 bp, Arabidopsis thaliana landsberg
gctgtgcaaagtaaaaaataccagtggaagattcataagaacaacaagagaacacatacatgagtaaaaaacacttatatctcccatctccaactaacatcttcccgtttaacaacacacttgagagattcctaaatctaagacttttgttactgttaatggtggattctacatcatttgactcactatttaggtcctccacttatatttgcagaaggtaccttgctagggtagctcgatatatcaatgtcaatgagcgacatgtcatacattgtggaaacagagtccgaggcatct

SEQ ID NO: 158029 - DNA, 423 bp, Arabidopsis thaliana landsberg
aatacacccttaacatataagtaggcctaaaaaaccttcttatcagtaactcgcattctgtttcgacaccctcggcttatttccaacctttgcaattgttcattcctaataatcgataataatgaggtcataagaaacatttcgaccctataacctaccaaaaatcatatcaatctcttgctttatttttttttataataaggggagagaaatattttctttttgacacattagtcgatttatcaggtatgaataaggagtcaagtcctatgagcactaaccattttgatgaggtaaaaggaagagcagtgagattagctccagcctttgtggattatgttaggaatggatgtccttaagtttgttgattggccttctggatttttcattagtcggattgatttgaatctgcaatacttaaac

SEQ ID NO: 158030 - DNA, 412 bp, Arabidopsis thaliana landsberg
taataagtatgtttttaataatattaaaacaacctaccaaatactgtcgaaacataaaaaccaaaaaaacatgattgattttttttttttgagagaaaagcgaaagccacggtgtctcaaacggtatgtcgttgactttgttgtcgacatgtacaattgtgtagtggatgccttctatttcttcgtcttgttctcgtacgtatgttttattcttttttttagccattacgaaactagtctaatccaatataacctgtttttttaattgataaatcatttttaacaaactatattgaatctatttaatctaaatgaacatttaaatactatttcttattattgaaattttttttttttttttttacgtttttacataggaaaaaaaattacttagtatattataaaaatatag

SEQ ID NO: 158031 - DNA, 210 bp, Arabidopsis thaliana landsberg
caggggaaaaagctctggctttctctttttttccggcgaggaaggtggtgataattggcggcgatggagatactaagaacgaaatgggtggctatgacagctagtatatggatacaatgcgcaagcggcgcttcctacaccttcggaatctattccgctgtcctaaaatcgactcaatcgtacgatcaatccaccctcgataccgtctca

SEQ ID NO: 158032 - DNA, 329 bp, Arabidopsis thaliana landsberg
cttaaaaagcacacttgtttccaaaactaaatagggtcagtcccaaaattggatttgtatagtaacaaatgaataacggaaaagagagtttcaagatctacgaacaacagcagtagcgaaataaggatgatgggtgaactcaaacgataccttaagcgaacggtcttgacagaaaaggttcacagcaacaatattgcgttccgcgactttctctaatcccgtgacttcagccagcttatcaggatcgttggcgtaaccgacctttatgtccttagcgatcttttgagcatcgtgaaagtactcatacataggaagatgctgcagcaata

SEQ ID NO: 158033 - DNA, 102 bp, Arabidopsis thaliana landsberg
ccctaatctaatccatcctcaagaaccttaatcactactcaagcaacataactaagaacataaacccagaaattactgaaattatatcaaaatgtagatcta

SEQ ID NO: 158034 - DNA, 490 bp, Arabidopsis thaliana landsberg
cattcataagggcaactctagggttcagcaggtggctaacaggtgagaggtagataccctagacgatagattcaaaaatcgggtcaatccactgtcatgacagagaccctcataactctaccactttctaatctgacctctcgttgatgaaacatagcagagaagggtttaagcaacaatctaccaaagtaaataagcggactagccaatgtcttggtcaagtctacaaatctctggaattcgtaaatcagacatccatttgaacgtcttttggacgttggacgtctatgatcgaatctccacactagccagcgaaaaccgcataggggccaagcgaatccagaagggatctaacctaatcttaaccacctgactaacctagagattaccctaatctagtccatcctcaagaaccctaatcactactcaagcaacataactaagaacataaacccagaaattactaaaatcatatcaaaatgtagatcta

SEQ ID NO: 158035 - DNA, 395 bp, Arabidopsis thaliana landsberg
tggcattgagttgccatgttccacttgctgcagctgcattctcaacgcgtaattgttcacctgcattttttctaccttttgtcattcactctttcttttatgaggcatcatcaaattctaacaacatctgtttttggttcaattttaaaacaaccaacaccagaccattcaaagcaatagcaagggatatgcagaagctctctgtcgcctaaggcttacctccagatttctaagcttttcctgatactgaggaaccagttgcttcaaaagtcctagctgatggttcgcatcctccaatgccttctgccgctcatgctggatagcaacagcacgtttgaggactgtgttgtccttcaccaaggtctccacctgttgctgcactgccactttctcct

SEQ ID NO: 158036 - DNA, 125 bp, Arabidopsis thaliana landsberg
acacctagacaaattgcaatgataattttgtctatatatcataaattcaattttctaaacagacttaatcgcttgctgaatgctgatcgcgaacgctaacatatcatatgagtcatatcccaaac

SEQ ID NO: 158037 - DNA, 363 bp, Arabidopsis thaliana landsberg
  unsure (1)..(363): unsure at all n locations
agaaagaacaggtaggctcatagaagggctctggtttagatactaggtgaacttatcaagcttattaacaatgcatgctttagcataggatttatcggcttctctggttatcttagctttaagtatagagagtttcgcagaacgccaccggttactctagaatcatagtttgagnnnnnnnnnnnnnnnnnnncaatcttaatattagctagatctacaatttatctatctccctagacaattccttagacccgacgctttaatcaattgaatctacaactcatttacttgattatttgtctttaacattcaattacttcatttagcttattaaacaacatcataagtctattttgtgaacat

SEQ ID NO: 158038 - DNA, 83 bp, Arabidopsis thaliana landsberg
taggttactgtttatcgtctcatctgtaaggagacggtggaagagaatattttgcacagggcaagtcagaaaaatacagttca

SEQ ID NO: 158039 - DNA, 173 bp, Arabidopsis thaliana landsberg
ttgacgaacaactgctatgacagattttaaatggaatgctatctatcttcgcatttgttttttttacttccacatcttctcttttctctgggctccgaggctacgcacttcaatattacaacatcagcacaatatcctcaaatgtaaaatttggtgtttaagctttatctgta

SEQ ID NO: 158040 - DNA, 488 bp, Arabidopsis thaliana landsberg
atgatgaaaaaatgaaatcatccaaaatatttataatagtatcaaaatgttaaaagtgagaatgtataaaactttttctatatagatgaaacatgatgttacacccgattagaaagataccaaacgagctctccttgttcccaagtttaatatttcaaagccaaaataaaaaaataaaataatgttacatatcataagcacaagttgacgtcgaggacaaacaataagatgaccatttctggttttagaaacaagttgactatacatatcagatactcaaaaggagaactttaataaatcatcacttgcagatgaacaaccaaactcactcagatcactgagaaatctctcttcattccttttgtgatacattgagttaaccgaggaactcttagcggctagccccagcgcctggtaacaagcttgtgagcgaaggcacgccttgtctcctcatttcctcttgtgcttgcttcatctcctctggatct

SEQ ID NO: 158041 - DNA, 443 bp, Arabidopsis thaliana landsberg
cgttcaatccatggcagaggcaaactttttccgatccttcaccgcctcagatctagttttctcaccattgaagatctagttctcttacctttctccatgagacgctttccttcaggtctcggggtgctgattttgcttcaccgccgttcatggtaaggagtattttggttttgtttccttttgtgagagttcctagtctcagatatgttgattctatgtttgttttagactttgtatttttaattttgattatcaggattatgagtccggaaagtatttgttcagatatgatgtatttgtagcttgagttttttcccctttagtttgatcttgtattcgggagttttcatttgcttgccgactttaatctctagaaggattgtttccttgtcggcctttgtaatcatgtgactctaaattttatcaataaaatccttattcta

SEQ ID NO: 158042 - DNA, 328 bp, Arabidopsis thaliana landsberg
actcgcattggattacgagtaacggggtttgtttttctgtatcacaggagcttcaaaggatggcaaaagaaggccattacagagtttttagcagaagagagcatcaatgttgggaagccaaacgatttcacatgaactgtgagagacccccttaaaacatatcttgagatctgagtttttggtttattggttcagaatctatcattgatgatgatgggtttagattattttcagctgttacaagtaagtagagattgaaattcatctgtaagctgccctttttaaagttcacattcagatttaagatagaagaagaataaaacatgaa

SEQ ID NO: 158043 - DNA, 357 bp, Arabidopsis thaliana landsberg
gactaggttaacttgagggtctctgttgcggtggcacttagatttgggtaatgaacttgttgtttagggataatttattgagcatgtcagtcacctgtaaactgaggaaacgaaactactcaatacccccatcctcgagaattctttatccgattgattttattgtttactccactgctgtttactgtatcctgtcatctgctgcttagttttctgcaattcttttttgtaactcgaccttatactcgaccacccagttgtctggcaacagactgtgcagtcaattatctgtgtcatactgtctgtctgttactcgacctatcactcgacctcacccagtgctctgcaaagagctgt

SEQ ID NO: 158044 - DNA, 212 bp, Arabidopsis thaliana landsberg
gttaaatgatcattgttattaatttctagctacaacataaaataaatatctgtgactgaaatttgaaactagtttattttattcaagtataaatattattatttataaaattttatttaaataatctcacccatagctaaaacaaataagaggatgaaagtgaatatatatataaaaagtaaacattagtttacaccaatgcttgaaggctt

SEQ ID NO: 158045 - DNA, 529 bp, Arabidopsis thaliana landsberg
gacaaacaagaaaatgtttattcatttatcgattgatcttattcatcaacatcttcgacatatttcttccataaccaatgctgtctccaaagaagataaacctcttcaatcggaacctgtttcgtctccggcaacagaaagtaaacgaagcttcccatccccaatataagtccggcgaataaaaggaatattccgtacttgagatggcacagcgacaccaggaaacactgcgcgattagagccgtgaagaaaaggttcacgcacaccacaacgctctgaccggctgatcgagtctctagagggaaaagctcgctcggaactaaccatcccattggaccccaagatcgaccatacgccaatacaaatagacagataaggaccacaagaatcagaccgagcgattttggtagctccttaccttccccaaacttcaacgctagtgttactcctactacaacctgcgaaaaaatgaacatatttagggtttcaccggaagttacttgtttagcaagatataccttgagttata

SEQ ID NO: 158046 - DNA, 608 bp, Arabidopsis thaliana landsberg
gcttaggaaaaaaaaaatcataattactgatttgcccctgagggtatttcagtcattactatttctggtccatattgttctgatttcaacaacaacatgatgaacaaaagaatcgatgacaaggatggataagagagaatgctaatctgatcaacaaagaatctgttcgaaaattcaaagtaaatcattcattctcctctcatgatgatgatacatcaagacatgaagcttgttcttcgattcattgtctgtatttggaccttttctttgttgaactccgggtttatgcaaactcctcgtcgtcatcatcttcttcttcctcgtactcggaatcctcctctctttcaggttgcatcaatgtattcatgtcaaaagaagatggatcagtttctacctcttctatatctattgtgtcgtagctcattctctgttcgaacttctcatctgaacagtttagcatccaagccaatgaacatttgattcccttcttgattatcttcttgtgtctcggctttaccgtggactcaagcccatacgtaaagaatgcggggaaatccacaaggtcttgaagaggtcttctcatttccttttggaagtactcaaagctg

SEQ ID NO: 158047 - DNA, 154 bp, Arabidopsis thaliana landsberg
agatccaaaacgcttcatctacattttaaaacaagaaggaaaaattacaataaaaggaacgagctaagagctctggacttgactcagagtttacctctgcttttaaagccgagtgcttcactgcctaaaaggagtgggatttaaagtttgaaca

SEQ ID NO: 158048 - DNA, 283 bp, Arabidopsis thaliana landsberg
cccaaaggatgcaaggaacagatgtgacctttcgaaaggatgcaaggaacggatgtgacctttcggaggggtgcaaggaacggatgtgatgcttcgggaagcatccattcgccccctatataagggaggacgcccaaggcatctcacatcatctcacaacatccaaaacaccataaaacattcttaaaggagtcccaacacatcctagagttgttggtcggaaagggggtgcggctcggcgagtataactcgaccgaactgatgcgcatgctaccttccggtc

SEQ ID NO: 158049 - DNA, 153 bp, Arabidopsis thaliana landsberg
aaaagcccattatagctaagtgggtcaccgtttactctcgcttcactaaacgtcaccgtttgggcaatcatcgtcccttcagttttttttttttggttttggtgtctaccgggacttatcgattcttccttaaacaggggaactactatgctc

SEQ ID NO: 158050 - DNA, 152 bp, Arabidopsis thaliana landsberg
ggattatatgcacttctgggacccgaaactcttgaagaatcttttcccgttttcggttatgtatggaaagatagttatagtgtggcctccatgctgggtattcacttaattttgttaggtgtaggtgcccttcttctagtattcaaggctct

SEQ ID NO: 158051 - DNA, 466 bp, Arabidopsis thaliana landsberg
ggaacatgcttccctgcaccagtctcgctaaagaaagtattgaacgcatcgtgtgcaacaccaactgtagtatcactgtaacagagtaaaacattcgtctctcaaaaaccttcagatccacagaaacagagtataaaagagagaattagggtttatacctcggcatcattccgtcgggctggattccatgttcgagacagtaaagctcccagcaggaatttccgacttggatcccggcttgtccgatatgaatgctaatgatttccctcatcttctctcagcagaaaccctaattcgagcgatgctctgcgacagacggagaaggaggaagacggagatcgagcaaatgaaggcggtgagagtgagataatctttttttggtttaacttcgttggcaaattaggtttatattttgtgaaaggaaaatgattaatttattgaattggatttgataatttgttggggt

SEQ ID NO: 158052 - DNA, 520 bp, Arabidopsis thaliana landsberg
gagagaggaagagagcgacactatggcgatgacacttattaacagagcaatctctagaaccgaaaccgttggtgctttcagactctcgcttaatctcttaagaaatttctctgcggcgccggcgagtgaaaaccctagctccgattcgagtaaaccgaaacgaagaaagaagaagaacttaatcgaagttgctcagttcttacctaattggggaatcggataccatatggctaaagctcattggaacggaatctcttatgaaatcactaagatcaatctctataaggttcttcttctccttctctttcatctctgaaaattgaaaagtttacatttttcgcatgctaagagaatgtttctattacgaaatcattttgggtttgtttatctcatgctaagagaatgtttctattacgaaatcattttgggtttgtttatcttatttgggtatttgtttgattttggattcaaatgcaggatggtagacatggaaaagcttggggaattgttcacaaagatg

SEQ ID NO: 158053 - DNA, 306 bp, Arabidopsis thaliana landsberg
acagagttgacagtggctcgctatactctctttcggagacaacactatgttcagactttggtctgcttcctcctacgtggtcctgtccttaagttccctggccagctctttcgattctagtcagagaaaccaaaaggggatttactggtctctgctttggattctaaaccgatgaagcctgtttcagtgaagcctgttttaatgaagcctgttttaatgaagcttgtttcattgaagctcttaatgtctcatctggtactgtccatgaaagtaactgtccagctgaatcaccgcttagtaactgct

SEQ ID NO: 158054 - DNA, 179 bp, Arabidopsis thaliana landsberg
aaagactcaacttattacatatgacaatgcaggatctggattcttagatacaaggccctttctcttaaaacttgtgatgtatataattgtggtaaatattgtatatcaagacaaaacacatgtcttttttttgtgttttggtataagaatcttctctttcaagcatcagtttgataaca

SEQ ID NO: 158055 - DNA, 400 bp, Arabidopsis thaliana landsberg
attaaatcagagaatagggctggacatatgaataacccattcgagttcgggtagaacccgttcggatttaggattaatggtatatgatttactacccaatagaatacttctaaatattcggttctggttcgggtcgggtccagttgggtttgggtcagtttggataaaaagtttcagaccctaaaaatacacaaaaattagaaacgggtattttgtatgtagatagtgggtctccaaacaaaaaaaacttttaaatttgttaagttttaataaatttaattatatttgaataaattttactaaattttgacaaacataacaaataatttttgaatagtttaattgttttgtatatttaggtccaaaattaattgacatatttagatttataattataatt

SEQ ID NO: 158056 - DNA, 404 bp, Arabidopsis thaliana landsberg
gataattaaatcacagaatagagttgggcatatgagtaacccattcgagtttgggtagaacccgttcgagtttgggattaatgggtatatgatttactacccaatagaataattctaaatattcggttctggttccggtcagatccagttgggtttgggtcagtttggaaaaagtttcagaccctaaaaatatccaaaaaaatagaaacgggtattttgtatgtagatagtgggtctccaaacaaaaaaaacttttagatttgttaagttttaataaatttaattatatttgaatatattttactaaattttgacaaacataacacataatttttgaatagtttagttgttttggatatttaggtccaaaattaattgacatatttagatttataattataatt

SEQ ID NO: 158057 - DNA, 415 bp, Arabidopsis thaliana landsberg
cgagattctcagttagaggagcaggcgacggagaaggaccaagtagcatcgatctccaagcccgggaaaggccacgacttccttcactctatgaaaatgaagaagcgtccgagacccccagggccggaagttccggtgaagaagccgaagcccaaactcagtatcaaggaatgagaccagaatctgaggatcgaggatcaacgagcgataatagcgatcgttaagttgtgattgaggagagacgagttggtaaatttgtaaatagtcagagttcttctacgagcaaagattagcctctttttgtaacgttattggatccacatgttattgattgtcctatttgttgcgagccattgaagattcccatctttcaggtcttgcttagttcattgatgacacaatccattgaagcact

SEQ ID NO: 158058 - DNA, 1917 bp, Arabidopsis thaliana landsberg
actaacctattgacatttgagctttgagttctaaatccctataggagaatcatgagcaattacagtggcagttcttctgttgatcctgactacaacatggatgagacagaatcgtcatcttcaaggccagagagagaacagagagaatacgaaagtttcagaaggaaagctgagatatcccgaggaaagagagcgatgacagagaggtatgagcttatagacgaagatctggaggacgagtacatgcctgaacagactcgcagagctaccaaacttctgcacaagcccgacatattgcctgctgaggaatatgttaggctttttaagctgaatgagttctgtagcacgaggtatccttggtcgacctcacttgcacaactcggattgttggaagatgttcagcacctgtaccaaagttgtcatttggacactttgatggcttatccgtatgtagcatatgaagatgagacaatacaattcctctccacactgcaagtagagctctaccaaggtatgacctctgatgagttggattgtgaaggattgggattcttgtgattttctgtgtatggtcatgagtataggttatcaatcaagcgattggaaggattgtttggcttccccagtggaacgggatctaagccaaagtatgaaagagaagagctgaaagacttgtggatcaccattggcagctctgtaccgttgaatgcttccaggtcaaagagcaatcagatacgcagccctgtcatcaggtacttccagcgttctgtagccaatgtactctactcccgagagattacagggactgttactaactctgatatggagatgatcgcaatggccctcaagggaactcttcgccaaactaagaatggtatgcccctccagggtgaaatcaatgacacacccctagctctacttcttctgatccatttgtgtggatacaagagttgggctgtcagcaataaccgcaagagagcacgaggcgctttgtgcataggtggcgttgtgacaccgattttgatagcttgtggagtcccaatcatttctgctggactcgagccgcgagcaatggatatcgagcacctacgtcactgcgaattcctggagtttgcaatggttgacgatttccacaggttcaggtttgagcactctacagacaggagagctaacatccttctccctagccctgaggttacacggataatagagggagataacattgattttaggcctgaggttggatgcctctactatgagaacgctccgccattggatgaggatgatcttcttgaagaagctactgaggatgggatggatgaagatagggcagtggagttcgacactagcatgtatcactttggtgagcatgtacctccagcgagagagagcaagaacttgagtgaagctcacagaaacaataacaagttacaaaagtggtgcaagaagtaggacaagttcatcatcaaatgtctaaagactatcaagtctctgaaggccattctaagctgctcttcctccaccactgctattccatagggacaacctcctctggagatgccatcgaggagatttgatgagcctgagcacaggcctaagcttagcgagcagagagtcccacatgtcccggctaggcattcgtcattcgaatcccgggagcacaagagaagaaggaaggctacactcactcgatctagcagcagatcacgcctcattcactcgagaaggtcactcgaccgcggtgctggccgcagcataaggagagaggtcgagtatcctcagagcggtgctggccgccacagagctgatgaggtcgagtacccacctgctggagctgatacagaacaaggtggtttgtctatggcctgggagcaatcacaggcagccattgacgagcaactacgttcattcttcgac

SEQ ID NO: 158059 - DNA, 322 bp, Arabidopsis thaliana landsberg
cgcctgatgatgaaccgacgcctgaactgaagacaagaaccaaaattcaacgaatagtacctcctgatgatgaaccgacgcttgaactgaagacaagaaccaaagttcaacgaatattacctcctgatgatgaactgacgcccgaactgaagtcaagaaccaaagttcaacgaatagtacctcctgatgatgaactgacgcctgaatttaagacgagaaccaaagtacaacaaagaatacctcctgatgatggcagagccggaaagtgcaagcaacctgtgaatcatgttactaccagcggatcaaaaaagacggaaatacc

SEQ ID NO: 158060 - DNA, 1241 bp, Arabidopsis thaliana landsberg
  unsure (1)..(1241): unsure at all n locations
cagcattacgttgaaatcttctgatcaatctgggttttgttaaatcattgattcctcgggatgtgatgatttttttgggtaattcgttttcggcggaatttgactctggattatacaatgaattggtttcgttttgatcaacattacatcgtttttgaatttttttaaattttggatgtttcaggcgaaggtttgagttctaaggagtgtatcgtttaatcatcgagctctgttttccttctttcccgaggaagctctagggctttttcggtggatcaagagggagggagggaggattaacacgtaaataagatttaacaggaatttgcggaattttgattatatcagtgagtagaagaaatgangcgcagtctcgggtgtaatctcgaggcaagttttgcctgtttgtggtagcctttgtattctttgccctgcgcttcgtgcaaggtctagacagcctgtgaagaggtacaagaagctcattgctgagatttttcctcgtaatcaggttcgtatccagccattttcatctcccttctattagacttgtgttgacttgttacttcttgtagtctatgcaagttggattttgatttcctttgacaagttcatacttaactctctttaattactgagggttatggttgatgattgacttacgttgccatgcttctggaagcacaaaattgttaaatcaaccactctgcaatctgtgtttggaatttttccagagtggcataaatttttggtttttaatcttctatgctttcccttgtctatattaaactttttcgatcttaggtactataatagaaaactggatgtccctcttggttatcttgttgggttggtttaacttatcaatgcttctgatttctggcaggaggaaggcataaatgatcgaaagataggaaaattatnnnnnnnnnnnnnnnnnnnngctgtgcgtatgccaaaggtataatttattcagtgccaagtctagatattaagtcttacaaatcttgagctggcctggagtattagcaattccttgacatttggcatttctatgttcatatttgagtcagattactcgttatagcaatgttttcagtttgctttgttcccaaattttgttctctggtgttgaaatttaagtttttccagatatcagattccctggggcatggatattacaaggaattgaggaatgagaatttccactcggcaaagatagccatgtgtattgcagaagactt

SEQ ID NO: 158061 - DNA, 273 bp, Arabidopsis thaliana landsberg
  unsure (1)..(273): unsure at all n locations
cgaacacgaacagtgaaccgattatactatgtttaattcataattaatcacctaacgcatttcatggatcttatccattaattcaactcttagatttggactatgaatttaaaactctggaatccaaaagcccaaaacctactagaaatttttctatgatttaaatgatggtgtaggagtagccgagtaggacnnnnnnnnnnnnnnnnnnnnnttaattgatagagtccatcgataacgaagctttgagcagcacaaacgatccgcactaca

SEQ ID NO: 158062 - DNA, 524 bp, Arabidopsis thaliana landsberg
aaagcatctaacttacaattaaagacaatccatggcgatcagaatccctcgtgtgctgcaatcatcgaagcagattctccgacaagccaaactgttgacatcatcttcttcttctagctctcttgatgttcccaaaggctactgggcgggttacgtatgagaacaaaatatgaagagatttgtagttccggtttcgtacttggaccagccttcatttcaagatctattaagaaaggcagaggaagagtttggatttgatcatccaatgggtggcctcacagatcccttgcagtgaagaaatttttattgatcttgcttctcgcttcaactgatcatgactcactcgataaccttacttttgtcattgatttttgtacattttgttttcccaattagttttcttcaagagatgagatgacttagaaacagcatctctccttgaaagtgaaacagagacttgtaacactctttttcctcacttacagtgagttggactcaaatctaatcaaaaccatcatttagtc

SEQ ID NO: 158063 - DNA, 1908 bp, Arabidopsis thaliana landsberg
actaacctattgacatttgagctttgagttctaaatccctacaggagaatcatgagcaattacagtggcagttcttctgttgatcctgactagaacatggatgagacagaatcgtcatcttcaaggccagagagagaacatagagaatacgaaagtttcagaaggaaagctgagatagcccgaggaaagagagcgatgacagagaggtatgagcttatagacgaagatctggaagacgagtacatgcctgaacagactcgcagagctaccaaacttctgcacaagctcgacatattgcctgctgaggaatatgttaggcttttcaagctgaatgagttctgtagaacgaggtatccttgctcgacctcacttgcacaactcggattgttggaagatgttcagcacctgtaccaaagttgtcatctggacactctgatggcttatccttatgtagcatatgaagatgagacaatacaattcctctccacactacaagtagagctctaccaaggtatgatctctgatgagttggattgtgaaggattgggattcttgcgattttctgtgtatggtcatgagtataggttatcaatcaagcgattggaaggattgtttggcttccccagtggaacgggaactaagccaaagtatgaaagagaagagctgaaagacttgtggatcaccattggcagctctgtaccgttgaatgcttccaggtcaaagagcaatcagatacgcagccgtgtcatcaggtacttccagcgttctgtagccaacgtactctactcccgagagattacagggactgtcactaactctgatatggagatgatcgcaatggccctcaagggaactcttcgccaaactaagaatggtatgcccctccagggtgaaattaatgacacacccctagatgtatttcttctgatccatttgtgtggatacaagagttgggctgtcaccaataaccgcaagagagcacgaggcgctctgtgcgtaggtggcgttgtgacaccgattctgatagcttgtggagtcccactcatttctgctggactcgagccgcgagcaatggatatcgagcacctacgtctctacgaattcctggagtttgcaatggttgacgatctccacaggttcaggtttgagcactctacagacaggagagctaacatccttctccctagccctgaggtcacacggataatagagggagataacattgattttaggcctgagattggacgcctctactatgagaacgctccgccattggatgaggatgatcttcttgaagaagctgcctcggatgggatggatgaagatagggcagtgaagttcgacactagcatgtatcactttgctgaacatgtacctccagcgaggcagagcaagagcttgactgaagctcataaaaataacagtaaattgcagaagtggtgcaagaagcaggacaagctgatcgccaagtgtttcaagcttctgacagataagctgagttgctcttcctccaccactgctattccacaggtacagcctcctatggagatgccatcgaggagaattaatgcacctgcgcacatgcctgagcttagcgagcagagagtcccacatgtccaggctaggcatttgtcattcaagtctcgggagcacaagagaagaaggaaggctacactcactcgatctagcagcagatcacgcctcattcactcgaggagatcactcgaccgcggtgctggccgcagaagaaggagagaggtcgagtatcctcagagcggtgttggccgccatagagctgatgaggtcgagtagccacctgctggagctgataaggaacaaggtggttcgtgtatggcctgggagcaatcacaggcagccattgacgagcaactacgttcattcttcgac

SEQ ID NO: 158064 - DNA, 474 bp, Arabidopsis thaliana landsberg
caaagatggaagtcaaaggcaattaggtgttttccgggtgattccaactccaaacatgtctccaaccagaaatactattaaacttaacggttagaaattgtattttttcatttgatttttaaagccaaaaagacatgaaagtttgatatttttgtgattatatccttgtaacaaaccctgtgccttatattagtgaaatgtttcagacgcgaatgttgatggatctgaagatgttcgtaaagaagaatgctgtgtgtagaatctgctttgtagaattgggagagagtattcaggagccttcaatatgtaatgtttgtgtagaggggacctagctcttgcccacaaagaatgttcaatctaatggttctcccttcaagggagcagaacatgtgatgtgtgcaatgcaaaaggctcaccctctccctgtgccccttcttagaaagctatattctcggggtagtattgaagctccag

SEQ ID NO: 158065 - DNA, 69 bp, Arabidopsis thaliana landsberg
aacgtcatctctttctcatctcgtgaaatcaacaccactgccggactccaacgacctacggtgaaaaaa

SEQ ID NO: 158066 - DNA, 290 bp, Arabidopsis thaliana landsberg
cccacaaattggcgttttatacatccccatttaaaaagaatggtaacgccgactctgtgaagcatttttcagcactcctttcctttccctcacaaacaaaacaaataatatctaacaaaaaaccattcacaaaaaaatagagagaatcatctgagagactagtagtgatgatatgagcttcttctcctacaatctcagaaaccttcgatcactgttttagataatctctacaacggatacaatggaaagcaccgattcttccggtggtacaccaccggcacaacctaacc

SEQ ID NO: 158067 - DNA, 288 bp, Arabidopsis thaliana landsberg
ctcaccactgaatttacacattatttttcctttcttgttccgtacattgttttcgtatcaacaaaaaagtataaattatggtaaaataattaatcgtagaacaacaaaggatagcaaacgataaccacataaatagtactgcgccgaacactttgtgtacaaatatctatatatgtaaagactcaaaagaaaagtaaaatcaagttttgaaaggagaacatgtaaataacattcaaaaaaaaaaaaagccaagtagaatgataagttctgaattatacttttaatata

SEQ ID NO: 158068 - DNA, 90 bp, Arabidopsis thaliana landsberg
taatcttgattttgattttgtgttgtttttgtcgttaagactttgaaagtctttttgtaatccaaatgaataaattccttttctttttct

SEQ ID NO: 158069 - DNA, 557 bp, Arabidopsis thaliana landsberg
cttattgaacaatgctctttcttttgtaaaagctctctcaatagcaattcaacttttttttggtctataagcaatttccttataccatttaaagccataacatacctatgataatcgatgattaatgggggaaaaaaactaattgcaaacacctatgaaaaggcctttttattaatgaaacaaagaaaaaaactcagaaaatagtactactaatccaccactgtttataaataaaccggtgatatttaaaccaaatgcaaaaaccataaccggacaatgagaaagtactgatgatgaaaactactcaaatgtgtaaaaaaagcaagaaaggttcgtaaaatcagaaatttaaaagtaacgataatttgagctaaaaataaccaaaactttggtggctttttctttttggctcatactgctctcaagctttgccactggctgctggtgggttaagctcatcccaagcttcaatccatgtaaccatggcttttgtaagcttgtcaaagtacgggtctaaggagctcaacttctccttgaccatctttgagagctcaatg

SEQ ID NO: 158070 - DNA, 793 bp, Arabidopsis thaliana landsberg
atctttatctctaaagaattgaatttgttggttttttttacttttttcttcattgtatcgtgttattactctcgtttattaaaattactatcaaaatttataagtaattttaagggttattccaataatttacgttttaaaatctcttgtaaaatactgtttaaaatgcctttcaagatccttttaaaataccttgtaaatctttcgttatgccacttacatatacttttaacgattgtaaatcaagttaaacacttttacaagcttttaaaatcccttgtaaatcattctctgccactaacttatgcttcttaaacgattgttaatcaagtaaaccccttttaaaagctttttaaaatctcttgtaaatcattatttaccacttttttatcctttaaaaccgattgcaaaccatgtaaaccctttttaaatcgtttacaaggctttacaaatcctttaaaaattcttgtaaatcgtttattaaaattactatcaaactttacaagtatttttaatagttattccaataatttaccttttaaaatctcttgtaaaatcctgtttaaaacgtcttttaaaatctttttaaaataccttgtaaatatttcgttatgccacttacatatacttttaacaattgtgaatcaagttaaacacttttacaagcatgtaacttgaatcttttaaaatgtcttgtaagtcgtttattaaaattactatcaaactttacaagtaattttaagggttattccaataatttaccttttaaaatctcttataaaatcctgtttaa

SEQ ID NO: 158071 - DNA, 354 bp, Arabidopsis thaliana landsberg
ttctctttctctctgttttcttcttcttccgccgaatcagaaagcttgtctttttctttactccggctatcaaaagttctcggagtttctctgagattctcatttccgaccttcttcgtatctttctctgcggcaagatttgcagctagagttttttttctgttttccttctaacgaatccaaaaatctccggtttgctggaattgtttttccctaaaggtggaagctttatgctggttctgatttcagaagcaaaccgtttgttgttgtctaactaaagcagagataaatcgaatcactttatgggatctatagaaacagaaggagaacagaggaaattaagctgatttttca

SEQ ID NO: 158072 - DNA, 188 bp, Arabidopsis thaliana landsberg
aaatttcaaaaacttttgaatgttttcgtttggaatctgaggttgtttgctcgacagttttggtgggtttctgctgaaatctggattaggattagggtttttcgtgaatttgaaaatggtggagcacaagagtaccaataggtggaactgggaggtgattgggctcgagtcgaagaagtcgccagcga

SEQ ID NO: 158073 - DNA, 172 bp, Arabidopsis thaliana landsberg
gtccgtatgagtctttggctttgtatcttctaacaaggaaacactactcaagcttttaagatccggttgcagtttaagttcttatactcaatcatacacatgacatcaagtcatattcgactccaaaacgctaaccaagcttcttcttgcttctcaaatctttgatggtgta

SEQ ID NO: 158074 - DNA, 380 bp, Arabidopsis thaliana landsberg
tcattacctaaaaggcaaaaaatattaattttttaaatattattatttatatatttaaaatttttaaaacattattaatatttgaatttataaaaagtttgatatattacaattttttaatatcattatataatatatagagtttaaaaaaatctcaaaaaaaaaatcgtcatattttgtgattcgaaattttaagaattaacatatattaagcaattggcgaaaaatgtgtgggttcaatgtcccgcaacgactaaaatattttgacaatgattcataaacatattataaataagatcaacattaataaaataaatagtattttttttttgacgggtttggcaggacgttacttagtaacaatgataaattataaaata

SEQ ID NO: 158075 - DNA, 323 bp, Arabidopsis thaliana landsberg
tattactagattttaacccgcgatataccgcggagacaattcattttttaaaattaatatatatataaaaatttgtaaattattttataatttatcattgttactaagtaacgtcctgccaaacccgtcaaaaaaaaaatactatttattttattaatgttgatcttatttataatatgtttatgaatcattgtcaaaatattttagtcgttgcgggacattgaacccacacatttttcgccaattgcttaatatatgttaattcttaaaatttcgaatcacaaaatatgacgattttttttttgagatttttttaaactcta

SEQ ID NO: 158076 - DNA, 116 bp, Arabidopsis thaliana landsberg
gcaccagcagtcttcatggcagcagcacaaccctttccaacatcaccatatccacagataacagcaacttttccagcgatcatgacatcagtggccctcatgagaccatcagggag

SEQ ID NO: 158077 - DNA, 253 bp, Arabidopsis thaliana landsberg
tggaaaccttaaaatcaacttcatctgttgcagtttgctcttcgccatcagaagaatcatcactgccgctagacagatcatcaaccacattatttgacttcgggctgtgcatttgttgagtttcatcagtttcagtctctaggttcgatgcctctggtttattgggaggcacatccattggtccatcctctgttgaaactgttgaatcaaccatcggtatgctttttgctgtgctagcttcgtttaagggact

SEQ ID NO: 158078 - DNA, 122 bp, Arabidopsis thaliana landsberg
tatcagaaagaaggaacaactcgatatcatgtgttgtacattagcatcgtgttgaacccttggtcctcggtttcaatttctctctttgcgaaccggccattaacttgcggtctcatctctgc

SEQ ID NO: 158079 - DNA, 623 bp, Arabidopsis thaliana landsberg
agggtttctattgacgctgcacacaatgggtccagaactgttcttcacaggtcccgcagaggcattgttattgcagctctctgcttttctcttttgtttcttttctttatccgtcatgtgaaatttcaaaggaagcatcatggaattcgatgctcccagcagctggaacttcgcttggtcgttgctgcttgcaaacaccggcttttcatgagtattgtaaacaggagcaaaggtgtcttttctcttggttttcttctcttgatgatgaggactccatgaagcattttgaaatgaaagtgaagacgtcccaataggtggagtgatggggaaactcttccgggaaggctcttgtgtgaatctcttgctgtatagatcaaaaggtatctgcttagttgagtaggctgacttactagagtcccctgtttgaagctctataaactctttggactggttggctggcggaaaatgtcttttagtaaatttagtgtttccgtgttggtcagcgggagtagttgacctcaggcgaggatccagaaggctgagtagatgcaatgccggtatagagctctcactagaaaagttatctattggcctactactactactactaaccccagcagcat

SEQ ID NO: 158080 - DNA, 230 bp, Arabidopsis thaliana landsberg
atccctgatgaattgatccttcgtttgcgccactgaagctatgttatttcaaagtgtttggtttctaaagttcccttggtctagggtctacgtgcagattctggtgaagaaagtactggtgattcttccaaacatatacgcaaaacgcagcttcagtaagtacatggctcgtgcctttcacaacatcaagtttcaccattctcattcctgcaccctccgtatgggagctt

SEQ ID NO: 158081 - DNA, 175 bp, Arabidopsis thaliana landsberg
tttctgatataatcagctcatgccagttgatttacatacatattttctttgttgatattgatttgtgagatgattaggtgcagaaagaaataggctttttagctttttaccttgtctgaaactgaaactcttctgtctgaagcaaagtgaattgaataaacaaaaacagaacaga

SEQ ID NO: 158082 - DNA, 989 bp, Arabidopsis thaliana landsberg
tcctccgtcaaactttttggtcggttcccggcaccgacgtgtctggcaagaacaacacgtgtgatacatcactcgatctcagagctgtgagtcgataaaatttgggttttaaaactatactattcctcattgttatggctttcgttaattctggagtttactacttcattcttcgagcttaagttttaagggtagattaaattagggtctcggtttcctttccggtgagtcggtggattcatagaacagctcaaaagattcttcttcagtttcatgattcctgtagttagaaaaaaaaaaactttgaatctcaacgaaataatttttattttctgaaaattttgatgtgattggaacattttttgtcttctctgttttaatctttagtaggtgatgaagtggtctaaccatctaaaatttgtggggatttggttgtaggaacagagtttggagtagacgactataatttctgtttctattgagagctatggcactacgatcagtaagcaggaggctcgggagcagaattttgaatcaacgttcctttgttgcttcgcttcactctcatgccacaagtttcggtaacattcttgtggatgactttcacaattcaagatcatctgttttgatgctatacgaaatgctttgttttctattatatggcttcttcttgagtttctactgtgtgagtttaacttcaatgttttaatttcagggtttcaagaagtaaaggaagaagagaaaagcaaattggttggtaatgtattcaccaatgtagcttcgagttatgatattatgaatgatgtgatgagtggtggtttgcataggctatggaaggaaaggttagactccgtgacacgtttatcactagtgttatgaattgctcttgtgtaaaaattgacacttttgttggtcttgtgatttcagactcgttgggaagctaagtccatttgcagggatgaagcatcttgatgtggccggaggaacag

SEQ ID NO: 158083 - DNA, 168 bp, Arabidopsis thaliana landsberg
cattgtgtctgtgaagaagtggaggaaacagaggcagtagagtgggtttagtgataaagctggtgagcctgaacttgatttccatagtggaaagacgctccagagaggaggaggtaagaaaagaccatgtgtgtctcccggagatcgatcaggaggtaatggaaggcc

SEQ ID NO: 158084 - DNA, 330 bp, Arabidopsis thaliana landsberg
gaagagagtgagaaaacagggaaggtgacatcagctggcatgtatttcttacattttcaagtgtatagaatggatacaactgtcaatgcggtatgcaagttctgagctcttttcctttcataattagctggcatattagaatatgcagaggtactaaagcaatccacattgtggttattgtgcagttggctgcagccaaggaccctgaatctgctttcttcaagcgattggaaggtcttcaaccttgtgaggtttcccaactgaaagctggcacgcatatataaacagattatggtatgacttattactttacttacgatagctggggca

SEQ ID NO: 158085 - DNA, 457 bp, Arabidopsis thaliana landsberg
atacacattataaactaagcacacaacttaacacatatatatatatacatgtgtttttataactttaggattttcaagacctagcttaggtagttaggctccattattggcgtaggtattaacgagagcgagcgcattactcgtgaacctcttgacgtctgcgactctatcgcaaatagccgtcttcgtctctccgtcttccatctcctccgtgatcccatccgtacacgtctcctcgtccgtcaacgccgcgctcatccacgtctgcacgttactcatctgaaacctaaacgccggagctccgggacgacggtggttcatctctcggagctgccttagggagccacgcatctgatccaccgcatctcccacgttcgaaacgcagtcgttgacggcggcagaggatgcagcgccagagcgacgcgagagtttggagaggtaagccgccgtgtatttt

SEQ ID NO: 158086 - DNA, 232 bp, Arabidopsis thaliana landsberg
taccttagaatgggtaaccgacgatgcagaaaagacacgagagcttttccgaccaatcgctaccgcaagagttctaggagctcggcttttagggaaagcctttgagatcccgaagaaaaccgttctcgttaactgcattgccgccattttaatcaatcacaaaaacaatttcttcttacttcttctttttgcttaatttaagctttaccaaaatcttgttttttggaaggtt

SEQ ID NO: 158087 - DNA, 62 bp, Arabidopsis thaliana landsberg
ggcgctcaagattcaaagaaggcgaagctatactgtagaattggcaaggaggttgtatctgc

SEQ ID NO: 158088 - DNA, 205 bp, Arabidopsis thaliana landsberg
  unsure (1)..(205): unsure at all n locations
ttttttttttcgggtaggttttttttttttttttagtatttttggtgtttggtaaattttttttggtgggtttttttttttttttttcaaattttggggttggggggttttttggtttttaaaattttcattngctctttgtnttttttgttttttttttttaaatttttttttttttttttttttttctttttttttttatttt

SEQ ID NO: 158089 - DNA, 356 bp, Arabidopsis thaliana landsberg
gactaggttaacttgagagtctctgttgcggtggcacttagatttggttaatgaacttgttgtctagggttaatttattgagcatgtcaatgacctgtaaacttagaaaacaaaaccactcaattaccccatcctcgggaattctttatctgattgacttctttgtttactctactgtcgtttactgcatcctgttatctgtcgcttaatttctgcaattctttcttgttactcgacctcatactcgaccacccagttgtctggcaacagactgtgccgtcgagtataggtgttatactttctgtcagttactcgacctgtcactcgacctcacccagtgctctgcaaagagttgt

SEQ ID NO: 158090 - DNA, 374 bp, Arabidopsis thaliana landsberg
gcccaaggagaatgggaacaaacggagcttgaattcgtcttcactgacaccattgatctttgttaggttgcagagcctatcgaattcatcaagggggacgagtggatcctccattggcagaccatggaatttgttcccctgaatcatcgagatgagaccactcttaatctcgaagttgttgttctggatagcaggaggtgcaatttctttcctctgacggtgatcacgtggtgcatctccagcaccaatgttgacagggccattttgttgattccgttcgtcagccatttcgagtggttgctgaggtacaaggttgaatgtgtttctaatttctctgagttcgcgagttatgcgatcgatgttatcattgaaaa

SEQ ID NO: 158091 - DNA, 110 bp, Arabidopsis thaliana landsberg
caaacaaaaaaaaaaaaaaaacaaaaaacaaaaaaaacaaaaaaaaacaaaaaaaaaaaaaaaccaaaacaaaacaaaaaaaaaaaaaaaaaaaaaaaaacaaaaaaaaa

SEQ ID NO: 158092 - DNA, 524 bp, Arabidopsis thaliana landsberg
atcgtccatacaggttgtctgaccacgagttcattgcagagcttggaagttggaattgcaatcaagcaggtaacttgtagctctagtcaatttgcgacttttggtcattctagggctctctgatctcaaactttgttctttaatcctgcatgaatccacctttacgtgtttgtttctcgttcggttcctattttgctaggaaattgttgagtagcctccatataaagacctatggtggaggaagaagtggcatcacagaggaaacaggtttgtgattcctctgagttcctcatgatgctagttttgtagaaaagtgtcgagcttttgagttaaggaaaaaagatgtgcagcatttttaattttattttttcttatttgtctctcctttttcatcatatacaaatacaaaaagagcaaagaggcctttccaatatcggacattcccataccctatgcctttctttcgtgtgtaacaaaagaaaatgcgggtttcttatgaaagtgaaacacagatttgtcacgtt

SEQ ID NO: 158093 - DNA, 219 bp, Arabidopsis thaliana landsberg
agaacttggtctacaattgcaatattagctctcacatcccatataattttaacatgataattattgatacaattctctgtaaattttatccacaaaaatataacccacaaagaataatgagatcaaagccttgcatcaacattaaaaccaccaccacctcctctcttgatttctgttgtgttcttcaaaacttacccacataaaaacataacacctcaa

SEQ ID NO: 158094 - DNA, 173 bp, Arabidopsis thaliana landsberg
agacacataagtatacattcacaaaatgagaggactttgctgaaagtttgttacaaaagagacataagcttaacaattaataaaacaaaacaccaattagcaacttaacaaatgaagatcttatacttataaaatcaagactttaatcataccattaaagaaaaagaagtaaa

SEQ ID NO: 158095 - DNA, 406 bp, Arabidopsis thaliana landsberg
gagaactacctttttttttttctctctcttatttttctcccttctctcttcaactcgccgctgcttgtgttcttcgtctccgaccggcgcgtgtgggccaccatggtcacggcgtcggttggttttttcagtttttgtttagttatctagtttcatgtctttgtgtggagagatctgtggattggtttcattttgattccttctctacttttttctctttttagatctagatttttgttgcttaaattttgttgcaggttcttgtttcttctttgcatgagtcctccttggccctaaccgcgttggctctaagccactcattgtcgatgtgtggtgattcggtttgggcgacctaatttttaggtttcctcacacagcttcaacaaatggatctagggcaagatcc

SEQ ID NO: 158096 - DNA, 158 bp, Arabidopsis thaliana landsberg
ggaaaagaagaaatcaataattaatctgaagtggtatatattacatcaactacaacacacccaacacagaaacaaagttactttgcagttttgtgtaacctaaggacttatgaccgaccaaagatgatatccagaaacatgatcctatagtttcttct

SEQ ID NO: 158097 - DNA, 258 bp, Arabidopsis thaliana landsberg
accatggtaacccttaattgtaactttggcataatctcttggaacttacaaactcaatgaaagcttgatttcgattagctccaacattgcattttgtattaacaacagtaccaaaaggctttccgagttcaattaactcctcttcagtgcattcccatggcaagtttctcaaatgaagaacctttgaaggaggttgcgtgtaacgaaactgtggctggcttgaaacagaagacattgctcaaaacgaatcttagagct

SEQ ID NO: 158098 - DNA, 266 bp, Arabidopsis thaliana landsberg
taaaatttttaaaagaaaacgggataactcaaaggttgtcaacgtgtattgtagggtttcccttacttcaaatgtttattagaacatagaatataagcaatcctatccactgtggctaccaaaaatattggatacggacatcggatattgcacatacagcaaataggccgagaagcagaattgttgtgttgcaaactaatatcaacctcaccaattttgtaagtttgaccagccttataatattgatctgggccaagtaagcaatt

SEQ ID NO: 158099 - DNA, 190 bp, Arabidopsis thaliana landsberg
ctgagaactctggaaatgaaaactaaagattctgtcaaatttcaaaagctttatcatcaaggtatttgtattggtagtaaataaaaacatgaaaatgttaaaagagagagaaagcaaaatccggaatgggagactttttcaaagattctaaaaggttgatgttcaagtagtcggaatctaaatcttgatg

SEQ ID NO: 158100 - DNA, 77 bp, Arabidopsis thaliana landsberg
ttttttcatttttttttttctattttttttttttttttttttttttttttttttttttttttttttttttttttttt

SEQ ID NO: 158101 - DNA, 124 bp, Arabidopsis thaliana landsberg
atatctatcgattcttcctccggcatatccgttgacttctctctgacctccgattaccaaccatattccagctccgatcaccaatcccgcttctcaaacacaactatttcagatctgaaaatag

SEQ ID NO: 158102 - DNA, 206 bp, Arabidopsis thaliana landsberg
  unsure (1)..(206): unsure at all n locations
actgaaactaacataaagttatgtaacaagaatctcatgagaaagacatcatatcaattgcctaaaagataggttagaaattctcattctttcagtcacaaaatcataatcataacataggcctgtataaagaaaggttgcggatcacaagaataatagggcgctncncccacaaaaatgacaaacttattttacaactgattgag

SEQ ID NO: 158103 - DNA, 104 bp, Arabidopsis thaliana landsberg
gtaaaagataaaaaaaacaaaaaaaaaaaaaaaaaaaaaaaaaaaaaaaaaaaaaaaaaaaaaaaaaaaaaaaaaaaaaaaaaaaaaaaaaaaaaaaaaaaaaa

SEQ ID NO: 158104 - DNA, 205 bp, Arabidopsis thaliana landsberg
gggaggagattgatgagtatataagccaaagggagacatatataatatcggcagcaaagtatatatatcactttgaagcagtggagatgggtggtggtcacattcatcaacattaccctccttaggttttgggcagtatgcaaaattgtgtaataattcaccaagaataatttaaatgtgaatgtataatttgcaatttatgtga

SEQ ID NO: 158105 - DNA, 210 bp, Arabidopsis thaliana landsberg
tcagaatgttaccaaaaaacgttccaatcccgccatcgggacccagccgaaaagaaactcctccatctccgcctagatccgtatgatactcgttaaacctgctgtagtaaggatcgcttatttataattcaattctacatgttgtaaaatttggtatgtgaatctgatgcaaagcttgtaaaatggtagtagaataatttcgcagtgatc

SEQ ID NO: 158106 - DNA, 197 bp, Arabidopsis thaliana landsberg
gcttgttttgcttggtctttgtttaaagataaaaaatgggagcttcgaaactttccgggatgcaaaagcaagtcttgagtctctcagaggatttctaagagcagctcgttcaagaccaatagaagacaggaagagaatgggatgattgtgtcacagagttccgccacaactctaagaggtcgaccgtagaattttca

SEQ ID NO: 158107 - DNA, 231 bp, Arabidopsis thaliana landsberg
caaaaatatttaattactaaaattcaccatagttggaaacaagatccttaatatgactaactaaacctatttcaattaactagaaatgcttaaggtatcatcaattttttttttttgaaatctccttttgttcatatatataaaagaacagagattttgttgatgtttaaccgcataataaaaccctttcaaaaacaatttgaggaaaaaaaattgtaacaaagaactgtg

SEQ ID NO: 158108 - DNA, 237 bp, Arabidopsis thaliana landsberg
aattcttgagcatagctttaagatgaaacataaatggaagttaacattgctaataaaaggttgaagttatgtatccaacaacaacaacctcaagttctcaaaagcttaatttaaaaacaactctcatttgcaattgcattacatgcttagattgaagttatgacataagaaaaaaagttgagaagaaaattgcagatttaaagggacttagttcttctagctctgcttcaacagatg

SEQ ID NO: 158109 - DNA, 418 bp, Arabidopsis thaliana landsberg
taaccgtaattttccaaaattaagctacaggtacagctaaaaagtgtactacagttttctttttctaaaaatagtagagaaattctttcttgaatttttagaaacaagattgacgataagccctggattctattagtttctatgtgggcaaaaaaggccacattttctatggaaataaaatgctaagggaaagcgaaaagaaacaaaaaacagagaaaagttacctaaccgaactagatctgagaaagagttcctgcgttttttcatccatctgggctatcaaaaccaaacagcaatctccgtgaaaatgatgattaaaccgatgatcatgggcggtaatggcttgattgtagtgtacatacaaagaacaatccaggcttgggtcgcttaccgattcccctttgacttggcttccttc

SEQ ID NO: 158110 - DNA, 268 bp, Arabidopsis thaliana landsberg
ggtaggaggaggcggggacttgtagacgtattttggagttggcggtggtggagacttgtaaacataagtcggggtaggaggaggcggagacttgtagacataggttggagtaggaggaggcggagacttgtagacgtatgttggagttggcggtggtggggacttgtaaacatatgttggagttggcggtggcggagacttgtagacataagtcggggttggtggtggaggagacttgtatacgtatgtgggagtgggaggaggaggt

SEQ ID NO: 158111 - DNA, 208 bp, Arabidopsis thaliana landsberg
acatacgttagaatccggctattactgggggctgggttaagggagagacttatagtgaaccacccacatggccaacagatttgaatctgctagtgtggcagaaagactgtccagaaatgagtaaaccggattcattgtagtttaaatcctaatactttcttgtgcatgaagatccagtttactgtatctttcatttttggctacagca

SEQ ID NO: 158112 - DNA, 296 bp, Arabidopsis thaliana landsberg
cgaggattgacgtctaggctagtttactatccggattgtaacaaaaccgaaccggttgattactgaacgccggacaacttatcctaatgtacaaattgcataccgccaacacattgttagcaaaccggactcccaccgtgaatgccatagcgaccacagggatacgtttggccgctgtagaacctttcacgacgcgttcgaggccgttgatgatttggtaacgcgcattggaagataagccgaggaacacacctgaacaacagcacaatacagagaagagagtgaatatatatgta

SEQ ID NO: 158113 - DNA, 608 bp, Arabidopsis thaliana landsberg
tccgagctcatttcacttgaagatcgtttagcaactttgatttcttgattacagaccctgtggaacttttcccctcagatgctgaggtatgagactcaagcagaggctggagagaacttccagctgatccaagatctgttccagcttcttctttaggtttaagactcgccatagcttcagatttcccatgctctggaagtacagcagctctttcttccattctctcctttgatttttcagctagacccttttgttcatcaagagagggctttgaagctgaaaattctttaccaggaatagctgcatttgaagaggcaaaatccatgctgacgatcccagacttctcatctttcattggagtttgaagcgtcggagctcttctctgcagcccaaaatccccatccaaagatccatcaattccctggatatgagaagcttctgaacttgcttcaatttcgccaaactgaacagacttatcaccagcttcatcccttcgtttgagaagatacttgtctttttttttagagaccttaacctttgtgggttttttagagctcttaaggtcacctagcgtttctgctatgaccagtgggccactcaagggagct

SEQ ID NO: 158114 - DNA, 145 bp, Arabidopsis thaliana landsberg
gcagtttgtgatagactatccaaatgaatatttgatatcaatggagggaacatacatcatactccacgatgccaacgtttcggtcattaggtcgttggtttaaaaaatcatcaaaagggagaatctctcccacatatgggtttgt

SEQ ID NO: 158115 - DNA, 456 bp, Arabidopsis thaliana landsberg
gaatataattataaatctaaatatgtcaattaattttggacctaaatatccaaaacaactaaactattcaaaaattatttgttatgtttgtcaaaatttagtaaaatatattcaaatataattaaatttatttaaacttaacaaatttttaaaaaaattttgtttggagacccgctatctacatacaaaatacaaatttaaatgtattttgtttttaattaaatttaattaattaaattagtatttgattttttaattcttaaagagatgaattaatttactctttaaatttttatttctaatggcatatctatgtaattacttacaaaagataaggttacatttaaaatgtacttcccaaataatataataggatcaccatcacggacccatagtatcactaatcagttgcaaagtaaatttagatttctattttaagagtatctctttaaatgg

SEQ ID NO: 158116 - DNA, 85 bp, Arabidopsis thaliana landsberg
ttttttttttttttttttttattttttttttttttttttttttttttttttttttttttttttttttttttttttttattttttt

SEQ ID NO: 158117 - DNA, 302 bp, Arabidopsis thaliana landsberg
gttaaaagtttctaagttcatcaatggagaaatcaatggagaaaagcgtgagctctgctgcttctggtaaatcttcttcaattccttctatctgattatcacttcccatttcagttttcgtaatgtttttctgattcgaaaatttctgaacaggtaattcaataaactcgaagctgaggtatcctctcagcatcggctcttagaatccaagggaagggggaagccatcctggattcctggattttcatctggcttcttactattgcccagaaaggtacctatttgatttcaaataatgatcc

SEQ ID NO: 158118 - DNA, 324 bp, Arabidopsis thaliana landsberg
gcaatggaacgagctgtatggtgaaggattttcgattatagaagacgtcgttgagctactggtggggtaagtttgacaaacgagagaggcgcggccgatttgttcgtttttgatctctctcgtgtccggtttttttttttgaatctcattttggtcgtttaatttataaatttgcgtacagagagaaagggtgttgttcgctttgctgtctaattcattttctttctcaacataagatgaaaaaaacattcgctgtataatctaatacatgcttatgtctatagaggctcggctcttttaacgataacgtcataatgctaaatc

SEQ ID NO: 158119 - DNA, 283 bp, Arabidopsis thaliana landsberg
aagttgtataatagtcttgtgaatatgattttctgtaaattctctttattagtttcatttagatcatagattcatttgaagatgaggagagatgcaaagagaggaaacgttattgtacagttttttgtttgcactctttgattctgtcttcgacctcccatcctaatcagttgcggatacatcatgacaacaattacaaaacctttttgttaaaccaaaccgaaatccaaacaaatctcggccaagttcacacctaaagtttcactgtacatacttttcctgc

SEQ ID NO: 158120 - DNA, 229 bp, Arabidopsis thaliana landsberg
ttgtacagacctaggtttggagtcattttctgtttaagaaaactttacattctaagcaaggttctttttagagggaacatcaaactaattgggacaggtaaaaaggtttttttaccaaacatgagggacaagaagaacagaagctttgaatgagtggaaccacagacgtaggtgtcaaggttaccgagtttctcgacatgacccgacccgctagttggatccagatcag

SEQ ID NO: 158121 - DNA, 385 bp, Arabidopsis thaliana landsberg
ctcatattcaatatactgaatatggaatcattctacttctgtatatacacatgggatccaaacttaaactttaccctctcttaaatcactcatccgtttttcacccagacagtcgttaccaatcggcccctacaatggaggaagagcaacaacaacttcgtgttctcttcgcgaaatacgagatgggaaggttattatgcaaaggaaccttcggaaaagtctattacggcaaagagatcatcggcggcgagtgcgtcgcaatcaaagtcatcaacaaggatcaagtaatgaagagacctggaatgatggaacaaatcaaacgcgagatttcaatcatgaagctcgttcgtcatcccaacatagttgaattgaaagaagtcatggc

SEQ ID NO: 158122 - DNA, 166 bp, Arabidopsis thaliana landsberg
tggagcttgcgacggcccctcaagattggtagttacaagcttacaatcatagagattaggtatcatgtctaacaaaaaacaaaagtaattcttgaaaaaataaaaataaattgtaagtagcatataataccaagaatgttatgagtgatagtatagaagcagcctc

SEQ ID NO: 158123 - DNA, 231 bp, Arabidopsis thaliana landsberg
agactgagcgatgggatatgaagcagggagaggagaaagttgtgtttggtaacgcagaagatgtggtggatgggtttggaattagaggataggtgaaatctaatgaatgggatgtgtcaaagccatggaatttgaaagaggaagagaaaggagttgtgtttgaaactggtggtgaagagccgtttagctttgagaatagcttgcaaatggcggagtaagagcgtaaaagaa

SEQ ID NO: 158124 - DNA, 362 bp, Arabidopsis thaliana landsberg
agaaagaacatgtaggctcatagaagggctctggtttagatactaggtgaactaatcaagcttaataacaatgcatgctttacacaagatttctcagcttctctggttatcttagctctaagtatagaaactttcacggaacaccaccggttactctaatactatagtttgagtttgagaaaggttcgataacaatccttatattagctagatctacaatttatctatctcccgagacaattccttagatatgacgctttaatcacttgaatctacaactcatttacttgcctatttgtctttattattcaattacctcatttagcttattgaacaacatcataagtctattgtttgaacat

SEQ ID NO: 158125 - DNA, 114 bp, Arabidopsis thaliana landsberg
ttttccggagtttttccatcaacaccaactcctcctaagcctattccagagacttgcccaattgacacgctgaagctaggcgcttgtgtggacgttcttggaggtttgattcac

SEQ ID NO: 158126 - DNA, 68 bp, Arabidopsis thaliana landsberg
catgagactttttaaaattcatgtttgaataacattggatttataaattctacacaaatctcttaaaa

SEQ ID NO: 158127 - DNA, 351 bp, Arabidopsis thaliana landsberg
ttgcagatccgggaatgtggcgtcacaaaagtgactagagaaacttgagagagttataaactggtaaacgaagagggtggtgtgaagcaaaaaagccaaaacaccgaggtgatgtggctctaatttaaaaagagaacggttatgttgttgaggtgaaatagtgatatgataaagaagtgagagtgtacatacatgatttcggaatcagaatcacatgcaatgcagattgtgaggagatggttaaaaaaaagaaagccatttgtagagatcgagttagtatttatatgcactcctttgcttattcattgtttttttttttttgtctcaacattattttgttatgtgggtttt

SEQ ID NO: 158128 - DNA, 82 bp, Arabidopsis thaliana landsberg
  unsure (1)..(82): unsure at all n locations
tttttttttttttttttattttttttttttttttttgttttttttttttttttttttttttttttttttttttttttntttt

SEQ ID NO: 158129 - DNA, 342 bp, Arabidopsis thaliana landsberg
atatggttccattttatacggatcggaacttgcattacaatttaaatatatttcttccagttcgattagataaattgtatgtttttgattatagtcgacgattcttgaagaagaaacacaattagaatagaaaaggcatcatgaattaaaaaagatatacaattagttacatgtttatgaacgctatattatgaagttacaattgtcacaaaatctaggagcaatcttgagagcttgtaaaccttctgtggacacgccctcctgaaaaaaaaagaattgagaacgaaagtccaaatgtgatacaagatcatgattacgaggccttcatatatagtcaagcaa

SEQ ID NO: 158130 - DNA, 622 bp, Arabidopsis thaliana landsberg
agcagctgtcgtctgttaatcttccttgtagatattgctccagtcgccttcacttccacaaccttcataaagttacaaactttgatgagatacaacaagtgacagtttcatccaaagctaatcaattcaaacagaatcctaaatatatgactaattgactatatgaacatgcaattcaatagttcattatatccagaagaaacctcataaaccggttcacgaattcccagagacgtagagtcacttgatgaagaagaagaagaagaatcgatcttctttgaatcatctcttcctcctccgttatctccatcactactattactgtcactaccatcgtcgtcgtcgctaacgttaagggattcgtaatcgccgacgaaatcctcggcggttgtcggagacttggcgaaacatttcgatctcgataaaactttaagtgcctcgaagtagatcggagttctactcaacgcagataactggagagaaaaggaaggagaagatccaggaagaagataatggagagatggagatggatatggagagtgatcggagaagttgaagagagaagtgaatgttgaaggaattggagttaacgccattgttggtttggtgctggtggaacgaa

SEQ ID NO: 158131 - DNA, 76 bp, Arabidopsis thaliana landsberg
ttttttttttttttttttttttttttattttttttttattttattattttattttggtttttttcttttttttttt

SEQ ID NO: 158132 - DNA, 118 bp, Arabidopsis thaliana landsberg
agaaaatattatatatacatttttaattttttttaatattatagttttaatggtgaaattgtaaatgtgtccagatgtacaggaaacataacttatatgtggaaataaatacagcttt

SEQ ID NO: 158133 - DNA, 391 bp, Arabidopsis thaliana landsberg
gacgcgtcagcgatgccagtgatgctattccactaaactctactctaatttagtaattttgatcaaattagattcctaaatttcatcttgtttaattgtggtatttacgatgaaatatttggaaatacaagtaagagacggtatgatttaaatttggtctagaaaagttaagagttgaatggttatagtagccactatttatggtggataattacttagtaaaatacaaaatacgtgacagctttttgggtgccagaagttataaatacattggtggtcattttttattggcaaataatttcttttctttttttttgacaaaaaatagttttttttactttgtctaaaatatgaggaggtcatttctatgttgaaatgagtggagaatcga

SEQ ID NO: 158134 - DNA, 147 bp, Arabidopsis thaliana landsberg
agcttatctgaggactcataggagttctttggttcacttgctggggactcattggagttctctgactcatttgctggggactggactgttgtagctgctgttgggtaattccagctgatggtgaccctacttggggtggtgatagta

SEQ ID NO: 158135 - DNA, 377 bp, Arabidopsis thaliana landsberg
agaaagaaacaacaacaatggcaacggcttctcctccatttatctcaactctcagcttcactcactcttctttcaaaacttcttcttcttcttcattttctccgaagcttcttcgacccctcttaagcttttccgtcaaagcttccagaaagcaagtagaggtaatcaatctcctccccaaattcccagaaaggattgatttttattgtacaactgttagattgtgatgggttctcgatctaattgaataactcggaatcaataatggccacaaaaaaaggactcctttttgttccttcaactttcgtttttagctcttcgtttttgatggatttgaattcacaatttgagcttgatgcttgtggatgtgtcgttgt

SEQ ID NO: 158136 - DNA, 228 bp, Arabidopsis thaliana landsberg
  unsure (1)..(228): unsure at all n locations
aaaaaaagggaaagaaaaaaaaaaaaaaaaatatttaatttaaaaaaaaaaaaaaaaaaaaaanaaaggaaaggaaaaaataaaaaaaaaggaaaggaaaaaaaaaaaaaaaaaaaaaaaaataaaaaaaaaaaaaagaaaataaaagaaaaaaaaaaaaagttaaaaaaaaaaaaaaaaaaattaaaaaaaaaaaaagaaagtaaaaaaaaaaaaaaaaaaataaaa

SEQ ID NO: 158137 - DNA, 84 bp, Arabidopsis thaliana landsberg
ttttttatttttatttttttttttttttttttttttttttttttttttttttttttattttttttttttttttttttttttttt

SEQ ID NO: 158138 - DNA, 170 bp, Arabidopsis thaliana landsberg
atcagaactcgacgttgcaacactatacgcaatataaagcgatggagttgagaggatgtgtgaaggatcttcaacgattgtgtagtactgctcacggctctacactacctgctgttagagagaagtatagtcaacacaaagtaagttgttgtgtttatttatttgtgctt

SEQ ID NO: 158139 - DNA, 117 bp, Arabidopsis thaliana landsberg
ctctgttatggtggagaccaagaaagattgaagaacatttctctaaacaaggaattcgaggtcctccttatcatttcttcatcggaaatgttaaagaacttgttggaatgatgctta

SEQ ID NO: 158140 - DNA, 203 bp, Arabidopsis thaliana landsberg
tctctcttatatatgattttttcaaataaaataaaataacggaggctggtttaaagaacaccgatgaattctatgttcccataggctgaaagaaaaactaaatttttgtgtggcccaccaaaaggcttgaaattttgatccgacgatacttgagctgatttacggtattagtgctatttcgatttcctaaagattccgttttt

SEQ ID NO: 158141 - DNA, 254 bp, Arabidopsis thaliana landsberg
gtctttgtgggacggtttcaaagaaggaggagggtaacaattcttcatcaaatttgttgcaaggggttcagaagaattggctgaagtcgaagcagaactggtttgtttcttctatctgcatgttcgctcaggcttagataaataattttgtggtataacgttcctgtgtgtttattgtaggatgctgatttgaaggataatggcaaatccccaaaagacagtagtaagatattacactaatacaacatgatcag

SEQ ID NO: 158142 - DNA, 142 bp, Arabidopsis thaliana landsberg
tgaattattgcttcggttgctgactgggaatctggttgagttgaagcttctcctccgttagtgttttctatggaagatacaatatctatgctttgatgggacaggtctacggacggtttggggataagggagagacgacaaa

SEQ ID NO: 158143 - DNA, 97 bp, Arabidopsis thaliana landsberg
tttttttttttttttttttttttttttttttttttttttattttctttttttttctattttttttttatttattttttggtttattttttttttttt

SEQ ID NO: 158144 - DNA, 301 bp, Arabidopsis thaliana landsberg
atgatactgtctacaaagattcctccatcgtgatggtggtaaacacatgaaccattgatcgattcatctcggtgatgattttttcaccagaatcgacgctcaaacggttattgacatgtggctaagatggagtccgacgaaaatttcttcaacaacaagcggtgatatattgagctctttttgggcctttaatgtttctggggctttatgtatagcccatgtaagatttggttgtggttaataatttctacttttgtgacaaaccctaaatccaatttacagtctttttgtttttgttttt

SEQ ID NO: 158145 - DNA, 90 bp, Arabidopsis thaliana landsberg
  unsure (1)..(90): unsure at all n locations
ttttgtttttttttttttttttttttttttttttttttttttttttttttttctgatttttttttttttttttttttntttttctttttt

SEQ ID NO: 158146 - DNA, 509 bp, Arabidopsis thaliana landsberg; identical to SEQ ID NO: 79425
  unsure (1)..(509): unsure at all n locations

SEQ ID NO: 158147 - DNA, 476 bp, Arabidopsis thaliana landsberg
gatttaaacaaaaatgtgaacggggctgttgagacctgcatggagaccttccaccgctaccacaagtacttgaactattctcatcctctcatacgctcccactttgatccagatgcgtgtgggtgggcgtttggaatgaacgtctttgatttagttgagtggaggaagagaaatgtgaccggcatataccactactggcaagaaaaaaacgtggaccggaccttatggaaactgggaacactacctccaggacttctgacattttacgggttaacagaggcactagaggcgtcctggcatatcctgggattgggatacacgaatgtggatgctcgtgtgatagagaaaggagctgttcttcacttcaatgggaacttaaagccatggttgaagatcgggatagagaagtacaaacctttgtgggagagatacgttgattacacttctccttttatgcaacaatgcaattttcattg

SEQ ID NO: 158148 - DNA, 1011 bp, Arabidopsis thaliana landsberg
  unsure (1)..(1011): unsure at all n locations
tagaaatttttcagtgaattgcttttgtaatttggattttaccatggcagattctggagaaccaagttctaacggtggccaaagctatggcagataagatagacgccgagctcgccactttagcagagcttgacgaggacgatctagaggttttgagagagagaaggttaaagcaaatgaagaaaatggcagagaagaagaaacgttggattagtcttggacatggtgaatactctgagatccattctgagaaagacttcttctccgtcgttaaagccagcgaacgcgtcgtcgtgccatttctaccgcgagaattggccatgtaaagtatggattcttaatctcttgcttcaacattttcgaattttttgtgtggtttcaatagagttcgattgcgtagttcaatgaattctctttgattagagatgttaggaatcaaataatggtgcttcttgttcatagccactagaccttgtggatgtgtttgcattgcttgattcttagagcttgtggaagtgatgtgttttgatcggtgtaacggtttttggatgatttggtgatttgtgaatgattgatgtttgtgtaggtgatggataagcacatgagtatattggcaaagcaacacattgagacacgttntgtgaagatccaagctgagaaaagtccgttcttggctgagaggctcaagattgttgttctacctactcttgcacttattaagaacactaaagtcgatgattatgtggtaacaataattattggttaaacgagaacattttgttagtttctttaggatatgatttagtggatgatcaatgttgttgttgatgataggttgggttcaatgagcttggagggaaagatgatttcagcactgaggatttggaagagagaatagctagagcgcaagtgattcattacgatggagagtcatcgtcgcttaaaccaaagtcgacaacacaagttagaaggaatgtgaggcagagtgctcgttcagattcagactccgaa

SEQ ID NO: 158149 - DNA, 557 bp, Arabidopsis thaliana landsberg
tgaaagacttcgccggaaagatagagaagttgtcggaggagctactggatctgctgtgcgagaatctcggtttagagaagggttatttaaaaaaggtgttttacgggtcgaaaagaccgacttttggaaccaaagtcagcaattatccaccttgtcctaatccggacctagtcaagggtctccgagcccacaccgacgccggcggcatcatcctcctcttccaagacgacaaagtcagtggacttcagcttcttaaagacggcgagtgggtcgatgttcctccggttaagcattcaatcgtcgttaatctcggcgatcaacttgaggtaactactgaaccaaaccgtactaaaccgaaccaaattgaaataagaattttgagttttaattttggattgattaaaccaggtgataaccaatgggaagtacaagagtgtggaacatagagtgctatctcagacagacggagaaggaagaatgtcgatcgcatcattctataatccgggaagcgactctgttatatttccggcgccggagctgatcggaaaagaagcagc

SEQ ID NO: 158150 - DNA, 206 bp, Arabidopsis thaliana landsberg
ttctctctctctctcttctgtttttgaaagccaaagtgtctctcttggacagtgatggaactgctttaagagatttaattttttacccacgagagaagtcaagttgttgaagaagaaagatttgttcttttgtcttgtttctttcattttttcatccacaaagatctcaaagacaagagcctttttttttcttttggggttgcttc

SEQ ID NO: 158151 - DNA, 318 bp, Arabidopsis thaliana landsberg
tgaggacatcagcttaagtgctggcaaatctgagcctttgtccaagaggaagagggttgctaaggaccacagtgagcaatgagatgtcactggtgatgacattaggccttgtaaacggcagttcttctaacttcgaactgatctcaatccaagaagaaatgcagaaattgattggaattctcagtattttgaatcattctgttgggatgatgtacgtccttaatctaactgtataccgtggagcttacagcttaatggattgtcggtcattctgtatgaaccttgagactgctttcaagcaagtttaatgattgaacg

SEQ ID NO: 158152 - DNA, 371 bp, Arabidopsis thaliana landsberg
  unsure (1)..(371): unsure at all n locations
agagggagagaagtataaggaaaatgtcctgagnaagtttgttcgcaacaagaaacctgaaatcatgcctggactcaacaagttcttcactgatcgtacatactgaaaccatctntgcacaccgctttgtcgtattgtttctggaattgaatctctttgtgatataaaaccgcatttgtcaatttcacattgttgatgtatcctccagctgatgacacttgttaatgctgggcttatgttgtcacttttaagcagaaaattgtatgacttgcttatggcagcatactcttttaatgaccatctcatctgagagtaataagcacttgatatcttcaaattgtcatgatttcttacattgtggtggacaagca

SEQ ID NO: 158153 - DNA, 513 bp, Arabidopsis thaliana landsberg
tttaattttgttttataaatttatcattagttacgagattatagatttcaataatacacattgtatacttgagactttttattagacataatcctcgaccgaattcaacaaatcatatttaactcaaaacattcctatgttcaaaaatttcaagtgttagtagaacatgagaataaatatatttttagagatcaagtcttcaaaaggattatatatgcaacgatgaaaagtgaaaaaatcatgttacaggccagataaaagaaaaggaaaaaaaaaaaacaatctgatgaaatctaagtagatatttgtaggaaaaaaaaaaaaaaaaacatatgataataataataaacctccctgtgagtgcaaaagacaaaaaggaacgaccacacttgcttaaaaactcatcagcctctctttcatctaaatcttccagtctctccagcaaagaactgagtcctactcgattttcattttcttaagaaattcaaacttttattacaaaatggtttcaaa

SEQ ID NO: 158154 - DNA, 213 bp, Arabidopsis thaliana landsberg
ctccacgcttcattttccatttgcgtatggacgaaaccaggtgtattgtatataatatagtctcaaaaatttcaatcttaacttataacagcaatatatctcacacgtctttttaaaacgaaataataaagaatgtttttatttccagcatttcagcttctttgtagcgtctatgatgctttgcttcgtttccaatctctggcacttgagcaa

SEQ ID NO: 158155 - DNA, 244 bp, Arabidopsis thaliana landsberg
attctagagatttgtaggctatagaccaagagattggctagtctgcttattggctttggtagattgttgcttaaaccctgctctgctatgtttcatcaacgagagttgagattaggaagtagtagagttatgggggtctctgtcacgagagtggattgacccggtttttttgaatctatcgtctagggtttctgcctttcacctgttagccacttgatgagccctagagttgcccttatcaatg

SEQ ID NO: 158156 - DNA, 371 bp, Arabidopsis thaliana landsberg
atcacaatgcctaacttctttgaattccaaacctttactagactaacacttttttgtatcccccttaagaactctaaactcttactcacttttttttttttttttctttttttcttttcattctcattctcattcctagtcaagtcatacacagtcccaatcccaaatacaagtctccacctagtcctagctaacccaaaaagcgtgggctaggtctacatgaaagactgctcttgtcggctcatagctaatacgttataccaagctcaatcgaaaaagacctcacaatcacacacaaatgatctttggcttgaaataaggctaggctaagggtaagggaaactgctccaaaaatgagagacagctacttg

SEQ ID NO: 158157 - DNA, 1920 bp, Arabidopsis thaliana landsberg
atgaatcccaaagaatcaagaaggagagcctctgctcgagcagtggcaagagggtttgagatgattaatgagaagaatcagtcaaagaatcaggaagctgcgagtcctggttttactcggatgacaggccgagtacaatggccgagtatggccccggagtcctctgtgggtcgttctgcggcggctcaagaggaaatagcaagaggcaagagggtctgggagtccgagccagttgcagaagaagaagtgcctgtgctagagaaggaagcatgtggggaagatgtgcaagttgatgaagaggtcccgatagttcctacaaggagaagaaggaacaacccaagaaggaagaaggagcctacaattgaagaacactaccagtacctcatggagttgagctttgaggggacaagatatccccataggcataccatgcaagctttggggatctgtagagatgttgactacctcatggagatggccaagctggggacattcttctcctacaagtgtgagggataccaaactgagagctgccagttcctagccactttgaagctccatttctacgcagaggagagggagagagagatacataagggagttggctatatcacattcatggtgtttgggattcactactccctccctattaggcagttggatgttgtattcaagttccccaccaagtatgggatccgccaaaacttcagcaaggacgagctccttgatctatggttgacaatcgccggtccactcccctacaagtcatctagggccaagagttcgttgataaggagcccggtgcttaggtatctccacctttgcattgcaagtgccttcttcccgaagaagacaaccggccatgttaatgagggagagctgaagttgcttgatctcaccttatgcttcattttggggcacacgaggaatgggatagagatggaaggggatagggctgatacatccctttcggtggtgttgattgatcacttgattggttttagggagtatgcagccggaatccaccaatccggctatggaggaagcttatgtgctggaggagtgatcacgcccatcctaatagccgctggagttcctcttcatacccccactcacacagcaacctacatcgatatggagtatttgaagaggaagtgctacttggacaggtctgctccagcggatcaactctacttcaagttcaagcactccacgctaggtctctctaggctagcactcccttgcaagaagttcaccaccattaggattgggaacaacattgactttgatcctcctcaatcgatcttagtcaatgtccttgcgcctctacaagcagagccgagcataggaagtgagtctcaagaagaaggagcagagtggaatgaagaagaagctgagcaggaagcttatactcggccgagtaactttcagcaggccgagtatggccatgacgagtttgagcaagctgagttcagtcaagctgaacagtttgatgaacaagaagattcgtgcgaagctgcagcggagcagtttttctttgaggattatgctgagtccgatccagagagagatcccggtcaagttcacaagaagttgggaatgctcaaaggtctgggcaagtttcagaggaagttgttcagtgggttgaagaagaaggtgagaaagatgaagagagcaatggatggcatggcggttcagattcaggagctgcaacgaagacagagatcaccaccacctcgacccgagttcaggagaagtaactcaacaagtgtggcgccgcgaagggacgctcgtttcgacccgccaagagcctcaaactacgagctcgggaggagctccaccttttcagatcgccgtttcaacagccgcccacccggtccagtgaaccagttggttctgaacgctgacccaagccgagag

SEQ ID NO: 158158 - DNA, 320 bp, Arabidopsis thaliana landsberg
actgtcttgtcattcttctcatctcctagacaaaggaaactcaggagatgagaagaaaattttggtggttttttataaactataatataatacacatcaaatctttgacacgataccaacttgaagaagaagaagaagctgcattgatcttcccaaaagatcctccatggttcaaggcatggatggttcctgtgatgatgcttttcgttttctttgtattttctattggaggaatttgtcgacgttgtcgcaattgtcgccgtggtgaaaatttttccagcatttattctattaactaattatttagatttttttttttt

SEQ ID NO: 158159 - DNA, 111 bp, Arabidopsis thaliana landsberg; identical to SEQ ID NO: 71744

SEQ ID NO: 158160 - DNA, 85 bp, Arabidopsis thaliana landsberg
ttttttttttttttatttttttttttttttttttttttttttttttatttttttttttttttttttttttttttttttttttttt

SEQ ID NO: 158161 - DNA, 226 bp, Arabidopsis thaliana landsberg
  unsure (1)..(226): unsure at all n locations
agatctcnccgaatagggagagtaattgaatgtcggtagagaaaattgaagaagagataagctagtagtgaagaaagggtgatttaaaatcaagaacttcacaggaaaagatcattgtgaaagattgaggaaagaaagatttgaaattctacaaaaatggaaagaggaaaaggtatttggtttttctgtcaggagccctagaatgatctgtgagagaaggaagggg

SEQ ID NO: 158162 - DNA, 513 bp, Arabidopsis thaliana landsberg
agtcagttcacagcagatatgtcgtcagacgggagtagaattatcaattcaagatcacaagagagacccaaacttgaagaacattgtacttgaaggtccacttgagcagataagcgaagcgagtgcaatggtcaaagctttgattgggaggcttcattcagcagctaagaatccccctggtggtggtcttggtggtggtggtggcatgggttctgaagggaaaccacatccagggagcaacttcaagactaagatatgtgagagattctcaaaaggaaactgtacatttggtgatagatgtcactttgctcatggggaagcagagctacgcaagtcaggcctcgtctagttgttgcttgcagatagagaatttgctggtaaaacgtagtttcttatttagtggtggtgatatctgatatcatcttcacctactttgtttttccccctatgagagaatacaatagtttcattatcgatataagtctatttggtgttttttttaatagtttagtt

SEQ ID NO: 158163 - DNA, 127 bp, Arabidopsis thaliana landsberg
cagggacaaagattgtttccgtagacagccctgtcgggcgcttaggccttactgtatgctacgatttgaggttccctaagatatatcagcaactgagatttgaacagaaagctcaggtaaatccaat

SEQ ID NO: 158164 - DNA, 160 bp, Arabidopsis thaliana landsberg
  unsure (1)..(160): unsure at all n locations
tctctgtacacagctcgagtacgctccacgtcttcagctagaatctcttcaaacagtgcataatcattccannnnnnnnnnnnnnnnnnnnnnnnnnnnnnnncctcagcgagtggaacattagcaatagccctctcatagacttctctgatcctatctt

SEQ ID NO: 158165 - DNA, 70 bp, Arabidopsis thaliana landsberg
gtcaaggttgacgatccccttatcgttgaaatcttcgccagatgctatggaatggtttcctactatttca

SEQ ID NO: 158166 - DNA, 262 bp, Arabidopsis thaliana landsberg
aaaacggattcgagataggaactaccaaaaagctgctatacctttactgatttttctgaagatggtgccttttctcctgcgtcactgtcgctctgtgaatctgtttgttttgtcttctttgcagaggcaggtttctccttttcacgtttccgctttccggttccctctgactttgataattttctttcctccgccatcttcttttttacagctacttccttgtccttctcctcgtcttcaccatctgaatcaaacatttctt

SEQ ID NO: 158167 - DNA, 207 bp, Arabidopsis thaliana landsberg
ctatacagaaccaaagtgggtaacattttcaaagtgttcaagtaatatgactagtcttcatgcccatcagatgattgatcatcctcatcatcatctttttgatcatcatcatccgtcgcctcctttttgtcacttctctagttcctttcattccatcttgcccaggcccacttcaggacaagaaaccctccaagtgcatatacgtga

SEQ ID NO: 158168 - DNA, 76 bp, Arabidopsis thaliana landsberg
gaaacattatagcatctacagatatcagaatttattaccttttttgttctataaagatcaagtttcaaatttcttt

SEQ ID NO: 158169 - DNA, 124 bp, Arabidopsis thaliana landsberg
gcatctccattcaggatttcgtggcccactattggccaaaccacctgcgcgctaggtccgatgtgagtagggacactcagccatgcttcataattggaaaaacgagcaccaggataacatgccg

SEQ ID NO: 158170 - DNA, 343 bp, Arabidopsis thaliana landsberg
ttcaatgaaacgatactaaaatgttaatacaagttcgcccaaaaatgtaagagaaggaaacatccttaaagagacacacttcatctttcttacttatctagcaagttatctatttatatgtatatatattacattcctgccacatcccccaaagggatataagctattttacaaattgtaccagactacaaaaaaaagacggagaggtagaagacagtaatcagtcacagagtaatatatgtatagtcaaagaatcaccagccagatcaagccactgaactaatcgcgaccttacacacagcataagttagcatctacgacgattcttctgcttcaattggca

SEQ ID NO: 158171 - DNA, 380 bp, Arabidopsis thaliana landsberg
actaacctattgacatttgagctttgagttctaaatctctacaggagaatcatgagcaattacagtggcagttcttctgttgatcctgactacaacatggatgagacagagtcgtcatcttcaaggctagagagagaacagagagaatatgaaagcttcagaaggaaagctgagatagcccgaggaaagagagcgatgacagagaggtttgagcttatagacgaagatctggaagacaagtacatgcttgaacagactcgcagagctaccaaacttctgcacaagcccgacgtattgcctgttgaggaatatgttaggcttttcaagctgaatgagttctatagcacgaggtatccttgctcgacctcacttgcacaact

SEQ ID NO: 158172 - DNA, 424 bp, Arabidopsis thaliana landsberg
agtagtgcataatcttattgagacttttaagagatccataatggaatataaaatccagcttcatatatataagatatataactacggtaaaccattttcatataaaatataataatcccataaaaagtaaaagaaaaaaatccagaattatgaaactcattcatatatttagaccaatgccaaaagtcttccaatacttaaaacgataaaaggtgtttttgtcgtaaagagagaccaaatacttccgtctaggagaaatctgagtaaccgaataaactcgtttgatcgtattcataatttgtccaataaccgttttgcataaactcatccatgttctgatctaagcttgtactcgctggaaaatccatgttttggttaccgatgatcggaaaatcaaagtcttgttggaagcactgagatgcga

SEQ ID NO: 158173 - DNA, 514 bp, Arabidopsis thaliana landsberg
gggcaaaggaagctttcattaatctaactcctcaagagaggtgggtttatacaaagtaaaattaaagcattacatgaaagatagagataaagattccatgagtcttccaaaatgcataacttcgagaaggttgcaagggatggtagatctattgggacctgcagagattcaagcttgaagactagcttcgagaaatctcggatcaacttgtgatcatagtaagctcgtgcgatcgacgcataaaagcttttgttgaaatgctccaaagaggaggctgcggtgtgagacttttctccgggttcaagtttcaaagaggatatctccttagaggagtaaggtttcagggaaggtatctccttagaggagtaaacataatgcaatcggcaacaaagattacaagtccaaagcacagataatcttctaatcaaatgacagagataaaccggattcatggggcttgagaagagggttgatagagcaggccgaagcagttttagccaacaattccaagagg

SEQ ID NO: 158174 - DNA, 3801 bp, Arabidopsis thaliana landsberg
atggctgacgaacaaaatcaacagaatggccctgcaaacattggtgctggagatgcaccacgggaccaccatcagaggaaaggaattgcacctcctgctatccagaacaacaacttcgagattaagagtggtctcatcttgatgattgaggggaataaattccatggtctgccaatggaggatccactcgaccacatggatgaatttgataggctcttcaacctaacaaaaatcaatggtgtcagtgaagacggattcaagctccgtttgtttccattctccttgggcgacaaagcacacatctgggaaaagaatctgccccatgactgagtcaccacctgggatgattgcaaaaaggcttttctagcaaagttcttctccaatgccagaactgcaggactcagaaatgagatttctggctttttacaaaagactggtgaaagcttctgtaaagcatgtgagcatttcaagggttacaccaaccaatgccctcatcgtggcttcaagaaagcttctctgctcagcactctatacagaggagttctaccacggatcagaatgcttctggataccgccaacaatgggaatttccagaacaaagatgttgaagaaggctgggaattggttgagaaccttgctcaatcagatggtaattacaacgaggactacgacagaactatcagaggcacaactgactctgataacaaatacaagaaggagatcaaagcgctgaatgacaagctggacaggattcttcttagctagtagaagcatgtgcacttccttgttgatgacgagcagtatcaagtccaagatgaggagggtaaccagttagaagaagttagctacatcaacaatcaaggtggctacaaagggtacaacaacttcaagatgaacaaccctaacctctcttaccccagcaccaacgttgctaatcctcaggatcatgtgtatcctccacaacaacaacaaggtcagaacaaaccttttgttccgtacaaccaaggttttgttcccaaacagcaatttcaagggaactaccagcagcaaccaccacctgggtttgcacctcagcaaaaccaaggtcctgttgctcctgatgctgaaattaaacaaatggtacaacagctgctccagggacaagcatctagctccatggaaattgctaataagttatctgaattacaccataagctaaactgtagctacaatgacctgaatgcaaaagtggaggcgttgaattccaaagtcagatacttagaaggacaatccacatctacctctactccaaaagttacgggacttccagggaagtcaattcagaatcccaaggagtattctaatgttcatgctatcatcataaggagtggaagagagttatccactagagagagacccaagtcagtcactgaggacagtgcataccaagatggggaggattccagtctcaataaagatcaagctgagaaataactcgagcagccactcgaccagtcactcgagcagccactcgaccagtcactcgagcagccactcgagcagccactcgaccagtcactcgagctgccactcgaccactttactcgaccgacattcccagcaacatcaccaactgctctgaaaccagttgttgtcaaaaacaaagaaaaagtcttcattcctcatccttacaagcccccacttccatttcctggccgacacaagaaagagttagaagataagtacagagctattattgccaagaacataaaacaagttgaagccaggatacctcttgttgatgctctcacgcgtatcccggattccgaaaaattctttaaagacttgatcatggagagaattcaagaggttcagaaaacaacagttatgagccatgagtgtagtgccatcatacatgagaaagatgaaccagagaagctaggagaccctggttcattcactctaccatgctccctacgttcattgactttcaataaatgcctttgtgacctaggaacatcagtaagtctaatgccactctcagtagctaagaggttgggtttcaacaaatataaatattgcaatatctccttgatcttggctgatgggtcagttagacaacctcatggggtattagaagatttgcctatcaagattggaaaggtggaggtgcctacagacttcataatgttgaacatggatgaagaaccaaaagatcccttgatcttaggaagaccctttttggctacaactggagcaattatagatgttaagcaaggaaagattgatcttaatatggggaaggattttaaaatgaagtttgacatcaatgatgctatgaagaagccgacaatagaaggacaaaccttcttagttgaggaaacggatcgactagttgatgaacttctagtggaacttaaagaagcaaataactcaaaaactgttttgaccaagagtggtaaagctgggtatctccctagtgaaactttgagttctgagaagtcattagactcacacaaggcagcagttggctcaaaagtttacaagggcttgatggggtctgacacaaaggttatgaaagctattaaagtaagttcaacgcatgctcgaccaactgattccacaaacaaattgaagaagcctccaacttggcctgaaagctcatgctcgaccaagaaactcaaggcaagcagtcagacgtcagatgattggttagaactcaaggagagatccaaatggtaggacaaagccatacaagagctaacacatattgtgaaagagctgaaggatcaaatcaaggagatcaatggaaaagtcaaccaagtaccactcaacatcaatgacgcccctgcaatggagccactattcttgtcagcaaagaaggatgtgtattcacgtcggaatggtctagaggagaagactatcttgataaaaaagaagcttactgtgaggacatggccactgagtacccaattgcagacttgtcaagaaaccctaataagtatgatgatcactctactaaagaaggagaggagacctcatttcttctctgcaacccaccctaagcctaatgagtatgagaagtcaagcttagagacttaaaacaagctcacttgggaggaaatcccatgtctatctttgtaaatatctttatttttccttgttgtttttgatgcatttggttagtgtcttcaggagataagtataaagagctgagtgaagtggattttggctctgagagtgcaacagtatactcgaccccagagcaatgaatgaatactcgaccatgttttaggttatccacgctaggagatcactcgaccgttgtgctggtcgtagcagaagaagagcccgctcagtatccttagggcggtgttggccgccacatagttgatggggtcgagtacccacatgctagagctgacacagaacagggcggctcatctatggcctgggagaattcacaagcagccattgacgaccaactccgttcattcttcgactgaggtaagcgcctcacttcaccattgtattatatcatctcttgtgatttgttctttattttgtttctgtgattggatttatcctgaatactctcttccatgtttagtcacacagtggattgtgtgatttaagtttgggggagggttcaagaagtgagtgttgcattgtttatactcttgagtctgcactcatctaaggcatagaaaaacgaaaaaaattttaaaaaaattcaaaaaatgatttcacaaaaactgagtgttcatgtagttgcattacatttaggatcgagtctagaatgtttcatttaagattgtgcat

SEQ ID NO: 158175 - DNA, 493 bp, Arabidopsis thaliana landsberg
cattgataagggcaactctagggtttatcaggtggctaacaggcgaaaggcagataccctagacgatagattcaaaaccaggtcaatccactctcgtcaaagagaccctcataactctaccgcttcctaatctcaactctcgttgatgaaacatagcagagctggctttaagcaacaatctaccaaagtcaataagcagtctaaacatccaatctcttgggctagaatctataaatctctgaattcgtaaataaggaatccatttttacttcttttggacgctgaatacctaaggtcgaattcccacattagcgagcgaaaaccgcataggggccaacaaatccagaagggatctaacataatcttaaccacctgactaacctagagattaccctaatctaatccatcctcaagatccctagttagtacttaagcaacataacttagaacaaaaacccataaattactgaaatcataccaaaatgtaaatcta

SEQ ID NO: 158176 - DNA, 513 bp, Arabidopsis thaliana landsberg
tgggtttgttgttgaacaaactatggttctcaagcttctgcacggtcatctagctcccagccggttgcccttccggatggagcattgtctcgtccttcaggtgttaaggcggcacagaccgcgggagctaaaaggactctgtcagtgattaggagcttgtggggatttatgcagaaggcatttgatttgtgcgagaagcttagctagatgacgttgttggagactctacttcgaatagcagcgccgcttagtgatcttgagatggctttaaagatcgagcttatcgctggcatattgtctaatgcttgaatggtgtcttttatgtcttgcaagttagtcttttttgtttcggttaacgcttcttctcttgtttttgtccagttcggttatgaatcttaagttgtttgtgttctgttctaaattggtttggttgtgctctgttctaattggtttgtgttagtgttcaaatggattggtttgtgttctgttctaaatgaatttaaattcgatttc

SEQ ID NO: 158177 - DNA, 92 bp, Arabidopsis thaliana landsberg
atcccgtaaaaccctaaacatagtcacttcatcgtctcctccactgtatcattcaatctctgtcttccttctttttagcgacctcgtctcca

SEQ ID NO: 158178 - DNA, 292 bp, Arabidopsis thaliana landsberg
  unsure (1)..(292): unsure at all n locations
gaagaaaaagctgacatggcaaagtggtgaatctagagtgaccaatgagaatgtgacaaataagcctttagtgaagagattaggatgctcatgagccacaagttataatgttatatgttagcttatatcaacatcacttccagttaccaagaaataaatcttttttttttttgtgaagtgtggagtaatgttgataagttgagtttttcagttgttcnnnnnnnnnnnnnnnnnnnaattgtaatttaattttttgggaaattatgagatcatgaaatgaatatttactccc

SEQ ID NO: 158179 - DNA, 84 bp, Arabidopsis thaliana landsberg
tttatgaatcttaaggtttcttatatttcctagctctcaagaaacagagcatgtaagctcattcattggtctgaaagaacagag

SEQ ID NO: 158180 - DNA, 62 bp, Arabidopsis thaliana landsberg
aaaaagaaaaaaaaaaaataaaaaaaaaaaaaaaagaaaataaaaaacaagaaaaaaaaaaa

SEQ ID NO: 158181 - DNA, 268 bp, Arabidopsis thaliana landsberg
gaaaattttgactcaaatgagttgatgagtcaattgggttgatgagtcaattggtttgatgagtaaaatgagttgggttataatggttaatggtttcaatggtttacccaattaacccattaattaaaccaactaaaaactctaaaccaatgccaatttaagtttaaccaacacatctaacctaatttaataaaattaatatttttccaaatttcttaaatatacaagcgatgcaattgagaaaaaatatactcgtaatttttccacc

SEQ ID NO: 158182 - DNA, 390 bp, Arabidopsis thaliana landsberg
ctgatataccgttctagaaggtcaaactcacacatgtgaagtcatggatgttaagcaaagcacgtgtgtgttgtgagctggcaatgcaaatggacgttaacggcgatcgttattaacgtggttaacgtttactttctttaccttttagtataagagcaacatgttatgctcatgctttcattatcgaataatctggttgtaatctctctctagagatttctagatttccctcatcgttttacgcggagctctcgtcgagtctcttgtaggtgagaagttgatattgcgtctctttatgaacgttgtatcaagtgtgttaatcggagtactctgttttcatctctctgttctattgatttcaaactctgtcttattcatttctggtttacg

SEQ ID NO: 158183 - DNA, 148 bp, Arabidopsis thaliana landsberg
atcttctttctctcgtctctgcgtttattctctctggatcgaagtagtaactttacgtccgcgatttggtctctctctctctctttctatccgataactctcaggagaagttagtcgaggtagtctgcttctatgccattttgccgag

SEQ ID NO: 158184 - DNA, 165 bp, Arabidopsis thaliana landsberg
attgaaaaatgagatgagagagagaggaggagtctctcatcgagagtagggcttgtgactccctccctactgtgcctacttctgcttcttgctctgaggacactctacacagaccacacctactataagacacctttctcatacttgagatcggagtcagatcct

SEQ ID NO: 158185 - DNA, 422 bp, Arabidopsis thaliana landsberg
ctagctatggctgttgcggctggtgtgatgaccggagaaggatcttcttccggaggtgactcgtcgccgggatcaagtccgacgacttctggatctcctccgaggcagctacatcatcatcaacatcagatgaagaagcttcctccgttgtatcctaggagtcaagggtcttttggtaatttgacttcgtctcagtcgtcgttgggtttttgtgcctggagatcgttttcggtggctgattttccgaggtgttttccggcgacggcgagtgggattgggtttaatgactcgtaggaaatgatgataacaattgttttgttaaatttttatattttgaagttagtaacaaccacatccggagaatgtatgtgtatagaagagtttcaaaacttttgaatggatcatccacatcttttttttcc

SEQ ID NO: 158186 - DNA, 503 bp, Arabidopsis thaliana landsberg
  unsure (1)..(503): unsure at all n locations
atcaccccaacgtatttgtcttttttattcgaaccttctacaaatacagagccgtagagttttaaattataaactacaccaaagatataaaaattaaactcgaggtaatcatctacaagttctcccgttttgcgtgccaaaaacacctaaatttaaaatctttcactcatttttccctctctcccgaggaaatggtcttgtaaaaatttccaagtttctcaaagtatgagcgagtcttgctgtgctcaggctgtttctgcccaccttccgtcactctcctgtagtacttgttcatgttctcccacttctccttacactttttcgcagatctttcgtaccctctttctttcattcttgctgatatctcatcccaaatcgctcccttgttgatccccgtcttctcttccacatcgcttctcgaacttatcaatgcctgcacttcctcttgcggccaccttctaccactgctgccactgccgcttgagtacctaaactntatctct

SEQ ID NO: 158187 - DNA, 764 bp, Arabidopsis thaliana landsberg
  unsure (1)..(764): unsure at all n locations
tgaaacagagtactctgttttatgaactcattttcagctttttttttaatgttgggctccgattacgagcctcaaggcggagattattgtccgacgttggccacgagttgcccgaagaaaccggcgggccgtaagaagtttcgtgagactcgtcacccaatttacagaggagttcgtcaaagaaactccggtaagtgggtttctgaagtgagagagccaaacaagaaaaccaggatttggctcgggactttccaaaccgctgagatggcaagttgggctcacgacgtcgctgcattagccctccgtggccgatcagcatgtctcaacttcgctgactcggcttggcggctacgaatcccggagtcaacatgcgccaaggatatccaaaaagcggctgctgaagcggcgttggcttttcaagatgagacgtgtgatacgacgacggatgctcatgnnnnnnnnnnnnnnnnnnncttggtggaggctatttatacgccggaacagagccaagatgcgttttatatggatgaagaggcgatgttggggatgtctagtttgttggataacatggccgaagggatgcttttaccgtcgccgtcggttcaatggaactataaatttgatgtcgagggagatgatgacgtgtccttatggagctattaaaattcgatttttatttccatttttggtaatatagctttttatacatttgatccttttttagaatggatcttcttctttttttggttgtgagaaacgaatgt

SEQ ID NO: 158188 - DNA, 99 bp, Arabidopsis thaliana landsberg
actctgcgtttctttctcggggaacataatatctgagaagaagattcgagagagagagatctgacggcttttcgctagtctcaatgggacgctcagcat

SEQ ID NO: 158189 - DNA, 228 bp, Arabidopsis thaliana landsberg
ttttagtggtctcttaaaaaacataaaatatatatattaaaatttctcaaattactaatgccttcggctggaaattttaatagtaataatgaaaatactaatattgatagatgagtttccgataatgccctcagactctgaagttctttcccatgaaagtctgaccaaacttccaattcgccggagcaatgttccacgacgtcgagcttctacggtcactgcttgtga

SEQ ID NO: 158190 - DNA, 474 bp, Arabidopsis thaliana landsberg
gacaacactgatgctccaacagaacagctctttgaagaagattccaacagggtttttcatgcatatgcctgttctcagagtcttggacttgtcgttcacaagtatcactgagattccgttgtctatcaagtatttggtggagttgtatcatctgtctatgtcaggaacaaagataagtgtattgccacaggagcttgggaatcttagaaaactgaagcatctggacctacaaagaactcagtttcttcagacgatcccacgagatgccatatgttggctgagcaagctcgaggttctgaacttgtactacagttacgccggttgggaactgcagagctttggagaagatgaagcagaagaactcggattcgctgacttggaatacttggaaaacctaaccacactcggtatcactgttctctcattggagaccctaaaaactctcttcgagttcggtgctttgcataaacatat

SEQ ID NO: 158191 - DNA, 384 bp, Arabidopsis thaliana landsberg
catctgactgtttcatttctcagggcattttcctccagggggcattatttaaccaacttacactctatatgacattttggcgtcggaactctttgcacaagaaaggaaatcgagtgaaggtaatctttgatggacgattacaagaaattcttcatttatattatgtttatcttcttgaagaactattgtctcgttggtggagttaaataactgctataaaatctgaattttcagataattgaagcatgcatcatctcttgtataacttcagctatctcatttgggctgccactcctaagaaaatgcagtccatgccctgaatcagttcctgtgtctggtattgagtgtcgcacgaccacagggaatgtatgtaaatcatgtaat

SEQ ID NO: 158192 - DNA, 107 bp, Arabidopsis thaliana landsberg
gactaagaatgggatagaggagatgtgtagggatctatggaattgggcaagcaataacccttacggctacaattcctcctccagtggctcctcttcataatcctctt

SEQ ID NO: 158193 - DNA, 344 bp, Arabidopsis thaliana landsberg
ttaaataaacttggattatattaatggccatcaacacaaaaacacaagtgatgtttcttacaaaagttgcaagctaatgttgagatcggctgaggaaagggttatacacactggctaaaacttaaaccccagaagccaacattgaacactattgatattgatttcatacaaatataatgagttttcgggggagttaaacaaaccaaactacttggggtgaaattaatctatagaaaaaacgaaccagagagccagttggtattcgtaacgacggagcattccaagaatcttacaagaaggcttctcaagctgcgccttctggggcggacaggctccatggttac

SEQ ID NO: 158194 - DNA, 85 bp, Arabidopsis thaliana landsberg
  unsure (1)..(85): unsure at all n locations
ccaatgactgatgagtggttaggcactctcatctaacatgttggaaaagctgataagatctaagccattggattgatgatccntg

SEQ ID NO: 158195 - DNA, 448 bp, Arabidopsis thaliana landsberg
ggggtactctaattgggcctttgtgatttttatactgttcgtccccatacattacatgtttgttcacatcatgatcggattattttgatactcagcaatagattttgacatttgctctaatagtattaaagcattacaaacaaaatcgtaaatacaatcattcagaaagaagaagtcagtcaacgaagatggagaaagaaaatctctcaaacgtgtcaacatcttcaatattacaacgtcttcacttgtgaatggagcaactctcctttttcttgtcaactcatctatgaaatataattacttacggaaaaaacaacgtgtttacaaagtgttatgaattcacacatatactactaactcacgccccttccgcttctatcgatcaaagtacccacttgttctccgcacaaagcttttgtgatgttcccagcttccagaaagttaaata

SEQ ID NO: 158196 - DNA, 213 bp, Arabidopsis thaliana landsberg
tccttaaaacaaagcaaaaaaaacatgacagtgactttctgttcataccagaaaaaacacacaaactaatgacaagtggttggtattgtctcaaccattattcaagaggccatatttttgacactttttcttggtacaagagttgtgaatcagtagaaagggaacatcctcagcttagtcttcaaatcagcttttggagttgctgccttctgg

SEQ ID NO: 158197 - DNA, 209 bp, Arabidopsis thaliana landsberg
cgactatgaaagcgggttgtcgacaaaagttgattagtccttcaagggaaacttcttgtaacggaaggaagcctgtgaaagctgtaactttcaacaacacgaaggagaagaaagcttcgagttgtagtctcatgaacctaataaatcaacacattcttgtcagataaagttaagaataaacagagctttagggtggatggtagaaaaaa

SEQ ID NO: 158198 - DNA, 206 bp, Arabidopsis thaliana landsberg
tgacctatggtcgaatacccacattagccagcaaaaaccgcataggggccaacgaatccaggagggatctaacctaatcttaaccacctgactaacctagagattacgctaatctaatccatcctcaataccctaatcactactcaagcaacataatgaagacacaaacccagaaattactgaaatcataccaaatggtagatgca

SEQ ID NO: 158199 - DNA, 582 bp, Arabidopsis thaliana landsberg
agggctgataatgaaccaagctttcttcggtggcgttgagccgtcggattctgagtcacggcttaaagacgataagatctgtccgttaccagctactcacttgttgtggtcactttgtttaccggacggtgtagatcgtgaccacgtgtacagtaatccaattaagagcagtgggcctcaggaaaaagataagatgggacgttttccgtcgactcttatcaacggttacggtggggatcctttagtggatcgtcagagacacgtggcggagatgttaaagggacgtggagttcacgtggagacgaggtttgataaagatgggtttcatgcttgtgagttgtttgatgggaacaaagctaaggccctgtacgaaaccgttgaggcctttatgaagagttgttcatcaactggcccatcgtccaactccaacatgtagtagtctgatctaatcatgttttacgaactatatatatatctagctaataattaaattcctacaactattatgcaatttttgttgttttaagtcacatatgatatctgtggtgcaatggaaaaatgtataccctttcaataaatata

SEQ ID NO: 158200 - DNA, 421 bp, Arabidopsis thaliana landsberg
gacggtgaatggtacggtttaagcctggagacaagacagatatgtgtagttgatgtaatggagcttagtgagtcatatgatgggaacaaaaagatgatcccttatggatcagatgatgttgggaggactttcacagaggcgaattcaaggtttggagttatgagagtggcttgggatgtgaataagcttcagtattagactcagttgcattgaatttgaccagtaggtttttgacttttgtttatttttaactgtttagagattctcctctgttttgtgagctttgtctctctctggttatttacaggcaaaggttgagactttgagaggaaggtaataacagaaggaatagtttgactttataaatctcagttagttgactttacagctatttaaagaaacaaattttatttttttcgtg

SEQ ID NO: 158201 - DNA, 252 bp, Arabidopsis thaliana landsberg
ggaaaaccggtcagaaatgggtaaccggagcagcagaatctcttcgtcatagcttctcccgacgagattgctaagatccatcgagccgaaacttccaaacaaggtctcttcttctttctccgtctctctctctctttttttccctaaaaaaaatcttttaaattgatgactttggattatgtttacagccggagctattgccggagctaaggcagccgccgttgccgccgtcgccagtgcgattcccacagt

SEQ ID NO: 158202 - DNA, 115 bp, Arabidopsis thaliana landsberg
tgtgtcttttggcttttataatcgtcgccgggacacaacacaaagaggggcttagatttgtgctttcgagaagagctttgatctcttttttccattttcacttctaatcggagat

SEQ ID NO: 158203 - DNA, 108 bp, Arabidopsis thaliana landsberg
ccaagcaagtaacaattgctatagctattgctcaaacaagagggcactgagcttctcgtggtctgagaaccacagattatatgccagcaactattttatgatgaagct

SEQ ID NO: 158204 - DNA, 265 bp, Arabidopsis thaliana landsberg
ttaggagtaattatgaaactaatggcccattttctaatcatttgtagtctgtttcatttggttttacgtttgttatttctaaccttatccataacactctaattgaaaataaatgagtagctttattagttgttagactgtgagagatccgccattgtcacccgctgtaagattcagaatcatcgtcgcagccttcacagccctgttacatttgacatcacataacacaggtttagagtttcaggcaatagattcttaagaagaa

SEQ ID NO: 158205 - DNA, 204 bp, Arabidopsis thaliana landsberg
ttacagatcgttttcgtggttgagagcgtaagcgcaatgctaaaccatgacagggcgctgaagagatcaaactcaaaccatcgagaagtcaagagttaagccattgaaggtcattgcgccacttttctgttacaagtaaatacaagagccccgtttttagcttaaagttggcaacaaatggaatgtgtgagtagttattccctg

SEQ ID NO: 158206 - DNA, 601 bp, Arabidopsis thaliana landsberg
caaagggaatgaactacttacacaccagccacccgactgttgtacatagggatttaaaatctccaaaccttcttgttgataaaaattgggttgtgaaggtttgtgattttggattgtcccgcatgaaacaccacacatatttgtcctcgaaatcaactgcaggaacggttagtttttatcttagatggaacgattccttatctctcaatcatgaattgcaaagataaactgaacaacttacttgatacaatgtcctgttaatgagtctgcagcctgagtggatggctccagaagtgttgaggaatgaaccggctaatgagaagtgagtgaaatttaacacttcagagaatctttttaaatgttagtacagaaatattgactggtgtgcttgctcagatgtgacgtgtacagctttggtgtcatattgtgggaattagctacttcacgcgtcccctggaaaggtttgaacccgatgcaagtcgttggagctgtgggattccagaatcgacgccttgaaatcccagatgatatcgatctaactgtggcacagataatccgtgaatgttggcaaacgtaagttcattttcataactcaaatcct

SEQ ID NO: 158207 - DNA, 99 bp, Arabidopsis thaliana landsberg
aaacaattgttagattaacgtaatcttcttattgattcccaagtcatggcaaaactactgtgttcttatctgttcatctgcatgtttgttctctcaggt

SEQ ID NO: 158208 - DNA, 280 bp, Arabidopsis thaliana landsberg
cctcctctgtggctgcctggatcgagtgaattggtcgagtagaatgctctgctacttccctcctagtttgatagagtagagggtcgagtagaaatccttgtaagctccttctacacctgaaaacataccaaaacatgcaatatgtatacaagatgatcctaaatgcctaagtgtgcaaaataagctaaatgtgatgcaaaatgctatgatacaatgagtgatcactaagctacatgatgataaatacatgcctaaaatgagtaaaatatagtgttatcat

SEQ ID NO: 158209 - DNA, 378 bp, Arabidopsis thaliana landsberg
  unsure (1)..(378): unsure at all n locations
agttgtgcaagtgtggttgagcaaggatacctcgtgctacagaactcgttcagcttgaagagcctaatatattcctcagcaggcaatacatcgggtttgtttagcagtttggtggctctgcgagtatgctcaggcatgtactcgtcatcctgatcctcatctataagctcatacctctctgtcatcgctctcctccctcgaggtatattagcctttcttctgaagctatcatattctctctgttctctntctggccttgacgatgacgactctgtctcatccatgttgtagtctggatcaactgaagttctgccactgtaattactcatgattctcctatagaaatttagaactcaaagctcaaatgtcaataggtta

SEQ ID NO: 158210 - DNA, 93 bp, Arabidopsis thaliana landsberg
cagacagccagatggagaagaatctggcaataacgaggatgagcaaaaaaaatagtgacatctgtataaacctctctggtgcatatatgaaag

SEQ ID NO: 158211 - DNA, 289 bp, Arabidopsis thaliana landsberg
tacattcagtcattcagatgaaaagacggagaaacggagctgtggcgggaatgtaactagtaaagtactttcttgaggattcggcagtgctcaagaagtttatgctgcgtttgggttgtgagagaatgaataagagtttatgctctaatcatcagtggaactcttgagattaaggagatgctctgcttattgtgaagtcgttgttgaactttcagagagtgattatgattgatacacatgagtttgtaacacttaaaatgtgcagatccattttggaaagtttagtatt

SEQ ID NO: 158212 - DNA, 174 bp, Arabidopsis thaliana landsberg
gaaacgtttgagtactaatacaaccaaactgaacaaggttcctacgacgattacgacattgtatcaggaaccagaaccaaaaccagaactaaagctaataaaattggtgaaaggatagtgtattcttaacttctttatttttccccaacatcgtaaaaatatttcaattgtaga

SEQ ID NO: 158213 - DNA, 328 bp, Arabidopsis thaliana landsberg
atcaattttaaaaaagtcttacaatcacttcactcataaaacgtattgcatattgcaaaaaaatgttactattaccctcaaacgatgtgagcatacaatgcttgacgctcatctaagtttggttatgatatcacttggaaagatccgactacaattatttgtggacctttctgttcactcctagcccgtaggcttcatccacgtctgaccaccgatgtcaaacttttgaaacctctaagaaacttgttattggtcatatatttcaccacaaacgtaaaaatacgtgtttttacatctcatgatataaacaaacaaatttaataggtca

SEQ ID NO: 158214 - DNA, 112 bp, Arabidopsis thaliana landsberg
tttttgattgacagatggaagctctgtcttctcttacgttcaagggttctcttccagaagccatatttgaagccaaagggaagaagaagctttttgttgtctacatttctgg

SEQ ID NO: 158215 - DNA, 394 bp, Arabidopsis thaliana landsberg
gattaggttttcgattctctttctcttcgtatttgaagctaccaaaaccctaattctatcaatttgaaatcttcaatttcacgtgggcgaacatttaccttctcaaccatcatctgatactcatcccccaaatcaaccaaaatcacccaatcatggaacccataatccaattccaccggaaaccaacgatgacgatgcagcctcatccgccaaagtttctggctcaatcatcccatcaaacatcagcctgagctttcgagagcattttcattgcttatgttgaattctaaaaattcaattagtcgcaaaagaaatcattttgatttgtgggcaaggagaagaatcttcgaaagtgagaaaagatatagagagaattatgagaccatttttgatc

SEQ ID NO: 158216 - DNA, 366 bp, Arabidopsis thaliana landsberg
accttttatttatatataacatctttatatttacagtgctataaatatattaatttatacagaaacgaaagttatacaaagtaatgatccgcttgtaaatcaaccaggttgctctcaagacctgttaaacataagttttcaatcctaattcgattgatcattgatgacatgcgtgtatgacatatagttaatatattctcaaaggggaacatatattaattacctaaagtttccctgcaagcataaatgccttgtagtgaacatccttgacttgttcatcatcaccccaagcttccttaaactcatcaatcatataagaagttaaaagatcctctccttgctcctttgctttcactagaggctgcc

SEQ ID NO: 158217 - DNA, 93 bp, Arabidopsis thaliana landsberg
tttttttttgtttttttttttttttttggtttttttttttttgtttttttttttgtgttttttgttttttgtttttttttttttttttttttt

SEQ ID NO: 158218 - DNA, 621 bp, Arabidopsis thaliana landsberg
tgatgatcaatggcgatttacagatctctaagaaagctagttgaaatcaatcaccggaaaacaagaccattcttcaccaccgctacagcttccgccggaaccgtttctctgactccaccgcagttttcgccgttgttcccacatttctcacaccgtttatctccgctttcgaaatggttcgttcctcttaatggacctctcttcttatcttctcctccttggaaacttctccagtctgcgacacctttgcactggcgcggaaacggctctgttttgaaaaaagtcgaagctctgaatcttagattggatcgaattagaagcagaactaggtttccgagacagttagggttacagtctgtggtaccaaacatattgacggtggatcgcaacgattccaaggaagaagatggtggaaaattagtcaagagttttgttaatgtgccgaatatgatatcaatggcgagattagtatctggtcctgtgctttggtggtaagtatagaagtatatattcctcaggaagataatattaggaggatgaagaatctgagactttgtttgtggttctattgtaggatgatctcgaatgagatgtattcttctgctttaaagggttggctgt

SEQ ID NO: 158219 - DNA, 424 bp, Arabidopsis thaliana landsberg
atacttggtatgtgtaaagtttgacatagaagataggcatccgctggtttgaactagtatagtgcttcaaaacccggtacaatgtctctggtacatactccataccaaggttgaggaagagctcatctctactcgttgtagagaaaagtcagtgcttcaaggagatgacatttgggtgatccattggtcgcattagttgcaactcacggtttttatagcgtcgatcttgcaagacctttttaatggctactgattctccagtttccaagcatttcgcgtaaaatcgtaaatttcagacttgatcagaaagaaagaagagaatttatgacctggaaccgctagtacaaagaagcacaaaatacctgaaaaacaatcccgaatgaacctgttccatcaacccgctcagccatgtaactaatggtct

SEQ ID NO: 158220 - DNA, 266 bp, Arabidopsis thaliana landsberg
cgaggctgagatatatctcttcggaggctgcattacttcttggaaagttgcgagtggtaaagatcttctttttgtcagaccagatgctgtcttcaataagattaagcccattaggtctgtgtgtgtgaacttcaacaattgttattaaaccagaaattgtgagtaatgtcttttctgttttcgccatactttttgttattggattagcggggggattccacattgttttcctcagtttggacctgggctaattcaacaggtactct

SEQ ID NO: 158221 - DNA, 246 bp, Arabidopsis thaliana landsberg
gcaataagtactagtctccaagttcaaaaaaggagaactgtttctctgtttaattaacagaaaacaaaatggcaactgatcaaattacaaaatcatggagaagcgtattcaaaggcctgcggaggttgtggctcgtcatctatggccatagcagaggtggtggctgcttgttgggcttgtcctgcagcttctgcacccactgcaggggatgctgttgaagtcggtgcatcggtcagagacagaact

SEQ ID NO: 158222 - DNA, 371 bp, Arabidopsis thaliana landsberg
aatccaagagcagctgcacccggatgttcctccatctgttggaagtgaaactgttttgggtgatggtaacgaaggtggtcaacaaagtgaagaacgtgaactactaaataacaatgaaaatgttaataatccacctgatgtagtggctgaaagtttcgctcaaggtcaagctaatctagcttctcctgtcagccaagatacaggtgaaagtctgcagcagcttgaagttatgcagcctcttcctttgaacagtacaccaaatgagattgatagaatggaagttggggaaggtgatggtgcgcctattgatcaagtagaccacgaagctgtgcatcttatctccactgctcagggtcaacctgatacttcca

SEQ ID NO: 158223 - DNA, 460 bp, Arabidopsis thaliana landsberg
taaagaaagatctttgccaaaaacttctgagttggtattacagtcattaagaatgctcgaaaaagaaattctcacgtccgtattgaaaaaccttcttcaagacactcagttctaagatcttccatgagaccctgaaacatagatggatcgctcgtcacaacagcatccacacctaagtgaagcatccttttcatgggatcagcatcatccacagtccatgcatacacctctttgtttctcctgttgatcagatcgagcaaggttgtaaacacatgagcaggtgtgtttttatttgaaacattgaaatcgattgcttaccgacggacaactctaactaattcttcatcgatcaagggatgataaactcccacaaccctagctcccttcattctcagcaggctgtttctcgccccagtcaaaggatctaccatcacaatgtatcccacctgccaaaatcact

SEQ ID NO: 158224 - DNA, 137 bp, Arabidopsis thaliana landsberg
gagtttctcgagatcacaagcggagattccgttacagccagcgacggtggtggtggtggctgaggaggaagaggtggagaagcggcggtcggagattggaggaagaggaagacggagatttagctgacgacgttcac

SEQ ID NO: 158225 - DNA, 185 bp, Arabidopsis thaliana landsberg
taggggtactttcttggcgattgtaagagtgccaacttcttcagtatcgatatctttatgtgtcatcccatcaggcaacttccagtcgaagaagtaaagtaagttcaagagtcccaattctacagtagccatccccatcgatatcccgggacatatccttcgtccagacccaaacggtaagagct

SEQ ID NO: 158226 - DNA, 462 bp, Arabidopsis thaliana landsberg
tgcagctccaagaagggatagtgtagtccccacaacagagctcgtaagttatatggaaaagctacttccgggtacccatctaaagccttttagagacattttgaaaatgcctgctatgattttggatgagaaagagagggtgatgtcgaggtttatttctagcaatggactgattgaagatccatgtgacgttgagaaggaaagaacaatgattaatccttggacctcagaggagaaagaaatctttctgaatttgctagcaatgcatgggaaggatttcaagaagattgcttcatctcttacccaaaagacaactgcggactgtattgattactactacaaaaaccacaagtctgattgttttgggaaaataaagaagcagcgtgcttatggtaaggaagggaagcacacctacatgttggctccacgaaaaaagtggaaacgtgagatgggggctgcctc

SEQ ID NO: 158227 - DNA, 257 bp, Arabidopsis thaliana landsberg
aaaaaaagaacgggaactaaattgtaagtaagctcatttcattttgtaaatatacgaatgacaaacataaaatcaatgcatcaacatttcgattaaattatatggtatttaggcagttttttgttttgtttggtatggtatgaatgcaggactaagaatgggatagaggagatgtgtagggatctatggaattgggcaagcaataacccttacggctacaattcctcctccagtggctcctcttcataatcctcttc

SEQ ID NO: 158228 - DNA, 138 bp, Arabidopsis thaliana landsberg
  unsure (1)..(138): unsure at all n locations
ttattgatcttctagaaaagattgactttagattatttactttttcagtaattagtatgaacaacattacatattcaaaaataaattacataaaaacaatttatttggctaaagcanaagatgaaagtaagttttctg

SEQ ID NO: 158229 - DNA, 268 bp, Arabidopsis thaliana landsberg
tgaaaatatcgtaattatcctatcgaaaagtgagaaagagtaagcagagaaataagcgattgatctctccttctgcaagttctctatttcttccctcacttcttcttcttcttctcccctttcattgttctctctgttcggcgctctcttctacttctctcgatccgaccgtgaatcactatcggagcaatgactatgatgactccgccgccgctagatgtaatctccgattatcctattattgttgtttgtgtcgatttgatgtcgt

SEQ ID NO: 158230 - DNA, 397 bp, Arabidopsis thaliana landsberg
ctcgtctcgatgtatgtatgggaggaagagttgcagaggagctcatctttggcttggaccatattaccactggagcgagtagcgatctgtcacaggccactgaacttgcacaatacatggtaacctcatgtacatgtgcttaattgcttctttttttctggtttatcaaaagagttagcctttggttcttttagttttctggaatgaggtttgagggacttagtctctgagatccttaaggtgaacttacaagttaatgcgagaagatggatcttacctcttgttgtagttgtagtaatgcttttctttttaatggaaggtatccagttgtgggatgagtgaggcaataggaccagttcatataaaagaaagaccaagctctgatatgcaatccgca

SEQ ID NO: 158231 - DNA, 206 bp, Arabidopsis thaliana landsberg
tagtgagatgggtttttagcttgtaacaaagtgatgaataaagatcacgagaaatatgagtttaccatttggtagttcatggaaattatttgcagatatgaggtgctagcaatccaacaggctcaaatcaggaggatggccatggaagacagtaaaacttctgaaagcaagggtgtatatgaagttgaaatgtcagaaacaaagca

SEQ ID NO: 158232 - DNA, 281 bp, Arabidopsis thaliana landsberg
gtttatctaggttttagacaggctctctctccttccaatttcaaaactgtgtgaagaagaaaaaatgtcgagggttttcggagcttgcagggtactgatggcgaaggccgcttcttccaccggcgctaaaactggtagacaaggtactggcattcttaaggtggttcccgtttcgaagccgctcgctaattttattgggaaaacgaagtctctcgcacaactgccgtcaagaaaatctgggaatatatcaagcttaacaatcttcaggttagggtttgctt

SEQ ID NO: 158233 - DNA, 998 bp, Arabidopsis thaliana landsberg
caaacgcagtcgcgcctaaaccaaggcacagaagcgctttaacaaacgctaacgcagtctctctctctctctctctctgggcttcggtggtgatcgcttgggtcgaatactgatgaagaaactggctgatcggctccttcatcgttttactaatcatgaaaccgctttaaacgccggccaccactgtgatttctcgtctacccttctcttctcatggtttcttcatcctcttgaatttctctcacttgagaatggtttttaggctgctcaacgaaattgtgacagcaaagtttgtatttttagcccggattagtaaataagcttaaatttgttgtttacttcattttttatgacactgtaaactgtttttctttccttgtttcatcaaattgggtttgtttctttgctgaaagatgatttcccttcactgggtctacgtataaatccagaaaggaagggactttaaacgatcacagagttacaattgattgaatatcggaaataaaccattttgcttgattatcggaaataaacgccttttcagtttgttttaagacctgttctacagatcctatatctatgaccatttcaaaactcttgttttacacaagcacttatgaaactttgagtatctcgtgctgctgcattctgcgtaaagaggagttctcatattaatctctttagtttttctacattcaaaagtgttgatttttttccttacactaatatcaggctcagaggggacagatcaaggtacaagtggtcttagtcataggaaggatcacaggatgtcctctcatggtgtccacctgcatgtccatgatcgatatgtaatgcaacgtcctcagtcgacaatgtgccctttcatgtgtcttttattgaatgtgttttgactatagacggaaatggtgcaggttgtgatggacaatgggatcctccaagttacactgtcaaagccaggtggaattatcactgggataaagtataacggtattgac

SEQ ID NO: 158234 - DNA, 250 bp, Arabidopsis thaliana landsberg
tattgttgttgcaagcttcatttaatcgcaatcggaaagtaaaaaaagaagagaagggaggtaaagaaagcattaagtttcatcaaccaaaaccttaattgtttttgttagaaataaacaaatgccatcttcatcttcacatcccatatggaatccaatttatgctatacttttgtaaacatacggtatatcgtagaaaaattaaaacttcatggctatataagcaaagccttttgtcgaaaatacacat

SEQ ID NO: 158235 - DNA, 73 bp, Arabidopsis thaliana landsberg
ctttttttatttttttttttttttttttttttttttttttttttttttattttttctttttcttttatattct

SEQ ID NO: 158236 - DNA, 363 bp, Arabidopsis thaliana landsberg
aattagatggtggtcggattctatgaccgatagcaatatgcttaggatattgatgccggtggctgctgccttcaagctcaggcatggtcaagaagaggaggcttcacggctatacgaggagattgtgaaaaaccataatagcacagatgctttggttggtcttgtgactactcttgctcgtgtcaatgttgagaaagcagaagcttacgagaaacagcttaagcccctaccaggtttgaaggctgttgatgtggataacctagaaaagacctctggtgcaaaacccattgaaggcatttctgctgcttcattgagtcaggaagaagtgaagaaagagaaggtgaagaggaagagaaagccaaa

SEQ ID NO: 158237 - DNA, 310 bp, Arabidopsis thaliana landsberg
  unsure (1)..(310): unsure at all n locations
tctctcagattcctcccaagcaatctcgttttcaaattcttcgtatggtttcgtgagttgtttttttttcctttccgaattcatcgtcgatctcaaagtaaatagtcttgacctagatttgttggggtacaaacatatttgttttttgttgataatcacaactttttctggtttttaattaagataatgggatgnnnttagttagggtatcgtcagattattgagactatgggatttattaggttaggtagatgtgccctgtgacataacacaaacctatgactgtagaagcttctttcatgttaattca

SEQ ID NO: 158238 - DNA, 185 bp, Arabidopsis thaliana landsberg
accacaaaacaaaacaccattgtcatatcatcaataaccagcaatcaaataactcatatatgcttcaaaccaagactttcagattcaaatggctttggttagaggtatttatgcttcaaagaagactcttgaccactctatagcagctgcagctgagcagcaacattgagcaaaagacatttggg

SEQ ID NO: 158239 - DNA, 257 bp, Arabidopsis thaliana landsberg
aaaagaataaaaaaaaaaaaaaagaagaaaaggggaactctgaagcaacaagaagagaaggaaaaaaaaaaaaaaagaaagaaaaaaaaaaaaagaaaggaaaaaaaaaaaaattaaataaaaaaaaaaggaaaaaaaaaaaaaaaaagagagggaaaaaaaaaaaaaaagaaaaaagaaaaaaggaagaaaaaaaaaaaaaaaaagaaaaaaaggaaaaaaaaaaaaaaaaaagaaaaaaagagaaaaaaaagaaa

SEQ ID NO: 158240 - DNA, 279 bp, Arabidopsis thaliana landsberg
gggtagggacatgtgtccttgcaaagtcaagtaatgtgtatcttcaattggattttcttcttggttacgaatcaaaaaacgtggatacagaaagagaagcacaccaactatggaagaatgcagagtttgaattgtctcttaagccagagagggttattcgagaaagctgcagctttctttttatttttgatattgacaaatcaagtgacagcgagccatttgatcttggccttacttggaagcgtccctcaaagtggtcatgtcaacaagctccattac

SEQ ID NO: 158241 - DNA, 149 bp, Arabidopsis thaliana landsberg
tattgttgattctgtaatcaaacaatgaatttgtactaagggatttagacaaattcactcctctcttagctcgcaaataatcaaagggaaagaacaaagttgcttgaaataaaagctagggtttgctctataattgtagtctcttcttt

SEQ ID NO: 158242 - DNA, 106 bp, Arabidopsis thaliana landsberg
gagaatctcatggttatttttataatgactaaagattacataaacataaataacacaaactaaacatttgtaacaacatcaaatatccctaacctcgtactatgca

SEQ ID NO: 158243 - DNA, 356 bp, Arabidopsis thaliana landsberg
gactaggttaacttgagggtctctgttgcggtggcacttagatttggttaatgaacttattgtctagggataatttattgagcatgtcaatcacctgtaaagtgaggaaacgaaactactcaattatcccatcctcgcgaattctttatctgattgattttattgtttagtttactgttgtttagtgaatcttgtcatatgttgcttagtttctgcaattctttactgttactcgacctgatattcgaccacccagttgtttggcaacagactgtgcagtcgagtatccctgttacattttctgtctgttactcgacatgtcactcgaccacacccagtgctgttaaacgagctgt

SEQ ID NO: 158244 - DNA, 161 bp, Arabidopsis thaliana landsberg
gattccgatatttcatatgatacttcactccatttggtacaatagagtttttcaaatttaaaaccacagagtaggtttgtgactgtagaacaagtaactaacagagattcattcgttaatatagcaaaaaagcaggttgcaaaactcgcaattgatatcta

SEQ ID NO: 158245 - DNA, 472 bp, Arabidopsis thaliana landsberg
gtattccaacttaagaagaaaaatttattccaacaatgcaaaacacacaaaggaagaaatttctgatacacaaacaatttatcggttgaaaaacttaaaacacaaagaaacaacatgtcatatgcatggctagaaagatgatatataattaatcaaattttgtagagattgatatgccgaaccgttttgtttaactgatcttcctactttttccttaagaagttgtatcctccctcggatggcttctccttcagtttccaacaataatctccttatcgctctctcgatctcatccctctcaatccgaccctcgagatgtatcccaaccatccatacatcactaacaaatcttgcatttaacaattggtcccaacgaaaaggcaaacagatcatagggacgccttcacaaacactctcaaccgtcgagttccaaccattatgtgtcaagaaacctccaatagctcgatgcttt

SEQ ID NO: 158246 - DNA, 222 bp, Arabidopsis thaliana landsberg
cgggaattctttatctgattgaattctttgtttactctactgttgtttactgcatcttgttatctagtcgcttaatttctgcaattctttcttgttactcgacctcatactcgaccacccagttgtctggcaacagactgtgcagtcgagtatctgtgttttattttctgtctgttactcgacatgtcactcaacctcacccagtgctctgcaaagagttgt

SEQ ID NO: 158247 - DNA, 238 bp, Arabidopsis thaliana landsberg
tgttgccggtatgaaccgcctccgggatgacgacggtttgcaatatgatcatgtctcagttacacgttcttcttgttgtccttgttaaccaagtaattattaaactcataatctgttttttcatcaaaatcgatgtgagatatgtacgtaagacgactcaataattgcaggattcgttttaccactcgcttactaaggagaaattgaacaaggttcatgaatataatttcgatcatcc

SEQ ID NO: 158248 - DNA, 760 bp, Arabidopsis thaliana landsberg
ttgtctttttattttcctcttccttggccaaagaaaatcttatcgtagctgtgaaaaccctagtttctaatcatctcaattctctcattaacctatcaatttcgatagggtttgatcaagtatccgatttcatggtttgtattttccgtttaatagtctttaaaggtcttgtcttttggaatttcaagggttttcgtttcagtaactccttctttttttctgttaatttagatcggttgctgtatggagactaattgctggagtttaggttcgtgtgttttgaactgagcttttggttcttgtttgtgtctggtgttgaagacatggatttggaagctaattgtaaggtattattgtctgaaagatctatggatgcttgttggtttataatttttgttgatttgaacttgttatgaatgtgttgattggtatatagagtggatgtttcaaaaaagctttgcttttccgttttgtttatgatctagattgtattgctgggagtaaaaaacgatcctttatctcataagggttttggattatggttcgtggttgctgttattgaatttagtcttgctctagttaagcttaacgttgtgtttttgttgtgggttgcaggaaaaactttcatattttcggataaaagagctcaaggatgtgctcactcagctgggactttcgaaacagggaaagaagcaggttagtatcgttctctaatcttccattggtcgtgattatgtttgtgagttgcttggaacgatta

SEQ ID NO: 158249 - DNA, 74 bp, Arabidopsis thaliana landsberg
caagatatgtctatatttctgctgcggatttcggattagcccactacgtgttgagaggatatcatgagggaaag

SEQ ID NO: 158250 - DNA, 691 bp, Arabidopsis thaliana landsberg
gcaagtgtggttcatgtgggtcaaggaagcagtcaccaagtgaatgggaacggcatacaggctgcagagccaaaaagtggaagtatagtgtaagagtgaaagacacaatgctacctctagaaaaatgggtacatcccttatgcttaactctctcataaactttcccttatatacccctgaaatttacatgcatgatgtctataagaagtataatactgacaacaagatattacagattgcagaattcagtacctatactctagaaacccagatgttggataagcaaaagatgctctctttgctagaaggtagagtatatcttaattcttggcgtccttcttttggagtttaaaattgctaagatacttgcttactacttattttatatgcacagaaaagtatgagccagtcagggctaagtggacgactgaaaggtgtgctgtatgcagatgggtagaagactgggaagaaaataaaatgatcatctgtaacaggttactttaatggcataatttggttatactgaattctacagcgttcttataactaaacatgagtcataaatctgaccaaatctgtaagcaggtgtcaagtggctgtgcaccaagaatgttatggggtaagcaaatctcaggacctcacttcctgggtatgcagagcatgtgaaacaccagacattgagagagattgt

SEQ ID NO: 158251 - DNA, 386 bp, Arabidopsis thaliana landsberg
  unsure (1)..(386): unsure at all n locations
cggacaacttcgtggtaggcaaagtaaataagcacagacaacttcctctagctgacaacaacagaagcctaatgataaaagagaaaaagatacatgccaaagagagagagacccttgcaccaaattttaactaataacaagttttgtatcatactctcacacaaaatgacactgtacaaggtaacgactttttcattccaacactccaacttnnnnnnnnnnnnnnnnnnnnnnnnnntcgttgaactctttcactcctcctgaactttcctccggctttgagtcctcagccatctccttgttcttcttcaacactccaacttctcctactatcccttctttcatcgcttgctccatcgctttctctgccccttctgggtccacct

SEQ ID NO: 158252 - DNA, 362 bp, Arabidopsis thaliana landsberg
tttggaccgaaaaaaaaaaaaagaattcatccccaaatctgcacctcctctcatcttcttcatctccttcaatcttcattatttataacctaaaacgactgaatctttctctctctttatctccattttctaggtgtgcttatcacagctagaaagttcttacatttaaatcgccctagttggagaaagccgtcggtttctcattttgaaatttccaaggagatctgaaagttttaattttttggatcgatttcatcgttatcatactccgatcatcatttctgttcaagggttaatcgtaaatcgttcatcgggtataatgtttttgacatctcgttttttattctgtggtggttgttgtg

SEQ ID NO: 158253 - DNA, 176 bp, Arabidopsis thaliana landsberg
atgagaagtggacaataataattaataaaaaattatgtttttattttagataccaaatatagtttgttgattttaattggttacttttttggaaattaataatgtatttcgtttttctaattaaattaaattaattaaaatttagatatcacatcttatatgttgattttgattgg

SEQ ID NO: 158254 - DNA, 321 bp, Arabidopsis thaliana landsberg
taaattctctaacaattatataaattcaagacctgaaagattcatttttaagcgcaaatgaaaacaattggaatttcacatataccacaaaaaggcaaaagacaaatttcatttttcgaaaagatcacaaggagaatcgaaaaacacactccctatcccttacatacttaatagaaaaccaacaacagaccaacttcttatgtaacttttggttttctctacaatgggaagttagcagatttggcagcgagtctttaaaacttgttgcatcaaccacggccgcgacctgctcctgtttttcacaacatattagagttttag

SEQ ID NO: 158255 - DNA, 491 bp, Arabidopsis thaliana landsberg
cattgataagggcaactctagggttcatcaggtggctaacaggtaaaaggcagaaaccctagacgatagattcaaaaaccgggtcaatccactcccgtgacagagacccccataactctaccacttcctaatctcaactctcgttgatgaaacatagcagagcagggtttaagcaacaatctaccaaagctaataaacagactagccaatctcttggtctatagtctataaatctctggatttcgtagatcagacaatcatttgaacgtcttttggacgctggacgtctatggtcgaatttccacattagcccgcgaaaacttcataagggccaacgaatccagaagggatctaacctaatcttaaccacctgactaacctagagattaccctaatctaatctatcctcaagaaccctaatcactactcaagcaacataactatgaacacaaacccagaaattactgaaatcataccaaaatgtaaatcta

SEQ ID NO: 158256 - DNA, 152 bp, Arabidopsis thaliana landsberg
tggttccactagcggtagaccaggctgtggtttactgggaaataccgctcagtcctcgtccttagcaagtgtcaaagctcctctagcttgctcttgagatctgccacttgcttttctaggtcttcatcttttattctcaactcctgtaaaac

SEQ ID NO: 158257 - DNA, 531 bp, Arabidopsis thaliana landsberg
caactaatctgatttacagattcagtatacaaggtcgaaaatctaatgatacatatttaacaatggcatttgcttttgatcaatcgagacactatagttgaggaaagtgttggatacatacttaatatagcttggtttgatcaaaacagagacatcattgttgtgagaaagtgttgtagccattgcaagaagttcttcaaaacccaatgcatcaaggtaatctaccaagagtacaaccatggtttctagactttttgtacttttcagtagacgttccatgaacaaagccaagagattggactctgcgtgtttactcgccaacatcgaaatggtctcaagagagcccgggaagaccgagtcttttgatctccagcattgacgctgattcaagctatgtttacgcaagtagtcattgagatgcaattcctgtcaaacagaaaaatggatttcatcatgcaaactaataacttgtatacaaaaagagtgtcaaaaaacttcatcatggttcttggataaacactattttgtcat

SEQ ID NO: 158258 - DNA, 175 bp, Arabidopsis thaliana landsberg
aaaagagaaatccaaaaggagaattcttttgttctttcttcatttgatttaatacctttcttcatctacttgtcaatatcactgactctttcacttttacaaatcccaaatcttcaaagagaggaacaaaaagaaaatcagatttcagtttttttttttcatttctaacataaca

SEQ ID NO: 158259 - DNA, 636 bp, Arabidopsis thaliana landsberg
ttctctctgaaaatctcttctccttcctcaaaaaccgatactctcttcttcaatctccctctcttatctctccaagctaattctccaaaccgtcttttctcaaaccctaacgtacggattagggtttttgttcgttgattccaaaggttacgactttcaatttctccaccaaattctctgtaaaggttaaagatttctactttcttttgagttcttagcctgattctttaaccttttcgttgtcattcgtcggaattttggagtggtcaaagtaataatctttatcacaattcaagctttttgagagttgattggttaaaattgtttctttttgtttttgcgagtttaatttagtttgagatttgtcttcactggtttctggttttgattagaagttgtttctccattgtttaaaaagtaaggagtaatgtgtagttgcagtagttttttttttttttataattgagaattgtggattatgttctgattctaatgattgtttaataatttgtttaattaaaatatatgattaggtgacgatgaatgagaaaggagaaaagacttgtcctctatgtactgaggagatggacttgactgatcaacatcttaaaccttgcaaatgtggttatcaggttt

SEQ ID NO: 158260 - DNA, 459 bp, Arabidopsis thaliana landsberg
aacaaattgttgatttatggagcttagtatcaaataggaattttgtcttcttgcctattaaaaaatcaacctaaattttacatttaaatacttttaaattacgaaatataaagtgaaagtccgtacgtaatgcgggtactcatctaatttatataatactgtataacaaaggtgcctccattgtgacggtgataaacacatgaaccattgatagattgatctcggtgatgattttgtcaccagaatcgacgctcgaacggttattgacatgtggctaggatggagtccaacaaaaatttctataacaacaagcggtgatatattgggctctttttgagcctttaatgtttctggggctttatgtatagcccatgtaagatttggttatggttaataacttaataatatctactcttgtgacaaaccctaaatccaatctacagtctttttttttctttc

SEQ ID NO: 158261 - DNA, 162 bp, Arabidopsis thaliana landsberg
  unsure (1)..(162): unsure at all n locations
gattttaggtatgcactatcaaatgatttaaagaaacggtagaaaccttgtttttaaccgtcacggtccctatataaacctatgagctagcgacgacaagtattcagtataatcnatccagaaacnagtagaaactttaaaacgagagagagagaaagaaat

SEQ ID NO: 158262 - DNA, 294 bp, Arabidopsis thaliana landsberg
aaagagttcatttacaaggatgttttggaacattagaagtcatatacgaagagtagtaaaagtcatttatgtgtttggctaagaataaaaggcgaaagaatcaaatcacagatttatgatccaaagccagaatcatctgtttcgcagagggttttaaaaagtctcaagaattattatattagaaagaaacaaagctgtagaaaatctgtttatcaagaagaagccggcatcagctaaagatatgttttatttttatgtttgaaaactgagtacagatacgcagcaaagaaaaac

SEQ ID NO: 158263 - DNA, 580 bp, Arabidopsis thaliana landsberg
  unsure (1)..(580): unsure at all n locations
tttactcaaaagtaaagagttgcccgtaaaatcataactttatacattagagttttgaaaaaggacacgtaaatagagtaactaacttaataagagccaaactggaatacagacaactttataaaccatgcgttnnnnnnnnnnnnnnnnnnnntcggcatcgccaggactaatgacgtccacctcaaaatacaaggaaggaagaggccagaggttattgtctccggcgtttctaagagctcctttgtcaatcgtgatgtcaacttggcaagttcaggtccggggttgttcgnnnnnnnnnnnnnnnnnnnnnngctgggattacacgtgtctgtggatgttcgggcttcttcagggcaagaacgacttgtttctcagccattacagcctcgttctttctcttgaccactcttgtttcctctgtaggattgcaagagcttgagattccctttagcttctcaggctgctgctgatttgatctgtcaaccatagtttgactagtgaccacggaagtgctggttgcatttggatcaacaatcaattttttttccccactgtgttgtctctgaaccactaattc

SEQ ID NO: 158264 - DNA, 282 bp, Arabidopsis thaliana landsberg
  unsure (1)..(282): unsure at all n locations
caatctttctctttctctctctctctctgttcttgcactcgcaaatcgcaatggattcgtttgnnnnnnnnnnnnnnnnnnnngagaaagccaaggcgttgcggcgtttcaaccgcttctgtagaattggccgtttcttccgtgcggcggaggtttgcgtcgctctactcttcatcttttggacattttcgcaacttcctttcgtcgttcaaatctccggagcgtttctccgccgtatcgccgccgtcatatctactcctctgttcgttttcctcctcggga

SEQ ID NO: 158265 - DNA, 518 bp, Arabidopsis thaliana landsberg
ttgctatatatagatttagcaatcgattttctaattttttttgtcacctatacaaagacatattgatatgaacgcatgtacaattctttaagaaaaatatttataaaagaaatcaaattacacggcgatcttagctagtgtcttcaacattacacagtatacgaaacaatacactatatatattagttattaattcatggttacaaggacataacaacatcaaacccaacatacatactgcataaagatggtaatgttaaataaaaataaaatatgctatttgtcaatatgatcggcatacaattaaaaagattcaaatatttatgtatttgtgtgatagacctaatattaagagaccgttaatttggccatgcaaacggctgattcgatgacggtgctggctggtagtaaaacggagctgccggatgctgccacttcttaaaaatacgcggcttctccgcctctttaccccaccgttgctcctccctcttcattaccgccggtggtttctgtggcgg

SEQ ID NO: 158266 - DNA, 170 bp, Arabidopsis thaliana landsberg
  unsure (1)..(170): unsure at all n locations
agaaagtcatctctctccagtctccactaagggcagntttctctccttctatcttatttcttctcgaacactagccctcgtcctaatttccgccacaggagaaacccttgaatctaatttcttgcatcacaagaaagagaaactaactcatttcagagtatactggcacg

SEQ ID NO: 158267 - DNA, 323 bp, Arabidopsis thaliana landsberg
ttttgtttaactaattatttccgcgttgtaaccttttttttgcatatttcttttgcgaaaaaacgatagaactcatagagggtggagaatacgttgtcgttttgcgctttaatatttaaattttcttgctagcttggttctttccacttaaaagcattatacactttttctaatttggattttacaaaaagaaatgacatcacaatatatcattgtcccatttctcgcaatatacaacatcctattttgcatttttcagtccttctcattttggtaatttctcctttgaccttttcttttaagatgaccccatcgaatcgcta

SEQ ID NO: 158268 - DNA, 280 bp, Arabidopsis thaliana landsberg
gatgggattcttctaacattcttcttgtcaacaatttctatgcatgacgacataaaatcgcagcatttctaaacttcatgcaacaacaacatatcgtcttgtttgaaacatcataattaaccaaatgctcccgtgatacaccacgataagatactttatatttatataccatctcagacttactaaccttgttggcaacataatcaccaataactatgtattgtttctggaacaagctacaaatttcgggtgtatacacttcctctgcatgttgcaacat

SEQ ID NO: 158269 - DNA, 171 bp, Arabidopsis thaliana landsberg
agcgaagaagcttgttggcaagagtgtcgttttgtccaagtcccaaagattttgcttcagattgggcagtgaagatgcaacactttcccaatggtaagagtactctttacaatttttagatttgtgttgtcacacatattgaaatatatatatggtatatttggacgatat

SEQ ID NO: 158270 - DNA, 337 bp, Arabidopsis thaliana landsberg
ggactgaaggtgcataacgacgagccttgtaacacggatggtgaacatgaaattgaattgttattcccattcatgaaagatactcgtgctgagggtatgtttttctcactctaatttagacacagtgatttggtttgctatgaggcttgtctttggacgattgtatctaatattacggtgtaatgttgagaagcatcaactgcaaagaatgttactggaattctactcttcactggttctgtattctcttacgcctacttgaacgtgaaagaaccagtttcacaagctattgctgatattaaggtactgcaacgatgtctcgtgtcagttctaccgg

SEQ ID NO: 158271 - DNA, 73 bp, Arabidopsis thaliana landsberg
ggggggtcgcttcttctgcattttctgcttcccaatggcttccagaattgctgattctctcttcgccttcacg

SEQ ID NO: 158272 - DNA, 262 bp, Arabidopsis thaliana landsberg
ctcaaattcttaacgttgttttgcagctcaaagtcctctcctctatcgtttatcttgctgctcaaaatattctttatctccttatgcgggtatatatatatgactaatgtttctaaaaattggaaattctgattcatggagttaatttattaactaaatatctaacaatattgttctaaaaatctagactcacgctaagtcttaatctctactatgtggccatcgagaacaccaccgccacctttgcggcagccaccaccaa

SEQ ID NO: 158273 - DNA, 397 bp, Arabidopsis thaliana landsberg
ccaaagacaaagagagaagccataaaaaccctaacaacatccattgttgaaactctctttggcacaacaccaaacacacaaaatatggccatcccctaaagaaactgaagctcaagaaccctctgaatctatcagaagatctcaccaataaagggttttgagaggttcaagtttctctttatgggatggccccaaacacaagagtactcacaaaaggtaagaagaagaagagatctcttggagattatgattgtgaatgttcgtgtgtgggtgttgtgtaaatgatcatcatcatcatcatcatcattatccaatatcataattatcaatatggtgatgatgatgatgatgaggattgtgtgtgaatggagcgatgaagattgcatgaaggttgatg

SEQ ID NO: 158274 - DNA, 153 bp, Arabidopsis thaliana landsberg
gccggatccaactctcttaacctttgaaatggctgattcgagtgctgctgaaacatcaaccggtgcttcttctccccccgcggctactgatgagaactcaaccagattcaaccgatccggatgccaaccatcgaggagatccgagctcaatag

SEQ ID NO: 158275 - DNA, 304 bp, Arabidopsis thaliana landsberg
gaaaaataaatctactctctatagtctaataaactagtaattaaaaactaaacaaaataggtttgtggtatatatatttcccttgaaaagttatttttaaatgatcaaaagaaaaacaaattattgcatgaggtgagctagacagagaccagaaactgtatctttcaccaaaaacaaatttagctacgaatccaagacggctccaaaccaaaaagcttatctccacggttttgagcacctgatgtccgaggcggcggtgcatgtacagtaatcggaagaacccattcgcttttttccctttccg

SEQ ID NO: 158276 - DNA, 90 bp, Arabidopsis thaliana landsberg
aaatacgtgttgtgttgtgtataatcttgttttatatagatgcatgccagttcttgtatttcttgcaatttgtgcagtcaaattttctga

SEQ ID NO: 158277 - DNA, 200 bp, Arabidopsis thaliana landsberg
agacaagaagacacagaacaagtagccactctatcatctcaccacccctctttctctctacttgctctctatctctctctgcgtctctccactttctcttcttcttcttcttcttgctctagagatctctctatctccatgctattctctatgtgtttctagaaagacatcagtgacattttgtcttgacgcatctatgg

SEQ ID NO: 158278 - DNA, 392 bp, Arabidopsis thaliana landsberg
  unsure (1)..(392): unsure at all n locations
tcattacctaaaagacaaaaaatattaattngnatcaccactgtgtttatatatttaaaattcataaaacattattaataattaaatttataaaaactttaatatatcaaaaaaaattaacatcattatataatatatagagtttaaaaaatctcaaaaaaaaattatcatattttgtgattcgaaattttaagaatgaacatatattaactaattggcaaaaaatgtgtgggttcaacgtcccacaacgaataaaatattttgacaatgattcataaacatattataaataagatcaacattgataaaataaataatttttttttgtggacgggtttggcgggacgggtttggcaggacgttacttagtaacaattgtaaactataaaata

SEQ ID NO: 158279 - DNA, 183 bp, Arabidopsis thaliana landsberg
ctgcaggtcgactctatccccagaagatgatgaaaatgtgaaattcaaatgttttgggaggaagaaactaacggtacactcttaatttagttcttgtattgtactatggatgtatcggaaacttcatagtatttgaagcaatttcccacttcactatgtggtctgtaaaaatttgtttaaaac

SEQ ID NO: 158280 - DNA, 109 bp, Arabidopsis thaliana landsberg
tcaagttccttgagccgattccagacgactttctttcggcttttcacgcgttatcggctcgaaagtgcgattggctgaagcatttctctcgggagcgagttgaacgtgc

SEQ ID NO: 158281 - DNA, 224 bp, Arabidopsis thaliana landsberg
tcgcctttactcttttctttcttagtactaaaaattaaacgacacttctcccctcaaatccctttttctctctctaaacacatttacacacagaacacaacacactctctctctctctctacgattctcgctcactgttcatcgaatcagtcattggatcgattcgaacttggtgtgtgttttctttccatacctctgattagagatttcagcagatctgaacg

SEQ ID NO: 158282 - DNA, 435 bp, Arabidopsis thaliana landsberg
tgttttccctacttatgatatactacaacattctgaaattgttttacatgatgtaatcaaaagacgtgatcgttgctttcaaatatttacaaaataaaatctcacatgagcctagttttttcatctgagcatatctccggaatgtatttgtagtccgctaagcgcaggcgatattgtgaatccgtttccgtccatacggtacgaaggatgcgcgagcgggactggtcggtccggaataggaggaacctcgatgtctccttcaagcattttcaatgcatctaatattgttggccttaaagcaaccaatacatgggcacacaatatcccaacttgcaagaatctctccattatccctttcggattcgagagccctgagccttcctctctcaacaaagactgctcaagagcttcctctgttttccctgcttttaccaa

SEQ ID NO: 158283 - DNA, 177 bp, Arabidopsis thaliana landsberg; identical to SEQ ID NO: 69128

SEQ ID NO: 158284 - DNA, 110 bp, Arabidopsis thaliana landsberg
agaagaaagatgacgttgaagaaggtggacgcgaatccatcaaccttggaatcgattttacaagaactgaaatcagacgaaacaagccgtagcaagatcaatttcatact

SEQ ID NO: 158285 - DNA, 139 bp, Arabidopsis thaliana landsberg
cttcttcctcaacagtttctccttttccttttcctttctcttacgcttagcctcctcagcttgagcctcaagctcttcctgcctgcggcgctcctcttcctccttcctcaatttttcttcttcttccttcttttttcgc

SEQ ID NO: 158286 - DNA, 186 bp, Arabidopsis thaliana landsberg
gaatatgtttccagtgatttcagaccacaatggcctcattcgatgggcaagggtttatgatggttgataattcttgggtccagaccaaagccattgatgttgaatcaacaaccgatatctctccttacctttccaagatccttgaagattccgtctggaatggaaaccggtccattgctttgatgt

SEQ ID NO: 158287 - DNA, 198 bp, Arabidopsis thaliana landsberg
attgtctaaagattaattgaaaaacaatgtctcaattgaaaaatagatcttcacaatgcttatggacaagtatttgcattgtgttaatagtaatgtcgatggctcgtgaagctgtctctacaaattatgcagaagctctcaaaaacagtcttttgtatttcgaagctcaacgttctggaaaattgcctccgaaccaaa

SEQ ID NO: 158288 - DNA, 490 bp, Arabidopsis thaliana landsberg
cattgataagggcaactctaggattcatcaggtggctaacaggtgaaaggtagatacctttgacgatagattcaaaaaccgggtcaatccactcccgtgacagagacccccataactctaccacttcctaatctcaactctcgttgatgaaacatagcagagcagggtttaagcaacaatctaccaaagccaataaacagactagctaatctcttgatcaagtctacaaatctctggaattcgtaagatcagacatccatttgaacgtcttttagacgctggacgtctatggtcgaatcttcacattagcctgcaaaaaccgcataggggccaacgaatccagaagggatctaacctaatcttaaccacccaactaacctagagattaccctaatctaatccatcctcaagaaacctaatcactactcaagcaacataactaagaacacaaacccagaaattactgaaatcatatcaaaatgtagatcta

SEQ ID NO: 158289 - DNA, 330 bp, Arabidopsis thaliana landsberg
gcggtggcacttagatttggttaatgaacttgttgtctagggttaatttattgagcatgtcaatcacctgtaaactgaggaaacaaaactactcaattaccccatcctcgggaattctttatctgattgaattctttgtttactctactgttgtttactgcatcttgttatctttcgtttaatttcagcagttctttcttgttactcgacctcatactcgaccactcagttgtctggcaacagcttttgcagtcgagtatctgtgttttatttttctgtctgttactcgacctgtcactcgacctcacccagtgctctgcaaagagctgt

SEQ ID NO: 158290 - DNA, 576 bp, Arabidopsis thaliana landsberg
ccatcaatgattctgttgtcatcaagcttctctcctttaaacaagatctcttgatcatcaacctcaggaaaacctctaccctctttagagatccgtttcttcaaatacccaacatttctacgacgatccacatgaaactgaaagaccttgccgcaagtagtaatcacagtaacaaggaaaggatcatagagcttaagcaccaaatgcaaaacactcccaccagtcacaccatagtccttcacacgtgacgcattcctcgcaagctctcgaccactgaaaacaagtttctgtcttctaaccctaaaaccattacaagtctggatcctaagtttaacctcagcaatagaatcagactccaagatgaacataggcatcgtagaaccagaaacactaaggaacaccaaaaccgatttaacagagtaatgcgtcgtcgtcgattgtccgaaaccaccaacagcaaacgccgatcctctatgaatcgggcttaaagcaacaacagcaacagacatttcctattgaaacaaaaaaaacctagctctaatccaaatctaaacaataatcttctcgtacgggtat

SEQ ID NO: 158291 - DNA, 539 bp, Arabidopsis thaliana landsberg
atttataaacttttggctattattgattcttctgatgtaagttaattttaagtttcgagttatatagcaatcgttaagttggcaaaagattttaaccctcgagactttttggacaacaaaacgcaaatatgatagagcggaagctcattaaaaaatcgttttagagcaatgtcaccaaacaaagaaaatccatttcccaataaaaaaacaacgaatataaaattcgattatatatttaccatcaaccacttaacagaccacaaaatgaaggctgtttacggattcaacacagattaacgggtatgtatgtatgatctaggcaacggtggtggtgggaccaggataagcaggaagagtcatgatccgcttgtctacaactggacctcccacagtgaaatggtacagactctgaaagctagagtcattaatccccagaacctcgtgcactggatcatcgaaatagcacccaatcccggttgctgagatccccaatgcgtgtgcttccaggtacaaaacttgtccaacaacacccgtctccc

SEQ ID NO: 158292 - DNA, 300 bp, Arabidopsis thaliana landsberg
cctgaccaaagatggcagtgggtattgcaagtgtagcaacggcatttggagaatcgactataccggatattcttccttcgcatggacagcatgagagtaagagatatacctgttctcaacatagtttcttgatcagttttatctcttgttttaatgctggcgatcaactaggttctgtgagacacatcttgttgcggagatcaccacctgttcttttgagtaaccgaatttgaaaagatagtctatggcgttgagaactgcccgtttgtaagcaactgttgcatctaggtaatgctgttt

SEQ ID NO: 158293 - DNA, 141 bp, Arabidopsis thaliana landsberg
tgtttatagtttacctctcgttcgttgcacattgggatctgaataaggaccattgggaaactggatgggtcttctaaatcgatagattcgtctgtgagcttaggttcgatctttttaaatttgatccaaaagcaaccgaga

SEQ ID NO: 158294 - DNA, 91 bp, Arabidopsis thaliana landsberg
ctaacctgtcctcttaggaacgtcagtgtgagtaagattgacaatggtgactcctggttgaggcttctcgaaaacgatcttcacctgaaat

SEQ ID NO: 158295 - DNA, 434 bp, Arabidopsis thaliana landsberg
aaactaagttcggtcggtgttgtaggcgatatattgggaaaggaacataaggtaaccaaagtcatttcttttcttttccctgaaggtaaagtcatgtctttgttgtgtgtgtttgtttattgtttgtagttactattgagatgtgttttgctgacttattatgtggattaggttcgtacaaacacccgagttgtccaaggtcgaggaaattagttattccgctgcattgttcgttgaacatgcttgaaggagataccgggtaggagtgtttatatgatcattcaattgcaagagtctcgtttcacgttgctcattttttatcttggggttctggcaggtgttccatctggccatcgagtctgtttctgtcagaatttgttttgtcatttccagagttattcgccaataaagcctgttttgaggttagtttattg

SEQ ID NO: 158296 - DNA, 239 bp, Arabidopsis thaliana landsberg; identical to SEQ ID NO: 78828

SEQ ID NO: 158297 - DNA, 345 bp, Arabidopsis thaliana landsberg
taatataataaataaaaaaaaatttagaaaaaatagaattattaagaaaagaaaggaagaataaaattaaagaaaaaatagaaataaaagatgtaaagaaaataagaaaaagagataataaataataaagtaaaaaaaaaaattataaaaaaagagaaaaaaatataataaaaaaaaataagaatatataaaaaaatgaaaataaaatagaaaagaaaaaaaaagagaaaaggtagtaagaaataagataatataaaaaagaaagaaaaaaaaaataaaataaaaaaaaaaaaaaagaaaaaaaaaataaaaatattaaaaaaaaaaagaaaatataaaaaataa

SEQ ID NO: 158298 - DNA, 1542 bp, Arabidopsis thaliana landsberg
aacagaaacgttttgtttcgaatcacacacaaactcacaacgttgccagtaaagctcaccgtcgtcggagctcatggatcgaccaccgtcgtttacacactatcaaaatcctaatccgaaattcttccaccacgcttctctttttcaaaatcgtaccaattttactccatcgctccggcggtgattggcgagctctccggtatactcccttcttctgttgtcggaatttccttagattctctctcgaaaaatctagctttagatcactcttccgatgaggacaagcggttagtcattactaatttcaattgatttcggttaggtttaaatggtattgaaataaattagaattgatttgcggttcggtttacatagagaagaagtaacaaacaaaatattcacgcgacgaggattttggagacaaatgcgtcgattgaaaaaggcgtgttttggaaaggggtacacccacagaattgctctcacgcgctcaacgctcactttgtgcgagtgggtgtgaaatagagccttctgattggcttagaaactctaaaaaaagtgaaatagtatacatgttgctagctcctatatgttattatctagtttttgaaagttgttttttttttttagttacgattgattctagatgatatctgatggtagtgataattttagataactataaagttcacatttagtggtggttggtgatttttgatgacttgaagctctctgcagaaacgcacttggacatggaaatgttacatctgaaccccatatagtgcttctgctccaatgtcatcttcaactcttctcctaccttcaagtatgtagtggattaaaaacatcggttcaagtatgttcagcattttagacccccaaagtcgtcaaaaatgtctcacccttccagttctatccatgaggttattactatatatgattgcaagttttatgtttttaaaccatgattgccattatcccattcatgtttctgttttcttgtacagatgagcttctcgtatgagttgttgtttgtgaaacgttattgtcagccatttggcttagggaacatatgtaagctccacaccaaaattatttcactgctctcattgatcttatcttgatagttggattttcaggtagaaagaagagttggtgttttgtttatgagtttgaacacttaaaactttttaaaggctacacattgacgaggatgaagaaaggcacaaaatttggacacaaaggaggtaaggcctgaagcttatttaagccttttttggagaaatttaactgagtataagattttgcgagccatcattggttggcctcactttcatctaaaacgttgcttacttaagagtttctattcatttgctgagttggttatcatctggttaggacgtttaaacttggatttatacttgagccgcagtttcgtactagcattctataaatgattctatttcagggtttctctgcccattcgtcccataccttccagttctttgcattttgatcaacacctacttgatcatcaacattggg

SEQ ID NO: 158299 - DNA, 633 bp, Arabidopsis thaliana landsberg
  unsure (1)..(633): unsure at all n locations
ataatgacttatattacgagtcatgttgataattctttgattttaagggatccctagaaaaatgtttgcgctgtagattgatgtaatgttcacaattcttacgatatgatatgtttttagtgtaaatggtttttcaatgaaaatgattcatgattggttatattgttgaaggtggtggttgatttcacggcttcttggtgtggaccatgtcgtttcatcgctccattctttgctgatttggctaagaaacttcctaacgtgcttttcctcaaggttgatactgatgaattgaaggtacattcaccaacatttttcccttcttcttgagagatattgttttcttcgatcacaatctcttttatggttttgttggaacagtcnnnnnnnnnnnnnnnnnnnnnnnnnnnnnnnnnnnnnnnnatgtttttgaaggaagggaagattttggacaaagttgttggggccaagaaagatgagcttcagtctaccattgccaaacacttggcttaagctttccactcttatatatctcttaagatgttggattaattgttctattactcttgacatgttataacttgttcccctttgttatcgttccggcctataatctcatctgactatttgaagctg

SEQ ID NO: 158300 - DNA, 768 bp, Arabidopsis thaliana landsberg
atgaaggttgccgctgctttcctcctcgccgttttgggcggaaacgctaatccttcagccgataatatcaaagatatcatcggagctggtaaatttatgtgcttttgaattcgttttgaatatgttttgatttgattagattgtgttactttgaacaacgaagtagtagcaatgatgatttgagaagattctgcatttgctttgttttagttgtaagagttttagtttgattgttgaagagtataagaacagaagagagttttgttcactgtatatgattcattaaaggactttgtttgttatgttttgttatgtagttggtgctgatgttgatggagagagcattgagcttctattgaaagaagtgagtggtaaggacattgctgagctgattgcttctggtagggagaaattagcgtctgtgccatctggtggtggtgtggctgtttcagctgctccatcaagcggtggtggtgctgctgctgctgctgcccctgcggagaagaaagaagccaagaaggaagagaaagaagagtctgatgatgtaagcgtttctctctttatcattttgtttccttattacttagtctttgttatggtcttgatattggtctttatctgactctttgttatatccttcacctttgatgcaggacatgggattcagtctcttcgagtaaggtttttgtccccacggaaaggagtcgagatttgattttttgttctcttagtggttctggtttttgcttcttggattacgaattttac

SEQ ID NO: 158301 - DNA, 1430 bp, Arabidopsis thaliana landsberg; identical to SEQ ID NO: 31341

SEQ ID NO: 158302 - DNA, 1955 bp, Arabidopsis thaliana landsberg
atggcacagacaaaagaaaaaaggaatccatttccgagtgagactggtgaggaaagatagaaaagatgcatctcctactgtgtaacatcaactttttatcccaaagatacacaatcttccctaatctaatgtttcactaaaccagctattaggaaagtagcaagaaacaatgttatacaaaagcacatatcaaagaatcttgctttgattttggagctacaagaaaaacattagatactagattcatgtagatttccctcgcaatttgcaaccaatggaagaagatatctcataaagcaaacaaaaagaatcattttttattcgttcatccgtgggaccaattcctttacctctgatttaaaacaaaggcatgtaaagataaagagagagagagaaactgtttactgaaaaaaaagcaggaggtggatactaatgctatgagagtgataaaagtagcctttaacaagattgattgggagaggctttgtccttttggctactctatggacaacttgagttactacgaatggggtggattcctgttccccaaacataagtagagttcactaaatggaaatatttcatccgtacactctcaaaaccgcacaaaatcaacaaaacttttaagattccaccactgttaaaaaatagcaaaaagggaaagaaaagaaaagttaaatcaaaccttgctttatatatgagaaactcctttacaggttagacacatatatgatatatcactgggtcagaactatctaccgaaactcggttttcgtcaagaccataagtagaaaacatatattataagccctaacaggctaatatcaaggaacagtgagatatcagtaaaatgagccaggagatattaatatttgaatgctgctatatcaaagatagggaaagttcatggctgctccagttaaaaagctcatgggtccctagaagcaattctgggagatatgatttgctaaggccacagccacatggcactactattgcagcaactggtatgatggacccattttatataacaaagcatattacgctgcaaatgattttataaaattagacactaaaggtaaaggtccataatgtgagcttgatctttatagcttcttattcatccaaccataagtttttctaaatgaaatatataaaaaaaaattcctcattaaatatctgaaaaaaaattgaaactttacctttcctctatataaacaattagcctccaaacctttactctatataaacaacctccaacggaaacacagaaagccaccaatctatcttaaaactaagttatcatgtgcactaccatttccatttccaccataaaaccaactgagtatctttcaagaaattcttggaagttcttactcaagaaaattactatttcatacccatgatcaatcaccaactccagcaccatccccatatgtaggcgataacaactttgatgcaaatgttgttatggtcctatcagtcctcttatgtgcacttgtttgctcacttggactcaattctataataagatgtgccttgaggtgctccaatttagtaccatctgaagctggtggtgacaactatcctgttcgcttgaccaacacaggagtcaaacgaaaagccttgaagagtttccagacagtaagttactctactgaactaaatctgcctggcttagataccgagtgtgctatctgtctctcggaatttgtagccgaggaacgtgtgaagctgttgccgacatgccaccatggattccatgtccgttgtatagacaagtggcttagttcacactcgtcctgtcccacctgcaggcactgcctcatccagacatgcgagaagattgccgactgcagccaaacaagctcgttaaactctactcaaccaccacaagacagcatcattctccaaatagcaccactagaaccggaaagatggatacgctggtttag

SEQ ID NO: 158303 - DNA, 527 bp, Arabidopsis thaliana landsberg
  unsure (1)..(527): unsure at all n locations
agaggacaaaaacagaacaggttcttgagaatcgtcaccatgcctcttaaagttctatgcaaagctcgtgatctctacatgagaagcatcacaggttgtgcagctcgaactcactactcttcagccgtcgacgcnnnnnnnnnnnnnnnnnnnnnnnnnnnnngtacttcctccgccttctcttcctctgcctcttctcggagaagatcttcggatttcactttcgacgatgattatagcgagctgcttagagctgcttccgttaggagtttaggtcataagaatgagatggacatgatcatacaacaacagcaacagcagcagcagcaacggcaggagaatccgttgcgatgggagcggttacggttaaaggcggtttgcctaagagctcgagtgttgggatgacaatggctaggattgatgaagaagatgaagaagaaggatctgtaaagaatcaaaagaagggatctgatttcttatatcctcgtagcagatcacatgctgttactattagaggatccaagttt

SEQ ID NO: 158304 - DNA, 1401 bp, Arabidopsis thaliana landsberg
  unsure (1)..(1401): unsure at all n locations
atgtccggcgaggaagaagccaccgtgagggagccactagatctgattaggctgagtctcgacgagagaatctatgtcaagctccggtcagaccgcgaacttcgcggcaagcttcacgtacgttttcttgtgccatgcttagtgccttgaacttgtcactacttaaaatactcgttccacacatagttcgtttgaattttgtaactttattttgccgatttcactgttttggtgtcgaatttggtccttttttgggggaaagtctagggttttgattttcaagtttcagtttctaaaaacgttttctcgagttatggcgatgagcttgcaattgggaatttatggttcgtgtaaatttaattttgacaaagttcttaaattttggaagatttctacactcttgagttactcacttaggtttgatgttgatgttgttgttgttaattctttgggcaggcgtttgatcagcatttgaatatgattctgggtgatgttgaagaaactatcactacagtagaaatcgatgacgagacatatgaagagattgttcgggtacgtgctttttcttactcaatagttaactttataggtatttgagggggatcttgatgagtttctatctcaagttaaggatattgttagagaacaagtgtacaagtgtcttttagctttcactatatacagaagtttcagctcaatgtagaacatttacttagacaagagattatatcctacacgaatcttattgttctggaagatataagctattggatcgaaattaggaaggcatttccatgtaactgactgtttctagtagagaagtctctttctttaagcttcttaggcacacacatattagttgttgggactcctctaggcgggctacaattctgatctgattaggataagtggcttttgtctctcatgtatgtgattagttttgtttactatctctgattgcagactacaaagcggacgattgagtttctattcgtgagaggagatggagtgatattggtgtctccaccgctgaggacagcagcctgagttcaaactcaaatcttttgtgtcctcttttcgtaaggggaatttgtgactattcttgtatttagtcacttcttgtcttaactaaaacaagcttgaagaagctactttgcttaaatttccaatgcttttcagatactttgatcgtgtgatatactaattacaacccaattatctgagttcacaaataaagataagagtctgaaaaagacagacaaacaaacaaaaaaatgcaccaggaacaagagaattatgatgcatttnnacggtacaaaataaacggagnnaagaaatnnnattaaatttaaacaaagtnncgatcgttcttcattatctttttcgtctaggggtcgggcc

SEQ ID NO: 158305 - DNA, 349 bp, Arabidopsis thaliana landsberg
atgacgaagacgatgatgatcttcgcggcgacgatgacggcgatggctttgctttcagttcctgcgattgaagcacaaactgagtgcgtgagcaagctagtcccttgcttcaacgacctgaacacgacaacaacgccggtgaaagaatgttgcgactcgattaaagaagcggtggagaaggaacttacatgtctctgtacaatctacaccagtccaggtttgctcgctcagttcaacgtcaccactgagaaagctctcggtcttagccgtcgttgcaacgtcaccactgatctctccgcttgtaccggtaaccaatttcattttctccgatctccgatttttttatttt

SEQ ID NO: 158306 - DNA, 2774 bp, Arabidopsis thaliana landsberg
atggacgactacgtttccagtgccttcaacctaggtaccacacacaaccatcattgtatataccattttctgttttcgttttgttttagtgtctcttgaactcttctttagacttctactacacaagggactgtgtaatttaagtttggggaaggattcaagaagtatttaacatgtttgctagtgagtcttatttgcatcatttgagtcttaactttatctaagccatagaaaaaactaaaaaaattgaatttttttctgaaaatgtattccaccaaaacacagtgttcatttagtttgcatcacatttaggattgagtttaggatgtttcatataggattatcgcatatgcattggggattatgatgagatagccttgtaagcattttggttcatcgttgctagttgtctgatacgtagtcaataaaattgaagtaaaattgcattatgtcttgaatgctctactcgatcatactgtcattatctgataccattccctatcaattttgaacctgaatttgacttgcaattatcatgtcttagcatcgaatttgaactcatggataccatatacatacttgggttttcttactcattttaaccactcttgtgaatccaagtacctgactctccttattagagcagttaacccgaacccaaacctaaactttctttcaaaccctatatcacttgtgagtgtttgtgaggtcttatttcgattgagcttggtaggcagtgttaggttcaaaacaacagagatagtgtctcatgtagttatagttcgcgttttcggactggataggactaggtgggcgcttatatcatgggttgggatgtgtttaaaagaaaagggtgaattcattgttgataaggaaagggaaagaattctaggggaagtaagctaaaagaagttggaaaaaaatccagtaaagattttgggaatgttaaagaaaagaatgaggttcttgttagctaaagaaaatgggttaaaagcctttggttttaaagattaaaaacaggaactttagttgttaaagaaatccaaatccgctagatgtatcagagtgttgagaaagcttctcctagagttaagagaaaagaaaagaatgatatgaaaaagagtttgaaagattcatgagtgcaaagggtagagttaagttgggactggagttgggattaccattagaacttcattgttatactctgggtagatgggatcttatctctgtatgcataacttgggacttacctttagcattctactaaagctcaatcattcttgagggatcccctgttacttaagcctattctgtaagggaccatctttgtctcttgaccttcaccttagccaaatgagttcatataatgatgcattgcttgattcacgttccagaactaatgaatgttaaagggattggtagatttgaaaacttgtgtaggtcgagcatatgagtcggattgattgattgatgaggcatggctaacgtttttaagtagaattcgatcttgcagcttagaactttcaacttggacaatgatttcatctggtctatctggtgttttggctctgagtccccgctttcaaacctcacttccagcttgttcttgaatgtttgcttgagggcaagcaaagactaagtttgggggaattgataagtgtgtattttgcatgtttgagcatccatttgtcatcactttagcatcatatcatcactgttttataccatttcacatcatttgtcatcactttgcatgtttaggatagttttgcatgcatgttgcatatttgcgttgatttcaggtgatttggagctgttgacgagctatttggaagaagcggacctgatcacgacaaaccactcgaccaagagttcgagtaggagcttcaggatctcaagagaccactcgacccccaggtcgagcagaggacatcaccacttcacttcaccactcgaccacgaggtcgagtgccctcatctccatcaccagaccatcactcgatcacttcactcgaccatgaggtcgagtgtcttcacctccatcatcagaccaccactcgacctcttcactcaacctggaagtcgagtatcttctaacaccactcgatcacatcactcgacccccaggtcaagtgccttcaccttcactgccagaccactactcgacctcgtcactcaacctagaggtcgagtatcgccatcacaacacttgacttcatactcgatgacaagctttagagccttcttcattccgcactcaaccagacacacgagcacaaggaagaaaagaagactccaactaattccagagtttcgtggctctgtacaaaggtattggttgcagggagcgttttggctttaacttgttgattcgtaatgcctgttaggttagctctcgtcaatggtgattgagtctgggactaggttaacttgagtgcctctgttgcggtggcacttagatttggtaaccgaacttgttatctagggataatttatttagcatgtcaatcacctgtaaactgaggaaacaaaactactcaattaccccatcctcgggaattctttatctaattgatttctttgtttacttagctgttgtttactgcatttggtcatctgttgcttagtttttgcatttctctcttgttactcgatctgatactcgaccacctagttgtctggcaatagactgtgcagtcgagtatctgtgtttcattttctgtcggttactcgacctgtcactcgacctcacccagtgctctgcaaagagctgt

SEQ ID NO: 158307 - DNA, 1204 bp, Arabidopsis thaliana landsberg
  unsure (1)..(1204): unsure at all n locations
atgaccggagatctgaaacttgatgaaccttacgtaggtttgaaattcgaatcagaagaagaagctaaagatttctatgtagaatactccaaaagattagggtttgttgtgcgtatgatgcagagacgaagatcaggtattgatggaagaacactagcgagaagattaggttgtaacaagcnnnnnnnnnnnnnnnnnnnnnnnnnnnnnnntagttctagttctagttcacgagaaggttgcaaagctacgattttggtgaaaatggagaaatctgggaaatgggttgttactagattcatcaaagaacacaatcactctcttcaattcattgggtcttcttcttttaattcctttgtacgttttcaaagtttgtatctttgtgtctttttgatttgctttgctagttacatgacttggttggttgaagaagacagatttgtgttactgttttttgcatctttggttcttgtttgctactacaaggcttgatgtgttgaagaaagagtgtgcatctttgggtcttttttatttgctattacatgacttggttggttgatgaaaagagatttgtgttactgttttttgcatctttgagtcgtcaaattttgattctttgggtcttgttttgctattacaagacttcggtggttgaaaaagagagatttgtgttactgtgtttctgcagctttgtgtcttgttttgctattgcaagatttggttacttgatttgccattacaaacacttgaaattcctttgtacgtcttcatatattgcatctttgggtcatcttgatttgctattacaaagacttggttgcttgaagaaagtgaggtttatgttacatttttttttttgcatctttgggtcttaatttgctattacaagacttggttacttgattttcctttgtacgtcttccaagtttgcatctttttggtctttttgctttgatattacaagaattggatgattgatgcagagagatttgtgttactatttttgtaggctgataaggaaaggaagattaaagagcttacggaggagatcgagtgtcaggaccggttatgcgatgtgtatccggatcgatccctgacttttatcgataatgttgaacattatacggaagaattgtcacttaaagttcgagatattgtggagaatgttaagaaacttgaatgtcaaatacaaacaagagcttga

SEQ ID NO: 158308 - DNA, 1009 bp, Arabidopsis thaliana landsberg
gagttattagaacttgcaaaaaatggcttccaaggctttgattctgttaggtctcttctcagttcttctcgtcgtctccgaagtgtctgccgcaaggcaatcgggtacgtaaaatattatacatttcagcctgcttacaaaaaacgaagatatgttcgtgaggctagctattcaaacttgaactaacgtaccatttgataaatttatacaactatttcgccagttccattttatggacttacaatatagtaaagtcagaacacacttcacttgagtgatgtggaatcctaggaagttttgtgtaaattatgtttcgaacgtatatttaaaaactataatttcgagtttatatatgtactttaaaaaaaaaattgaggtggaaaactaaattgaagtcaggaagagggcttcacattttcacgtgcttaaaaatgtctttgaaataacgtgtttttttgggcaggcatggtgaagccagagagtgaggaaactgtgcaacctgaaggttatggcggtggcctcggaggacatggtggtcacggagggggagaaggccacggacatggaggacacaacggaggagggggccacggacttgacggatacggatgaggtggaggacactatggaggaggtggaggacactacggaggaggtggaggacactacggaggaggtggaggacactacggaggaggtggtggaggacacggaggtggaggacactacggaggtggtggaggaggatacggaggtgtagtagtacaccacgtaggaggaggccacgggctaaacgaacctgttcagactaagccgggtgtttaaaactatataatatcttcactaccatgcatgattgcatatatatatatacgcttatgtattatctatatgcctataaataaaccatggtgagtttgtaacgcagtgccttcagaaatgttcggaataaatttccataatattaatttccgctgctcgcacaataaaatcgtttataggtcatgta

SEQ ID NO: 158309 - DNA, 671 bp, Arabidopsis thaliana landsberg
agaaagaaaaaaaatctcaaatcaaagaccaagccagtcaccggaaaatgctgacgtgtatagctcgttcgaagcgagcaggcgatgaatctccggtcaaccagacgatccagattctaaaaacgccaaatctctaacatctcaggtaaattgaatttaactcactctcatcgtcagtctctttatttcgtaagtctctcttctgattgagggtattttcgtcaattcaatatcagctcaaagacatggctctgaaagcatcaggagcttaccggcattgcacgctgtgcacggcggcgcaaggtcaggcacaaggacaaggcccgatcaagagcaatccgtcgtcgtcgtcggtaaagtcggatttcgaatcggatcaacggtttaaaatgctttacggaagatcaaccagttcgattacagctacgcggccggcggcggcgacgcaacaacagcctagggtttggggaaaggagatgtaagcgagacttaagggaatatcgagcggcgaagcgactccgaaatcggcgagtgggagaaaccgggtcgacccgattgtgttcgtggaggagaaagaacctaaagaatgggttgctcaggttgagcccggagttctcataaccttcgtttctcttcccggcggtggtaatgatctcaagcggatacgtttc

SEQ ID NO: 158310 - DNA, 3314 bp, Arabidopsis thaliana landsberg
cttctctacttccaatccattctcggatccaccaaacccggttcttcttctctttcctcggagctccgtcgtctttcttctcccgccgttcagatctctctccgtacccaaaccaggaagaacttccgtgagttctctgttttttttcccgaaaatttctcgatttcaagcctttgaatcattagggcagctttggtagattgaattgattcacattttcattagaacaaattgggtagatggaaagtttaaagctttaagagtttttgaattggtagagatacaagctactggaagttcatatgggactcattttcgagtttcaacttttggagaatcacatggaggaggagttggttgtatcattgatggttgtcctcctcgtattccacttactgaatctgatttgcaattcgatctcgatagaaggtattttgatgaagaagaaagctcttcttactatataatatgatcccttgatgggtttttttacatgtgggtttgctttattaggagacctggtcagagcaggatcacaactcctagaaaggagactgatacttgtcggatatcttctggagtctccgaaggtctagctttgattccttttttcatagtttggattttgatatagtttctcaaccgttgtttaattgttgatatccataaatttgcaggaatgacgacaggaacacctatccatgtgtttgtgcctaacacagatcagagaggacttgtaagtttttttgacttctctatgtatataactgtactcgatattgttaaatagacttttgctatttgcattagaaagacaacagttttgaagtatagaaagcctgtagattctaacctttgaggaactcactggattttcaggattacagtgaaatgtcggttgcctatagaccatcgcatgctgatgcaacttatgacatgaagtatggtgtcagatcagtgcaggtatctttttcttttaaattactcacatgctacttttcttggtaaggttttatgtgttcaaaggcattgttcagcttaacataccttaagcgttattcttttcaagggtggaggaagatcttcagctagagagaccattggaagagttgctcctggagctttggccaagaaaattttgaagcaatttgcaggaactgaggtgtgtttactttctgattttgcaaatgacactgctctcaaagaatcaatttacattgaactttttatatcccttctcatgtttggttcttctttcatctctctattttttctatcttagtatatccttgcaaataagatgccccttattaactcagtgacccaattctaatgattcacgcaactctttaaagtttgcttctggacttgcttatgtttgtctctgttgtttttttgtgtctccagattcttgcctatgtctcgcaagttcaccatgttgtacttccagaagaattggtagaccacgagaatttaacactcgaacaggtgcaaatattttttcaaagtataatttacatgttgttttttgagtagttttcggactgtaacggagggaaaacccattttggtgacctggttcttgctgtcaattttctgcaactttcatccaccgttataactattttcctaatagtatttcttcttattaaggttcttctggtgatattcttacctcattttgtttattttacagatagaaaataacattgtcagatgccctaatcccgagtatgcggaaaagatgatagctgcgattgatgctgtcaggacaaaagggaactctgttggtggtgttgtgacctgcattgttcggaatgctccacgtgtatgaactcactataccatgagcttaatctgtgcgtcctcatgtagtttgattaatgaacttcagtgaatgcttattgaaactactattcgcaggggcttggtacaccggttttcgataaacttgaagcagaactggcaaaagcttgtatgtcgttacctgcaacaaagggatttgagtttggaagcggctttgcaggtatagaaagttatatttttctcttctttgtccaatctaaaaacaaccccctttggagctgtataaatcatacgcaaatgaacctgcaggtacctttttgactggtcttgaacacaatgatgagttctataccgatgaaaatggaagaatacgtaccagaacaaaccgatctggtggaattcaggttggttaagtcttgtatttaatatgtcaataaactacatttctcctgagagaattcctaatattggtcaatttgtatagggagggatctcaaatggtgaaataataaacatgagagtagccttcagccaacatcaacaattggagtaagtttatgataaaactcatgcagaatccttataaacataacaaatgtcaacttcagatcattgatgttttctttccaacgtgcagaggaagcagaatacggtaaccagagacaaggtagaaaccgaaatgattgcgcgtggtcgtcatgatccttgtgttgttcctcgaggtaaatagacacaatccaatccaaaccattgaattaattcagtctatcactctagattttgattttgggattttgttgcagctgtgccaatggtggaagcaatggtggctttagttcttgtggatcaattgatggcgcaatacgcacaatgccatttgtttccaataaatccagagttgcaggaacctctccagatagagcagccccaaaatgctactgctttgtaagcaaaactcgagaagataagagtcagagacagtaaggcttcgcttttgttgtgtgattattattatgcataacagtaatgttaattttgtacccaccagagtaacaaaaaacatgatttttttgtaagaggatttgcttctatatcattattcagctaaatgtgattttaccacggaacattaactattttctataacatacatgatacatgtaaatatacaaacatacgtaactattacactttgctatgttctctgtttttttcgtactctcctgggacgaaaaccgacgtagttttttttcagatgtttttacttggttttcttgttatcgtctttgctctgttcaagaaggaccggagcagccggaatgctaaaccaccactctttaagccgccgcatcaaccgttccgtgcttgctcttcgtggtggtgagtatcttgtgaacagttcaagaaacaccaccaaaatcagattgttccaaggcaccaatgccatcatcgttgcagcgatcacaatcgcaaccgcaaacttctcactcgcctgtttttttcgataa

SEQ ID NO: 158311 - DNA, 1849 bp, Arabidopsis thaliana landsberg
atggtgattgtgacggatacagttcgtggtgagatccgatcttatcaaacctttggtttaccgagaagagtcggtcgccaacctactctgttttgattttaaaaaggaaggaaccggtgttatatttctcttgatttgtatctatgatgcttgtagagtacgtaaagaagccttcgtatacagaaacaaccgtcttatagtgttgagaaacctctctcgacgttcaaaatattgagttgtatacacagcagaaaaatttgtgtagttctccaaatatgaatcaagcagtaaaactatgtgacttcaattaattagatgttcttcgatcattcgtgggagataggccatggcccattttaaaatcaggcccgtttaaagcgtaattagaatgaaacaaaaagacaaatataattcaaaagataaggtgacgtggcgaaaatcggaaattttgcgatatttctcactctctcgtcttcttcgtctgagctatcaaactccagtcaatggcgatgatgacgacgacgacgacaacattcttccatccactacttcctgctaacacttacaaatccggagctgcagcttcttcctttgtctcagttcctcgttcgtcgtctctccaatttcgctcacttgtgtcagattctacgtcgatttgtggtccaagtaagttcaccggaaaaaacagaagagtatcggttaccgtttccgccgccgcaacaactgaacctctcaccgtcctcgttaccggtgccggtggaagaacaggttctctctctttatctctacaatgtggtattgtgaaattccataagaacactgttcaatattgatggtgactgtgacaggacaaattgtgtataagaaattgaaggagaggtcggagcagttcgtggcaaggggtttagtgaggacaaaggagagtaaggagaagatcaatggagaggatgaagtattcattggagatattagagatactgcatcaattgctcctgctgttgaagggattgatgctttggtcattcttactagcgctgttccgcagatgaagcccggttttgatcctagtaaagaagcaagacctgagttcttctttgatgatggagcttatccagaacaggtgactacattgatcttagtgtagtgtgttcttgtggatttcttcatttcttcttggtttttgaattcatgattttgtttgtaggttgactggattggtcagaagaatcagatagacgctggtttgtattcatcatctctgttgtatgtgtgtttagcggaggtgttgatgatgatggattgtcgtttgttgtatcagctaaggctgcaggagttaagcagattgttttggttgggtcgatgggaggaacaaacattaatcaccctctcaatagtattggcaatgctaacattctggtgagactactctttctctgttttcttgaacacagagatgagtttcacggcaaatgttcacagtctttatgcaatttgtaggtctggaagagaaaggctgagcaatacttggctgattccggtattccatacaccatcatcaggtaacttttattgtttacttgcatccggtacaaattgcaatggcggaatattctcatcttgcaatattgctcttggattcagggctggaggtctgcaggacaaggacggtggcattcgagaattacgtgtgggaaaagatgacgagctactttagacagaaacaagaacaatcgcaagagctgatgttgcagaagtctgtgttcaggtgtgtgttcattatgaccaaaaggagcttcgtcctaccgcataatcctatcaacgagttaccatataaatttaaaccgagttt

SEQ ID NO: 158312 - DNA, 3509 bp, Arabidopsis thaliana landsberg
tatttgtgttgatttcaagtgatttggagctgttgacgagctaactggaagaagcagacctgatcatgtcaaaccactcgaccccgaggtcgagtaggagcttcaagatctcaagagaccactcgaccccgtggtcgagtagaggacttctcgatttcaccacagcactcgaccccgaggtcgagtgtcctcatccccatcactagaccatcactcgatcacatcactcgaccccgaggtcgagtgtcttcacctgcattacctgatcatcactcgaccacatcactctaccaggaagtcgagtatcaccatcaccaccactcgactacatactcgattgcgagcttcagagtcttcttcattccgcactcaaccagacactcgagcacaaggaagaaaagaagactccagctattcactcgacctctcactcgaccacctgggtcgagtacagtttttaatccgtctcaatactgcgtcgttttaagtattagggtttcggtatatttggctataagtagcatgtacttcacattttcgaggacaagttttatctaggttttattccgtagacattgtgtcttgaccttttgtaatccggctttctctttatctattcagtattcagtatttgttcttgatttcgtttattgtttttcatcctgttatcattctgctattacactgttgttatcatgttttcatcctgttcaacgtttatgttttctgcaatgatgtctgagtagtgaataggtttctgaggatgggttagagtagtgtagaattctcagtttgctaggtggttgagtatcgattgatagatcccttctggatcagttgttcttaatgcctattgctttctgataacctggaatttgagcccagacatttccgcgcccaaaaggtgttcgatgaaatatctgaaccactaattacagagattagtggccatgtaccaaggtaatggttgcagggagcgttttgctttaacttgttgattcgtaatgcatgttaggttagctctcgtcaatggtgattgagtctgggactaggttaacttgagggtctctgttgtggtggcacttagatttggttaatgaacttgttatctagggataatttattgagcatgacaatcacctgtaaactgagaaatcgaaacttttcaattacccccatcctcggaaattctttatctgattgattttattgtttactctactatcgttgactacatcttgttacctattgcttagtttttgcatttctctgctgttactcgaccacccagttgcctggcaacagactgtgcagtcgagtatccctgttatattttctgtctcttactcgacctgtcactcgacctcacccagtgctctgcaaagagctgtgttggtcgagtgttttactgtttctgtttgattttctgttttctgcatgttcacttaggactgctagaacacaccaaaacctgttattgcttggcttgacttagtgacttctgatcacatcttgattgttagcatcacacccatttggattgacaacctaaaatactacaacgaaatgattagtgttttaggataattaactaaaaacttattatcacatctgaccaaagactgtagtgttcttaaaaggcatctcgcagaactatgggcaagcggagatctttcgaaattcaatatggagaccaagaccggctagcgaagaagaacccagaagttcaaaaggtaaaatcaatgtaattcttggaggttccaagctttgccgcgattccatcagcgcaatcaaaaagcatagacggaatgttcctctaatgtcaagtttaagtgaaaaggtagattttcaaggcgcttcaatatcattcgaggaaaaggaaacgcagcacctcaaaagacctcacgatgatgctctagtaattacgctggatgtagctaacttcgaggtttcaagaatcctcgtcgatatcggtagttcggttgatctaatctttctaagcactttggaaaggatggggataagcagggccgatgtagtaggaccgccatcccctttagtagcttttacaattgagtcaacaatgtctctcggaacaattaagctaccagttttggcgggaaagatgtcgaagattgtagattttgtcatctttgataaaccagcagcttataacatcatcctcggaactccgtggatttatcaaatgaaggcgatcccctcttcttatcatcaatgcatcaaatttccaactccaagcggagtagaaacaattcggggagatcaagaagcttcgcagacatgttatctagagagccaacgtttgaaggtccaatagcaattaacgaagcctgcgaagaaaggaataatcccgagatttcctagtgggtagaaagtggatgatgtggtgatcgaagtaatgttagaggaagacaaaccagatcagaaagtttgaattggatctaatctaaccggggaaataaaagaagccataatagaacttttgaggaaaaacaaggcatcatttgcatggtcggcatcggatatgccttaaatagatccaagcatagtctgccacgagcttaacgtggatccaagattcaagcctgtaaaacaaaaaagaagaaaactcgcagtgaaaggaggctaggcagtaaatgacgaagtggataagctcttaaggatatggtccataagggaagtacaatacctagattgggtggcaaacaccgttgtggtcaaaatgaagaatggaaaagatagagtttgcatcgacttcactgacctcaataaatcttgcccggaggacagtttcccgcttccgcatgtagatcgccttgtggaatcaaccgctttgaacgagttacaaactttcatggacgctttctttggttataatcaaataatgatgaatcctaaagatcaagataagacgtcatttatcacggatagaggtatttattgtaacaaggtaatgccttttggtttaaaaaatgcaagagctacttatcaacaattggtcaacaaaatgttccacgagcatcttgggaagacgatggaagtttacatagatgatatgtcagtcaagtcgttaaagaaagaggactacgttaagcatttagaagaatgttttgagattctcaatcaataccaaatgaagctaaagccggtgaagtgcacgtacggagtcccatccggggagttccttggttgtattgtgaccaaaaggaaaattgaagcccatccgaaccaaatcgatgcctttcttgacatgtcatgttcaagaaacttcaaagaagtgcagcggttaactggccggattgcagctttgaaccgttttatttcaagatcaactgataaatctttgcctttttatcgaattctaaaaagaaacaaagaatttatttgggatgagaaatgtgaagaagcatttggacagcttaaggcgtacctaaccagtcaaaatgtattgtccaaacccgaagtggatgaaaagctctatttttggt

SEQ ID NO: 158313 - DNA, 1435 bp, Arabidopsis thaliana landsberg
aacttgagtattcctcattgagtcgttgcaaacggtatggctacggaaaaaacccaccaatttcatccttctcttcactttgtcctcttccctttcatggctcaaggccacatgattcccatgattgatattgcaagactcttggctcagcgtggtgtgaccataacaattgtcacgacacctcacaacgcagcaaggtttaagaatgtcctaaaccgagcgatcgagtctggcttgcccatcaacatactgcaagtcaagtttccatatcaagagtttggtttgcaagaaggacaagagaatatcgattctcttgacacaatggagcggatgatacctttctttaaagcggttaactttctcgaagaaccagtccagaagctcattgaagagatgaaccctcgaccaagctgtctaatttctgatttttgtttgccttatacaagcaaaatcgccaagaagttcaatatcccaaagatcctcttccatggcatgggttgcttttgtcttctgtgtatgcatgttttacgcaagaaccgtgagatcttggacaatttaaagtcagataaggagcttttcactgttcctgattttcctgatagagttgaattcacaagaacgcaagttccggtagaaacatatgttccagctggagactggaaagatatcttcgatggtatggtagaagcgaatgagacatcttatggtgtgatcgtcaactcatttcaagagctcgagcctgcttatgccaaagactacaaggaggtaaggtccggtaaagcatggaccattggacccgtttccttgtgcaacaaggtaggagccgacaaagcagagaggggaaacaaatcagacattgatcaagatgagtgccttaaatggctcgattctaagaaacatggctcggtgctctatgtttgccttggaagtatatgtaatcttcctttgtctcagctcaaggagctggggctaggccttgaggaatctcgaagatcttttatttgggtcataagaggttcggaaaagtataaagaactatttgagtggatgttggagagcggttttgaagaaagaatcaaagagagaggacttctcattaaagggtgggcacctcaagtccttatcctttcacatccttccgttgggggattcttgacacactgtggatggaactcgactctcgaaggaatcacctcgggcgttccacttctcacatggccgctattcgcagaccaattctgcaacgagaaactggtcgtgcaagtactaaaagccggtgtaagagccggagttgagcagcctatgaaatcgggagaagaagataaaataggagtgttagtggataaagaaggagtgaaaaaggctgtggaagaattgatgggtgatagtgatgatgcaaaagagaggagaagaagagtcaaagagcttggagaat

SEQ ID NO: 158314 - DNA, 1779 bp, Arabidopsis thaliana landsberg
agatcatccggtgacaagctactagagccattttttttgattagaagatagctgaattacacaagaagatcggttgttcttacaacgatctaaatgtcaaattcgaatctttgaattccaaaatcaagtatgtggagagtcaatttgcatcaacctctgcttcgaagcatcctcagcaacttccagggaaagcagtccagaatcctaaggactatgctactgcaaatgctatcaccatccaccaagaagatgagtctccaccaagtcatcagactcccaatactgaggacagtatgattcaagaagggggggattcaactcaaattgttacacctaccacccagcaattcatctggactataaagcacacacctttgctgaatactcactattcttgaaaaagttcaaaattgaaaaactcaagaaggatcacaatcaacatattatcatcagtgcttccacccaagatacatacaagaagatagtcatccaagaagaacttgatgatcgtggttcattcactctgccatgctctctaggaccattgacattcaataggtgccgttgtgatttgggagcatgtgttagccttatgcctctctttacagctaaaaggctagggatcatagaatacaagttctgcaacttagctttactcttagctgatggttctattgcacattatcatggtctaatagaaaatctgcctgtcaagattggacatgttgagatacctacaggttttgtggtattggacgtagatgaagaaggcaaggatcccctgatcctagggagaccattcttagcttcagatggagctgtcatagatgtcaagaatggaaaattaatctgaaccttgaaaaaggcatcaagatgaagtatgacaccagagaagcttcagagaaaccaactacaagaggttagagttttgggattcaggacatggatgttgatgaagaaacagaagctggaaccccaccaaaagttaactgtacttctcaactcagcaagttgaagagaacttttgaccacaagaaaagagcaatagaagggttagctcagactgaagatcctacagaagatgactggtatgagatgagaaaaaaatttaaatggcaaagtagagtcatatagggattatcttcaagggtgatgaagctgaaagatcaactttggatgtttgaaaaaagagttaaaaatttttcaaatggtattgatccagagaagatggaaactgcactagctatcaaggaggacgaaaatttcacaacagaatggtttgcaccagaagatcagaaagtagttcacttagaggaaagaagcctagagagcaagttgttgagtgaggaggaaactcctattccgatttattctccaggagtgcctaaacagcccaccaacccctctgctgaagaagaatacttgattcatgattctgttgctgaagaacttctgaaactctaagttggatacaaagctcaagagaatataattggaaagttaactcataagatggaagagttaaatagcaccattctggaacttaaagaaatggtcaaggactaccccaatttcgaatttgaggattggtcaaaggagtctggttcagaagaagaagactactctgctgattagaaagaagcttattttgaagaaaaatcaaatgagtactcatcctaccatatctcaagagaggatgcagagtatgattcaagcactgaaaattcaaccactgaagatgagaatttctctgttcctctcttcaacctcttttctgac

SEQ ID NO: 158315 - DNA, 1519 bp, Arabidopsis thaliana landsberg
tgggaatcctgatgatcagtgtgtacttaacttgtttcattttatgcagaatgattgacttctctactttatctcctgcggagatcacggtgatgggatccgtgttctgtgttttgctctcgatgcacttcactatgcagtttgtatccaagcatctgttttactggaagaaccctaatgaacagagagccattcttattattgtgcttatggctcctgtttacgctatcaactcttttgtgggcttgttagatgctaaaggaagcaaacctttcttcatgtttttagacgccgttaaggaatgctatgaggcacttgtaggttccttcgagattctctcatgtctcattttccctacattaactctctctgtgtgtggataattcctgatttgttgtgtttgcctctgtttgtttcaggtcattgctaaattcttggcgttgatgtatagttatgtaaacatatcgatgagtgcacggattatcccagatgaattcaaagggcgagaaatccaccattcgtttccaatgactcttttcgtgcctcgtaccacacatctggattacctcacactgaaacagctcaagcaatggacatggcagttttgtattatccgcccagtgtgttccatcttgatgataacattacagatccttgggatttatccagtttggttgagctggatcttcactgctattctcaatgtttcggtttccctggcgttgtattctttggtgaaattctaccatgttttcgccaaagagttggagcctcataagcctcttacaaagttcatgtgcgtcaaagggatagtcttcttctgcttttggcaggtaaataacttaatttccaactttttctttgcctgccaaatgccaaaatcacaagttctctacctactagtttcttcaatcaacaaactgagtttgttgaaaaagcattcaaatttttcttcagtctgctgtttagacaatggaaagatacatatagtctctagaatgtcataagatgttttagggttcccgccttataatatttcaccgccacgaattagaccattaaggtttgcaggactactttaacaaggaattgtagctttgccagctcaacaacagaccttaggctgtttagttgagagctgaaggtttaaagggaactcttttgtctaggatttttgtaatgtgcatatggtctgagcgttgagatttttctccttaatctaagtctttcgattgtgtagcgaacgaaaaccatttagagcttgttggttggtacttgagacacaaaaaagtctcatctcaatagattttaggatcactgctacattgggtcaagtttaaagcattcatgtctaatttttcgccttgttccattcttaaaccttgggaattatgtgttgcacagggaatagtcctgaagatattggtgggattgggattaattaagtcgcatcatttctggttgggaggtggatcagcttgaggaactctgcaaaatgtgcttgtaatgcttgagatga

SEQ ID NO: 158316 - DNA, 1334 bp, Arabidopsis thaliana landsberg
tcacattaaccactataatccatgggctttttcttcacaacaaggcttccgaagcagtggctttaattgatcggatggttgccagagggtgtcaaccagatctatttacttatggtcccgtagtaaacggattatgtaagagaggtgatattgatttggctttgagtttgttaaagaagatggagaaagggaaaatagaggctgatgttgtgatctacaacacaatcattgatggtctttgcacatacaaacatatggatgatgcattcgacctattcaacaaaatggaaactaaaggtattagaccagatgttgttacctacaactccctcataagatgcctttgtaattacggaagatggagtgatgcttctcgactactcagtgatatgcttgagaagaaaatcaaccctgatgtattcactttcagcgcattgattgatgcatttgtgaaggaagggaagcttgtagaggctgagaaattgtacgacgagatgatcaaaaggtctatagatcctgatattttcacttatagttcattgatcaatgggttttgtatgcacgatcgtttagacaaggccaagcagatgtttgagttcatggttagcaaggactgtttcccagatttagttacatataatactctcataaagggattttgcaagtctaagagagtagaagatggtacggaactcttccgcgagatgtctcatagaggattggttggcgatacagtcacttacaccactcttatccaagggctttttcatgatggcgactgtgataatgcccaaaaggttttcaaacagatggtttctgatggtgtgcctcccgatatcatgacatacaacattctgttagatggactctgtaaaaatgggaagctagagaaagcattggtggtattcgagtatctgcaaaagagtaaaatggaacctgatatttacacatataatattatgattgaagggatgtccaaggctgggaaggtggaagatgggtgggatctattttgtagcctcaagcttaaaggagtgaagcctgatgtaataatgtactgtacaatgatctcaggattttgtaggaaaggtttaaaggaagaagcagatgccgtgtttagagaaatgaaagaagatgggactcttccagatagcgggtgctataatacgctgattagggcacaccttagagatggtgacaaagcagcatcagctgaattcatcaaagaaatgaggagttgcgggtttgctggagatgcttcaaccattggcttggtcgctaatatgttacatgatgggagattggacaaaagcttcctcgatatgctttcttaa

SEQ ID NO: 158317 - DNA, 1536 bp, Arabidopsis thaliana landsberg; identical to SEQ ID NO: 4638

SEQ ID NO: 158318 - DNA, 873 bp, Arabidopsis thaliana landsberg
tttgctatgttttcttgttacgctgaactaattaatttgatggattactctttgtgtgctcggtgaaggtctccatgggtttatgctagtttgttatatactataactgcatatttgactgtgcaggttgattacgcttgcacacctgaagaagttcagcagcatttccaaacatgcggcactgtccatcgggtgaccattctgacagacaaattcgggcagccaaagggatttgcatatgtagaattcgtcgaagtggaagctgtacaagaggctctacaactgaatgaatcagagctacatggtcgtcaattaaaggtacacatcttactataccatcaaacaaaacactttttaccatgaaaaaaccccttatgattccatcgttttctcatctggcttaaaataatttcaggtcttgcagaagagaacaaacgttcctggaatgaaacagtatcatcctgggcgtttcaacccttcaatgggataccgctttcgcagaccctttgtgcctccgtatttttattccccatatggatacgggtaagtttaaactctgcatatttaccatcagtttatcacaaatggctttctcttcttcgtctcacgagactcggcaatgcctcgtgcaggaaggctcctaggttcagaaggccaatgcggtacatgccttaccaatagaaaccgtaccggaataagaagaactatgacagagatgatgccgaggtcgtccctccatttcgagctttatatatgaatatgactttgctcgcacctgaacttaattttgaatctgtcatgtacggatgagattataagcttttgtttctttagattatgattatatttggtcgatattactttcagtttata

SEQ ID NO: 158319 - DNA, 858 bp, Arabidopsis thaliana landsberg
ctcagaaaaccctaattcctccatttcgaaattccaacgaattctctggtgattttaccaatggcgatggcaacatcgatgagtttgaatctaattggggcattcaaaggcttgtctctctcttcaacctcgtcttttctcagaggcgagttgagtttttcccccaaaacaactttcactgttactcttcctctggaaaatcttcaagctccggttccgttgacaattgaatcggcccataagaaaggagctggtagcaccaagaacggtcgtgattctcctgggcaacgactcggcgtcaagatctacggtgaccaagttgctaaacctggtgctatcattgttcgtcaacgtggcactaaggtaacacttaagaacacagaaatgttgaaattaagaacctcataagctcctctttcaattctcttctaatttcaccgcaactctgtcaatatggtcagcttcttatgggtttagctctcaagctctgttttcagattccattctcgaacatatctgggttttgcttgtgtttaggatgaattttcgtatttagtagctcttgtttctgatgccattgccatttcttctggaagttctacgttatgtttgtgtttaaaatgaaactatattgtttgagaagattgattcatgaatgatgatgtttgatgcagttccatgctgggaaaaatgttgggattggtaaagatcataccatcttctctttaatcgatggattagtcaagttcgagaagtttggtcctgacaggaagaaggtatacctgaagttatactgagtaaggtttataagctttcttaatcttctaggatgttaaaggaaatgagacatgttttgca

SEQ ID NO: 158320 - DNA, 4253 bp, Arabidopsis thaliana landsberg
accgatcaggttgatgaaaacggtcatcaaaggcctatgctgcctgggggtggcgggtcaaagatggaaagaagattgtcgatggtgaagtcaactaataaatcatcttttatgaggacgtatactggagattttgatcacaacaggtggttattttacacgagtggaacttatttttatgggaatgctttttggacaaaagactgatatttctgtagcggtaatgatggagatggagatggtgactgttttggtattgaggcccaacatttgatgagcagaccggggagaccgcttacttggaagctgaaaattgctgctggtgttattagtccatacaggtataaaaatagacaagtctattgtttgttgttattgtttaactttactattacctaaacatgttaaaagagttcttttttctttctatgcaggcttttgatatttatccgtatagttgttcttgcattgttcttgacttggagggttaaacatcaaaacccagacgctgtatggttatggggaatgtctgtggtttgtgagctatggtttgccttgtcttggcttcttgatcagctccctaagctatgcccgattaatcgtgccaccgatcttcaagtcttgaaggaaaagtttgaaacaccgacagccagcaacccgaccggcaaatccgaccttcctggattcgatgtctttgtctctactgcggatccggagaaagaacctcctctggtcactgctaataccattttatctattcttgctgcggaatatcctgttgagaagctttcttgctatgtatctgatgatggaggggcgcttcttacgtttgaagcaatggctgaagctgctagctttgccaacatttgggttcctttttgtcgtaaacatgcgatcgagccgaggaatcctgattcctactttagcttaaagagagatccttacaagaacaaagtgaagtctgatttcgtgaaggatcgtagacgggttaagcgtgagtttgatgagtttaaagtcagggttaacagcttgcctgattctatcaggcgacgttctgatgcttatcatgccagagaagaaatcaaagccatgaagatgcagaggcagaacagggacgatgagcctatggagcccgtgaagattcctaaagctacatggatggctgatggtactcactggcctggaacttggttgacttctgccagtgatcatgccaagggagaccacgcgggtatcattcaggtataaagtcggtataagattcaagatgttattattttattcaatatctcattttgttttggcatattatcgatcaatgcaggtgatgttgaagccacctagtgatgaaccactacacggagtatccgaagggtttcttgatctaaccgacgtggacattcgactcccgctccttgtgtatgtttctcgtgagaagcgacctggttatgatcataacaagaaggctggagccatgaacgccttagtcagagcttctgcgattatgtcaaatggaccgttcatactcaatcttgactgtgatcattacatatacaactctgaggctctgagagaaggcatgtgtttcatgatggatagaggcggggatcgtctttgctacgttcagtttccgcagcggtttgaaggtattgacccatctgatagatatgctaatcacaacactgtcttctttgacgtcaacatgagagctcttgatgggcttatgggtccggtttatgtcggaacgggttgtctctttagaagaatcgcgttgtacggattagatccacctcgggttaaagaacaccatcccggattctgcagttgctgcttctctcgcaagaagaagaaaagccgtgtgccagaagaaaaccgatctttgagaatgggtggtgactcagatgatgatgaagagatgactctttttttggttccgaacaaattcggaaactccactttccttatcgattcaatcccggttgccgagttccaaggtcgtcctcttgcggatcacccagctgtcaaaactggacgtccaccggaagctctcaccattcctcgagaacttcttgatgcatcgactgtagcagaagccattgctgttatctcttgttggtacgaggataaaaccgagtggggatctcggatcggatggatttacggttcagtcactgaagatgtggtcacaggttatagaatgcatacccgaggctggaaatcggtttactgtgtgaccaaaagggatgctttccgtggcacagctccaatcaacttgacggataggcttcaccaggttctccgatgggctactggctcggtaaagatcttcttctcaagaaacaatgccttctttgctagcccgagaatgaaaatcctccagagaatcgcttacctaaacgttggaatctatccgttcacatcattcttcctcatagtctactgcttcctcccagctctctccctattctcaggccagttcatagtccaaacactcaatgtcacattccttgtctacctcttaatcatctccattacgctctgcttactcgctctcctcgagatcaaatggtcaggaatctcactcgaggaatggtggcgaaacgagcagttctggctcattggaggaacaagcgctcacttagccgcggttatccaagggctgctcaaagttgttgccggaatcgaaatctcattcacattgacatctaaatccggaggagaggatgtagacgacgaatttgcggatctctacattgtgaaatggacatccctcatgatcccaccaatcacaatcatgatggtgaacctaatcgccatcgcggtcgggtttagcaggacgatatacagtgtgattccgcagtggagtaagttgattggaggagtgttcttcagtttctgggtactggctcatctttatccattcgctaaagggcttatgggaagaagaggaaggactccgaccattgtatatgtctggtctggacttgttgccatcaccatatctctgctttgggttgccattaatccacctgctggttccactcaaatcggaggatctttcactttcccatgattcataggtttggtttctcaaaaattctctttctttagtcctttctaaagatggagacagagattggccaagaaacacacaagtatagttgagccaaaatatagagcaagtcaaagaacttctctcattgtcttttattttttgtttttttatttggttgggaaaggacactttttatttgtctttttaaattttgtaatcttttatctgttgatggaattatttatgctactactgttaattatttattcagttcaaattcaagtgccaaagttttgttaagttttaatttatttgctttcataaaccttttaaggaaaaggaaacaaaacgggtcgggttatcgggtcaagttatccagaaaccgatccaacacttgtcccgccgaaaccctacctaaaccttgagaaccttctcgtcgactttgagatttctaatggcaacagatattccgacttcgaatttcttcttctccaagccaatttcttctacataaatcacattttattacagtattctcgaatctcgaagaaccctaagtctcgtttcccaggaataatggctcagaaatgtgcgattggtttgatttcagccctagcagcttcggcttctcttgcgaaatctaaagtcgcttctgcagatggtcccttcaatctctctgggttctctacttctgcgaatcctcagcagcaggcttctcctcctccaccgtcgttggctggtgaagaatcttcagctcctccgcgagctcgcaatgataatccgaggacaagttccggtggtttcgatccggaggcactggagcgaggtgctaaagccttgaaagagattaacaattcctcttacgcgaaaaaggtcttgaacctttttctctctttctatagttagaaattttgtgaaatcgaatcatgcttaggtttaggaaaggctacagaagaatgtttcaattaggttataatttgtatgatgaacctaaaagtgattgaaaatggtagcatctgtgttggatctcagaattgttctatttctgtttgtttatcaatcgtggttaagctcacagttgttgtgtatttggttctggtaggtttttgaaagtattaagcagcaagaagagacaaagcaaactgagtttgcaacgaaggcgcaagagtttaaagctatgcaagcccaagctgaaact

SEQ ID NO: 158321 - DNA, 1328 bp, Arabidopsis thaliana landsberg
  unsure (1)..(1328): unsure at all n locations
gtttttttgttacttcaggggagagtgaagaaactcgatctttacgggaagttaaatggtcacgagggatgtgtgaatgccgtggagttcaattcgtctggcgatgttcttgtttcggggtccgatgatcgacaannnnnnnnnnnnnnnnnnnnnnntggaagcaggaagttgtcgtatccctctggccattgtgaaaatgtgtttcagactaagttcataccttttacggatgacaggacaatcataacatctggtgctgatggacaagtatgcttgtaatctcaagatctttaagactctccagcattgttgctttttgtaattagtttaatcattcggtttccgttctgtttttgcaggtaagacttggtcagatcctagaaaatggtaaagtggagacgaaaaggctagggaggcatcacggtcgcgtgtacaagcttgctgttttgcctggagatcctaacgtattctacagctgtggtgaagatggttttgttcaacatgttggtctctatatctctctcatgctcctccattgtgtttctcattgtggtctctgaacttgtctttattatttttgggcagtttgatatacgaagcaacaatgctactatggttttgtattcctctccgttcacacaaggatgcaggagacatcactctagcagtaggatcagattgaattctattgcgatagatccgaggaatccatattatcttgcggttgggggttctgatgaatatgcacgagtctacgatactagaagagtacaattagctccagtatgtcgccacgtcttaccagacgctcctgtgaacactttctgtcctcgtcatctccgggaaaccaacagtgttcacatcacgggattagcatattccaaagctggagaactactggtctcttacaacgacgagcttatttatctgtttgagaagaacatgggttatggttcgtcgcctgtttctgtctctcccgagaaactgcaagaaatggaagaaccgcaggtgtatacaggtcaccgcaatgcacaaacagtgaaaggagtgaacttcttcggtccaaatgacgaatatgtcacaagtggttcagactgcggtcatatctttatatggaagaagaaaggaggtaagcttgtccgagctatggtgggtgatagacgagtggtgaatcagttagagtctcacccacacataccgttacttgcatcttgcgggattgaaaagagcgttaagctttggacaccaatgtcaaatgatgttctttccctgcctgaaaagatcgaaaaggtaaatcaagtattctctcaaccaatgtttaatgt

SEQ ID NO: 158322 - DNA, 1076 bp, Arabidopsis thaliana landsberg
cgaacatgtgagtttgcttcttctattgcaggtgaggtgttgggaaatatcccgtagtggagcctctctagccagtgctcctaaagcatcaatatcacatgatcagccggtaatatgtcattcttcttcttatcttacctttttttttcttttgcctttgaatctgatgcatatacgtcctttcttgtgttgaaggttttatgttctgcttggaaagatgatggaaccacagtctttagcggtggatgtgataagcaagcaaaaatgtggcccttgttgtctggtggtcaacctgtaactgttgctatgcatgagggtcctatcgcagctatggcttggatcccgggaatgaatctccttgcaactggaagttgggataaaactttgaagtaagaatgattgttcattatttcctatgactgaatgtagcaaattatagaatgttgactgattcatttatttgctgccatgaatttaatgatgtatgttggttttccttccagatattgggacacaagacagcaaaatcctgtacatacccaacagcttccagacaaatgttatacattgtctgtgaaacatcctctgatggttgtcgggactgccgatagaaatctgatagtcttcaacttgcaaaatcctcaggttagaatttttccttgttgttccatgttataacttgcgcatgagagttctaagtgctaacaatgctgtcagcatcacatggttttgggaattcgtgatcaatttagcccatgtgctatcttacaaagaatagatgaacaggctttcaccattagattaacagtttctcttgtgtaaactgtagactgagtttaagagaatccaatccccactgaagtaccagacgaggtgtgttactgccttccctgatcagcaaggttttttggtatgtcttcttatttatgttctgttgtgttttggttaattcagttttacaggaattagcttgttcgttagatgcttacattttaggttagacattgcaatgtttttatttgcaatctcgagaagattttatgtatgtcattctagcaaaaaatagagtaatttta

SEQ ID NO: 158323 - DNA, 1158 bp, Arabidopsis thaliana landsberg
cgattacttgccttggcctgcaccttcttgggataactctggcttcaccaactcaaatgtccagggatcatcattctttaccggtgacaacactataagcttgacaatggagatgaaacaacactgggtctcaaatgcagcactatgattcctcctctactcaatccactggaggagaatcatatagcgaagttgctagcttaagtgaacctactaatcgctatggccacaacattgttgtcactcatctctcaggtccaccactttttaacctttttcgcctgagtaagagttcacattgctgcggcaactgcatttacttacagcttatctatggattcttgttttggtgcaggttacagagaagaccctgagaatcctattggaagtcattcgatatcgaaggtgtctcaagattcagtggttcttcctattgaggttaattattagactatcatctttgaccttattataaaccttgtagtagttcaagatgagactgagtttaaagctgaatactatcttaatgatgtctatatatgctcacaggcggcttcttggcctttacacggcaatgtaacgccacatttcaatggtttcttgtcttttccttatgcatcacaacacacggtaatacacaattgtaacatttcaagataatactgtttcttgtatctttatgaaagtatttgttatggaaatctttgcaggtgcagcatcctcaaatcagagggttggttccgtctagaatgcctttgcctcacaacattccagagaacgaaccaattttcgtcaatgcaaaacagtaccaagccattctccgcggcagagagcgccgtgcaaagcttgaagctcagaacaagctcatcaaagtccgcaaagtatgtttgtttatctatattgcaccactctgataaatagaattatatgcagaaagtttcagttattatgtcaagagtcttgactcaagaccaattttttgtatgaaactatgcagccatatcttcacgagtcgcggcacctccatgcactcaagagagttagaggctctggtggacgtttcctcaacacaaagaagcatcaagaatcaaattcctcactatctcctccattcttgattccacctcatgtcttcaagaactctccaggaaagttccg

SEQ ID NO: 158324 - DNA, 1278 bp, Arabidopsis thaliana landsberg
tgtagcaaatcaaaagaatcaaaaaccacaagctgttgtaaagcctgaggtgcagaaagaagctcttcccatcgaagttcctcccttgtctgtggatgaggttaaagaaaagactgacaattttggatctaagtctctgattggtgagggttcttatggaagggtatattatgcaactctaaatgatgggaaagcagttgctttgaagaaactcgatgttgcacctgaagctgaaacaaacaccgagttcctgaatcaggttataaattttgcttcaatcccccttcccttcatttccttttatcttcagaaaagaaattctttacaatctcttgcttccttcttcttaggtttccatggtttcaagactaaaacatgagaatctcattcaactggttggttattgtgttgatgaaaacctccgtgttcttgcttatgagtttgcaacaatgggatcactgcacgacattctacatggtatgaggagcttccacgctcattcttgttagaaaacttccttgcttgggaaaaatatagaaaacagaatcgatttcttgatggaatgtgttactattataggtaggaagggagttcaaggagcacagccaggtccaacacttgactggttaacgagggtgaagatagctgttgaggcagctaggggtttagaataccttcatgagaaggttcagcctcctgtaatacatagagacataagatctagcaatgttctcctttttgaagactatcaagcaaaagttgcagattttaatctctcaaatcaagctcctgataatgctgctcgtcttcactctacgagagttttaggcacctttggctatcacgctccagagtaatcttccttaaacccttaaaacttttgttgcgtccaaatgaaattatgagcaaggcagctaaaatgtttctttccatttgcagatatgctatgacaggacagttaacgcagaagagtgacgtgtatagctttggggttgttcttctagagcttttgacaggaaggaaacctgtagatcatacaatgccacgcggccaacagagtcttgtaacttgggtatgtttgttatctgctcgctgtccaaatctgtatcctgctctgtttctatctcatgtcttacaaattgaagtgtgctgtctattattcaggctacaccgagactcagtgaagataaagtgaagcaatgtgttgatccaaagttaaaaggagaatatcctcctaaatcagtagccaaggtacactatgttcctcgcacaagtatc

SEQ ID NO: 158325 - DNA, 4727 bp, Arabidopsis thaliana landsberg
  unsure (1)..(4727): unsure at all n locations
atggcgggaaacttcaattatggcggtggtggcggtttctattgagattggatgtacaagagaattgatgaagtaacgggaaatttgtcagccgaatatgtcgcaggagtggaggagttcatgacattcgctaatagtcagcctatagtacagagtagtcgaggtaaatttcattatccttgtagtgtatgcaagaatgagaaacacatcatctcgggtagaagagttagtagtcatttctttagtcaaggatttatgcctgattattatgtttggtataagtatggagaagaattgaatatggatataggaactagttacacggataggacgtattttagttctaatcctgaagaagtgggtaatgttgtagaaaatccatatgtggatatggtgaacgatgcatttaattttaacgtggggtttgatgataattatcatcaggatagttatcatcaggatagtagttatcagaatgtggaagaaccggtccgtaaccattcaaagaaattctacgacttgttagaaggtgcaaatactccattgtacgatggttgtcgtgaaggccaatcgcagttacccttagcatctcgactcatgcaaaacaaggcggattataatatgagtgaaaaattggtggattctgtttgcgaaatgtttacagattttttaccagaaggaaaccaggctaccagttcacattaccaaaccgaaaagttgatgcgcaatttaggacttccatatcatacgattgatgtttgctcgaacaattgtttgcttttctagaaagaagacgaaaaagaagatcattatcgattttgtggcgcacaaagatggaagcctaaagatgaccgtcgaagaaccaaagtaccatatagtcgtatgtggtatctacctattggggaccggttaaaaagaatgtatcagagccacaagacagctgcagcaatgcgatggcatgctgagcaccaatcaaaggagggagaaatgaatcatccttcaaatgcggcagagtggacatatttccaagagttacatccccggtttgcggaagaacctcgtaacgtttatctcgggttgtgtactgatgggttcaatctgtttggcatgtctcgtaatcattccttgtggcctgtgattctgactccatataatttaccccctgttatgtgcatgaatacaaagtacttatttctttcaattttgaattctgggccaaataatcctcgagctagtctagatgtcttcctcctacttcttattgaggagctacaagagttatggtctactgagttgtatgcatataatgtgtctttcaatcaatatattaatctaaaattagtgttgcgtgggcaataagcaactttccgtcgtacagcatgtcaccaggactcctcaactcttaaccctaaacccttaaacctaaacactaaacctcaaaaccatagaccccaaacttgaaaacctaaatcctactttagcttcaggaatccggttgcggttctaattccactatctagttttttgatccggttgcggttctaatttttgatactcaatgaatccggttgactacaaatccgctaaccaagctttttgattctcaaatctttgatggtgaagccgaagttctcatgattttttggttttgaatcctataatagggaaacaatactttacctttcgtgatctggttgaggttctagttttatattcaatcatacccatgaaatgtagtaatacttcgcttggaaatgcaaaccaaaatttttcttgcttcttaaagtattatagtatgttagcagaaccatcccaatctgtcttacagaagtacaaatgttgcaaacccgtaggaccaagtctacccttcacagcagcagaatcaacccaagccctttgttccatacaaccaaggtcaggggtatgttcctaagcagcagtatcagggcaactatcagcagcaacttccaccacctgggttcacacagcagcactaacaacctgtttcaacaactccagattcagacttgaagaacatgttacatcagattctccaaggacaagcaacaggagcaatggatttgtccaaaaggatggcagaaattcataaaaaggttgactgcagttacaatgatatcaatatcaaggttgaagcactgacatctaagatcagatacatagaaggccaaaatgggtcgacctcagcacccaaatttacaggaccttccgaaaaatcaatgccaaattcaaaggagtatgctcatgctatcacgcttagaagcggtaaagaattacccacaaaaaagagtctgaaccagaacactgaggacagtgtggagtgagatggggaggatttatgtcagaatgaagattctgctgaaaaagcaatagaagagcctatactcgaccaacctactcgaccactagctcctgcagtatcacctcttgttgaaaacccagctgctgccaaaaccaaagacaaagtcttcgttcccccaccttacaagcccccactcctatttcctggtcgatttaagaaggtcatgatacaaaactacaaagctctctttgaaaagcaattgaaaaatcttgaagtcacaatgcctcttgtcgactgtcttgcacttataccagactctaacaaatatgtgaaagaaacgattatagagaggatcaaagaagtccaaggaatggtggtgctaagtcttgaatgtagtgcgatcattcggaaaaagatcattccaaaaaaattaggagatcatggttcgtttaccttgccttgcgctcttggtcctttagccttcaacaaannnnnnnnnnnnnnnnnnnngtttgtgagtctcatgcctctctctgtggcaaagaaactcgannnnnnnnnnnnnnnnnnnnnnnnnnnnnnnnnnatcctagctgacatgtctgtcagaatttcccatggtctgctagaagacttatcaatcatgataggcgtggtcgaagtacgtacaaactgtttagttttagaaatggatgaagagcccaaagatcctttgatactgggaaggccatttttaggtacagttggagttatcattgatgtcaagaagggaaagatcgatcttaacctcgggaaagatctcaagatgatcttcgatatcaccaacaccatgaagaagcctacaatagaaggaaatgttttctggattgaagagttggatctgttagctgacaaaatgctagaagagctaggagaaacagatcatctatagagtgccctgacaaaggatagcaaggaaggagatttacacttggagactttggggtaccataagcttttagatgagcataaagtagctgagaatccagaacagtatgaaaatttggttggaagggaaaaggacgaatatatactcgaccgcatcactcgaccgacggcccattcagtctgctcgaccgaactactcgatcacaacccctcctctgaagccaacttagtatccgacgactggtctgactcaaggcgtccaaagtcgatttaaaatcgctaccaaaacggctaaggtacgtttttctttgactaaactctacttatcctgtcataatgaatgatgagctaactactgatcaagtaaacctactgataactgagcttaaaaagtataggaaagcaatagggtattcgttagatgatattatggggatttcacccaccttatgcacccatagaaaccatcttgaaaacgaatcctactttagcattgaacttcaaaggagattaaacccaaacttgaaagagattgtgaaaaatgagatacttaaactattagatgttgggttatctaccctatctctgataacacttgggtctctccagttcactgcgctcctaaaaaaggaggtatgacagttgttaaaaattctagagatgaactgatacccactaggattataactggacataggatgtgtattgactataggaagttaaatgctgcctctagaaaagaccatttcccattgcctttcattgatcagatgctagcaagattagcaaaccatccttactattgcttcttggatggctatagcggattttttcaaatccccatgcacacaagaattttttcaaatccttatgggacctttgcttacaagcgtatgcctttcggtctctgtaatgcacctgctacctttcagtggcgtatgacttccattttctcggatttgatagaggagatggtagaggtattcatggatgatttttatgtgtatgcctcttccttctcctcgtatttgttgaacttgtgcagggtactcaaaagatgtgaagagacaaacatggttctgaactgggagaaatgtcatttcatggttagagaaggcatcgttttggggcacacaattgcagaagagggaatagaggttgataaggctaaggttgatgtgatgatgcagttacagccgccaaaaactgtcaaggacataaggagtttccttgggcatgcaggattttacagaagattcatcaaaaatttctccaagttggccagaccgctcaccagactgctgtgcaaggaaactgagtttgcatttgatgaagaatgtttgacaaccttaagatgatcaaggaagctttggtcactaccccaatagtccaagctccaaactgggacttcccacttgagatcatgcgcgatgcttcaaattatgcaataagagcagttttgggccaccggattgacaaa

SEQ ID NO: 158326 - DNA, 883 bp, Arabidopsis thaliana landsberg; identical to SEQ ID NO: 36070

SEQ ID NO: 158327 - DNA, 3625 bp, Arabidopsis thaliana landsberg
tgcagtgttatcatagagaagaagatcattcctaagaaggttagtgatcctggttcattcactctaccatgctctttaggtccattggctttcaacatatgcctatgtgatttagaagcatcagtcagtctcatgccgctctctgtcgccaaaagattggggttcactcaatacaagtcctgcaatatatccctcatcctagctgacatatcagtaagaatccctcatggtttgctcgaaaaccttccaatcaggatcggtgctgtggagataccaactgactttgtagtcctggagatggatgaagagcccaaggaccctttgattctagggtgacctttcttagccactgcaggagctatgattgatgtcaagaaagggaagattgatctaaaccttggcaaagcctttaaaatgacctttgatgtcaaagacgcgatgaagaagcctaccatagaaaggcaactcttttggatcgaagaaatggatcagttagctgatgaattactggaagagctgggagaagaagatcatcttaacagtgctttaaccaaaagtggtgaagatgggtttctgcatttggaaacatggggataccagaagctgttagactcccataaagcgatggaagaatcaaaaccctttgaggaattgaatggaccagcaacagaggtaatggtaatgagcgaagaagagtcaactcgagttcaacctgcactctcgaggacgtactcgagcaaccactcgaccttgtctaccgacgaatctggggagccgatcattccaacttcagatgactagtctgaacttaaggcaccaaaggttgatctcaaaccacttccaaaaggtctaaggtacgcattccttggtccaaactctacttaccctgtgatcattaatgctgagttaaatagtgatgaagtgaacctgctattatttgagcttagaaagtataggagagctattggttattcattatccgacattaagggaatttcacctagtttatgcaaccataggatccatcttgaaaacgaatcctattctagcattgaaccacagaggaggttaaatcccaatttgaaagaagtagtgaaaaaagaaattttgaaactgctggatgctggtgtcatttaccctatctctgatagtacttgggtttctccagtgcattgcgtccctaaaaagggtggaatgactgttgttaaaaatgaaaaggatgaactgatctctactagaactataactggtcatagaatgtgcattaattataggaagttgaatgttgcatctaggaaagatcattttcctttaccattcattgaccaaatgctcgaacgtttagctaatcatccatactattgctttcttgatggatacagtggtttctttcaaataccaattcaccttaatgatcaagaaaaaaacactttcacatgtccttatggaacttttgcttataagagaatgccatttggtttatgcaatgctcctgcaacatttcagaagtgtatgacctctatattttcagacttaatcgaggagatggtggaggttttcatggaagatttttcggtctatggtccctttttctcctcatgtttgttgaatcttggcagggtattgaccaggtgcgaagagacgaatcttgttctcaattgggaaaagtgtcatttcatggtgaaggaaggcatagtgctgggtcacaagatatcagagaagggtatagaggttgacaaaggaaaagttgaagtgatgatgcagttgcagccaccaaaaacggtgaaggacatcagaagtttctttggtcatgctgggttctacagaagattcattaaagacttctccaagattcattaacaccaccatccactcgaccaatcactctaccacatggtcgagtcccttatcatcattcactcgacgtccttactcgactgccagcttcagagtcttctccattccgcactcaaccagacactcaagcacaaggaagaaaagaagactttagcttatcactcgaccactcactcgaccacctgggtcgagtactgttcttaatccgtcctaatactgcgtcattttgagtattagggttccggaaatatttcgttataagtagcatgcactttacattttcgaggacaagtttttatctagttttattccgcagacactgtgttctagacctttgtaatccagatttctctttatctattcagtattcagtattcagcattcgttcttcatttcgttaactgttgttcatcctgttatcattctgctattaaactgttgttatcatgttttcatcctgttcaacgtttatgttctctgcactgatgtcagagtagtgaataggtttctgagaatggattagagtagtgtagaattctcagtgtgctaggtggtagagtattgattgatagatcccttctggattagttgttcttaatgcctattgctttctgatcaattggaatttgagccctgacatttccgcgcccaaaaggtgtttgttgaaatgtctgaaccactaattccagagatttgtggccttgtaccaaggtattgattgcaggaagcgttttggctttaacttgttgattcgtaatgcctgttaggttagctctcgtcaatggtgattgagtctgggactagtttaacttgagggtctctgttgcggtggcacttaaatttggttaatgaacttcttgtctagggataatttattgagcatgtcaatcacctttaaattgaggaaacaaaactactcaattaccccatcctcggcattctttatctgattgattttattgtttactctactatcgtttactacatcttgttacatgttgcttagtttttgcatttctctcctgttactcgatctgatactcgaccatccagttgtctggcaagagactgtgcagtcgagtgtctttgtttcatttactgtctgttacccgacctggcactcgaccacacccagtgctctacaatgagctgtgttggtcgagtgttttcttgtttcagcttgaatttctgttttctgcgtgttcacttaggactgctagaacacaccaaaacctgttaatgcttggcttgacttagtgacttctgatcacatcttgattgttagcatcacacccatttggattggcaacctaaaatactacaacgatatgattggtggtttcatatgtaattggattcgttattgtcttgatttgtttgtctcaattttggttgcattatgaaatagtgacttggtttttgtttttagtttgagtttctcttaggtggctcaaaagaagaaagggaggatatatggggctggttcattgcagctagaagccgcatcagctcacattggtccttcagttcctcgagaagatccgggtgatctctctcaaaagctggctgccgctgaagctcttattgcaaaccaagcggagaagattagtagcttccatgtgtacttcgactaccttgcggagatagatccagactttgctgccatctttcgagctggatcttctaggggagagatgacaagtgccacaggaactacaactgatgggatagctgaggaggaggcagatgggatgccaaataccacagg

SEQ ID NO: 158328 - DNA, 1298 bp, Arabidopsis thaliana landsberg
caggagatgttcatggtcagtttccagacctcttgcggttgtttgagtatggtggttatccaccagctgcgaactacttgtttcttggggattatgttgatcgtggtaagcagagcatagagacgatatgccttcttcttgcctataaggtcaaatacaagttcaacttctttcttctcagaggcaatcacgaatgtgcttcaatcaaccgtgtatatggattctacgatgaatgcaaaagaagatataatgttcgcttatggaaaacattcaccgagtgcttcaactgtctgcctgtttctgctctcattgatgataagatcctctgcatgcatggtggactatcgcctgatattaagagcttagatgacatcaggagaattcctcgtcctattgacgttcctgatcagggcattctatgtgatatgttgtgggctgatcctgacagagagattcaaggctggggggagaatgacagaggtgtctcttaaacatttggggctgacaaagtagttgagttccttcaaactcatgaccttgatcttatatgccgagctcatcaggtaatattttgctttagacatgtatctgtggcacgtctcttttgtttacttgtcatcataggacctacaaataatggacgaatacttatgatttatctcttttaacctcattgaagttgattgttttgccctttaggttgtggaagacggctatgaattctttgcaaatagacagctagtaacgatattctcggccccaaactactgtggagagtttgataacgcaggagcaatgatgagtgtggatgattccttgacgtgctcatttcagatccttaaagcatctgagaagaaaggaaacttcgggtttggcaaaaatgcaggaaggcgaggaaccccgcctcgcaaggtgagaatctttaaagcatcgaatgatacagttacatactgagttctattagggcaggccttcttagtcatctcattgttttgttttctcttttagggtggtggaaaaggctgaagacaaatcccataaactctgttttgtgtattccatgtttcttggttcaagacacttgcttgatcagctaaacttatcaaactgtcttcttcttcttcttcttcctctgctctggatcactttggcaaggggtacttctgtcttttcccttgactactctggatcacttggtgtctttgacctctgtgaatctgagatattattctctgtgagatacactttatgtcgttttttgttaaaacatttaaatgaaaatcataatgttcctcgtc

SEQ ID NO: 158329 - DNA, 1962 bp, Arabidopsis thaliana landsberg
ctaatcgaaacgagatagtgagttctataaactctaaacctcacactgtctaatttggattctgaatgttctttttgagtctgtgaaattgttctgtatatggtataggttcagttaaatattaaagattcagtgagattgacgttaacttataactggttgatgctatcgaatatcgacatgtttcagaacatggtatcgtgtcagaccaatgcggtggctatggtggtggtatcggacacagtgcatagggtgggatatactatcagttttgctgaatgctatccggaagaagacttggttgtcaggcttcctggtcaaccaaaggttgtattcagacagtacgcagggtatgttgatctcgacttgaatgctggccgtagccttttcaactacttcgtggaagctgaaaaacaccctgacacaaaaccgttaaccttgtggctcaatggaggttcgtgtttagttgctctgcttcctaactaattagcatttgagtatatcacaaatcactaatttgtgaaatgaataagttgaggtttgttttataggtccaggttgttcttctgttggtggaggagctttcactgagctaggtccgttttaccccacaggatatggccgtggtcttcgcatgaactccatgtcgtggaacaaaggtcaatgtcttataatagtaagcaaagaatgagagaaatcagacctttgatcttacacctgacgttattgtctagtgttgtaaatgtgaagcctcaaacctgctatttgtggacgcggcggctggagttggttggtcttactccacccgaagctctgattacaacgctggggacaagtctgcgggtaaatttttaaactccaaagtttcagaggatctcactctcactatattagaagatagttgtttcttgacttgttttgtatttgaacagccagcgatatgctcgtgttcttgttgagatggttcgataagttcccggagttgaagtctcacgatctctttctcactggcgaaagctatgcaggtatgtcttcgatatcgatgaaatctattaaatgttgacttggaaaacatcagtattctcatctctgttttctcgcaggacattacatacctcaactggctgatgcgattctcagctataactcacgctcaagtgggttcaaattcaacatcaaaggcattgcagtaagcaaaagcaccttgacgttccatcaactctatttttggttctcttctgaatcgtttctttctgatcagatagggaatccacttctgaagcttgacagggacattccagctgtatacgagttcttctggtcgcatggcatgatctctgaggtagtgggacgtacaatcaagattcaatgtgacttctcacattacacatatgcatacccccataacgtaagtgatgcctgcaacgatgctatccgtgaagccggagacatcaccactgagtatgtcaatacctttgatgttctccctgacctatgctacccatctattgccctgcaagagctaaggcttaaacaaatggttagcccttttttgcaccaacaaaacttttgcttgaattatctgtaaacttatgaaaatggtttcaggctactaagatgagcatgggagtggatgtgtgtatgaactacgaaagacagttctacctaaatatcccagaggtacagatggctcttcacgccaaccgcacaaacctgccttattcatggtctttgtgcagcaagtaagttcttttcctctctttcactttcataaaatgaagaatctttataaccactgttgcactctatgctttccccacgtgtcacagcctgttaaactactctgccatcgatgtaaacaccaacatgcttccgactctgaagagaattatacagaacaaaatacaagttaggatcttcaggtaatagttctattaaaaatctcctactgctgttatttct

SEQ ID NO: 158330 - DNA, 637 bp, Arabidopsis thaliana landsberg
tgtctcacaaactcttctttcagtcatcacagaaaacaaaaaaaacaatggcggataagctcactgacgatcagattacagaatacagggaatctttcaggttattcgacaagaatggtgatggtatggttcatcgtctctttccatttaatcgtacatattggatcatgaatcatcttcaaagcaatgaaatgactaacacaagtccttgattacttcttgtaggtcacattaccacagaggagttcggtgccgtgatgcgttccctcggtttaaacctgacccaagctgagcttcaggaggagatcaacgattcggatttagatggtgacggaaccatcaatttcactgagttcttgtgcgcaatggctaaggacacttactctgagaaagacctcaagaaagatttcagactctttgacatagacaagaatggtttcatctcagctgctgaaatgagatatgtgaggactatcctccggtggaagcaaactgatgaagaaatcgatgagattatcaaggcagctgatgttgatggtgatggtcagatcaactacagagagtttgccaggcttatgatggccaagtgagatttaaacaacttttccgcttcccctttttttactacctcttatct

SEQ ID NO: 158331 - DNA, 2421 bp, Arabidopsis thaliana landsberg
cactttccattttccaaagcgtctcactttttggcttactgcttaaattcctaaatcgaatttttaataattgtgcgggtcacgaacgaaccggtcggttagcaaaaaatcgaaatccttaaaccccttttgttgcttcactatcatcatcttctctggaaactgaaaactatggctttctcttcatgtctcaaattctatccattttctatctctcaagctgtaaccctaactcatcattccttctctctcaatctaactcctccttcttctaccatctccttcgcttctcctcactcagcagctctctcctctaccgatgtcaagcttctcgactcactccgtagccagcctgatgattccgccgcacttcgtctctttaatctggcctctaagaagccaaatttctcacctgaacctgctctatacgaagagattctccttcggctaggtcggtctggttcgtttgatgacatgaagaaaattctggaagacatgaagagttccagatgcgaaatgggtacttctcctttcttgatattaatcgagagttatgctcagttcgaattgcaagatgagattttaagtgttgttgattggatgattgacgaattcgggttaaaacccgatacccatttttataaccggatgttgaatcttctcgttgatgggaatagtctgaaactcgttgagatttctcacgcgaagatgagtgtctgggggattaaaccagatgtatctacgtttaatgttttgatcaaagctttgtgtagagctcatcagcttagacctgcgattttgatgttggaggatatgcctagttacggccttgttcctgacgagaagacatttacaacgattatgcaaggatacattgaagaaggagacttggatggagctttgaggattagggaacagatggttgagtttggttgttcatggtctaatgtcagtgttaatgttattgttcatggtttttgtaaggaagggagagttgaagacgctctcaatttcatccaggagatgtctaaccaagacgggttttttccggatcagtatacgtttaacacgttagttaatggtttgtgtaaagcagggcatgtgaagcatgctattgagattatggatgtgatgcttcaagaagggtatgatccagatgtgtatacttataactcggtgatttcgggtttgtgtaagcttggagaggtgaaagaagcagtggaggttcttgatcagatgattactagagattgttctccgaacacggttacttacaacactttgatcagcacgttatgtaaagagaatcaggtcgaggaagctacggagcttgcccgtgttctcaccagcaaagggatccttcctgacgtttgtacatttaactctttgatccaaggtttgtgtttgactaggaatcaccgggttgcgatggagttgtttgaagagatgaggagcaaaggatgtgagcctgacgagttcacttacaatatgctgattgatagcttatgctccaaagggaagctagatgaagctctgaacatgcttaaacaaatggaattgagtggttgtgcacggagtgtgataacttacaacactttgattgatgggttttgcaaagccaacaagattagagaagccgaggagatatttgatgagatggaagtacatggagtttcaagaaactctgttacatacaacacactcatcgatgggctttgtaaaagcaggcgagtagaggacgcggctcagctcatggatcaaatgattatggaaggacagaaacctgacaagtacacatacaactcgcttctaacacatttttgcagaggaggtgacataaagaaagctgcggatatcgtgcaagccatgacctcaaacgggtgtgaaccagacattgtgacctatggaaccttgataagcggtttgtgtaaagctggtagagttgaagttgcaagtaagcttttgaggtcaattcagatgaaagggattgctttgacaccgcatgcttataacccggtgattcaagggttgtttagaaagaggaaaacaacagaagctataaatctgtttagagagatgcttgaacagaatgaagctgcaccagatgcagtatcttacagaatcgttttccgtgggctatgtaatggaggtggaccaatccgtgaagcagtggactttcttgttgagctgttagagaaagggtttgtacctgagttttcttctttgtacatgttggctgaaggtcttctaactttgtcaatggaggagacactagtcaagttagtgaacatggtgatgcagaaagctagattctcggaggaagaggtttcaatggtgaaaggtttgcttaaaatcaggaaatttcaggacgctttggccactcttggcggcgtcttggacagtcgccaacctaggagaact

SEQ ID NO: 158332 - DNA, 3234 bp, Arabidopsis thaliana landsberg
  unsure (1)..(3234): unsure at all n locations
tagctttccaatgacaccgggataccttgatgccgtgatcggaaagaccttggcttgatgccaaacaccttaagcacagaaactgttctcaaacggaatttgatcaactactactcatttttgcttgaaaactcataattcttccttgaaccttaaatatttgaaatatgtctcataacactgtattctacttattttatgcatgtatttatcatcatttagctttgcatttgctcattgtttcatatcattttgcatcacatttagcttattttgcacacttagacatttaggatcgtcttgcatacatattgcatgttttggtgtgttttcaagtgtagaaggagcttacaaggattctactcaaccctctactctatccaaccaggagggaagtagtagagcattctactcgaccatttcactcgatccaggcagccacagaagagccagcaattcactcgacccacttactcgatcaaggcagcaacagaagaagcagaagatcgatctactcgccctcctactcgctcctctactcgacccatttactcgaccaagggcgacccactctaccagacttgttgatctatcaaagcgtcttcggatcctcctcattcctcactcaactagacaccttagcatacaaataagagaggaagaagcatctactcgaccaattgatcactcggagcatagacacaaaggcgcagactttgcagcaccctctttactcaatctccatgatcaagcactcgcccaaaccgcctcaagtctcttgtattctagtgaatctagggttttcaacattttactatcaatagatcactttgggatttgtccaaaggatctagctttaatactttagttttaatttttgttcttgaatcttcaaaacttaactactcttaatctatttcgtttttgtatttagttctttaagtaaagttgtttagcttgtttagatctacattttgttatgatttcagtagttacagggtttttgttattagttatgttgcttgagtagtgattagtgttcttgaggatggattagattagggtaatctctaggttagtcaggtggttaagattaggttagatcctttctggattcgcttggcccctatgcggctatcgctcgctaatgtgggaattcgaccatatgtatccagcgtccaaaagaagctgaaatgaatgccttatctaggaattataaaaatttgtagactatagaccaagagattggctagactacttattggctttggtagattgttgcttaaaccctgctgtactatgtttcatcaacgagagttgaaattaggaagtggtagagttatgggggtctctatcagaagagagtggattgacctggtttttgaatctatcctctagggtatctacctttcccctgttagccacctgatgaaccctagagttgcccttattaatgaatccatccttaggacttctattcttcttagatttatttgtattcaccccttgattgcacttttatttacctgttatttgtgtcacatgttgattgcattttagttcttaaatttgttgcatgttggttctactcgacccaatgatcgagtagggcttttaagttcttatttttgcttgtttgaatcctgacctaggattgttactagaaaccaactatctctataatctgggttgacttagttgcttctgtacacatcttgattcctagcaataacagtggactgaattgacaccccctatagctgtattgacatgctagtgtttaaggggaattgaactgaacctcacattctgcacataagtaggcataaaaatctacttatcatatcttcttcagaggagttgaatggcattatcagatggctttggatgcagctagtaacggaaatttcatgtcaagatatccataggatgcaacaatgttgatataaagcttatcttccagcattagtaccaacatcgttgacattgcaaggaaaacgcaagttcagtatgtttcacaggttaacagtttagccacttcagagaagatggatcaaaagggatacatgagctacaatcaacaatctacacattagaaaccggttcagcaaactacaagcacaccctccacccgagaccactaggatgattgaatcaatgttcaaacagattctcaaaagtcaagagatccagacaacagattttgatcacaaactggttgcattatcagaagatatgaatgggatgattcaattattaaacagtcggaccgagcatttgactacaaatatagcagatattagtgttatccagttaaggagtggaaaacaactaaatccagtacttcaaagggaacttcctacagccaaaatcgtcaatttggaagaaaatgatgatgcagtttttgcaaaccagacaccagtgtcgaccgtcactgctgggtgtcgatcgacaccagccaacgcagacactacagaacccgacagtgnnnnnnnnnnnnnnnnnnnnnnnnntcgacaccaaccaagtccaaacatgcaaattctccagaacccaatttcagctgtagaaaaggcaaccaaacacaaggttcttttccccaagagtcctaggaagtccaaacataagctagatgatgctagatgcaaagttatgatggataagctgattgtacagatgccacttatagatgttgtgaagtcttctcctatggtcacacaatatgtgaagagtatggtgactaaggattggcttactaagaaagctgtgatgaagatatctacagaggttagcgacattattcagaacaagattccaaagaaacttccagatctaggtagctttgttctcaattgtggtatccttaacgagagttttgagcgatgcttgtgcgatcttggttctagtgtcaacttgatgccacgttcagttgcgcttcggcttggtttgacaaatttagagcctacgcaaatcactcttgttcttgctgatcgactgtccgtagacccgatggtatcctatatgatgtccctatacaagtcggttctagctacattcctacagattatgtggttttatcttatgagaaagaacctaaagatcctctaatcttgggaaggcctttcttagccacaaccggtgccctaattgatgtaaggaagggcagaataggcttgaatgtaggtgatcttacaatacaatttgacatgaattaggtggttaagaagcctacca

SEQ ID NO: 158333 - DNA, 502 bp, Arabidopsis thaliana landsberg
atgagcggagacaacggcggtggtgagaggcgcaaaggtttctttcaagtggtttgatacccagaagggtttcggcttcatcactcctgacgacggtggcgacgatctcttcgttcaccagtcctccatcagatctgagggtttccgtcgcctcgctgccgaagaagccgtagagttcgaggttgagatcgacaacaacaaccgtcccaaggccatcgatgtttctggacccgacggcgctcccgtccaaggaaacagcggtggtggttcatctggcggacgccgcggtttcggtggaggaagaggaggtggacgcggatctggcggtggatacagcggtggtggtggtggatacggaggaagaggaggtggtggacacggaagccacgtctggtgcacgtgtcgtgggtcggaccacatggcgagcgactgcatatagggcgccggtagctactggggatgttgaacgaaattgggtcagtctgctgtcatgtcaaaccac

SEQ ID NO: 158334 - DNA, 1449 bp, Arabidopsis thaliana landsberg
taggtcgactctagaggatccccctgtgggttttgatcaagaccggcgttctcggtgaagctacgttacctctttacatttcaagttcatcggaaacacccaaaatttccagtttaaaagaacttctagcgaggctacagatcggtcacttggaatcaaaacacaatgctctcgaaagcctccttggtgcaatgcaagaagatgaaaagatggttcttatgcctttgatcggacgagccaacgttgcagctttagttcagctgctaacagcaacttcgacaagaatcagagagaaagcggtgaatctgatcagtgtattagcagaatcaggacactgcgacgaatggcttatctccgaaggtgtattgcctccgttagtgagactaatcgaatcagggagtcttgaaaccaaagaaaaagctgcgattgcgatccagagactgtccatgacagaggaaaacgcacgggaaatcgcaggacacggcggaatcacaccgcttatagatctctgtaaaacaggggattctgtgtcacaagctgcgtctgcagctgctctgaagaacatgtcagcagtttcagagctgagacaattgcttgcggaagaaggaataattagagtctcgatcgatcttctaaaccatgggatattgttaggatcaagagaacacatggccgagtgtttgcagaatctcactgcagcgagcgacgctctacgtgaagccattgtctcagaaggcggagttccgagtctcttggcttatctcgacggtccgttgccgcaacaaccggcggtaacggcactgagaaatctaatcccgtcggtgaatccagagatatgggtggctctcaatttgcttccacgattgaggcatgtactcaagtcaggatctttaggcgcgcaacaagcagcagcatcggctatttgccgtttcgcttgctcgccggagacgaaaaggctagtgggagaatccggttgcatcccggagatcgtgaaacttctggaatcgaagtcaaacggatgtcgagaagcggcggctcaggcgatcgctggattggtagcggaaggaaggattcgacgggaactgaagaaagacgggaagagcgttctgacgaatttggtgatgttattggattcaaaccctggaaacacggcgaagaagtacgccgtggcggggctgttggggatgtcgggaagcgagaagagtaagaaaatgatggtgtcgtacggagcaatagggtatctgaagaagctgtcggagatggaagtaatgggcgccgataagcttctcgagaagcttgaaagaggaaagctaagaagcttctttcaccggtaaaacgaacgatgcggagacattgaagcagccaagataaaaagtgtaatattgtctgatgtaagtttattaaccgttagttaaactttactagtaattaaaaagtgttctttgggct

SEQ ID NO: 158335 - DNA, 2264 bp, Arabidopsis thaliana landsberg
atggctgacgaacagaatctacaaaatggccctgcaaacattggtgctggagatgcaccacgggcccatcatcaaaggaaaggaattgcacctcctgctatccagaacaacaacttcgagattaagagtggtgtcatctcgatgattcaggagaacaaattccatggtctcccaattgaggatccactcgaccacttggatgaatttgataggctctgcaacctaacaaaaatcaatggtgtcagtgaagacggattcaagctccggttgtttccattctccttgggcgacaaagcacacatctgggagaagaatctgccgcatgactcaatcaccacctgggatgattactcagaaatgagatctctggtttttcacagaagactggtgaaagcttctatgaagcatgggagcgtttcaagggctacaccaaccaattctctcatcatggtttcaagaaagcctctctgctcaacactctttacagaggagttttaccacacatcagaatgcttctagataccgccagcaatgggaatttccaaaacaaagatgttgaagaaggctgggaattggttgagaacctagctcaatcagatggtaattcaacgaagactgcgacaggaccatcagtgatcagctgactctgatgacaaacacaggattctttttagcgagcagaatgacaagctggacaggattcttcttagccagcagtatcaagtccaagatggggagggaaaccagttagaagtccaagatggggagggtaaccagttggaagaagtcaacttcaaaggatacaacaacttcaagaccaacaaccccaatctctcctaccgcagcaccaacgttgctaatcctcaggatcaggtgtatcctccacagcaacaacaaggtcagaacaaaccttttgttccctacaaccaaggttttgttcctaagtagcaatttcaggggaactaccagccgcaaccaccacctgggtttgcacctcagcaaaaccaaggtcatgctgctcctaacgctgacatgatacaaatgctacaacagctacttcaagggcaagcctctggctccatggaaatggcaaagaaaatatctgagttacataacaagctggactgtagctacaatgatctcaatgtcaaggtggaaacactgaataccaaagtccgatacttagagggacattctgcatcttcctctgctccaaaacagataagccaacttcaaggaaaagcaattcagaatccaaaagaatatgctcacgctatcaccctgcgtagtggaaaaacacttccaactagagaggaaccaaagacagtcactgaggacagtgaagatcaagatggggaggattttagtctcagtaaagatcgagttgacaaacaagtcgagcagccactcgaccagacactcgagcaaccactcgagcaaccacttgagaagtcactcgaccacgttactcgacctactacttgaccaaccttcccagcaacatcaccaactgctccaaaaccagttactgtcaagaacaaagaaaaggtctttgttcctcctccttacaaacaacagcttccatttcctggccgtcacaagaaagcattggcagataagtatagagctatgtttgccaagaacatcaaggagtttgagttgcggatacctcttgttgacgctctagcactaatcccagactctcacaagtttctgaaagacttgatcgttgagagaattcaagaagtgcaagggatggtggtattgagtcatgaatgcagtgctatcatacagaagaagatcattcctaagaagcttgatgatcccggttcattcactctaccatgctctctaggaccattgacattcaataggtgcctttgtgatttgggagcatatgttagcgttatgcctcgctctacagcttaaagggtagggatcatggaatacaagttctacaacttagatttactcttagctgacgcttctgttgcacatcctcatggtctaatagaaaatctatctgtcaagattggaaatgttgagatacctacagattttgtggtatttgacgtagatgaagaaggcaaggatcccctgatcctaggcagccattcttaggttcagcaggagcagtcatagatgtcaggaatggaaaaattaatctgaaccttgaaaaaggcatcaagatgaagtttgacatcagaaaagattaagggaaatcaacgacaggaggtcagagttttggtattctggacatggat

SEQ ID NO: 158336 - DNA, 635 bp, Arabidopsis thaliana landsberg; identical to SEQ ID NO: 43030

SEQ ID NO: 158337 - DNA, 6081 bp, Arabidopsis thaliana landsberg; identical to SEQ ID NO: 1867
  unsure (1)..(6081): unsure at all n locations

SEQ ID NO: 158338 - DNA, 1066 bp, Arabidopsis thaliana landsberg
aaactaaagttaaacaagaaaagaagtttgagataaaacagagagatatataatgactactactcaagattggatcatgattggtggatatggccctgaaagttacaaccaacagtcatcgtatcaggttcatacatttatatgatttgcaaattttcataactagctagcaaggttcttaactccaaagatgtatgtatttaactgagtctcctctatataaagagagctttgttggaagcggcaaaggacaagatgaccgaggcgatctccgccaacctcgacctagacttgatttcgaatcgcttcattgtagcggatttcggttgtgcaagtggacctaacacttttgtggcagtccaaaacataatagatgccgtggaagagaagtatcttagagaaaccggacaaaacccggaggataacatcgagttccaagtcctcttcaacgacttaagaatcaatgacttcaacactctcttccagacactccctccggggagaagatactatagcgctggagttcctggttccttcttcgaccgtgttcttcctaaggaaagtttctaacataggagtcatgagttacacattccacttcacctcgaaaatacccaaagcgatcatggaccgcgactctcccttgtggaacaaagacatgcagtgcatcgcgttcaaccaagcggtaaagaatgcgtgtcttgatcaatactctatcgacaccaagaatctatggatgctagagctgaagagctcgtgcccggaggattgatgttgcttttaggattgtgtcttagagacgaagttaattaagatgtccgagacccctaaaggaatcgtaatggactttatcggagaacctcttagtgatcttgctcaaacggtacataatttgaaatttaaagattacctacaattctataattaagtactaactaacattatcttttttttaatagagtttttattaaaaatagggtaaaatcgaccaaggcaagctggactctttcaaaacctcattttactttgcagaactcggcgagattaggcaaatcattaggagaat

SEQ ID NO: 158339 - DNA, 1001 bp, Arabidopsis thaliana landsberg
cataacattctaacttaatcaaaaacgtttttttttcttttcttgtaaccaaaaaaattaagagtgtttgtttttttttatgttggaaaatgaagcaaatatgccatagagatttaaagctagagaacacgttacttgatggaagcgaagcgccacgtgttaaagatttgcgactttggatattcaaaatcaggagttcttcattcgcaaccaaagacaacagtaggaacacctgcttacattgcacctgaagtgctctccacgaaagagtatgacggcaaaatcgctgatgtttggtcttgtggagtcactttgtatgttatgcttgttggtgcttatccttttgaagatccttctgatcctaaagattttcggaagacgatcggtcggattctcaaagctcagtatgctattcctgattatgttcgagtttcggatgaatgcagacatcttctctctcggatattcgttgccaaccctgaaaaggtaaacaatgttctctttcgatttcgacttttagatttttattctaattaagatttgattgtaacagagaataacaatagaggagataaagaatcattcttggtttctcaagaacttgccgtagagatgtatgaaggatcattgatgatgaatggtccatcgactcagacagtagaagagatagtgtggatcattgaagaagctcggaaacctatcaccgtagctactggactcgcaggtgctggtggctctggtggaagcagtaatggtgccattggaagtagcagtatggatctcgatgacttggacacagatttcgacgacatcgataccgctgatctcctttcccctttgtgaacaattgtatcaaaaaccaaagatttcatgtttctgaagcctgctgatactactacacattgatgatacacagacgtgaatataattgttcactaaaaaggtataattagagtgtgaaaacatttgtctttgattacaaaaatgttatctgttagaca

SEQ ID NO: 158340 - DNA, 2984 bp, Arabidopsis thaliana landsberg
gattcttttatcggttgttttttgtggttgccagtcccgaggctggttttggagtacgtgacatcgtaccagatcgccctctcgcagatcacgatgcggtccttgagacatctgctcgagattttgattcggagttatgaatccgaaactgacattgcgcttgctcatctgagaaatcttcttgagatccggcgggttcccaaatccgaggtggatcggtattacatctctcctgctaagggtaggaaagttattgatgggttcccgagcaaggatgagccgtataccgatcacttcttctttgtagcgctcgaagatgttgttcacgaagacctccttgggtcggtcctgacgagatggagaattttgggtagttgtagctaacaatttatttgtgcctgttgcggatatatagtttctttttcttactgtagttttcctttgttgcagaacgcaccctaaagttcctcgagccgattccagacgactttctttcggcttttcacgcgttatcggctcgaaagtgcgattagctgaagcatttctctcgggagcgagttgaacgtgcgcttcgtcttcttcacggcgtttcttgtcctactagctctgagtcttccgaccatcgcactcaatttttcgtagatatgcaatcgacgaagcttactttgcgggaggtctacgccaagaagaaagaggataaggagaggcgattggcggaggagaggcgccttgttaatgcgggattgatctcgccgcgggccgatcctgaggcgacccaagatgggaatgttattcccgatgctgccgcgccggttgatgcggggttgatcttgccgcgggctgctcctaaggcgtcccgagatgggaacattattcccgatactgccgtgccggttgacgcggcacccgctgaggctcagggaactaagccgtctattggtgcgcccgaggcggttgtggtgttacctgtaagtgacaaagtggcgggtaagcgcgttcgggttgacgatgaatcgtcaaagaagaagaagaagaaaaagaagacatctggctccgaggcggagaaaatactcccgatcttcgaagatcgtactgcctcggccaatctgctcgggggatgtgttggccccttgcttcctcctccagatactcttcttgaatctcggaagtatgccgagacggcatctcattttctgcgggtatgagctttgttacttgtaacttgttttggtgttgtcattgtaaatctaacttttcccatttccaggttgtcgcttcgatgaaccggatggtacattcgtatgattcggctatgcggagcaacatggaggtggctggtaagttagccgaggcggagtctcggattcaggccatcgagcgagagaaaaacgaggcactctccaaagatgccgcagcgaagctggaaaggaaggaggttgagaggatggcctttgtccgtctgtcttaagcggttgttatccgaggagagagggcttcgtgacagcgaggtggctcgggccattcagacgacgaggtgggaggtttccgagaccttcattgccaaaataaggaccgccgagcacaaagtatcgctccttgatgaggtcaatgaccgattcatgtacttgtctcaagcgcgagccaacgcgcagctgatcgaggcgctcgaaggtggcggagttctggagagagagagggagcaggtcgatgagtggttaaaagatttcgctgatgctgaggttaatcttaatcgcttcatggccgagctgaaagatgatctcaaagctccagctcccgagtccgctcctctgagtccgggtggtcataggtcggtcgagtcattaaccgacgaggcgggaattacagagcaagctggatcgctcctccctgccaaggataaccgcccatctgaagatctcgattatggacctgaggcggtttttgttttcctcttctctttctgctcgattataatacttatgcttggatggctttatccgatggtatgtagaacctgtgcctggacggctttatccaatttaagtcactttttgaaatccaaaagttatggtttattagtcccgaatcgttttgaaatccaaaagttatggacgattataatatctcggttgcgatccgatcgtattcatttctcggccagcgtttaggaacgagctgggataccggtgttaaaagtataaccgggtttctgaagataaaaatttcttatcagaaataatctgataagtttcacctcgtatttgtatagcgcgctatagccgaataggcgtaatggatactccgagccgtcgctcattgtattagccgagtaaaaagttgcaaagaatttttattcatgtttcggttcaaaaacctacaagataatagaaatgggagtatgaatatacggacccactcccccttttttaatgggggggggtagctgaactcgtccgaagacgagctgcctacgtacccttttcagggatcaagccacctcgtagttcaagtttagtcacctcggatttagttgtagtatttccttaggtgcattgcgttccatgatcttggaacggcttatgccgcttaagttggcgagctcatatactccgggtcggatgacttagagattaagtatggcccttcccagttcgtcccgagcttcccggcgtttggctcgacggtattttgaaaaactttccggagaactcgatctccttcatggaatcttcgttgtcggacgtgtgagttgtaatgccgagccgtttcattctgatagttttgtatgcgaaccaatgctgaatctcttcgttcatcgagcagatcgagtttgtcgaggagcctctgagtattatcggggttgttctcgggagatagactccgacgtaggcttggtactatcatttcggctggaattacgcattccgttccgtagactaagacgaaagggttttttcctgtgcaatggttcaaactttgaataa

SEQ ID NO: 158341 - DNA, 487 bp, Arabidopsis thaliana landsberg
atgatcaggtgtgttgtgttgcaccataccttgcgtgttcttgagatgaaaatatctaaagagtgggggcaaggtaaggtaattttacgagatgtcggcatgtaagctgaagccgtacgatttatataccaaacaaataaacggtgcagatctcgtagttgacttggtagcgccaaaaataaaaagccgtggattgctcttttaattggatctctgtgctaccgactactttcagtgttctcttcttctccactaattcagatcacattcaagaatcttcttcactcacatctctgaaaaaatggcgagcaacatggaagttttctgcgagatcttaatcgcgatccttcttccacctcttggagtttgtctcaaacgtggctgttgcactgtaagttattggaattttggaatcatgaatcttgagatttagtttagaaaatctgactcttagtttttttgcaggtagagttcatgctctaaagcg

SEQ ID NO: 158342 - DNA, 345 bp, Arabidopsis thaliana landsberg
acaggggcaagagtgagaatagtatgcaaagacagagtgacactaaaatcggagttggttggggtggcggtgacgggacctgatgggaaatacaaagtcgccgtcagaggagaccgacaggaccagcaatgtctggcggagcttgttcacagtccactgtcccgctgccaagaggctgatcctggcagaagcaccgctaccgtgatcctcacgcgctccaacggagccgcctctactcgtcactacgccaacgccatgggtttcttcagggacgaaccgctccgtggctgcgccgctctccgcaaacgctacctcgcagacggcgataaccgggctatttgagtc

SEQ ID NO: 158343 - DNA, 1249 bp, Arabidopsis thaliana landsberg
tgagcaggactcagaagttaagaaaacgttctatagtcgtgacatcactaaaaaggttaagtataacactaatttcgatctctatagctctcaagctgcgaattggagagatactttaactatggttatggctcctgatgttccacaagcaggggacttacccgtgatttgtcggtatggttgttttcttctttttgttaaattatattcaaagaaaaaataaacttttttacattttagtgcaaactttttgtgggcaaagtattaagtcctgtgtaattttaattttacctatttgtgggaatagtatgaatggtataatacagcggaattcatatttacaacgtgaaaatgaataccattcatcaccataatgatttgcttttttagctaaatccataatgataccctcatgttattatgttatgttgaaaatcttggttggtgtgatttgctttttaagctaaattcatttacaaaatttcgagtttggaggtttgttcgatttcgaggtgagaaatttcggtctggttcggttataagaaactttccaactaataacgaactctggtggtgaatatttcagagaaatcatgttggagtactccaagcgaatgatgaagttaggggagctaatctttgagcttttatcagaagctcttggtttaaaacctaaccaccttaaagagctaaattgcgcaaagagtttgtcgttgctctcccattactacccgccttgtccagagcctgaccgaacctttggtatcagttcacatacagatatctcttttatcactattcttcttcaagaccacattggaggacttcaagttctccatgatggttactggatcgatgttcctcctaatcccgaagctctaatcgttaaccttggagatcttttacaggcaaatattttttaagaaacttgatacaccaattgaatcttgcatatcttgacaaatctcaaaacgttttttttaatgattgcttgcagcttataacaaacgataagtttgtaagtgtggagcacagggttttggcaaatagaggcgaagaacctcgcatttcaagcgcatctttcttcatgcacaccataccaaatgagcaagtatatggacctatgaaagagcttctatctaaacaaaaccttcccaagtatagagacactaccgtcactgagtacacgagtcattacatggcaagaggactttatggaaattctgtgttgcttgatttcaagatctga

SEQ ID NO: 158344 - DNA, 4010 bp, Arabidopsis thaliana landsberg
gccctcgcagaatggaaaccagcggagcttaaatcagtcttcactgtcaccattgatctttgttgggctgcagagcctatcgaattcatcaaggtggtcgagtggatcctctattggcagaccatggaatttgttcccctgaatcatcgagatgagaccactcttaatctcgaagttgttgttctggatagcaggaggtgcaattcctttcccctgacggtgatcacgtggtgcatcccagcaccaatgttggcagggccattttgttgattatgttcgtcagccatatcgagtggttgctggggtatagggttgactgtgtttctcctttctctgagaacaaaagctatgcggtcgatgttgtcgttgaaaaggaggttctgattcccttgtgaccgtgtatgcatgcaacaggtagcaacctacctataagtgacaaataaagttggttgctaagtacctgaaatacaaagtctgaaaagacacaatgttagtatctcttataacaaaaacgaacttgatctgaacaattttgaaatctcaaatatagcaaacaagcacccagttggcaacggcgccaaattgataataggttcttgctcaattatcctaaaacactaatcctgtcgttgtagtattttaggtgtcaatccaaatgggtgtgatgcagacagatgagatatgatcagaagtttctaagtcaagccaggcagaatttggttggttttctaacagtcctagtgttgatgaagaaaatagtaaaaagtgatagaaatgactgatatactcgatcggagggtcgactgccagaagggaccatcttatggttgtatgacttcaaacagttgtatgacttccaaggtccagatgggtactgctcagacatatcaagaggcatctcattagatgagtgtaaggtcacggggcttaagtcacaggattatcacgtgttaatgcaactacttctgcatattgctcttagagggttgctacctaaaggtcctagggttgcaatcaggcgcttatgtacgttcttcaaccacttgtgtcaacgagtaattgatatggagcaacttttggaactagaaactgagatcgttgaaactctttgcctgtttgaaaggtttttcccaccaagcttctttgatataatggaggatttgacagtacatttaggcagagaagctcggttaggtggaccagtcattttagatggatgtatccgtttgaaagatttatgaaagttctgaaggattttgttatctagctgaagaatgcatacagtttttagtgaatttttgaagaagacaacaaatgttcaggaaagtgttgatagaattacttagtatgagagcaactttatacttgaggggcctccaatctcagcaggctcttatattaatcttactgaaatggagacaaaaatagcccatatggttgtcatccagaatatggcagtctttgaatcttatgttgagtaagttccagtcagcatgttcattttacttagctatatatattttacttatccatatggctgtctctaactacttcttatttctccttgtattagtgagcacctggaacatctacaagactcaaatgtaagatgcagacgtgatgcatcactgttatggagtatgcacactcagaattttgcttcatggcttaaaaaacaggcatgtttatctctcacacttgacacttgaacactatactttatcagtaagcatataggtgtctgacattttctttttaaatttgttagatacctcttgattcaaacagacatgaagaaacacttaaatggttagcttatggtccacgtagttgtgcaaggacatatactggttatatagtgaatgggcagcgatttcatacaagaacagtggataaaaaaaactctgaacagtggtgtgtactatgaggcaactgctatctgtaggtctagagcaaaagacacatctcaagtggtcgatttggtttcatactatggctgtattactgatattatcttgctggattataatgtcttttacgttccattgttccggtgcaactgggcagtaaaaggcaatggagtgaagcaagaggatggttttacacttgtaaacctgaatcatagtcaagtctcatttttgaggggtccgtacatactagcctctcaagcaaaacaggttttttacctaagagaagatggctcgtcaccttggtatgttgcattgagaggttcttcaagaagattcagtcagaaagagtttgtagattcagttgcagcgattggcacattgccaccaaatgttgacatagacgctgacttggtatgaagctgagaatgagaggactgattgtgaaggaatttatgtttgtgaaatgtagtttttttttttttcattttcattccttgttgcattctctatgtttgatgtctgttttccatagtgtgttcaatgtcttatttgcatacagtgtacttaacccgttactctttcatttttttcatgtgatttaagatgggacaacagaagaaaaagcgaggtaaaagtaataaaaaaggtcaattcaaagaatgccaatgatgaggtcgagtatattggaacaattgaaccacaagtcaatgatgaggaacatgcagaaccagatgaagttcaagtatcagatgcaaatcaagtagcagatccagatcacttggttgatggagatcaggtgaatgatgaagatcatttggaaccagatcaagtagcagatccggatcaggtggttgatggagatctggataaggtcaatgaggaagagcctcacggagagcttgttttatctgttgttgatgattgtgttgagccaaagcgtaagcgacatcgaggaccaactatcctgaaggatattgccaaggatccaaatgccagagtaagagtagagttcactaacatgggagagcctattggtaaaggctcagttaagctggcatcatatgtaggggcattggtaatagaacacgttccagtcacaattgaacgttggactaagattggttaagaactcaggacagttctctggaagtctgttcaggtaagatttgtgtaaaatttacaagtttattagatattgatgagtacttgactgttttgtttttgatggcaggcaaggtttgaactagatgaagagtaccaaaaggttacagtgcttaggcagatgggatatttgtggaggtcctggaaatcatggcaagttacaaagattagagaagctaagactaaccacgagaggatgaacatgcgacctaaaaacatttctccttttgattggcgtaaatttgtgaagctcaaaactagccaagaatttaaggtatgcatttggaatttgtaaatttatctatatacattagaaattaacgttcatctgttaggttataagcgatagctacaaggaaagaaggcgcaatcagattccacatacttgtagtcgcaggggaatggttagacttgccgaagacatggtaacagttgtacacacttatattgttcatattgctcaccctttttccaaagtccaaacacttatgtattaaatgagatcattttttttgtttagaaaactgctagtgcagacccatctgaagtgacaaggctaaaggtttgggttaagtcacgtactaagaaggatggtacaccactgaatacgaatgttgctgaaaagattgtgagttattttgttttgtttgatttgcattttgtcattttgaatcacacgatattttaaaatgtatcttatgaatttcagaaaaaggcagaagagattgttaacagtgataatccatcaacaaatgaagcacaagattcattaagccaactgttagggcctgacagtcctggtagactgagagcaatgggtcgcaatatgaataagaccaagttatcttgtttccaagtgaagcacaagtgtatcgctgaaatgcaagagaatcagcttcatctacaaaagaaggtcaatgagctacaagaagtaattga

SEQ ID NO: 158345 - DNA, 1017 bp, Arabidopsis thaliana landsberg; identical to SEQ ID NO: 50610

SEQ ID NO: 158346 - DNA, 1037 bp, Arabidopsis thaliana landsberg; identical to SEQ ID NO: 31390

SEQ ID NO: 158347 - DNA, 699 bp, Arabidopsis thaliana landsberg
gttcttgtattggtttggatcggtatacttagttaattacgtaattaaatagatcggcgtcaagaagaaaaatgatcatgtgcagccgaggccattggagaccagctgaagacgagaagctcaaggatcttgtcgaacaatatggtcctcataattggaacgccattgctctcaagcttcctggtcgctctggtaattgatatatatcttatatggtttgtccatatatacaaaactagctagggtttaattttgatactttgatatatatacatatgaattaattgtattggtgatatatgcaggttagagttgtagattgagatggtttaaccaactagacccaaggattaacaagagagccttcacggaggaagaagagtttaggctgttagcagctcatcggatccatggcaacagatggtccatcatctctcgtctctttccaggtcgtaccgataacgctgtcaagaaccattggcacgtcatcatggctcgacggactagagaaagccaaagacaacgtcaacagcctcctccgacgttgtcaagagacgctgaaatgacggtttcgtcctcttgccgctacaatcaaggtaagatcacccatccccaagatgacgacgacgatgtgtcaaatgtaaatacttgtacgacggagctctctctcactccgccttcttcagcggaccagcctcg

SEQ ID NO: 158348 - DNA, 1957 bp, Arabidopsis thaliana landsberg
ttaagtgtccatgtcataaacttattttatgtctacatgtttaggcagccgctcaagtgctatctgcaggaatgataattcatgcatacacggttccttccacatcgtcgtcatcaattcttctgcagccttggttttttgcattgttattcgcaggggccattgacagtctatgtggaatagcatctggagtcgccattgaacgtgattgggttgtattggtatgctttctttgtgatgccatagaatacctgtttttataagaagataaaccgactgaagtaattaatttatcatttggtagttggccggcataaacagaccaatcgctcttgctcaagcaaatgctgttctccacagaatagatctgctttgcgaggtatagtaattttctctatggaatctatgtgctttatgccctttgaacaccagtaattcatcaaatgacataattgtaaccttaaatagatcgctgggacgatgttatttggcattctcctatcaaaatatgaccctgtgacctgcttaaagtttgctgcctcactaatggtgggatctttgccaacaatggtaagtagcaattccctataaacttttggttattcttctttcgtccaagctaaataaaggaaacacaaagctcctgtgttatatgaggctgaactatgtgtaatagagtaattcctatttcttatatttcaagtgtggaattcttttttcttcatcaaaaaggcagtttttctagtttaggagaagtattggagcttaacctagacccagtattattaggtcatttaactagataaatgtgttgtaatcaacattggagtgatgctgttctgcttcagatcctagaagcaattccacttgcgcttttaccaatatatatgggacttcttaccatcttgcacttctaatagaagaaatctgctttcttcagacagctcttatatggctgaccaacaagttctcctctggagttctggaccgtcctaaatgctccttgaacagctgttctgctgaaggacttcgtactaatacggagagtatttgtaaggaaactttttactttatactgcttggataagcatattatatgacttgagcatgtagacatcacaaataccatttgctttgttcatcagttgatgttggcatggaaactatcaagctcggatggaaagaatatattcaacagccagttcttcctgctagcctcgcatatgtccttctctactttaacatcgtcctcaccccgggcagcttgatgactgcatttctaacacaacgatgtacgctacttcaactcggtcccttacttttctttagtgcctggatgaaaaccgtcattaataagtctgagagtatttgtgctattacctattactcttacaaattagtcaccaagctgtcttttttcaacaggtgtgaatccatcagttattggtggtttcagtggattatgcgctgttatgggcgtcgccgcaaccttcttatcagcaaacttggtcaaacgagttggcattttaaaggtgaaatgttttcccgccatttgttatcttgagcttgtattgcgttcaagctgattaatgttattgcgtttgcgttttaaaacgatgcaggcgggtgcagtaggattgtttttccaagcttcactccttgccgttgctgttgctgtgtattgtagctcttctctatcccataaaagcccactcttcttcttcttgtccatgatcgtacgttctttcttcactctctctctcgaccagtaatatgcggttttggtgttgactaaaaggtaacaaacaaatgcaggtattatcaaggctaggtcacatgtcttacggcgttgtgggagctcaaatacttcaaaccggcattccatcatcgaaggctaatctcattggtgcaacggagatctcagtggcaagtctagcttgatcgcttatgctcggag

SEQ ID NO: 158349 - DNA, 1893 bp, Arabidopsis thaliana landsberg
tctgcataaacattctatctgaaacatttcccaacaacttctgtggtctgcatttaatggcctcctatgaaaaatatcattcttttcttaactctcacgtttaacttatgtaactgttcgttaccttggccccatctatcttcactttcgatatgtgcttagactctcaccacgtattttgtctctaaggtcattaaagcagctaacttttttgaagtgtgaggtttttgtattagtcttaagatttcattaggattgttcaagttaaaaaaaggactaaactttatggttttgttgtggatttttgttgtttcagaacattgcaagaaagtgaagaaaaaaaatgcaggaagggactgatccgtatggtgagattgagataagttttggttatcaatgcaataataagaagataggaatccctgaagataaaattgctgatggtcgagaggttcttggtgggtttaggcttcaaaagactagtagtttctcttgtttatcaagagctgctttaagtggaaacccgactttagccaatactaatatctgcaatggagtcattggttctgagatattgccgcctctggattctccgaaatctttcaggaaagttccatcttcccctgcgctttcaaagcttgatatactctctccttctctccatggaagtatggtgagtctaagctgcagctcgtctactagtccgagtcctcctgagcctgaatcttgttacttgacgtcaatgagttctccttcttctgttaatgaagggtttcttctctctgctatggaagttcaagttgcgggtggtgctgcaggggaagatagagttcaagctgtttgctctgaggagaatggttggttgttttgcgctatctatgatggattcaatggaagagatgctgctgatttcttggcatgtactttatatgagtccattgtgtttcatcttcagttgcttgatcgtcaaatgaagcaaacaaagtccgatgatgatggcgaaaagttggaattgttatcaaatataagtaatgtagattactcttccactgatttgttcaggcaaggagtactagattgcttgaaccgtgcgctttttcaggcggaaaccgatttcctaaggatggttgagcaagaaatggaagaaagaccggatttagtatccgttggatcttgtgttttggtcactctcctggttgggaaggatctatacgtccttaatcttggtgatagcagagccgttctagcgacctacaatggtaataagaagctgcaagctgttcagctcacagaggatcatacagttgataacgaagtcgaagaagctagactcttaagtgagcatcttgatgatcctaagatcgttattggtgggaaaatcaaaggaaagcttaaagttactcgtgctctcggagttggttacttgaagaaggtattagtattattcttttaagttatgagttttatacttgaaagaaaaagtatcaagtagctcttctctattaacttgcaggagaaactaaatgatgcactcatggggatcctccgcgttcgtaaccttttgagcccgccttatgtttcagtggaaccatcgatgagagttcacaagataacggaatcagatcactttgttatagttgcaagcgatggtttgtttgatttcttcagcaacgaggaagcgattgggctcgtccattccttcgtttctagtaatccttctggtgatccagcaaagtttctgcttgaacgtcttgtagctaaagctgctgctcgtgctggtaagatgcttttttgttaatgtttacttcacaaaatgtgtgcagacttcatgatctactatatgacaaaagaaaacactttgatgtaggctttacctggaagaattgacgaatg

SEQ ID NO: 158350 - DNA, 837 bp, Arabidopsis thaliana landsberg
aaaattcaattctctaatcctttacgttccgtcaccgccgggattcaccgtcgccggtgagttttttattttgtttcttcccaccttataatcgccgtcttgaatcttcaatttcgtttttttgtctaatttcgagctcgattttgacgattcgttttgtttgtgatctgattttgagttgtttctccattacgcttggattttgacgttttaaatctcaaaaggaagtacgatcatggaggaaggttgcaactttgtttactcaaggatggcctcaaaattcagcattggtttattgattattttggcgatcgttcttctaatggttcgtgtactgtatgttatataccgatgtggcaaaccacttccaaaaggagcttcacagtcttttactactcatattgttcttggttctggtaagaagagttaatgcagtgtcttcttcaattgcctctcagtaatgtcgtgcatattatgatatgttattgtggggttttttttaatcgccagggggacacacagcagagatgctcagtctcctctctgttttgcgaaaggatagatttacaccgaggtttcacattgtggctggtacagataacatgagtctccagaaagctcgtagttttgaagattctctagctgagaaggtttagttaaaaatccttgatttcacgttcgtctgagagttgtccctcctctttcaattttggtattgcttattccttatttcttgtgtgtttccggcttgggagcactgtggcatagccccctgttaagttagcatcatcgcagttcatgaaaattaactggagtcgtagagttggtcagtcttat

SEQ ID NO: 158351 - DNA, 340 bp, Arabidopsis thaliana landsberg
tctgaactgagccgtagcatcctgaaaataagaatcaaaatccaatttgatcttcaaagtagtgcagtaactagtcaagcaatcgaaattctctgacgatgttgttacaaccccaaagatcctcttatcgattatcgtaattcgtagaaaacgaagcagagagaaaatgggaggcgaagatgataaagataagaaatggaatcctccaccaccgcagcagaagccggactcaaggccttgggaagtcctcgcggcttttgtaatctgcgcaaccgctactactttcgccgtgagtcaaaattcattagttttgttttcgttcatatctcgaaattgtgtt

SEQ ID NO: 158352 - DNA, 695 bp, Arabidopsis thaliana landsberg
tgaactcatatatagtaaatcaaggtatgacaatttatgatattgttggtgttttatagagaagtgttttctatgagatacaacctttggtcatagagaacgtaagagaaatgctactgaaaaataggtttcctggttgcatcaaagtggcagacttgggttgttctactggacaaaacacggtgttggccatgtccgcaatcgcttacacgatcatggagtcataccaacaaatgagtaaaaacccaccagaaatcgattgttatttgaacgatcttccagagaacgatttcaataccaccttcaagatgtttcattctttccaagagaagctgaaaccggaggttaaaggaaagtgctttgtctcgggcgtcccgggttctttttactcaaggctattcccaagaaagtctctccattttgttcattcagcttttagtatccattggctttctagaattccagatggccttgagagcaatacgaaaagcattcatattaaatatccgtacccttcaaatatctacgagagctacttaaatcagttcaagaatgatttttcgtcgttcttaaaaatgcgttcggaagaaatagtgcataatggacacatggttctaacgttagtgggaagaaaggtttccaaaactttatccaaagattgtttccaagtttggtcgttgttatccgattgcctc

SEQ ID NO: 158353 - DNA, 2016 bp, Arabidopsis thaliana landsberg
  unsure (1)..(2016): unsure at all n locations
gagtagcggtggcttgaaggttactgaagctagacagctcttcaagctatagcggctgatactgatgggtttttggaggtattcgctagttcaatttcatgcccattaactcaaattgagatgctttgaggagagtctgatataaagtattgatctttattaagtaggaaagtaacaatacattagaaatttgaatagctgtcatgagaatagtgtattgatttgaggagattttgatagaaagtattgatctttacgcgattcatgtttcgttttagatgtgtgaagttgctaaaatcaatgaaatgttttcttcattcaggtgtcggatgaaggtgatgtgctttatgttttcccaagggactatcgaactaagttggctgccaagtcgttaaggatacaaattgaaccatttcttgaaaaggcaaaggtagtattttttttctgttaaaatttattgatttccttttaacagtgaattgctctgaatttgaatgttctgagctctattatgtgtctcgcagggtgctgtagatcatctggctcgtgtttcctttggcacggcgcttatagcgtctatcgttattgtctacacgtcaattatagccctgctttcaagcaaaaggtatgtgtttgccttgaccgcaattaagtctgcttgttatcaacagatattatcattctgatcaatgaacttgattcggattttgcactaaccttttttggattttgctaaaagcgaggatgataatcgacaaagaaaacacgggcgcacttatgattcatgattcaatatctatatcaaccctgtcgatctgctttggtaattttaatttcatgatgtcaaaggctcctactctcaaccaatagagaggatcagtaattgatttaacagaacctcgtagtcatattctagtgtttttatgtaaggtactgggatcccaattattacaacaggcgacgagctcgagaagatgaaggaaagggaatgaatttcattgaatctgtaagtagagtttgaacttaagagagttttcatgctttgctaaatgtttcttcttttgctgcttatgagtgataatggcttgaaataagtgagggttcatctctaggttttctcgtttgtatttggagatggagacccaaatcaaggaatcgaagaagagagatggcagatggtaatgtgctggacttgaatttacttatgttttctatatccgtttcaggttactattcgataatgttttattttatttttcaataaaagactactttcgacatatcaaaaggaaatgtagtaaaatgcttttttaaatcttcttttaaaggttatgagtttaaaggtacatcacgctcatataatgaaatattagtaatttactcgtttttgatacttattctcagattgggcagtatataacatctagaggaggtgttgttgccgctgatgaacttgctccataccttgatgtgccatcttcaaagagtgctatggtatgttttgcttattgtttcttgcaaannnnnnnnnnnnnnnnnnnnnnnntatgctgctatctatctttgtatttgtcctttgtactcctttacctcttgcgctagttgtatcactaaataatgtgaaagacataccgttcagcttcacaagttttcttttttgatgtttacagaacgatgaatcctacattctacctgttcttcttcggtttgatggtcaacctgagttggatgaagaggtatacaaatcctctttctggtgtcttgaaatgtgatgcccaaatgtgcatgatctgcagggttttcattggccatttttattaacaattttttcatgttgcttagggaaatattttgtatcgttttccgtccctgcaacgtacagcttctggatctagtagacgaaaagaatatgtgggaaaatggtttgactgggttgcagatatggagaaattcttaaggagaaaaaatggcaatttaggttcttatcgttgcttgctcctggaatttaatatctta

SEQ ID NO: 158354 - DNA, 1200 bp, Arabidopsis thaliana landsberg
cttctttaatttggattgaattttgccagtggcgaggtattcagtttcgcatggacgtactcgggtgagcttcggagcagacggagctggtttgttgtcgtactcttcagggacacaccggaaaggtgactcaaagtttgcatctttatccttcaagcatgcttctttgtggagtgttttctagcctgtgataaaaagcttccattttggggttgtatctagtttgttatttagttggtggtgtttataagatgttaccagttatcatgtatgaggatttgcataagatcctacggaaatgtagagacaggagagttgattgtgaatgttagcttgttgttgatttaacatgtgggatttgcaggtttattcattagattggacaccggagaggaaccggattgtcagtgcatctcaagatgggagattaatcgtgtggaatgctctaacgagtcagaaaactcatgctattaaactcccttgtgcatgggttatgacatgtgctttctctccaaatggtcagtcggttgcgtgtggtggattagacagtgtatgttctatctttagccttagctcaacggcggacaaggatggaactgttccggtttcaagaatgctcactggtcacaggggatatgtttcgtgctgtcagtatgtcccaaatgaggatgcccaccttatcaccagttcaggtgatcaaacttgtatcttatgggatgtaactactggtctcaaaacttctgtttttggcgtgaatttcagtctggacatactgctgatgtactaaggtatggatattgctttcatctccttggctcattggcatcagtttgtttgataaagtagaatatatttgaaaaactacttaatcttccagaaccataccatttggatcgagtgttggaatcaacatataggtttggtcttattgaatagatacgtttatttgacttgtgtataaaagctagcatggatgatatattgcaagtcagttaaactcgccctcttacttggtgattattccccattcttgcagcgtctcaatcagtggatcaaacccaaactggtttatatctggttcatgcgattccacagcacggttgtgggacactcgtgctgcaagccgagcagtgcgtacctttcatggtcacgagggagatgttaatacggtcaagttctttccggatgggtatagatttg

SEQ ID NO: 158355 - DNA, 512 bp, Arabidopsis thaliana landsberg; identical to SEQ ID NO: 4847

SEQ ID NO: 158356 - DNA, 1932 bp, Arabidopsis thaliana landsberg
atgagcggacatataggtcaggtaagattgcgaaaataaatgtggttagatcagttggttttgaggataaaatcaacaatttcgttttaatttcagattcctttaaccaaaaaatttcgaggagatacgcgagataagtcgctgctgatgtggacggccgagctggagcgtctcttcagcgcactgcatctgacggtccagatcaggcgcggataatagatttctgcaatcttaaaaatcgtggtgatgatggctttaaataactttccacctctccacttgacgtcacgtcaactcacacaactctcaagataacttctctcctcctttattatttactgcgctttgttttgtagaagtagaaaaatctcgtttttatttttttgctatctccttcgtttctctgctattcccaacttcccgatctgcctcctttgcttttttctttcatctctctcgcccttctccgtcgaaatccaaagatgagcgacttcgaagattctcagaacaagagcaaccacagttacggcgatgattcgagttcatacgagacaaagtcggcggcgtcaccgccgggagtacagagacgcgccataaccctaggcggaatgggtccaattcgtccgccgtcaaccagagccgacaaaccgaaaaagaaaaaggttgccaagcaagggggaggcacgccgatgacgaacggcaacctggtcgacctctggaggagatgccaggttccggtggaggtacatatgatactcccaaggccaccgctgcatcctgagaacgtgccggtcgggtggtgttgcgcttatgccaatttcttcgagaaatacggcctattcttcccaattccggcatgtattctcgagatgctcaactgtctcggcctcgcctatccccagatgtgtccgaacttcgtccgccatgtgctggcgttattcacccgggctcgggaagtaaacagaaaattcagctgccatgacctgcttcagctctgccaggtcaagaccaatgctaggagtgaccaagggacgtactacatcagtgcacgtcccggatctctggtcctcggcggtttgaaagcctgtcgagacaccaattggcgatccaagtatttatttttcagagtagatcgtcattcagttggcaattttgatcccgcgaggataacaaggacctggtctaccaacctgggtcagatggagacctgagcctcttgatttttctttgttgtttgtgttgaatccttgactgcttttgctaatcgttagtactgaaactaattgcttgtttttgatgatttgcagcaaggaccaaggaagttactctcttggagacggaacttgagctgttaacccttctccgacgtggtcagactgactggtccactttaagaagagatcgcatcgtagctgctcttgccgtagctccagcagttcccgtagctccagcagttcctgcaatcgtccctccaacagcacagctagatccgatcgaagaggtcccgcggattgaaccggttctcgaggctgatctgcctataggtacgagtttcgttatattttctttggtttaaaaaatgtacgagttatcgagatagctgagcaactcgaattgctaactaacaaatgtcgtgctctatttgttcagttcctcctgactccagctccacttcagaactcccgctcattagaagaatgaggcgtccaagtcttcgtgttcaacgagccaatgccggagctcttgctcgtgctggtgatctgtcggccgcgatgaccgcggctcaaaacattctagctgtttgcagcgcatctgcctcagcagatcatccctcgcattctgaggtcaacaccgggacctctactgcagcacgtcagtcaggtaacattctggctgctcaagtatctgggccatctgcagttgatcgttctg

SEQ ID NO: 158357 - DNA, 2110 bp, Arabidopsis thaliana landsberg
  unsure (1)..(2110): unsure at all n locations
ctttctttgcttatctaacaaaccaacttcagcgacaagataacaaaacgctttcacacgatcggataaaatggcggagaagagctttaagtacatcatcctcggcggcggcgtctctgccgtgagtatcttccttcctccttaagttttttcagccattgctttcgattttcgaagagcttgattcgatttgtgttgcgaaatgccacaattctcgtagtttttttggcttggagtttgttattgttaatcagatagcgattacgatgattatagattgtgattcatagatttaaacgtcagatcggcggctctgcttctactttctagtatcgttgagatgaatttacaatcgaaacttgattttgaatcaaacaatcgtatgtggattgattgttttttcgacgtaaaacatggatgtaatctggtttcctctgcacagattcacatcttaaaaacttccgattcagttctagttcttttgttgttgttaagtgtgagaaaagtgtatctctgcaaaatcacttgcagatggttaatagtaagcatagtatcatcaggatcctctttactttatactagctcagattaatcgtatagtcacagatgttaatgaagaaaattccaaagaaataactaaatacagaagcaaattcaactcttaacctttgttgtatccttttttccatttttgtgtgtagggatacgcagctaaggagtttgccaatcaaggggttcaaccaggagaattggctgttatctcgaaagaggcggtaagcttcctctcgatttggaaaactgtgattatgcagtgtgtcttgtaacctatgatatgatgatccttatgtggacttgtcttctctaatcctcacaccttatttactctatatggtggcttaggtggctccatatgaacgccctgcacttagcaaggggtatttgtttcctgaaggtaagacaattttctactttacttagctaactacaacgtttaattttgatttgctgaaacttggctttggtttttgctttttatgataatctttttttgttgcaggggctgctagactaccaggtttccattgctgtgttggtagtggtggagaaaaactgcttcctgaatcctacaagcagaaaggtaatgaactgtctgcaacatcaccaatatcaatgccctgctcatctgtgtagtcccactgatctattataacattacattactctctatacaagcttaattacttatgttattggaactaaatcgtgctatgatttttttgttatccattgtgtttgtaggaattgagttgatactaagcacagaaatagtgaaagctgatctctctgccaagagtcttgtcagtgcaactggggatgtcttcaagtatcagacgctcataattgcaactggttctactgtaaagactgatatacttgcatttctcacatcagaatgcttcttatgaattctattacaagaagaaagtaactctttaccttcctttgcaggttctcagattgactgattttggagtaaaaggtgcagactctaagaatatcctctatctgagagagattgannnnnnnnnnnnnnnnnnnnnnncaattaaagctaagaaaggtggaaaggctgtagttgttggcgaaggttacattggtcttgagcttagtgcagttttaaggatcaacaatttagatgtcactatggttttccctgaaccttggtgcagtaagttgactagtatccttttgctattcatgtaatatatgacattgttacacgtaatgaaaacaaaatgttgacgcagtgcctaggcttttcaccgccgatattgctgctttctatgagacttactatacaaacaagggagtgaagatcattaaaggaacagtggcatctgggttcacagctcagccaaatggagaggtaatcaaataaacattagctaatagagtgggcaatccaatttaagttttggtttgattttatagaaactaaagtctaaaaccaaattacaatgttatgtttaggttcggtatcgtttgacgaactcgattaattagcttttccaaatggtctcgttgcaaatgtcttacttgtattatatcg

SEQ ID NO: 158358 - DNA, 728 bp, Arabidopsis thaliana landsberg
tatttaagctcactttgtacacatgttacattcaatgaaaacgttactatgacatgttatagatagattcagtgttattttttttggttgagtacacaatttgtaggaagccttgttcaaattacaagatgaaagagatcacagggagtggaatattctctgtgtatgaagaaaatgatgattctgagttagcaagtgctaattccgccacaaacggcaaatcaagaactttccaggtttgtgtctgtctctttcttgagagaattggatacattttgtagtttgttttgatcacttttatgtgtttggattgtttcagcaaccaccagcagcaattgtgagtcacatttcatttggagaagaagagattgttacaccgaaaaagccagcgacggtgccagaagttgcaaagcaacgtgagcttagtggtacattggagtatcaatctgatgctaagcttaacaagcaattctcagatgcgaagtgtaaggaactaagtggtcataacatctttgctccaccacctgagatcaaacttcgtcctactgttcgtgctttggcttataaagacaacttcgacttgggagaatccgataccaaacccgtaaaaacgcctctctaaacttctacttactcatattagtatgtctcagaaacaccaatgcactaattcttgcaggatggggaactaaagacggccaagaagattgcggataggaagtttacag

SEQ ID NO: 158359 - DNA, 1024 bp, Arabidopsis thaliana landsberg; identical to SEQ ID NO: 31978

SEQ ID NO: 158360 - DNA, 1757 bp, Arabidopsis thaliana landsberg
ccaaaaccggcgcgaattcaaaatgggatcataaaccggtgctgatcatagcgcattgtggccgatgactaggccgttttagcaatccgcggggatggtgttttcctacatttcccagtcgggaaaccggaagaccgtaacgctaacgccaaattggtcccacgccttcaacagattccaaagtctcaaaatggtactgtttacgcaaacccgtttacgttgacgtagactgcgatgacgcagtagaggaatctgagacatcggaatccgaatccgacgaagagaacccggtcggaccaaatcgacggtcaggattagacgatcaagaaaaaaagggaacgttagtgaatctcgattcagagaaagagcttgaaatcgaaacgcttctcaaagcatcagcttatattttgggagccaccggttcgagcataatgtataaagcggtgcttcaagacggaacagctgtggcggttcgacgaatagctgaatgcggtttagaccggtttagagatttcgaagctcaggttcgagccgtggctaagttaatacatccaaacctggtacgaattcgcggtttctattggggatccgacgagaaacttgtcatttacgattttgtccctaacggcagcctcgctaacgcccgttaccgtaagtcctttttccgttccctttgatttttaatcaacacgcttacgttagtagggtaatgtaatagttggctaacataagcagaagagtgaaaagtgtcggtttcggagtcagagagttggttccaactaaaaaagtatgtcagttaatgatcggacgagagtcaacggcaagtctcaaaaactgttttttttttttattatcttatcgtaacttcgtaagcttatctcaggcgcaagatagtgacagttctgtttcagtgaaatctctctgttgagccccatatatagaggttttgtatttttgttattgatagatgcaagtcctttgctttacatttgtctttttgtattgttaagtaacagtgagggatttgctaacgtgtacatgttcgatttcacctaataaacggtcctgtgttttgttttcttttaattgcagggaaagtgggctcctctccttgtcatttaccttgggacgctcggctcaagatagcaaaaggcatagctcgcgggctaacatacgtacacgacaaaaagtacgtgcatggtaacctcaagcctagcaatatccttttgggcttagatatggagcctaaagttgcggatttcggtcttgagaagcttttgattggggacatgagttatagaaccggtggatcggctccaatattcggaagcaagagatccacaacgtctcttgagtttgggccgagtccaagcccaagtccaagttcagtcgggttaccctacaatgctccagaatctcttccacgtactccagccgagattcgaaatgggatgtgtactcgttcggagttattctgcttgagttactaacgggaaagatcgtggtggtcgacgagcttggacaggttaatgggcttgtgattgatgacggtgagcgggcaattcggatggcggactctgctatacgggctgagttagaaggcaaagaagaagctgtgttggcatgtttgaaaatgggcctagcttgtgcgtctccaataccacagagaaggcccaatatcaaagaggctttgcaagttctcgagagattccctgttcattctagtcaacagtaatgataataattaagaccaagaa

SEQ ID NO: 158361 - DNA, 4383 bp, Arabidopsis thaliana landsberg
  unsure (1)..(4383): unsure at all n locations
tgttccccttcacttcattactcaatggacaaaccatttaccctttcctctcaccatttccaactcgcctttactatccttccaaagagaatccgaaggccatcctcctccacccattgaaatcgccaaaccacttttgaaactctctctttcatcatctcattttcacaaactctatatctctcacaaagcttccaaattttcaccccaagctctccctatcactcttcaagaattcgttctccccttcaccaatacttcaccaaagtcactgatcactccaaagtttatcctcaagcattcaatcggtataaagctcaaaatttcataactaaagaaaccaattcccttccactttggtaccgcttcgagagttgttcttgtttgcccagttgaaccttaccaccaatctctatggattcaagaagaaagagttcatctcgagctagaagatcgttcgttgataacgaagaggttgaggcgtttgacatgagtggcatgactgaacgccaaattcgccaagctcgccgtgctcaaagatcaagcttgattcaaggtggaagctcaagccgctcaaccatgcaaagagaagaagtagctcgaggaaagagggtcgttgaagctgaagaagaacaccatgaagaagcaccttttgaagaagcggtttctgaggaagaggttgagatcatcggggatgatacaccaacccctgttgggagaagaaaccggcctaggaggaagagagagccaaccgagcgagtactatcaatatttgaaggagttgaagtttgagggaactagataccctcataaggaaacgatgcaagagcttggtatttgtggtgatgtggaatacttgatggaattggccaatcttgcaacattcatgagctgccaatgtgggggatacaaagaggagagctgccaactctttgcaaccctcaaggttcatttttgtttgggggagggttcaagacatgtttaacattgtgttctcttttcttatttcaaattttgcatcatctaaggcatagaaaaaccataaaaatttgaaaatttttcaaaaaatgatttcataaaaaaagagtgtcatgtagattgcatatcgttttaggattgtatatagagtgtttgcatttaggattgctcatttgcataggggatgatgatgatttcaaaccgttaagcatgttttgattcaatgaagtaagttcaatgcccgggttgttagttctttgttgcataaccgattgtatctctgaagtaagaccttaccctgctttgaatttgtaacttgactatactactttgatcgaaactcgcttacctgacgccattccctatctattagaacctgaactgaatttgaaattatcatgtctatgcattgtttatgaactcatggctaccatatacatacttggatcatcttattcatttcatcaccctctgttaatccaagtagctgtctctcctttttagagcagtttctcataaccttagcctagccttatttcaagccaaagatcatttgtatgtgattgtgaggtctttttcgattgagcttggtataacatgttaggtatgagccgacaagagcagtctttcatgtagacctagtccacactttttgggttagctaggactaggtggagacttgtatttgggattgggaatgtgtatggaatgaatgggaatgagagtgagaatgagaatgaaaagaaaaaaaaaaaaagaaagagagtaagagtttagagttataagggggatacaaaagtgttaagtctagtaaaggatttggaattcaaagaagttaggcattgtgattcaaaaaaaagggtaaaacgccctatgtgctaagattagaagaaaagccttaagtttgtcaaagtataaaaccaaacccgctagactcttaaatcgtttcaaagagaaccccttagacttgaaccaaaaagagagaaagaatgagaaaaagggtagagttaggacatttatgggaatgggatcatcttctaagctatcatactatatcattgggtagatgagagtctgttcttgtatgtgttcgtaggcttttacctttagcattctactgaagctcaatcttttctctgagagtcccctgttactcgaccaaaccattagagggaacatttttgtctcttagcctaagcccgaaaccnnnnnnnnnnnnnnnnnnnnnnnnnnnnnnnnnnnnnnnnnngcttaatgaatgttaaagggaattggttgatgtgaatgcttgaatagattaaggcaagttgttaggttacattgtgacgagtatggctaacgtttttgagtaaggtctatcatcttgcaacctagaattagctacctggacattgagtttacccattttataggcatgcttcggtttttgaatccccaccttcaaacctctccttcgacttaagattttttgtttgcttgagggcaagcaagagataagtttgggggagttgataacattgtattttactcattttaggtgtgtgtttatcatcatttagctttgcatttgctcattatatcatatcattttgcaccattttagcttattttgcacacttaggcatttaggatcatcttgcatacgcattgcatgttttggtgtgttttcaggtgcagaaggagcttaaaaggaatctacttggtccattcactcgatccaggcagcttttgaagaggttgcagttcactcgaccctcttactcgatccaagcagctacagaggaaggtgggggttactcgaccctcttactcgatccaggcagccttagatgaagcaacagattgatctactcgcccctcctactcgatcctctactagacccatttactcgaccaagggtgactaactctacaagacttgttgagctatcaaagcgtcttcggatcctcttcattccccactcaaccagacatctgagcgtacggataggagaggaagaagcatctactcgaccaattgatcactcggagcatagacacaaaggcgcagactttacagcaccctccttactcgatccccaagatcaagcactcgcccaaaccacctcaagtctcttgtcttctagtgaatctagggttttcaacatttcactataaatagatcactttgggatttgtccaaaggatctagctttaatcctttggtttttctttgtgttcttgaatcttcaaaacttaattactcttcatctatttcatttttgcacttagttcttttagtaaagttgtttagcttgtttagatctacattttgatatgatttcagtaatttctgggtttgtgttcttagttgtgttgcttgagtagtgattagggttcttgaggatggattagattagggtaatctgtaggttagtcaggtggttaagattaggttagagcccttctggattcgcttggcccctatgcaatcgttggctaatgtggacgttcgagcataggcatcgagcgtctaaaagacgttcaaatggatgcctgatgtaacacccgtcccgccatagatgccaaaacggcatgttatttatctaatcttgccaaaccattttctttaaacttctcacacgaacaaaatattgcacataactaactccacacgcttacggtatactagccgacaacctttcattaaaacctcagcttaccgtttttaaaaaatcaacacttgttttctaaccacgtgtatccttccgttgcactattcagatgactgcttaaaagaacatataacttgtccatctccatcgaactctagagcacaagcagtgatcactattagagcccaaagtagaaggattgcgaacaaaacaactacttaggcaaacaagacctccaagctaactatcattcaacatgttcgtacaggctcacatgtgctgaggcacttgaccttggtttccttcccattccttttttttcaatagtttctagggctccttccccatcattgataatttaacatctttacatgtctatgaattagatggtttccatccgtcttaccttaaatgtctctaagctcttattctccgataatactttcttccatttcctttctcgataaccttactctttagcttttcattgctatcttgaacactgattcttacttgacactttttaacaccatactaaagcgaagaaaacatgagaatccaaattacatttcaattatcaaaagaaacgcaattacgtcttcccgaaaagaactaagcagatatgtaaaactcaatcaacaaaagattactcaacgcagtaaagaaatcaatctcaagttcaagcaatacacataattaatcattcaaaatcttttttttttaaattggttctaaaaatctgaccctccgg

SEQ ID NO: 158362 - DNA, 904 bp, Arabidopsis thaliana landsberg; identical to SEQ ID NO: 16950

SEQ ID NO: 158363 - DNA, 783 bp, Arabidopsis thaliana landsberg
tccaaatctaacccacggaaaacatcgtcctacacgacaaaaacggcaaattcgtatggcagagtttcgatcaccccaccgatacactcttcacgggccaatcgttaaaagttaacggagttaacaaactcgttagccgtacatctgattcgaacggctcagatggtccgtacagcatggtgttgaacaccaaaggtttaaccatgtacgttaacaaaaccggtacgccgttagtttacggcggatggccagatcacgatttccgcggcaccgtcactttcgccgttacaagagaattcgataatttaacggagccgtcagcttacgagcttctcttagaaccggcaccacaaccgggtaataaccgccggttactccaagtcagaccaatcggaagcggaggaggaactttaaatctgaacaaaatcaattacaacggaacgatttcgtatcttagactcggatctgacgggagtctcaaggcttactcgtatttcccagcagctacgtatctcaaatgggaagagagtttctcattcttctccacttacttcgtccgtcaatgtggcttaccctcgttttgcggcgattacggttactgcgatcgtgggatgtgcaacgcgtgtcctacaccaaaaggattactcggatggagtaataaatgcgcaccacctaaaacgacacagttttgcagtggacccaagggtaaccccgtcacctattataagatagtcggtgttggcattaaactgggccttatgttaatgatggcaagcccacttc

SEQ ID NO: 158364 - DNA, 3350 bp, Arabidopsis thaliana landsberg
tcatatcattttgcatcacatttaacttattttgcatacatattgcatgttttggtgtgttttcatgtgtagaaggagcttacaaggatttctacttgaccctctactctatcaaaccaggagagaagcagcagaacaatctactcgaccagttcactcgatccaggcagccatagaggaggcatcaattcactcgacccacttactcgatccaagtagccacagaggaagtagcagatcggtctactcgcccctcttactcgatcctctactcgaccaagggcgaccaaatctactagactttttgatctatcaaagcgtcttcggatcctcctcattctccactcaaccagacatctgagcatacagataggagaggaagaaacatctactcgaccaattgatcactcggagcatggacacaaaggcgcagactttgcagcaccctctttactcgatccccaagatcgagcactcgcccaaactgcctcacgtctcttgtcttctagtgaatctagggttttcaagatttcactttgggatttgtccaaaagatctagcttttatcctttagtttttctttgtgttcttgaatcttcaaaacttaattactcttaatctatttcgtttttgcacttagttcttttagtaaagttgtttagcttgtttagatctacattttgatatgatttcagtaatttctgggtttgtgttcttgagaatgttgcttgagtagtgattagggttcttgaggatgaattagattagggtaatctctaggttagccaggcggttaagattaggttagatcccttctggattcgctggctaatgtggagattcgatcatagacgtccagcgtccaaaagacgttcacatgaatgtctgatctacgaattccagagatttgtagacttgaccaagacattgtcttgtcttcttattggctttggtagattgtttcttaaaccctgctctgctatgtttcatcatcgacagttgagattaggaagtggtagagttatgggggtctctgtcaccagagtggattgacccggttttgattctatcgtctagggtttctgcctttcacctgttagccacctgatgaaccctagagttgcccttatcaatgaatccatccttaggacttctattcttgttagatttatttgtattcaccccctgattgcacttttatttacctgttatttgtatcccctgttgattgtattttagttcttaattttgtcacatgttggttctactcgacccaatgatcgagtagggctcttaagttcacatttttacctgtttgaattctgacctatgattgttactagaaacccaccatctctataatctggcttgacttagttgcttatgtacacatcttgattgctagcaataacagtggactggattgacaccccctatagctgcatcgacatgttagtgtttaaggggaattgaactgaacctcacttcagcaaataagtaggcctaaaaaaaaactacttatcaatttggcgccgttgccaattcattgttgcattgttacattcaagatcacagaaaaagttaagatcaagttcttttacatttatcaagttactaactcatcatttcgtctgcttgtttttgtggtataggtactaatgtttgtgcatgcaaactcgatccaaaggttttgcacacctactaccattcaaagacagaatagacagaatagctcgtgagttacaagaagccaaagcaaaggcagcctgtgatcagcaaagatcaactgctatggatcaacagaacaaactagttgatgttcaagacccacctaatgttgatcaaccaagaaacatttgtgctggtgaagccccaagaaatcatcaccaaagacaaggaatagtgcctccaccagttcagaacaacaactttgagatcaagattggactcatctccatgatccaaggaaacaagtttcatggtctacctatggaagatcccctggaccatcttgacagctttgataggctctgtggcctaactaagatcaatggtgtcactgaagatatgtttaagctcagactattttccttctctttgggagacaaggcacaccactgggaaaagactctacccccagactccatcacctcctgggatgattgtaagaaagcttttcttgccaagatcttctctaatgctcgcacatctagattgaggaacgagatctcaggcttcacacagaaaaacaatgaaactttatgtgaagcttgggaaaagtttaaaagctacaccactcagtgcccccatcacggtttcaagaaggcttcattattgagcacactctgtagaggagctttatcaaacattagaatgcttctggacgctgcctcaaatggaaactttctgagcaaggatgtagcagacggatgggagttggtcgaaaatgtagcacaatctgatgggtgctacaatgaagactatgatcgctcagtaagaggaactggaggaacagaggataaacagagcaaggatatcaaggctctgaatgaaaagctagacaagctattgctcgctcagaagaagcagatacactacatcactgatgaagagcacttccaaatgcaagaaagggggaatgatcaaactgaagagctgtgctacatccagaaccaaggagggttcaacaagggctacaacaactacaagcccaacccaaacctttcctacacaagcactaatgtagctaacccccaagatcaagtgtatccaccacaacagaactagtctaagccttttgttcagtacaaccaaggttatgtccctaaacaacagtttaatggaggctaccaacagcagaatccaccaccagggttcactcaacaaccacaacaagcccccgcaactcaagatcctgaaattaagcaactcattcaatagatcattcaaggacaagctactagagctatggcttttgacaagaagataactgaattacacaagaagatcgattgttcgtacaacgatctaaatatcaagtttgaagctctgaattctacaatcaagtatgtggagagtcaatttgcatcaacctctgcgccgaagcatccgttgcaatttccagggaaatcagttcagaatcgtaaggactatgctactgctaatgttatcaccatccgccaagaagatgagtctccaccaagtcattagactcacaatactgaggacattatgattcaagaagggggggattcaactcaaattgctgaacctgccacccaacaattcatcaggactatagagcacacacctttgctgaatactcaccactttgaaaaaaattcaaaaga

SEQ ID NO: 158365 - DNA, 652 bp, Arabidopsis thaliana landsberg
cctattgtgttgttgcagttgattctgctgggagggagattcctatggctttcttaaaacgcgtgaaggaggatttttataagagatatggtggtgaaaaggctgcaactgatcaagcaaatagcttgaataaagaatttgggtatgtgttttttgatctatatgattggtattgagaagtttgtattattcatgtcaatgacagactcctttttggctgctctaaaggtcgaatctgaaagagcacatgcagtattgcatggatcatcctgatgagattagcaaccttgctaaagctaaagctcaagtgtctgaagttaaaagtttaatgatggaaaacattgagaaggttcgattctaacccttttttctgttgatggtataattttatgttttaatctatttccagtagagttaagctcgtatgagttaagtgtcatgatcttttggttccttaacctttaaattgatgaggggaatgtccagttctgggtcgaataaacatataatgtatcagtgtttacattgtggaacacattcatttgcaggttcttgcccgtggtgtgatatgtgagatgctgggtagttcagaggttagttctcttaggcatatggttgtaagttccatacttatagataaaaatacaacaac

SEQ ID NO: 158366 - DNA, 2298 bp, Arabidopsis thaliana landsberg
attcaggttttttcgtttgtgtttctaagaagtttattgtttcatttcccttcattttactgtaggagcttggggcaacgctaagagagatagtctctctgaagcgacagattgacgatgtgccatgccaatctgaactcctccagtatgctcttcttcccccactttcttacttctaagataatatgccttggatttggcactttgtatttgtgtacttgttcgcgttgaaactctttcatctcaacaatttttttgatttaaccccaccactcccactggtttgatgagcaagtatctttgattatgttgtaaaatatatgaatcatcatgtcaggagtcaagttaatttgcgtgtagctttgtggaatccagttttactatggctaatttcccacttggtgtatttatttcacgctaaattccaatatttcattccgtgcagatatgaaagaagattctcagagctgaatgtctgtattcaggttcgaatagtcaaattaatatttgcctcgttgctttgcaggtttgtttcttagttgaaaatgaacttgctagcttgacgaacatttgtttgatatctgactaaaaacaggagaaacttcaacaaactaggaagctctatgcaacatacaatgctcttttagaaatcaaagatttgatgcttaaggagacatcattattgaattccataggttcacaggtaaaatacaggcattattattttgttgattttctataactagcatcatctgctttgtactgttctccacgttgtacctttagttgtcatgtacttatatcgttgagaatagcttatgttcattactaagttgatttacgtctctgctttccccttttagtatatctcttggtgagtcaaagtttcaccataattccgttgacttgattgtagtttcaagacgtgattggtactcctgctggccgtgtgaagcttattgattcaatggaaggagtcatgaaaggaatccaacaggtaatctgagttatattgaatcaggtatttgaggcacaaagcatgaactaacccatcttacctatctatagctgtatgatttgtcataacaaaatgtttaaagtgcagaagattggaaaaatacaacttgggcttcaagaagagcagaggctccgtgatgcttcaaaagaaaagtatatagctgcagctgcagagcaaagaaaatgctacactgtactaagagcattccaggttagcacaagataggaaataagtgtttatactgaaaagcccgagagtcatctacttacgtagtgctaaatttctcaatggcaggaggaatgtactaagaatgagaggctgagaagtcatatatctgccatgaacgaacacctctgactcgaagaagggtttgaataaggtgatatgaagtgactctcctttcgagttacagctaaccagagtagagccagagttgatttagatatgattctcttgtgatgtgatgtatccatatgctcagccttacatggaaatatacgaaaatcgataggcctagaaatagtaggtttggttgaccaatatgtttatatatgagctatgagaaaatattattctctaaatcattgaggagatgagtttgaatacaaacctagaaaggtacagagcattgtacaaagctatcaagtcaacaaataacaacttagaagaagttgaccaaaaacaaaaaaaaatcaaaaaaaacaacaacttagaagaacagccacactcatcgtctctcatattcagactttaatcatgtggcttctttttcaggatctgatctgtgaaccggatctctgatatctcgtccccttgagatgatgcttccttgatgctctctacctgcaaatcatacatgtacatggttttatggctcctcaaacagattcaagttgataaaacccagaacagttgataactctttactgttgtatcctcattttattatgtcacaatgcaaaataagacctgattactctactccactcagtatttgtaagaagctaaccaaaatttctgctgaaatctggttttctttaaaaagaagtcacctggttgtgtaaagatccggtgacaggcactggaggtaggttgatgactcggccttgcacgaaattccgggggcatttgtggtgtttccttagagctgcctccttcatacatttggcctagcttgtatggaccgtcacttgtgttgttcttcgacttcggtttatgagacaaacccgtagaccatgagcctccgcttgatcctgccaaggccattatcacatccgcct

SEQ ID NO: 158367 - DNA, 3157 bp, Arabidopsis thaliana landsberg
aagaggaatttcaggatgaacctctagagctacctggacctgtcgacaagctgctatcagattatgccaatcgatatcatgaaatcaagacccctcgtaaattactttggaagaaaaatcttggcactgtcaaggtacatctagaataaatacttataagtgaaagtttcatgttttcgagtattgggtaaatcagatactgacctatgcatctctctgaaatggcttggatggattcagttggagctgcaatttgaagacagagcaatgcagttcacagtctcacccacacatgcagccattattatgcaatttcaagaaaagaaaaggtaagtacaagaatcagtcaatatggatatttccatcttccaaattcactgaagttatgtaatctttcagttggacctataaagatcttgctgaagtcattgggatacccattgatgcattaaaccgaagagtaaacttctggataagcaaggtatataccgtaattgtagtctcctgctttaaaccagtcatttagatgaaaagcttatttgcaagtttttctgtacttagggagttctgagagaatctacaggagcaaactcaaattccagtgtgttaacgctcgttgaatccataactgattctggaaagaacgaaggcgaggagcttctaacaggtgaggaagagggtgaaacatcaattgcctctgtggaagatcagcttcgcaaagaaatgacgatatacgaggtatgtaaaatgcttgggaaactttttccttctccagagatatacaaatctaaacaattatcaaccatgttttcagaaattcatcatgggaatgctcacaaattttggtagcatggcactagaacgaatccataacactctcaaggtaacaatctgacatcaaacctcactgattttacaatattatttgtcttgatcattgatgattgctctgttttttttgttgttttgttgtagatgttttgtgtggctgatccttcttatgacaagtcactgcaacagcttcagagctttctttctggtttggtttctgaagagaaactagagtttagagatggtatgtatttgctaaagaagtagatcaactctttacatgtgttagactagctagaactaattttgtctattgttgtatcaatatccttttcttttctcaattaaatctcatatagttagtgataaacaattactacttttctttttatttttctttgactccacaatcatttctttaaccacacaattatgtaataagagattggccatttctccattaaggtaaattatacaagttgtgatattctttagaggttcttaatgattttgagctttcttatcaatagcctacttaggtttaatgtataatgtatttgccagtttttattgaatttgatatactgtttaataataaaattatcgatttctcttttataaagagtatttgagaaaccctgataatagtattctgaaatccgcgagcaattagcgcagaaccgctacacattacttatgtaaataatttatcgcaattttggctcgtttgagtcctaaataatatctgatgacaaaaaaaaaaaaaaaaatctgcgggcaatagctgtaaactagcctaagttaaccgcgattctgcaggtaatgtagctcatttggttaacaaaaaatcacaacaatatgatatctaattgaaacaacccgacccattttttttaaaaaaaaaataattaaatattcccataaatatctaattaaaccaaccaataacataataattaaaccgcaagtcagaaatactattttatgaataaataaataattcgatcaacaaaaccaagaataactgacaatcctaaccgggttccaataaccaaaaacaccaaacataaaacaaacgagttcctagatcatcctctcttccttgccatgatttcacaatcacactttatctttacctgcatcaacaacacaatgaaatgcgtaagtattatcataaatacttagtgaggcgatcctcccatctacgagctatacacacaagcaaataaaaaggtataatcacgaatacaatacaaacaaaccagtcattgaacaattcacccaaaacacattcaccacacctacatatcatcacacaacccaatcgctcagataagctcatggtcacgcacttaccttaacaaattgattctaacatcaattaaacccaggagagactctttttgcgtttgaaacagttcagaaacgtcctgcaacaaatccacaaccaaaagcaaccttgaagcaaactggacaggaaaaaccagaaacaaaccgtctcaaagacgaaaccctaaaatacaagctaaccgttaactattcaatcgctccagtgaaaacctagctgcagacgtcaaaaagcttcccacaaaatcccgtgccgatcggaaaacagacgagaccacgatctcagtttcaatcttcgctggtcctaattcgcgtatgagaaaacgtgtctcacgaaactgcgaataactcaaccgattttaatccaaattcaattctgtaaactggagaataacgataaaggacttgggaataactataccaaatttcgttaccttttaccacgatttgatatgacgaaacggatttctcccaaaccctaacgattctgctccttctccttttctctctttttctcctttataaaacgaaaagtggctaactaaagccctaatttcgagtttccttcttttataggtacactttagggtttccaattaacccaaccaattaaaccggatgatttaaaaacaaaccctaaccgattttccggttcacgggcgttacaacgggtttacgtttttggcagaaaaatcacgggtttacgtttttggcgggaaaattacgggtttacattttttgcgggaaaattacgggtttacgtttttggcagaaaaattatggatttacgttattggcgggaaaatctcgggtttacgtttttggcgggaaaattacgggtttacgtttttggcgggaaaatcacgggtttacgtttttggcggaaaaatcacgggtttatgttttgtttgtggaaaaatcacgagtttactttttctcaatttcatcgcttgtatatttaagatatttggaaaaatat

SEQ ID NO: 158368 - DNA, 170 bp, Arabidopsis thaliana landsberg; identical to SEQ ID NO: 72272

SEQ ID NO: 158369 - DNA, 948 bp, Arabidopsis thaliana landsberg
atcttgattcactacaggttccatcagtaacttcagatggtaataatttttccttgtggggaagtggagaatggtggatgcttcttgcagctcagagcatggctattggcactgtcatggttcgatgggtctcaaaatactcagatccaattatggcaaccggttgggtaatgatgctcgatccttctcgcccctttcaatccttacttgtccccatttttgttcaattgcttgtcttcgagagttcttcttacaagaacttaactaaactaaacatgtctctcattttatctgcagcatatggttatcggtggccttcctcttttggcgatttctgttataaatcatgacccggtttttaatggcagtcttcaagatctatccacaaatgatgttatagcacttctctacacatccatttttggcagcgcagttagctacggtgtttacttctatagcgctactaaaggtccactctttcactgctctctcgagagactatcgctacttctggtttcagatctttgatacttttatgatgtccatttttgcaggaagcctaactaaactcagctcactcaccttcttgacaccaatgtttgcatcaatctttgggtaagaccataatcagcaacccataaatccatgattttaatagagtttcttcagtcattggttcatagtctgatattatttggtttgaccaggtatctgtacctcaatgagactttctcctcattgcaactggtcggagcagcagtcactttggtcgctatatacttggtgaactttcccgaaggcaacgactgagacactctttgagttcttacttcatttttaaactttgtatgaaggtggaaatgtatcatagtttcattatcttcaatcttattgtatataataaagtgaagcatcatagttcagtgttaatcaaaagccaagtttcat

SEQ ID NO: 158370 - DNA, 1346 bp, Arabidopsis thaliana landsberg
ccagaactgaggccgaccaaccggtaacgatgtcgccgccgccgcaacgtatcggcttgccatggcctgagcttaacgatggtttggcatacaaggatgccatctcttcttctgaatcaggtaagaaattcaaaaaatttgatcttttgttgttgttttggttcttttttgaaatgtgtggaatttgttgaatacagagttaacgacggtgtcagaattctacttcaccaaatacaagagttcagctccattgctagggttcttactcttcttcttcctctactcttcgtctacaataatatcgttcttactttccattctctttaatcatctttcgttcctaggtggattcaacgaatccaaaacggacaggtttgttcttcatacaaacatttctctcttgattctatagaatttgaaattcatttctcgtgtatgacgttttgcagatacaaattgacggtgaagttgtaaaagatcccaacacacttcttaggttcagctaacaattcctacaattgatttgaacacttataaaatgtttagcttttgtaaaggtgtctcatttttttttgtttctcaggagtggttcgaaattagtttacagtaggcttccttggaaggaacctgacacgccatactcgcttgaagttttgtatgaagatgatgatttggtaacttcctgctctgaacaaaacatatagaaaatcttgttgtgatgtttaaagctccaaatgaaatttggtattgtactatcattttgttctcaacttgtagtgatgtgtgtatacttggtggattttcacataatgcagatcgctttaaacaagccttctggacttcaagtattgcccggaggacttttccagcaacggactgtgttgacgcagctgcagtggtgttttggtaaaaatgactcttacatcggatcgcgtgaatcaccacatcctgtccctgtacatcgactgggtagaggaacttcaggttagtctatagacgtgttttgctttccttttcattaaaccagctatgatgttagtattctccactgctttataaatgttgtactcttcactggacttatcagttcgtatcgcaaaagcatctctataatgatctctctctactgttaagatatgttgttttcaacatttatttcaggtatacttctctgtgcaaagaccaagctggcaaaaacgaaacttgcagcgtattttgctgagggaacatctcttgtcggctccgggtgagttcaaacatgatctcttgtttactttttgacccagatcattcttgaaaagatccttagtattacatattggattttggatttaggctcttcattc

SEQ ID NO: 158371 - DNA, 1444 bp, Arabidopsis thaliana landsberg
gtttgtgtatatgtggttgaaacaggtattgtggtgaatattccaactacaaaggcacaagatggtcgatctgcgggcgagagtggatcgaagctaagggatgagtatattctaagaggatttaacccgactagagttcgtcctttatggaactacttgggacattcaggaacagctattgtggagtttaacaaagattggaatggacttcacaatggtcttttgtttgacaaggcttatacagtagatggtcatgggaagaaggactggttgaagaaagacggtcccaagttaggtctttacggttggattgctcgtgctgatgattataacggtaataatattattggagaaaacttgaggaagacgggtgatctgaaaactatagctgagcttacggaagaagaggcgaggaaacaggaattgcttgtgcagaacctgagacaacttgtagaagagaagaaaaaagacatgaaggagattgaggagctttgttcagtgaagtcagaggaacttaatcagttgatggaagagaaggagaagaatcagcaaaagcattaccgtgagctgaatgctatacaagaaagaacaatgagtcacattcaaaagatagttgatgatcatgagaaattgaagaggctgttggagtcagagaggaagaaactcgaaatcaaatgtaatgagttggcaaagcgcgaagtgcacaatggaaccgagagaatgaaattgtctgaagaatttgaacaggtatcaaattactctctgtatctctcttttttttaagatataagtccatgtgttgatgtgtacttaacagaggcacaaaggaggagcttcatgagaaaatcataagactagaaagacagatagatcaggtacaagcgattgagctagaggttgagcagttgaaaggacagctcaatgtgatgaagcacatggcatcagatggcgatgctcaagttgtgaaagaggtggacatcatcttcaaagacttagttgagaaggaagcagaactcgcagacctcgataaatttaaccaaactcttatccttagagagcgcagaaccaatgatgagcttcaagaagctcgtaaagaattggtaaatgtatgtatcaaagtgttgttcttttcaattatatcagaaaacctctgagaaagcttgacattttggtttgtttgtttcatgtgccttatgtagattatgagagaatagaaaacaagtatcggtgttaagtgtatgggagagctcgtaaggaaaccattcgtggatgcaatgcagcagaagtattgtcaggaagatgtggaggaccgagcagttgaagttctccaactttgggaacactatatcaacgatccagattggcatccatacaagcggaaaaagaaagaaaatcaagatagagaagtggtaagaccgccttcttgacacggtttgttatgtga

SEQ ID NO: 158372 - DNA, 843 bp, Arabidopsis thaliana landsberg
ttctcttttttttcttcttgtaccgtctgatctactctaacaccgtattgtgcactttttattacacacatatcatgatggtatccgtattccggatctagcctaagataaatagaatttgtgacacatattttgatcatctaaattttgagaatatgaaaaatataaatgtgatatttttcgttaagtgtatccgatctttgtactaatgaatagaaatgtgtatcaattaggtatatccgatctaatgtttgactatttttaattgataacagtatttaatatatatgtgtatggatacatatactaatttcattatccatgtgcattgatgatatctagcatcttatatcaatcctaatgtatatatttacacaagtctactgtatacataatatgacattactaataacacgtgttatcaaggaaacaaaggcacaaagctatatagatggtctcagcttttgtattttgaggatttaagcttagataacattttcataacagtactttttatgtaacgttatgcacacgccatgtataggtgtaacgtacattcatcatgtgctgattaataatgtttgtggcatgcgtaggacgatcgcgtcaggcacgataccggacccgggttcgttggttgggagcggcacgacggttctggacgtaccggttaaggtggcttatagcatagcggttagtctgatgaaggatatgggtacggactgggacattgactatcaactagacattgggctaaccttcgacattcctgttgttggtgatatcaccattcctgactctactcagggagaaatcaaggctccttcccttcgcgaattcttt

SEQ ID NO: 158373 - DNA, 1051 bp, Arabidopsis thaliana landsberg
tatttccggtttatcttattgctgagatgttttgatgaatacttctaacatagttctctgttctcttttatttatgattccaggatctggtttgcatacatttgttctttatttgggtccccatattgctttatttaccataaaagcaatgcagtgcgggcgagtcgatttaaaaagtgctgtatatgatacaattcagttgaagagaagcccttcatggcttgataaaccatgccacgagtttggctccccagttttttcttctggagttcctcttagcagtatactgcctcaggttcagatagaagccatcctctggggtctaggaacagcgttgggagaacttcctccttactttatctccagagcaggtgaaaattcactctgcccaccttttttattgacaactcagtgtttatggtttagtgttaagatatctactttgaggcccagtttcagaagcttcttgatgtttgagctatatctaagtgactaagtgggaatgaattaattggttttagaggtgtcgagtttaaatctggtacatgaacaagacatgcaaacagtttttgcatcaagattgattattaatgctctgactctatacagcaagtcttttcggtggcaaaatgaaagaattggaaacatgttctggtgacgatagcggcttcattgctatacgcgtaaatcagatcaaaagctggttattgtcacattcacaatgcctcaacttgttcacaatcatgattcttgcttcggtacgttttagatgagtcgtctgaacaatccaatgcttcttgcatagaatttttgtgtctgtttaaggttccggaaatcttatgatgtgcttattacaattacgttctgccttacattcaggttcataatccattattcgaccttgctggattcatgtgtgaacaattcaagaaaccgttttgggagtttttccttgcaaccttgattgaaaaggccctcatcaagtcacatatccaggttatagatttacgattgtgtaataaactatatgttttgagtcactttcgttctc

SEQ ID NO: 158374 - DNA, 479 bp, Arabidopsis thaliana landsberg
gatttagctttggatcatagaaaatcatgttgttccaagctctactcaattcaacatcttaaattcaatctcatttgtttatgctctcaaaattatgttgccttgagatgaatgtttttgatgatatgaatgtgaatcctctgttttgtgtttgaaggtttgggatatttccttcatggggtttgtctcagaagctgtcgaggatcatcggagcaaacaaagctcgagaagtttctttaacatcgatgccactgacagcagacgtggctgggaagttagggtttgtaaaccatgtggttgaagaaggagaagcgttaaagaaagctagagaaatcgcagaggctataatcaagaatgaacaaggcatggttctgaggattaaatccgttatcaatgatggacttaagcttgatcttgggcatgctctcacactagaaaaggttaaacattctgccatttttaacttgttgatcaatttg

SEQ ID NO: 158375 - DNA, 962 bp, Arabidopsis thaliana landsberg
  unsure (1)..(962): unsure at all n locations
gtatgtggagagtttttttgcatcaacctctgctctgaagcatcctcaacaacttccagggaaagtagttcagaaccctaaggactatgctactgcaaatgctatcaccatccaccaagaagatgagtctccaccaagtcatcagactcccaatactgaggacagtatgattcaagaagggggggattcaactcaaattgctgcacctgccacccaacaattcatctggactatagaacacacacctttgctgaatactcaccattctgaaaaaagttcaaaatagaaaaactcaagaaggatcagaatcaagagatgattagtagagtcagcnnnnnngaaacttacaagaagaaagtcatccaagaaaagcttgatgatcccggttcattcactctgccatgctctctaggaccattgacattcaataggtgcctttgtgatttgggagcattcgttagccttatgtctctctctacagctaaaaagctagggatcatggaatacaagttctgcaacttagctttactcttagctgatggttctgttgcacatcctaatggtctgatagaaaatttgcctgtcaagattggaaatgttgagatacctacagattttgtggtattagacgtagatgaagaagtcaaagatcccctgatcctagggagaccattcttagcttcatctagaacagtcatagatgtcaggaatggaaaaattaatctgaaccctgaaaaaggcatcaagatgaagtttgacatcagaaaagcttcagagaaatcaacaacaggaggtcagagttttgggattcaggacatggatgttgatgaagaaacagaagctagaaccccaccaaaagtcaactatacttctcaactcagcaagctgaagagaacttttgaccacaagaagagagcaatagaagggttatctcaaactgaagatcctacagaagatgactg

SEQ ID NO: 158376 - DNA, 702 bp, Arabidopsis thaliana landsberg
ttttctaaaaaatggttatttcctttttcatggggattgtatttgtgaagatccaaagattttcgctgtggaagcaaatagaattattccaagggacacaagatgtagttgtggcaaagatagggaaaaaagaagcagacaagttctttcaagatgctcgatacgttgtcgctttaggcagcaatgacttcattaacaactatttgatgcctgtctatagcgactcttggaaatacaatgatcaaaccttcgtcgactacttaatggaaacacttgaatctcaactcaaggtttacttttctaaactaattcaacacttcaagtacctatttatctttcatatatataatgatctaactgatacaaatttgtgatgcatgtaatgttttaggtgttacatagtttaggagcgaggaagctaatggcgcttggtttaggaccaatgggttgtatcccactgcaaagagctctaagcctggatggaaattgtcaaaacaaagcgagtaatcttgctatgagattcaacaaagctgccaccacaatgctcctagatcgcgagaccaagctccctaacgcaagctacaggtttggtgaagcctatgacctcgtcaacgacgtcatcactaacccaaaaaaatacggtaatatccaactttgataaaatcaaaagaagcattcacaaacggcatcgtgcaagtaagc

SEQ ID NO: 158377 - DNA, 993 bp, Arabidopsis thaliana landsberg
gttgtatccagtgcaatcatagacaagtacattggagaaagtgctaggctgattcgggagatgtttaactatgcccgtgaacatcaggtaagtcttactctctataggtcatatatgctttcctattttattttctgtaaggcttgtatcacattcttgacttattataaatcttttccctccgattagccttgtatcatattcatggatgaaatcgatgctattggtgggcgtcgttttagtgagggaactagtgctgatcgtgaaattcaaagaacgcttatggagttactcaaccagcttgatgggtttgacaacctcggaaaggtactgctctctaaatctgaattctgaacttataatctatatttaacctggtgtacatatgcgtgagattttggtgtgatgttgtaaatcgttgtcttgaaatctgttggatatcttgatcgaattgtatctcttccaaaaattggttatacactaaatttttgatgctattaattgtaaatgagcgtgaataaatgtgtttgatactagtttgggaaaatgtataggtgaaaatgataatggccacaaacaggcctgatgtgcttgatcctgcgcttctccgtccgggaaggttagatagaaagattgagatccctttgccaaacgagcagtcaagaatggatattcttaagatccatgcagctggtatcgccaaacatggtgaaatcgattacgaggctattgtcaaacttgcagaggttagttttttccttacattactgagatagtgaatgttgctttcaatatgtgagtttctcaccaaatgtttctttggtccaaaaaaagggtttcaatggtgctgatctgcgtaacatatgcacggaagctggaatgtttgcaatccgagcagagcgggactacgtgatccatgaagatttcatgaaggtatgtatatatattatgcatgagaattggttaaatcatgttgtaatcttggttgtgata

SEQ ID NO: 158378 - DNA, 625 bp, Arabidopsis thaliana landsberg
gtctttaatctcacttcaccggctctctttcactcaatctccgtgattcattgtttctccgacgttgcttaatcctcgaaatctccggcgatgggtggttgcgtctcctccaacctccttactccgaccgatgacaacagcttctctcagcttaccagctccttcttaagccaacatttcgtcaagctaacttccaccacttacggtcttctcaatctcgactcttcttcaccttttcctacgtctccttcctcctgctcctccgccaaatccgttatcacgccaatgactccgcctgagagatttcctatcaacggtaaggaggcggcgatgatgatggttaagtctgaaccgacgaccgaggttattaacttctgggagctaatgtccggtttagacggcgattcttgtcgattctctcccattccggtgaaatgtaatggatttttccggcggtttaaaaaaagaaaactccgatcctaatttgaaaaaacccctaacgattaccaaggtttgaaacccttagaatcccaaattagccggaggaatctgagaggttattgaccgcggaaagaatcgcgttgggatttatccaacttcttgcccgggtttgacggacctttga

SEQ ID NO: 158379 - DNA, 682 bp, Arabidopsis thaliana landsberg
ggcaagatggaggaaaataacgactacgtctgcaaatttgttgatgttatgatcaagctttgaatcaaaggggtaggggtaatctgaagatgatgttttccaagttgcataccaattgtactacaacaattacatgagtaatttcaaacttgagcatgcatggcgggagctccgacacaataaaaaatggtgtagtacatacacctctgaaaattctaaggggggtggaagctcaaagagaacaaagttgaatggaggtggtgtatattcttcaagctgtaatccggagagtgtgcctatagctctagatggagaggagcaagttatggatcgccctcttggtgtgaagtcgtcaaagcaaaaagagaagaaagttgctactaaaacaatgcttgaagaaagggaggccgattctagatcaagacttgagaacttgtgggtactagatgaagaggagcaagttatggatcttcctcttggtgtgaagtcatcgaagcagaaagagaggaaagttgctactaaaacaatgattgaagaaagggaggcagccaattttcgatcaagacttgggaacttgtggctactaaaggagaaagaagaaagggaggcagattcccgatcaagacttgagaacttgtgggcactgaaggagaaagacatagaagagcaaaagaaactaaca

SEQ ID NO: 158380 - DNA, 1097 bp, Arabidopsis thaliana landsberg
  unsure (1)..(1097): unsure at all n locations
caaaaacttcaattaaccagaaaaggtcagattctccgccgcctcacacgacgggcaacttcagttcctgccgtcgcgttagatcccgccgtcaatcggtcatggcgaccggtaaaacctcttccgccgcgaatcttttnnnnnnnnnnnnnnnnnnngatttatcatccgctgattcgcctccttcaaaactctctctctcctccgatcagctcaaccactgccaccaagctctcggcgttttccggggaaagatccaaaatcctgactcgatcgctcatgagtttaccggtttacaggttatagatccatcctctaaattgagaatattcctcttcctagtgtttcttccttaaaaaacaaattggatcataatacactctcttcgaacgtaggctaataggatgtggccatcggagctgctgctaaacagtacagtggctatgaacagtgtcaatgttgagaaaaacagatacagtgatgttgttccatgtaattttcctctctttttttgtgtggatttgctagttagtggtgtacagttctagattttgattttgctttggatatagttgacaagaaaaggattgttctgaatccatgtaaagactcatctgcaaaaggatatgtgaatgcaagcttaattaaggtacacttcttattagtctgtttatctgtatctttatgtggtgatagatttttgaaggttttacaatgtgttaatgttatgtacacgtcggagtctgagagtatttctcagttcatagctacgcaaggtcctttaccacacacgatggaggacttctggcagatggttattcagcagcattgcccaatcatagtgatgctcactcgattggttgataataatagggtaaacttccttgtcttgcttgtgtatatgagtctctttttagacgattggatattaatatgatctgttgcaaatatactagtacaagtgaagttgttgtgagcatttgtttctcaagttaaatttcttcgtattaaattttcccaagtcccaaatgttccataaacagtgataaagataaaaactatctcgttgatattgattcttgaacttatctggtttg

SEQ ID NO: 158381 - DNA, 1465 bp, Arabidopsis thaliana landsberg
ttccgtcgctaaaaccttttagattcttctgtaaacagggactgaaatgaaaggtgttcctgaagaatattctccaatccttggcaagtattggtgccaaagatacctcctcttctccagatttgatgaaggcatcaagatggatgaggaaggatggttttctgtcactcctgaacttatagctaaacatcatgccacacgctgtaatgaaggcatagtcattgactgttttacaggagttggtggaaatgctatccagttcgcatcaaggtgagtggacatacacttcttgtactgatgttttgtagttcttagtagtaattcacacggtagcaggatctagtttaactaatggaagtagcgttttgcacattttgggcaatttccctgacttattttctgctgtgttttgcttttttaggagtcactatgtgattgcaattgatttggatccaaagaaacttgatttagcaaagcataatgctgccatatatggtgttgctgataaaatcgactttgtgaagggagacttctttgacctcgcacataacttgaaggttttttaattcaactcttctcaaattttctggtcatagagtagccattgaaaagaattcaattgtgcaggcaggcactgtattcctatcgcctccttggggaggccctgattatcttaaagcgagcacgtatgatatgaagacaatgttgagacctcgtgacgggtatgtctctcgtgttgattttttaatatgtagttacgagtcttaaactcttactctctttccatgataagaaatatatccttactgttcctgaatgatgcagagatgctctatttaaggcggccatgaacattgcgtcaacaatcattatgtttcttccaagaaatgttgatattaaccaactagcagagcttgccttatcaacgtctcctccatggtcactagaggcaagtgtttttttcttatcactttcctatatggtcgattatatatatgagcatattctttggaatctagaaaggaattccaagaaattggatagattctgatgcttattcatgatgactttccatcatataaaaccagtggggtgttttctgttacattgttgaaaaaaattggttatttgcttatcacaatggaaacaaaccttgcaaaattttcttggctcttagtaacacttgttctaataggcgaactctaatgttttcaggtagaaaagaactatttaaatgggaagctgaaggcggcaacagcgtattacgtcagacaagatgattgtaagaagcttaaaagaagaccacagtagggaaaaggtagatgcaatctgcgtttgtgctggcttgttgaatccaggtggatcaatattgatttatgatcataggctatgcatttgtatagacaaaatgtgttgtcttaagcagtacaacaaaatacacttgttaattatatttcttacacaa

SEQ ID NO: 158382 - DNA, 530 bp, Arabidopsis thaliana landsberg
  unsure (1)..(530): unsure at all n locations
cacttttctcctttcctcagctcacggtgagtctctggaacggattgtactaatctcattattttcccggtttnnnnnnnnnnnnnnnnnnnnnnnnnnnacactctgagaagaaacatgagtcacccgagaaatgcagatgatatattttctgagttctttggggtctctagaccttctggtccttctggtcccagaaatgcggatgatatatattctgagttctttggggtctctagcccttctggtccaagaaataaggatgatatattttctgagttctttggggtctctaacccttctggtccgagagataaggatgatatatctgctgagtactttggggtccctagcccttctggcagtggcagcagtggaggcagagaaggaggaggtggtggtggtgcacaatgcatcacggtggagctaggaaggcagctcctgttgaaaaaaagtgccttgtagccttgaagatcttacaaaggaccaccannngagatgagatcctagagagatgctggtgctttggg

SEQ ID NO: 158383 - DNA, 1226 bp, Arabidopsis thaliana landsberg
tatgatttttggtcgattgatttggaatatttttcatatctcaatgcctctcattgctcttgtttccaacattcccctccacttatttgaacgttccttgaagtgttataattctttccaaattattgaaatcttaatggcatgtagaagtaagaagttgatatactttggatttgcacagggaatcatatcgatcaagccatgtggagctctctactggttcctctcctcgcttcaaatacctctcactatcttctttactctctgcatttacttcagtgacaatgttcaaagcaaccacacatcgcatagtaaccaaaactctgaacaggtccaatacatactacttgctgttgattaaattagcttttctgttggtcaaaagtcaacaggtttgatgaatatgaaactgaaattactccacaggagactggagttggaggaagacaaaacaagttgatgctccctgtaatggctctcttggctggagttttgggtggcctctttggtattggtggtggaatgctcattagtcctcttcttctccaaatcggtattgctccagaggtacgttcttgagtcttgttctctagcagcatcagaaccaaagttttaccaaaacaagcaattggattcttaagttaatcgtgctctctctacaggtaactgcagctacatgttcgttcatggttttgttttcttcatcaatgtctgcaatccagtacctactactaggaatggaacatgctggaaccgctgcgatatttgctctggtctgtttcgtggcatcactggttggactaatggtggttaagaaggttatagccaagtatgggagggcttcgatcattgtgtttgcagttggtatcgtcatggcacttagcactgtactgatgacaacccatggagcttttaatgtttggaatgattttgtctctggtcgctacatgggtttcaaattaccttgctgagaccaagaaaagaaagttttggtttcttgggttacaagtttcataatacatgtgtatatcatatcaccatgttgttgctctttcatccatttggtcatttagagttaagaagctttctatttctttcttttgtatgatttttatatcactattcagaatgcacatctcgtgcattcgaatatatggtcaaataaaagttatgttgtgaacctaaattcagatttcaatatcaaattctatgcatttgtttgtgta

SEQ ID NO: 158384 - DNA, 1997 bp, Arabidopsis thaliana landsberg
tctttctcatggatcctttttccaaaccgccggtttcattaaaactcgtctagatcgttcgattcttcatcgtttcttgtgattttaggctctaatctcatcagaatctcatcctatatcttccccaagtgtcattttcatcgatttgcaacatggctggacagaaaaagaaaggaaggaagaacgttccaccaccttcttcctccgccgctcatcttcgccgcagctcttccacccccgccggctcacatcctcaaccaccggaatcttccactgctgctcctcagcctccgatttaccgattttcatgtccaaaactagctagtgtgcagattccttctcaaagagtttgggaaaaggatatcaatagagaatccgttaaaggtgactataatgcctggatgagtgtagaaatttggcctactccggttgcacattttagtttgatgcatcgtttgatgatagagaaatatattttaggactgctagatgacataggtttgggaaccatttgtcttagacaatacgatttgtatcatgagctagttagacaattcatggcttctattagggtctactatgtgaatgacatgaaacgcaatgctaaggaaggagctcttatcttcttcatccgcggtgttagatatagtctaccactgagagagagttgtgtgacatctatagttttgacaatgatctcactggagttgcactacctggacagtttaaggatgctcaggttttctggagccggtttggtaatggaacttatgattccaaggacgcagtacactcaaagattcgtcaccctgttctacgatatttggttaggctgattagtagcacattgttgtgcaagatggagcctggcaagatgagactttctgagctgttgttgctctatcatgctgttcatgatttcttttctgatagtttgggatttgaggaggttgaccgcgatgtcaactttggcgctgtatttgctcatcacttggtctcagtcaagaccaagccctttacaggtaaagggaagaaatctgagagagttggcagtcttcttactcctaaatttgggcactttcgcaataactttgagggagaagaggtcaaaaccacgagattcactatggatgatagttatcttaagaactctcactggctgaaaggccaattcctttggtgtttcaaaggtgagacaaggcaccatatgattcagttacctttccctgcacttacagagattacatgagaccatgaggaaattggttttcattcccatccttcccttctacactccgcgccacgctccaggagacagagaggttcagcttcaggatccgcacttactcagaccgaggatgagttcatcgaccctgctgggggtcctcgagttggctcttcctcttcaactctcccatatcagctgccttctcctcttcctatcccgatagagccacatgtctttcagcactatgtcgtcgacagtttcaaaagcgtctagaacgccatagctacactctctcacttcggttgtgttgctcccactcatcatcgtcgtcgctctcccgcacccacctccggctcagagcatgaggactagccatcctccctatcttgctttgttttctaactttgtttttgctttatttcagactatttgttatttgttttggaacttgttgcacttatttttctatgctttgttggaactattgatgtgtgttttagtgatttaacagtctatctggatgatccatgtgaaaacactaaccaaagctctacaacaatgagctgaattcgcaaagctatgcaaaaacgaccacagtgtcgatagacaccaccctggtatcgatcgtcaggtggcaactcacgtttctctaacctttaagttttgattatttttctttcaattcctctagcttaataattctggggacaatgttatttaagtatgggggagtcagttactaacttcatcttttcttttttaatgagtc

SEQ ID NO: 158385 - DNA, 812 bp, Arabidopsis thaliana landsberg; identical to SEQ ID NO: 38771

SEQ ID NO: 158386 - DNA, 617 bp, Arabidopsis thaliana landsberg
agcaacctaactacaggatctgatcgctttagggggcaaaacatttttggtacccggatgcttcctgcaggatgttccgcagcgtgtcttactcaatatcagaacgcgacagaagaagactacgaccccttgacaggttgtatcccacggctcaatgaacttggagagcacgacaacgaacaacttaagacagaactcaaacgactccaaaaactctatcctgatgtcaacatcatttacgctgactaccataactccttataccggttttatcaagaaccagctaaatatggtccgtgccacttaaaactctttcgttgaccctcatggtttaattcattaaccgagatattgttttgtttttttcattagggtttaagaacaaacctttagctgcttgctgtggagtcggaggtaaatacaacttcactattggtaaggagtgtggatacgaaggagttagctattgtcaaaatccttccgagtatgtgaattgggatggttatcatttaaccgaagccgcctaccagaagatggctgagggtatactcaacggtccctatgcaactcctgctttcgactggtcctgccttggctctggtacagtggatacataa

SEQ ID NO: 158387 - DNA, 700 bp, Arabidopsis thaliana landsberg
  unsure (1)..(700): unsure at all n locations
tctttttacttcatgattcttacatctaagttagatgatctaacctatatatatatactgaattaatattatactatctttttgttgacctaggatatatttctggctggaatagacacaagtaccatcaccatgatttgggcgatggcagaacttnnnnnnnnnnnnnnnnnnnnnnnnnnnnnncaagacgagattcggtcttgcattggaataaaaaaggagagaatcgaggaagaagatctttataagcttcaatacttgaagcttgtgatcaaagaaaccttaagactacacccagcagctcctcttttacttccaagagaaacaatggctgatatcaagattcaaggctacgacattcctcgaaaaaccctccttttagttagcgcatggtcgatgggacgagatccgaaatactggaaaaatcctgaggagtttaacccggagaggtttattgattgtcctgtggattacaaaggacatagctttgagttttaccatttggttctggtaggaggttttgccaggaatggcttcggcgattgcgaccattgaattgacgctcttgaatttgctttacttctttgattggaagttgcctgaggagatgaaagatatgaacatggaagaatctggtgatgtcacaattgttaagaaagttcctcttgagctgctcccggttctttatcattgaata

SEQ ID NO: 158388 - DNA, 1215 bp, Arabidopsis thaliana landsberg
atgaattctatgtgagttttttccttctttaaatagttgtatccctatgtagtataagttaactcgaatcttagcaactaaagctaaacaaaatctataaatccaagtattaaaccacaattaaagatgtgtttttaagtgtgtgtgtgtttatccattgttcaaagtccaaaactgaaaactttgaaaacagagccatctacgtatgaagagagccgacttcatagggatgaaaaacagagcatttcactgtttacaataatctcatagccgactcaacaattccaaagctaaacaataataaacaaatcctcataaaaagacaaatttcaaagacaagagagaagagagagatagagagcgtggcctctaatcaacccaacaccctctgtcaaaaacaagcctgactttcttctccatccccatttctatctgcgcatgtctctctctttcttctccataaaaaaccaaattctcactctctcgtaccctaaagtttcaacctttaaaccctaaaaccaaaaaagcttcagtcttttgcatcacttcccttaaagcttcaacctttctccgattatgccgacgtctgactccggtgaaccacggcgaatagctatgaaacctaacggcgtgacagttccgatttctgaccagcaagaacagcttccatgtcctcgacgtgactcagacaacaccaagttctgttactacaacaactacaacctcactcagcctagatacttctgcaaaggttgccgtcgttactggacacaaggtggttctctccggaatgttcccgtcggtggtggaactcgtcgtagctcctcaaaacgtcaccgctctttctccaccaccgcaacttcctcttcctcctcttcttccgtcatcaccaccacgacacaagaaccagccacgactgtagcgagtcagactaaggttagtaatgtaacttcaggtcatggaagctttgcttctctgttgggtttaggaagtggaaatggtgggttggattacgggtttgggtatgggtacgggtacgggcttgaggagatgagtattgggtatcttggagattcttccgtaggagagattccggtggttgatggttgtggtggtgacacgtggcagattggggagattgaaggtaaaagtggaggagacagtttgatatggcctggtcttgagatctcaatgcaaaccaacgatgttaagtga

SEQ ID NO: 158389 - DNA, 1081 bp, Arabidopsis thaliana landsberg
cacaaactcaacgttgccagtgaagttcgccgtcgccggagctcatggatcgaccaccgtcgtttacaccctatcaaaattctaatccgaaattcttcaaccacgcttctccttttcaaaatcctaacaattttactccatcgctccggcgccgattcacgagctctccggtatactctcttcttctgttgtcagaattttcttagattccctatcgaaaaatctagcttttagatcactcttctattctcaggacaagcggttagtcattggttttgaaattaaaattgatttttaggttcggtatacattggtattgaaattagaattgatttgcggtttggtttacactggtttagagaagaaaacaaacaaattttcacgcgatgggaatttttgagactagtgcgtcgattgaaaaaggcatgatttcgaaaggggtatacccacagaattgctctcacgcgctcaacgctcactttgtgcgagtgggtgtgaaatagagccttctgattggcttagaaactctaaaaaaagtgaaatagtatacatgttgctagctcatgttgttattatttagtttttcgtttcttctatcaatctgatcaaagttcagttttttttttacatacaattgattctagatacttgagatctgatggtaatgataattttagatttttatgagactaggccactcagtacagagaagaaatgaatgcacttgggcatagaaatgttacatttgaaccacctagtgcttctgctgcaatgtcatcttcaaaagctattagtaagccaaaactgtcccaaggttcaaatatgcagtggattaaaaaagtcatccaaagtcgtcaaaaatgtctcaaccttccacttatattgatgaggtcattacaatatatatgatttaagtttaaaaacattgattatatccactggcattattcaattcatgtttttgttatcttgtgcagatgagcttctcttatgagttgcttgtgaaactctattgtgattgagtagaagtacagccatttggccttgtgaacttatgagacaggtacatgattgacgagga

SEQ ID NO: 158390 - DNA, 1162 bp, Arabidopsis thaliana landsberg
atggagggtcgagatatgattggtcgtgctaggactggaacgggaaagacacttgcttttgggattcctatcattgacaaaatcatcaaatacaacgctaaacatgggtttgtgtttactgagtcatttgaggttcagagaattatgttttctggttggtttactgatttttggggttttatgtggtttttgatgtgatagacgagggaggaatccgctttgtttggttttggcaccgacaagagagcttgctcgccaggttgagaaggagtttagggagtctgctccgagcttggatactatttgtctttatggaggtacaccgattggtcagcaaatgaggcagcttgactatggtgttgatgtggcggttggaactacagatcgtgtcattgatctgatgaagagaggagctttgaatctatcggaagttcagtttgtggttctggatgaagctgatcagatgcttcaagttggatttgctgaggatgttgaaataatattggaaaagttgcctgagaaacgtcagagtatgatgttttctgcaacaatgccgagttggatcagatctctcactaagaagtacctgaataatcctttgacagttgatcttgtgagtagtcttgtaccctctgaaatttctcacaattctgaataattgatcttggagttagcagagttgttaatgaagtgatttcttatgtgaaatgtgcttctatgtttttgtttgcctaactgtgatgtgttattcaggttggagattctgatcagaaactagcagatggaattacgacatattctatcatagcagattcttatggaagagcatccattattggtcctcttgtaacggtatgctttccttactttgctattaaacgagtatgagttaaattttgtgttattcagtaactgagtaagttatttgtgtattttttcggagttgtcagttgtatatggaaagagttaataatatcaattttccttgcaggagcatgccaaaggaggaaaatgcattgtttttacacaaacaaaacgagatgctgatcgcctttcatatgcattggctagaagcttcaaatgtgaagctttacacggtgatatatcccagagtcagagggaaagaacgcttgctggtttccgagatgggcatttcaatatt

SEQ ID NO: 158391 - DNA, 1137 bp, Arabidopsis thaliana landsberg
ttggggaagacggataacggcttcaatgcttgatttttcttttgagtatctgaaacagcttcagctccgaggtcatgtctctaaagataccttatgtttatcattataaccaaaatcctaaaaccagtctatattctgacataagtctttttttgttctgatatttgcagatgttgactatgagaaatggaataaacttgcatcctttgtgtttacctggaactacattacacccattgcaactctctcagattcgaccccctgaagcaaccaatgagcctctgcttaatcataccaatcagtttgcttcgacttctaatgcaccggaaatgatcaatactgtggcttcttcatacgctttggaacctttctattcgcagtcactttggaccttttcctctcctttacttcacccgtggtgcgtagttgaattacacatttttcattctataaccataaagctagtttgcttactaatttttttttgttacttaaggagatgagtcgggaaggtgggttaactcatccaaggttgaacattggtcattccaacgcaaacataaccggtaaagtcttgttgttttggaatcctaaggaagttttaggacatttacaatgttaataacgttacgatatttggggatttgcaggggaacaagctctgtttgatggacaacctgacctaaaagatcgaattacttgaacagtgtcccaacttcgggatctctatgtgttcttgtttcttagaacgccagccataaagctgtctgacaatggagatgcatttaactgtctttatttcttctaaggttctatttaaaatcaattgttggtgacacgaattctagagtctaatcttttggatctaatagctatatataacaaggactgaaattttattgcaaagtaattggctaattgttaggttgctgtatgtttatggtggatgtaaatcttctagatcatcttcgtattgtatttgagagtttgacactcgatggctttggatatgtaaattaccccgataagcttctagagaagttttcgattctacaagatggattttttatctttaaggttgaccatgttcttttggtatctcttgttctcaaattgatcatttacaatacaatcttt

SEQ ID NO: 158392 - DNA, 939 bp, Arabidopsis thaliana landsberg
  unsure (1)..(939): unsure at all n locations
taagttcactgttgtggatttccagtggttttgcaccaacgcacatcgccattgctatggaataatccgctggcggtgagctatttgagcgtatatgtagtgctggaagattcagtgaggatgaggtaagcttctcttgccatttaaagtcatggtggtgtactaaatgatcaatttcagagttgttttgtggtctgagattaattgagaggaaaggaaagaggaaaacttgtagagttatatttgtgttttgtagtataggaagccaaaggaatttctgttgtaaatcatttggatcagcttctcggattatgatagctttttgtgcacatctttttcttcagnnnnnnnnnnnnnnnnnnnnnnnnatctcaggagtcagctattgccatgctatggtaagagaaagaaatggcttacgaagttttttttttttttaacttcacacatatacataatttctgcggtattagtcctttacttgcattagttccttattgtcacagcaaatatgccacagagatctgaagcttgaaaataccctcttggatggaagtcctgctccacgcctgaaaatctgtgattttggttattccaaggtctgccatatatctccagcatgcacttgaatgtgctactagtgatttcttaatttatcctgtcgtaacaagctcctttttcttctttttccctccatgtgagctatttttcttcttttgtagtcctcattgttgcactctatgcccaaatcaactgttggaactccagcatatattgcacctgaggttctttctcgcggagagtatgatggcaaggtaatcttattggtttgcaagtattagtatatcaagtatgcttagcatcttgatagagacatcatagcttgaaaatttttcctgcgtagtaatgtagctctttcaacttttttcatgcatatat

SEQ ID NO: 158393 - DNA, 1887 bp, Arabidopsis thaliana landsberg; identical to SEQ ID NO: 18208
  unsure (1)..(1887): unsure at all n locations

SEQ ID NO: 158394 - DNA, 868 bp, Arabidopsis thaliana landsberg; identical to SEQ ID NO: 31528

SEQ ID NO: 158395 - DNA, 1145 bp, Arabidopsis thaliana landsberg; identical to SEQ ID NO: 26080

SEQ ID NO: 158396 - DNA, 1768 bp, Arabidopsis thaliana landsberg; identical to SEQ ID NO: 25111

SEQ ID NO: 158397 - DNA, 1459 bp, Arabidopsis thaliana landsberg; identical to SEQ ID NO: 35401

SEQ ID NO: 158398 - DNA, 819 bp, Arabidopsis thaliana landsberg
ctaagtggtgttatgggctcttcgaatttcttgctgatgttagatttttccttttttcagattttttagtgactgttccctccggatcctaatttccgtggtaggagagttgtaacattccacaaccagcgtgactttatatttttcagacatcaccggtacataacttcaccttttcttcttcgagttgcttttgctccattctccaataaaactttttattgaacgggtggtcaacactatccagttacatatttgagacaaaggaaagcaagagtgataaaggaaaagaagagacaataaaacctcgtcttcaggtcagttttgaccatgttgaatcaaaaagtaatcaacattatcaatgtttgtatcattaaactttggatttttaggaatgcggtcctcgattcacgcttaagctagttactctacagcatggaacttttgacaccaaaggtggagaatttgaatgggttcataaggtaaaatcaccagaaatggacacgagcagcttcattgctgttctttagagtttttgatgatttttaattttattttctgatgtgtttttttttgtatttcattacagcctgaaatggacacaagcaggagaaggttcttcttataaattctgctgtcttccgagtttcaccaagttttgtgtttattttgcattttcgaattttccctacctccgtccaaaattgtatgtctttaaaacttctcatttcttttttcaatatagccatgagccatcgaaacaatcgtaagagtacttgtttcaacaatataggccctcgttttttactaagctatata

SEQ ID NO: 158399 - DNA, 1810 bp, Arabidopsis thaliana landsberg
ttattttgcatactgatgcattgaggatcatcttgcatacatattgcatgttttagtaagttttcaggtgcagaaggagcttacaaggatttctacttgaccctctactctatcaaacaaggagagaagcagcagagcattctactcgaccagttcacttgatccaggcagccatagaggaggcagcagactctactcgaccctcctactcgatcaagtcagccttagaagaagaagcatatcgatctactcgcccttcctactcgatcctctactcgacccatttactcggccaagggcgaccatctctacaagacttgttgatctatcaaagcatcttcggatcctcctcattccccactcaaccagacatctgagcatatagataagagaggaagaagcatctactcgaccaattgatcactcggagtgataataggtttttagtcaattaaacctaaagcactatcatatcgttgtagtattttagtttttcaatcagaatgagtgtgatgctaacaatcaagatgtgatcagaagacactatgacaagccaagcaataacaggttttggtgtgttctagcagttctaagtgaacatgcagaaaacagaaaatcaagcagaaacaataaaacactcgaccaacacagttcgttgcagagcaccaggtgtagtcgagtgacaggtcgagtaatagacagaaaatgaaacagggatactagactgcacagtctattgccaaacaactgggtggtcgagtatcaggtcgagtaacagtaaagaattgcagaaactaagcaatagatgacaaaatgcagtaaacagcagtagagtaaacaataaattcaatcagatcaagaattcccgaggatggggtaattgaatagtttcgtttcctcagtttacaggtgattgacatgctcaataattatccctagacaacaagttcattaaccaaatctaagtctcgccgcaatagagaccctcaagttaaacacgtaccaaactctatcaccattgacgagagctaacctaacaggcattacgaatcaaaaagttaaagccaaaacgctccatgtaaccaataccttggtacatagccacaaatctctggaattagtggttcagacatttcatctaacaccttttgggtgcggaaatggctgggctcaaattccagtggatcagaaagcaataagcattaagaacaactaatgtagaagggatctataaatcaaactcaaccacctagcatactgagaattctaaactactctaacccatcctcagaaacctagtcactaatcagacatcattgcagaaagcataaacgatggtaagaatgaaaacatgatagcaacagagtaatagcaagatgataacaggatgaacaacttagtaaacaaaatgaaagcaaatattgaataaattaagagaaatccggattacaaaaggtctagaacacacagtgtttgcggaataaaactagataaaaacttattctcgaaaatgtaaagtacatgctacttatagcaaaatattctgaaaccctaatacttaaaatgacgcagtattaggacggattaagaactgtactcgacccaggtggtcgagtgagaggtcgagtgataagctggagtcttcttttcttccttgtgctcgagtgtctggttgagtgcggaatggagaagactctgaagctcgccatcgagtatgtagtcgagtggttgtgatggtgatactcgacttcaaggtgcagtggtgcgatcgagtgatgatcaagtagtggaggtgaagacactcgacctc

SEQ ID NO: 158400 - DNA, 660 bp, Arabidopsis thaliana landsberg
catttcagtggagttggtaacgcttaaggatcatgatgcattgctaataacccagtttctgcttagtgatgagaggttccaaataaagcataaatggagatcaagctcctacactcagtttcagagttgatgttctgcttggacaggatagagttaatcactagttatgcaaattcatggaattgcttgtacacgagagggtcttcaataatgcgttatgaagattctatttggaacagagtgacaaagggacgcaactcttatacagcaggagattggttgtttacaagcttggaagtgaggccaagaatgttgtagtggtgtctcagcgtgtgtattggactgttgatctagaatttgtgaaagtagaacgaaagcttgaagttgcacataaccaaacctttgattcggggatcgaactcgaagcacaagagctacttgagaataccttttcgaactacaccctgtggtcaaggttcttccaacagggaaagaaatgatataggaaactaggcattgatatatggttagatagtggagacagtagctgtgagacgtggcaagagaagattggtcgatgggagtgttagaggaagaatcgagatgcagatatatatagctaatgaggatcatttgtagaagataagaagattttggatt

SEQ ID NO: 158401 - DNA, 1915 bp, Arabidopsis thaliana landsberg; identical to SEQ ID NO: 61821

SEQ ID NO: 158402 - DNA, 1375 bp, Arabidopsis thaliana landsberg
aaaaaatattttaatgttcaaagtttaataataaattccgaaaattttaagcaaaacaaaaaaaaaaatttagaacaaaaatatgccaaaaaaaaaattaggtcgattataatgtgtaatttagtaaattgtgttagtatcattattgtgttaccattcaaacggtataatgcatgatgttaataaaataaaacataattttggtagttaataaaaatttaatatatatatatatatataatggtaatatccaaaatatagtatctatatataaaaataattaacaaagtttgataaatatgattattgccttaagtgtattaaagaagtgagaaaagaaaatttaatgagataggaaaaaaagaagtgagaaaagaagactttaagttattgccttaaatgtattaaagattccttgtatatattgtatattatactactttcctttgtcatttgtattaatctttgtaacgttattgcttccataatacttataaacatgtaattaacaaagatagcctcttcgattttttgtaatcgtaggcgaatgtttcttttttatcttaataggcacggctctgcctatcagggctttaagaacacccagattggtcatttatttgtaggtgtctttaaatataaaactaatacaaataataataaacaaatgaagagtgtctttatttttgatttgtgtctctagaaagacatttgagacaccaaaaagaggagatgtctttgattttattattaatctatactaaagacgcatatcaaaagctatgcaatgaaaatgctcttaggattacaagtaccgcgcctacggcgcttagaataactgatcatgatttccaagttggcgattatacaattccagctggttggatcttcatgggctatcctaatgtccatttcaatccagaaaagtatgatgatcctttagcatttaatccatggcgttgaaaggtggttttaacttgaacttcatccttaaacttatatatttttctattccactaatcaaatttatagaattttgagcatttaataattaaattttcggagagaagacttttcctcaatcttatccaagacttacattccctttggtgcgggttctagagtactatactactatgtgtaggagctgaatttgctaagcgtcagatggccatttttatccatcatttgtgtagttacaggttcatttttttttatcacctattgactaatttattcttaacaacattcaaaacaattacttacttatatatatgtgcttatggtttgaaggtggtcagtacttcgaaggtctatgctaatgtttccatgtggatctgatgttcaactctcagaatacaccgacgtggataac

SEQ ID NO: 158403 - DNA, 865 bp, Arabidopsis thaliana landsberg; identical to SEQ ID NO: 35879

SEQ ID NO: 158404 - DNA, 6484 bp, Arabidopsis thaliana landsberg
tcaactaaggtaagcacctcacttcaccattgtgttataccatctcctgtttttattttgattctgtgatgtgttttgtcctgagtactctcttccaaatttggtcacacagtggactgtgtgatttaagtttgggggagggctcaggaagtgtgtgttacattgtatagattcttgagtctgcattcatttaaggcatagaaaaaccaaaaaaatttgaaaaatttcagaaaataatttcacaaaaacagagtgttcatgtatttgcattacatttaggatcgagtctagagtgtttcatttaggattgttgcatatgcataggggataatgatgtgatagccttgtaagcattttggttcaccatataaactcaatgccctcgttgctagttgtctgatgcgtagtcaatgaaattgaagtaaaactgcaccatgcctagattgctctactcgaccacactgtcatgatttgataccattccctatcaatttgaacatgaatctgatttagaattatcatgtcttagcatcgaatttgaactcatggataccctaaaatacttgtattttcttactcattttgatcactcttgttagtccaagtagctgactctccttattagagtagttaacccgaacccaaacctaaactttctttcaagccctatatcacttgtgagtgtttgtgaggtcttatttcgattgagcttggtagaaagtgttaggttcgtaacgacagagatagtgtctcatgtagttctagttcacatttttcggactggataggactaggtgggcgcttatatcatgggttgggatgtgtttaaaagaaaagggtgaattcattgttgataaggaaagggaaagaattctaagggaagtaagctaaagaagttagaaaaaaaatctagtaaaggttttgggaatgttaaagaaaagaatgaggttcttgttagctaaagaagaagggttaaaagcctttggttttaaagattaaaaacaggaaccttagttgttaaagaaatccaaatccgctaggtgtatcagagtgttgagaaagcttctcctagagttaagagaaaagaaatgaatgatatgaaaaagagtttaaaagattcatgagtgcaaagggtagagttaagttcttgtattgggactggagttaggattaccattagagcttcatttgatatactctgggtagatgtgatcttatctctgtatgcatagcttgggacttacctttagcattctactaaagctcaatcattttttgagagatcccctgttactgaagcctattctgtaagggaccatctttgtctcttgacctttaccttagccaaatgagttcattgatgatgcattgcttgattcacgttccagagctaatgaatgttaaagggattggtagatttgaaagcatgtgtaggtcgagtataagagtcggattgattgataacaaggcatggctaacgtttttaagtaaaattcaatcttgcagcttagaactttcaacttggacattgattttattggctctatcatatgctttggttctgagtctccgctttcaaacctctccttcaactatgtcttcttatttgcttgagggcaagcaaagactaagtttgggggagttgataagtgtgtattttgcatgttttgagcatccatttgtcaccgttttagcatcatatcatcactgttttataccatttcacatcatttgtcatcactttgcatgtttaggatagttttgcatacatattgcatttctgagttgttttcaggtgatttggagctgtcgacgagcaaattggaagaagcggacctgatcatgacaaaccactcgacccagaggtcgagtaggagcttcaagatctcaagagaccactcgacccccaggtcgagtagaagacaccaccactctatcacatcactcgacccctaggtcgagtgacttcatctctatcttctgaccaccactcgatcacatcactcgacccccaggtcgagtgacttcatctccatctcctgaccaccactcgatcacatcactcgacccccaggtcaagtgtcttcatccctttgccagacaactactcgacctcatcactctaccaggaagtcgagtatcaccatcacaccacttgactgcatactctaccaggaagtcgagtatcaccatcacaccactctactgcatactcgatgacaagcttcagagccttcttcattccgcactcaactagacactcgagcacaaggaagaaaagaagactccagctattcactcgacctctcactcgaccacatgggtcgagtacagctcttaacccatcccaataattcgtcgttttgagtattagggtttcagaatatttggctataagtagcatgtacttcacattttcgcagacaagctttttatctagttttattccgcagacactttgtgttcttgacattttgtaatccggatttctctttatctattcagtattcagtattcagtttttgttcttgatttcgtttactgttgttcattctgttatcatcttgctattactctgttgctatcatgttttcattcttatcatcgtttatgatttctgttatgatgtctgagtagtgaataggtttctgaggatgggttagagtaatttagaattctcagtatgctaggtgattgagtattggttgatagatcccttctggattagttgttcttaatgcctattgctttctgatcaactggaatttgagcccagacatttccgcgcccaaaaggtgttcgatgaaatgtctgaaccactaattccagagatttgtgaccctgtaccaaggtattggttgcagggagcgttttggctttaacttgttgattcgtaatgcatgttaggttagctctcgtcaatggtgattgagtctgggactaggttaacttgagggtctctgttgcggtggcacttagatttggttatcgaacttgttgtctagggataatttattgagcatgtcaatcacttgtaaactgaggaaacaaaactactcaattaccccatccttggtaattctttatctgattgaatttctttatttactctctattgtttactgcatcttgtttcctgttgcttagtttttgctatttttgcctgttactcgacctaatactcgaccacccagttgtctggaaacagactgtgcagtcgagtatccttgttacattttctgtctgttactcgacctatcactcgaccacaccaagtgcttggcaacaagctgtgttggtcgattgtttattgtttctgcttgattttatgttttctgcatgttcacttaggactgctagaacacaccaaaacttgtttttgcttggcttgactctgtgaactctattcacatcttgattgttagcatcacacccatttggattgacaacttaaaatactacaacgacatgattggtgttttaggataattgactaaaaacctattataaatgactgccacataaaccttcgtgtacctcgctcataacgattttagacttctggcccaaaattgcaaagtaaataggaatcgcttacacctcgtctatgcaaagaatcctttgataaacaaattttgcgctaaagattctcatttttctagcctgccacttactctttgggagctcacctgtcacaatataatgttttattggctccctcaaatcagccccccaatctttagccagaatttggtcgatttcatgaaatatccgtgcttctggttcgggatgctcatttggttcgaggatgtctttgtcagcccatgtttccgtctcggcttcaacgatgttttctggaactgtatcttctattggtccgatattttcttcgaccctattttctttttgcgcggttggctttggtatggctgccccttttgattttcttcttttgacaggtggcaatttaatcgaaggttcaccgcgatcccgagctacagctcgagatcttgtaatcacgagtgtttctttttcttccttaacgatcctttccgaaatgcactctaccggaatgactctttttacttcggggtctgacgtcgacgctagagctgcaagtgcatccgcggttgtgttctctcctcgtggtatgcgaatgagttcgaacctcttgaaatttttagccaaatcttgaccacttcaagatatgcctccatccttgaatctttggcttcataatctccattgaactggttaacaaccagttgcgaatcacagtaggcaataaattcaccagctccaactccctgtgccaacatgagtccggcaattagagcttcatactctgcctcgttgttaaaagcactaaatagcaaacggaatggttgctcaaggattttcgacatgggagattccaacttgatccccactctggatccctgtttcgatgaagattcgtcaacatgcaactttcaagtttgataatctggttgctccggcgcgccaagcatcggtagtttggtcaggaaatctgccaaaacttgggccttcatgctaactcggcttttgtactctatatcatactcacttagctccaccgcccactttgccaatcttccgaactgacttggattatgaagtattgttcgaagtggctgattggttaacacctcgatcggatgagattggaagtatggacgcagctttcgggcagaggttaccaccgcaagtgcgagtttttccatcattgtatatctggtttctggatccgtcattgacttacttatgtaggaaatcggttgttgttctccgcgatcttcccgtatcaagactttgctaaccgcatggtttgatactgaaacgtacaaatagagcttctcatccacttcgggtttggacaacactggtggaatggttaggtacgccttaagctgtccaaatgcctcttcacatttctcatcccaaagaaatcctttggttctttttagaatttggtaaaaaggtaaagaattgtctgctgatcttcaaataaaacggttcataactgcgatccgaccagttatacgatgtacttctttgaagttttttggagatggcatgttcataaaggcgttgatttggttcggattgacttcaatttccctttttgtcacaatataaccaaggaatttcccggacgggactccaaacgtgcatttcgcagggttcaatttcatttggtattgattgagaatttcaaaacattcttttaaatgctagacgtgatcctttttcttcagcgacttcaccaacatatcatctatgtaaacttccattgtctttccaagatgctcgtggaacattttattgaccaatcactgataagtagtccctgcattttttaaaccaaaaggcattaccttgtagcagtaaatacctctatctgtgataaatgacgtcttctcctggtcttcgggattcatcattatttgattaaaacccgagaaggcgtccatgcaagttagtaactcattcccagcagtggattccacgagacgatctatatgcagaagcgggaaactatccttcgggcatgctttattgaggtgagtgaagtcgatgcatactctatcttttccattcttctttttgaccacaacggtgtttgccacccaatccgggtattgtactttccttatagaccttatccttaaaagtttgtccacttcgtcatttactgccttggctcgttccactccgagttttcttcttttttgttttaccggcttgaagcttggatccacgtttagctcgtggcagattatggttggatctatgccaggcatatccgctgctgaccacgcaaatgatgctttgttttttttcaaaagttctattatggcttcttttatttccccggttagagtagctccaattcgaactttccgatctggtttgtcctcctctaacattacttcgatcacgacatcgtccactttctgcccactaggaaatctcgggattgtttctttcttcgcaggcttcgttaattgctattggatcttcaaacgatggctagctagataacatgtccgcgaagcttcttgatctccccgaattgtttctactccgcttggaattggaaatttgatgcattgatgataagtagaggggactgccttcatttgataaatccaggcaatcccgaggatgatgttgtaggctgccggtttatcaaaaacgacaaagtccacgatttttgacatctttccggctagaaccggtagcttgattgttccaagagacatagccgactcgcttgtgaatgcctccaaaggagatggaggccccactatgtctgcccgactaattctcattctttccaaagttcctagaaagattaaatcaaccgaactgccagtatcgacaagaattctttacacttcgaagttagcaacgtccagcgtaatgtctagagagtcaccctcaggtctttctcatcaaa

SEQ ID NO: 158405 - DNA, 1856 bp, Arabidopsis thaliana landsberg
  unsure (1)..(1856): unsure at all n locations
ttattttgcatacttaggcatctaggatcatcttgcgtatgcattgcatgttttggtatgttttcaggtgcagaaggagttaaaaaggactctactcgatccattcactcgacccaggcagctatagaggaggatgcagtttactcgacctctntactcgatccaggatgccacagaggaggctgcagtttactcgaccctcctactcgatcaaggcaaccttagatgaagcagcagattgatctactcacctctcctactcgatccactactcgatccatntactcgaccagggtaactatctctaccagacttgttgagctatcaaagcgtcttcggatcctcctcattccccactcaaccagacatctgagcatacggataggagaggatgaagcatctactcgaccaattgatcactcggagcatagacacaaaggcgcagactttgcagcaccctctttactcaatccccaagatcgagtattcgcccaaaccgcctcaagtatcttgtcttttagtgaatctagggtttccaacattttagtataaatagatcactttgggatttgtccaaaggatctatgctttatctttcagtttttctttgtgtttatgaatcttaaaactttaattactcttaatctatttcgtttttgcatttgattttttaagtaaagttgtttagcttgtttagatctacattttggtatgatttcaataatttctgggtttgtgttcttgagaatgttgcatgagtagtgattagggttcttgtggatgaattagattagggtaatctctaggttagttagggggttaagattaggccagatcccttctggattcgcttggcccctatgcggtttttgctggctaatgtggaatttcgaccatagacgtccagcgtacaaaaaacattcaaatggatgcctgatctacgaattctagagattatagactatagaccaagagattggctagtctgttattggctttggtagattgttgcttaaaccctgctctactatgtttcatcaacgagagttgagattaggaagtggtagagttatgggggtctctgtcatgagagtggattgacccggtttctgaatctatcgtctagggtacctgcctttcgcctgttagccacctgatgaatcctagagttgctcttatcaatgaatccatccttaggacttctattattcttagaaatatttgtattcaccccctgattgcacttttatttacctgttatttgtgtcacttgttgattgcattttagttcttgaaatttgttggctgttggttctactcgacccaatgatcgagtagggctcttaagttctcatttttacctgtttgaatcctgacctaggattgttactagaaacccacaatcattataatgtggcttgacctagttgttatcttgattgctagtagtaacagtggactggattgacaccccctatagctgcatcgacatgttagtgtttaaggggaattgaactgaacctcacttcagcatataagtaggcctcctacttatcatctacactgagaagttcaccatggaagtgaaaccagtgcatgtgctaccgactgacagccctaccttggatgcggctttggagaacctcattgcatccctcacaacgatgcagctgcgtcttgcaggtaagcctctttctctcaccttacactctgttatctgttgagaatggtcttttatgtgagtgtgcactaaagtagggggagtacttgatgttacgtactctgttccggatgatatgggaggtgagaatgtggaggaagaggacgatgatgatgagttagatgacaatgcttag

SEQ ID NO: 158406 - DNA, 1680 bp, Arabidopsis thaliana landsberg
  unsure (1)..(1680): unsure at all n locations
aaaagttattacatgctgcagtgatgtgggaaacttttcttatgggtagcgtatgagatgttagaagaggtttaaggcttgtttgtaaatccataaaatgttttcacttgcagtctccaagtatcagagccaagacatgaaaagaacaatcnnnnnnnnnnnnnnnnnnnnnnnnnnntatatgcaaagagccattgcttcccgtggtgcattcgctgttttatatggcagatattcaaaacactatatcaagaagcctgaggtaatattatcttattcgtttaatattccttgtatgatttgataagcttcttaagaattatagtagcacttgttgatatcggggttcttttttcttaacataggttttggtgggtagatcaacagaagacctcgctgtggacattgatttgggaagagaaaagcggggtagcaaaatatctcgacgacaggtcggtcaatagtagatacttctatttgtattttaggtctttaagttgtatgagaagcagcagcccaggatctgtaatggttgttgtgtatgtttttttcctttttgggttactgaatgcaggcgatcatacggctgggtgatgacggttcgtttcatataaaaaacctggggaagtattcaatctcagtaaatgagaaggaagtagatcctggacagagtttaatcctcaaatccgattgtctagttgaggtttgatccgggatactcttttatgatcattacttacgcttctaggtccgtacttaaacccgatatatgtgcgcgcagatacggggaatgccttttatatttgaaacaaaccaaagttgcatgcaagagtacctgaagagaagagggaaagtgaactgagaccagatcaagagtgcgtgttgtttgtgtagatgaatgatgcatctcttgtgtaatgtaccttagccataggaacacgtcttgtagatcttttaatacatctttagttccgcatcatgcatagttgaccctgttttaaggcgttgaaatgaaaatacaagtctcttgtatctgaatttgtgttttaagcgaagaatgattgttcttgtgaagttgatacacaagttctttggatatcctatcagtataaaggataggtttccattttcgtgactcactcactgatttccattgcttgaaaattgatgatgaactaagatcaatccatgttagtttcaaaacaacagtaactgtggccaacttagttttgaaacaacactaactggtcgaagcaaaaagaaaaaagagtttcatcatatatctgatttgatggactgtttggagttaggaccaaacattatctacaaacaaagacttttctcctaacttgtgattccttcttaaaccctaggggtaatattctattttccaaggatctttagttaaaggcaaatccgggaaattattgtaatcatttggggaaacatataaaagatttgagttagatggaagtgacgattaatccaaacatatatatctctttcttcttatttcccaaattaacagacaaaagtagaatattggcttttaacaccaatataaaaacttgcttcacacctaaacacttttgtttactttagggtaagtgcaaaaagccaaccaaatccacctgcactgatttgacgtttacaaacgccgttaagtttgtcaccgtctaa

SEQ ID NO: 158407 - DNA, 2344 bp, Arabidopsis thaliana landsberg; identical to SEQ ID NO: 36735

SEQ ID NO: 158408 - DNA, 561 bp, Arabidopsis thaliana landsberg
actcgcttgcgtgtctccctctcttaaactctctctttctctttctcttttggtttctgggttatttcaaagaaaagaatcaagaaacccctctttctctcttacaagaatcccatcatggtgtttggaaaagggtcaaaccttgatcgattccttcattgcataacacccttagtgccaccccaatctctccccaaggtttcataacgtttctttctctctctctctttttgttttcgtttcaatatgtcattattgattgattttgatgggtgttgattttgcagacggagattagaaccctaaatcgattgtggcatccatgggagagacaaaaggttgagtttttcaggttgagtgatttgtgggattgttatgatgaatggagcgcttatggagctagcgttcctattcatgttaccaacggagaatctcttgttcaatactatgttccttatctctctgccatccagattttcacctctcattcctccttgatccgcttaaggtttgacttttgattgtgttacagctcaaagattgaaccttaatatcttttat

SEQ ID NO: 158409 - DNA, 1498 bp, Arabidopsis thaliana landsberg
tgacgtcaccgtggaaacgaatcaaaaggaggtagaagattcgcgccgcggaggcgatgacgtcgcggtagagactgagctgaaactgaaagatgtggaagattcgcacacggagaaaaccgaggaggaggaagaaggtagaggagaatcgcccggtgaagtttccgtagaatctgtggaacatgcggtgattgagaagatgagaggctgtgatttgtacaggggatcgtgggttaaggacgatgatgagtatccattgtatcagcctggatcgtgtccttatgtggacgatgcttttgattgccagaggaatgggaggcgtgattctgactatcttaattggagatggaagcctgacggttgtgatcttccacggtatgatgtgcttttagaattatctctattctctgtttcaaaccgccattgttatacttgatttgcagctatggcgatggtacaatgttgagcattattgtcaatccatagaaatgttgatcagcattaaactagtgttagggacagagtgtgaactaatgttgaacatgagtcgaattttcctagtagctgattgtgaaacaattgttagtataggtaaaagaatcttctttctctttacaataaaacaaaagagttgtaatcaacggttagtctttgatcaatgtatttactgtcaaactttatagatgatacagttcgcagaacacatcatgtgtaatttctgtttgtgcatagaatgcatgtatcccgttcttattgactttccaatcataggtttaatgctacagacttcttggtgaagctacgaggtaaaagtttgatgttggttggagattcaatgaatcgtaaccagtttgaatcaatgctttgcgttctacgagaaggtttatcggataagagtagaatgtatgaggttcatggccataatataacaaaagggagaggctactttgtattcaagtttgaagtaagtccactcttctgttcatgattgcctgtgttttcgattgaatttttactgtggtattctggtttgatactggaacaagcaacatattagttatggattctctagactttattagaaatcccagccacactttttaaaacctttatctttgttgtattaattgccacattgttgtttgagtaaagtatccatatttgtgcatccttttcgggtgattatcgtaagggtttaataatgtctgacaggattattattgcacagtagagtttgtaaggtctcattttcttgtgaggtaagtagttatagcaaatgctcaaggaaatattaatgcgtccctttccattgatcgcattggcaagtcccatgctaaatggaagcgagctgacattcatgtctttaaccctgaacattggtgggttcatgtaaagaccgccacagggtgatggctctttccttgtatgcattatcactattcttcacaaatgttgacttagtcagaggatttccaaatcgcacattcatcatagtcgc

SEQ ID NO: 158410 - DNA, 904 bp, Arabidopsis thaliana landsberg
tggactctcttcctcttctcatttatcttctccctccaatcacacagcaaagaagaagaagaagacacaccaatcacacgattccagcaatacttaagattcaacaccgctcatccaaaccctaactacaccgcaccaatctcttttcttcttgatcaagcaagatcaattggtcttacttctcgaaccatcgagtttgttcctggtaagccagttcttctcctcacatggctaggctcaaaccttaacctttcttcaattctcttcaactctcatctcgattctgttcccgcggaatccgagaagtggatacatccaccattctcagctcaccgaaccatcgatggtcatatctacgctcgcggcgcgcaagatgacaagtgtataggagttcagtatctagaagcaatcaggaacttgaaatcaagaagcttctctcctcttcgtacgatccatatctcttacgtacctgaagaagagatcggtggattcggtgggatgatgaaattcgcggcgtcttcggagtttaaagatttgaatctgggatttgttatggatgaaggacaagcgagtcccggagatgagttcagggtgttttacgctgaacgaactccttggcatctcgctatccgagctaatggtatgccaggtcatggtgctaagctttatgataattcagctatggagaatttgatgaagagtgttgagttgatttctaggtttagagagtcacagtttgattgtgttaaagctggtaaagctgcgaattcggaggttatctctgtgaatccagtttatcttaaagctggaactccctgcactactgtaagagcacctccagtcctactctatgtttctctgtaataatatattatataaactcactctatattccatcttaaac

SEQ ID NO: 158411 - DNA, 799 bp, Arabidopsis thaliana landsberg
  unsure (1)..(799): unsure at all n locations
attcaccatgatcatgctgtcatggtcatcacatatatcagancgacaaatgaagacatcatgctcatgatgagatgaccttgaagacagtgatgatgatgatgattctgatgaggacaacgatgaaggtattcaatcaaatttctcaaccatcaagtccatctgataattcaaaacacaacgaaatttttagttagcttatatttgcagattcagtgaatggtcacagaatccatcatacatccacctacattaacaggagaatgcaactggtttttgatagcctcggcttgcagagatatgtactcttgtgctctaaggtcagtccagaacaaaacatccagtcaagttaacacttaacatttgtataacacaagcacacacacttgtatgcgcagatccctgacggtggattcagagacaagccgaggaaaccccgtgacttctaccacacatgttactgcctgagcggcttgtctgtggctcagcacgcttggttaaaagacgaggacactcctcctttgactcgcgacattatgggtggctactcgaatctccttgaacctgttcaacttcttcacaacattgtcatggatcagtataatgaagctatcgagttcttctttaaagcagcatgacccgttgttgctaatgtatgggaaactccaaacataagagttttcgtagtgttgtaacttgtaagatttcaaaagaagtttcactaatttaaccttaaaacctgttacttttttattacgtatataccatttatcatatctttggtttacgacttaaagaa

SEQ ID NO: 158412 - DNA, 778 bp, Arabidopsis thaliana landsberg
acccctagagaaacctcaaatttggttgtcaggggaatgtcttctgaacatatatcaggtggtggagcttcaaagacgaagaaacataagtggagctcaagccagaaccgacccaaaccaatgggagtgtctagacaggaacgatctgttcatcttgtatctccttcgaactcgtttgcgtcggaggacgatcatcacatgttgaagataagtctgagctcgatttcgaagcttgaggttaggaacttgaagcggaaactaaaatctgagcttgatgaggttaggagcttgatcaaacggttcgatcccgaagctaatcttggtgggtcaatggctaaaagtggtgttgtagggagaagcaagaaggtgaaaacagggaatggaggaggtaagaaaagtgggcatggagctgataaaggtacggttcagatttttaagaactgtaacagtttgcttacgaaattgatgaagcataagagtgcatgggtattcaatgtccctgtggatgctaaaggacttggcttgcatgattatcacaacattgttaaagagcctatggatttgggtacagtgaagactaagttggggaaaagtttgtataagtcgccattggatttcgctgaagatgttagacttacttttaacaatgcgattttgtataatccgattgggcatgatgtgtatcgttttgctgagcttttgttgaacatgtttgaagataaatgggtatccattgaaatgcagtatgataatcttcataggaagttcaaaccaactc

SEQ ID NO: 158413 - DNA, 416 bp, Arabidopsis thaliana landsberg; identical to SEQ ID NO: 42441

SEQ ID NO: 158414 - DNA, 1439 bp, Arabidopsis thaliana landsberg; identical to SEQ ID NO: 57565
  unsure (1)..(1439): unsure at all n locations

SEQ ID NO: 158415 - DNA, 483 bp, Arabidopsis thaliana landsberg
aggtatcatctattctctctaaactcaagctcttactgtaatgatttacatgtttgtgttcttggtgatgaagttgtggaacctagaagagattctagaaggttctaatgtcaactctgggaatgcatctggagctgcagaagacagtgacagcgacaatgatgggatggaccttgacaatgatccttccaagtcttccaaaggtaaagagaaacctgcaaaactttttggaacatcttaaacagttccttgagatgataactacaaccatgatctgatctcgagtgttttttggctttacaggcagcaagaggaaaacaaaaagtaaagcgaatacgctgaacgctacaaataatttctttgcagacttatagattttgtttcagattcagtctggatagtatatcagtttcatacctgaattgtctacttgattctgacagtttgttaaaaattttggtttttagtaagattgtgttttgc

SEQ ID NO: 158416 - DNA, 1143 bp, Arabidopsis thaliana landsberg
ggtcaggaagttcctgcttctgacaatgattcttggctctacgatggtgaagatgaactaaactctgttcttcaagagaggcagaaagagatggagttttataactcaaagaaggaacgcaaaaataaaggtaaggagaagcaagaagctggaagctcatctgatgcaaacatgaacaattttgatctcggtgatatctcaaagtcgatgcagcaattcatgcacaaggtatcaagctacaaaggagcagaagttccagaaaacaggttatccattatttgaacattaatcatttttcatgaacatctctttgttaatttcaagctcaacacattaattttttttttctggacttatgtagggatttcaaagaagtgagtatagatgttgatcgtttcatgaaagatattgagtcaatgctaggaagccaaggtcgtgacgaacaagctgatgatgacagtgatggctctgaaggatcttccatggacatggattttggtatttcctaaactttttttttttttcctaatggcaacatatactgatgtataaggtctaaccctcatgtgggacttactaacatgttatggtatgcagatgacgttgaagatgatagcgaagtagaagaatctatcgaagatgctaaggaaagctttgaggaatcctactatggagcaatgaatgaggaactgaaaaactcaactcttgagaaaagctttgaaaatgtgaatcaacaacattcttctaagcaaaacgaggtaactctcataactagactcagtgaatttaggagcttagattttgctgtaatggtatttatgagatgaatgtaatgtctctgcaggaatcatcaaaaactagagatgagaaggatgatgagtttacaccagttgatgcagattttaaccttgttaagaacctacttgaatcctactcttcacaacaaggacttcctggtcctgcttccaatttgctcggcctcatgggtttgcagcttccaaaagattccggcgacaaaaactgaatgcttatcaaaatgtagtttgtttttgggttcactttgtttaatcacataatcgtgagtaacgttgttggggaagtttttgtgttgtcgaaagtaagcacatgacatgtgatttcaag

SEQ ID NO: 158417 - DNA, 1401 bp, Arabidopsis thaliana landsberg
taagactaattttgttaaaagctctgtctctaattaatattcacgaacacaactttatttgatgtagggtgaaaaaggaggtttgactgcatgggagcctgtccgtgcacaagaatggctggaagtaagagttacaacacataaggacaccttttgatgtcctttttgcggatttgaaaatcgttaagaatataaccattcaggtgatcaggtctaacctttgtaactggtgttgcagttgctcaatcccacagatttctttacttgtgttatggctgaacgcgagtatgtagaatgtacctcagctgttatacaagctttggtactgttcaaccaactttatccggatcacagggcaaaagagatcatcaagtcgattgagaaaggggtgcaattcattgaaagcaaacaaacgcctgatggttcatggtatgcctttaacataattaagacgtgtttaatgaatatagtttttctcttaaggtaatagtttctttttgagtaatgttaggcatggaaactggggtatctgtttcatctacgctacttggtttgctcttggaggcctagcagcagctggtaaaacttgcaaaagttgcctggctatgcgcaaaggtgtccactttttgctcacgacacaaagagatgatggaggttggggtgaaagctatttatcatgctccgaacaggtatgtcgagacataaatgcaaaatctttgtccgatcaattcatctaacttatcatgaaaaatgttatcacattttttaacatgatttttatgcagagatatataccatcagaaggagaaagatcaaaccttgtgcaaacatcatgggctatgatggctctaattcatacgggacaggttcaaacactttaatctatatttgcattttttttctaatttcaaatacacgagttggtctcgaaaccgatactcgcttacactttcgtatatatattcacacatataggctgagagagatttgactcctcttcatcgtgctgccaaacttatcatcaattcacaacttgaaaacggcgattttcctcaacaggttacttctttttagacatgatctagaacatatataagaaagtatgatctgtgatcaagatttgaacttgcttaaatattttttgtgtgtgcatatacaggaaatagtaggagcgttcatgaatacatgcatgctacactatgctacatacagaaacaccttcccattatgggcactcgcagaataccgaaaagttgtgtttatcgttaattaatcatttacttatttatgtaatttttttctttttaaatgagatgaatgtttttccagcgacggaatacaccgaatattaaaagatgaacacacaactatttgaatgaataaataatgatttagtcttct

SEQ ID NO: 158418 - DNA, 560 bp, Arabidopsis thaliana landsberg
tgtttagtttttctcatgttttgtttgagtttttatgaaaatgaattgtcttatgattttgtgtctgtagaagttcttgagttgcaaaggtttatgcgtaaaggaaacattgaacctcagtggatcattatctcaacaactgttgaatgctgcattggaaaagttgcttcattttggacgaatagttaatctcgataaggtaagcaaacatcgtaggccattgtaatgcatgtgaagttgcttagatgatggattgagtgaaatgcaggtggaagtttactttggtgaggatgcttgcactcctgcaggaatttacagtgttagaaacgaaatctcagctctcagctggatcctttcgcttataccggtttcttgtaagatgcaaacacaagttgatacctttgaagctctacgagctgctttaaaaggtagaatcaatgaggttgttggagctgaaaaggagaaagctagagttgttgatagctatagatgcgaaaaggaaagcaaattagtagaatggggtcaggacaatggagtcaaaaccaaattgcagatagctc

SEQ ID NO: 158419 - DNA, 1057 bp, Arabidopsis thaliana landsberg
  unsure (1)..(1057): unsure at all n locations
ggtccatccccgatccattaaacttcgtacatcntcatttccgtgacactgatgaacatcaacgcattagcgcgtcatgtactcataaactcagacggagttcttgagagaacagtcttccctagtcgatacgccatggaaatgtcttcttcaatttacaagaattgggttttcaccgagcaggctctcccaaaagacctcctcaaacggtatacatcaagtatcttgggtcacaagtaacattgaatcttgtggaacaagtaaccttacaatcccatgtttttgcagaggagttgctgttgaagatccaaacagtgacaacggcgttaagcttctgatcgaagattacccgtttgcggtcgacggtttagagatttggtcagcgatcaaaacatgggtcacagagtactgcacaatctactacaagaatgacaaaaccgtccaaacggatacagagatccaatcatggtggaccgagctccgaaccaaaggccacggcgacaaacaacacgagtcatggtggccttccatgcaaacccgcgacgacctaatcgaaacctgcacgatcatcatctggatcgcctctgctcttcacgcagcagtaaatttcggacagtacccttacgccggttttctccctaaccgtcctaccgtcagccgccggtttatgcctgaaccgggtacggatgagtacgctgagctggaggaagatgctgacgtagcgttcttgaagacgatcacgccgcagttacagactctacttggtatctccatcatagagatattgtctatgcattcaacggacgagatctacttagggcagagagattcaccgaattggacggcggatgatgagcctttggaggcgtttaagcggtttgggaaagaacttgagctgatagagaacaatattatacgaagaaacaatgacaagaggttcaagaaccgaaccggaccggttaacataccgtacacattgttgtacccgaatactacggattatacgagagaaggtgggcttactgggaaagggatcccgaacagtgtctcaatctaa

SEQ ID NO: 158420 - DNA, 1245 bp, Arabidopsis thaliana landsberg
gttaaattgttgtgtgcgaatcaacagagagagagaaaagggcacatcaaataggtgagtctcctaaacatgccttccttcaactcctccggcaatctcgcggtggccgttgctcttctctttgcgggcgccttatatttctatttctcatcaattacggtttctgatcctatgtccgatctactacacaatgtcgaaactgtaagttactttataatagaatcggaatttgagagtaaatataggaagattttaaatgttttgtgttaaatagagatggacagagtatcctgtggacgagctagaggcggtcctagacaaggcagcaatgggaaacaacaaaacggtgattatagcaatggtgaacaaagcttacgtggaggaggttgaaggagggaggacaatgctggatctgtttttggagagtttttgggaaggagagggtactcggccgcttcttgaccatctgatgctagtggcagcggatcagacttcctacgatcgttgcctcttcaggaggctccactgctacaagatggataccgatggggttgacttggagggagagaaggtatatatgtcaaaagatttcattgagatgatgtggcggaggactcacttgctcctagacgtcctcagccgcggctacaatcttactttcacggttaggtccgtcccttggttttggaatgtataacaaaacacctaatttgtttctctataagtagtgtatgtatatgtcaggacacggacgtgatgtggctaaggagcccttttccccgactaagctacaacgagagcttggatatgcagataagcgtggacagtattggcctggttggaggacacttgatcaacacgggattctaccacgtcaggtccaacaacaagaccatctccctcttccagaaatggtacgacatgaggctcaagtcgacgggcatgaaggaacaagatgtccttaagagtctcctagactctggtttctttaaccagcttggcctcaacgttggcttcctcaacactaccgaattcagtggcttctgccaagacagccatgacatgggcgttgtcaccaccgtccatgccaactgttgccgccacatccttgctaagatctctgatctaactcttgttcttcgtgactggaaacgctacaaagcctcccatgtcaacagcaattggagcccccatgttgagtgcgggcgttcatggagtgacgctcactatatccccaagctctga

SEQ ID NO: 158421 - DNA, 554 bp, Arabidopsis thaliana landsberg; identical to SEQ ID NO: 67580

SEQ ID NO: 158422 - DNA, 629 bp, Arabidopsis thaliana landsberg
aaaacttttctttttcacactctagatttaaattatccctatgattacaaaacaattttgttcttagttttataacttgtgtattaccatcctttcttgattaactcttgttaggagactatgaatgtaagatcaataaagttcttcaactttataattccttctataagatgtgtgtcggcaacagaattaaattaaatctttatagtttaactttaatctcaaccataattcaagagaatagaaaacatgaagaatcttgagtcttttcaagaaaatcttgattggttttttgttggattcttgtaattctgtactaatcaaattttgccctaaacgtttttggctttggagcagcaatcacggcgtaccaatcggagctaggaggagattcctctcccttgaggaaatctgggagaggaaagatcgaaatcaaacggatcgagaacacaacgaatcgtcaagtcactttttgcaaacgtagaaatggtttgctcaagaaagcttacgagctctctgttctctgtgatgctgaagtcgcactcatcgttttctctagccgtggtcgtctctatgagtactctaacaacaggtttcttcttcttctcgtgctctgttcttactttatt

SEQ ID NO: 158423 - DNA, 507 bp, Arabidopsis thaliana landsberg
atttctggttttgtctactactcttgaaggaaaatcctgaagaaaccaattgtaacttgtacacgtgggaaaatataagtgttcctgaggagtaaaagaggggaaaaagagaatgagaatagtcgggttaacgggaggcatagcgtctgggaagagtacagtgtctaacctcttcaaggctagtggcattcccgttgttgacgctgatgttgttgctcgagtaaggaacaaacatctctcttttctacttgctggaattcttttgtaactattgtgtcaccgttgctaagagagatgtactcctagatgcaatttagctcaagagaagtttagtaaaagatgtggaaatgtgttgttttactatataggatgtattgaagaaaggaagcggtggatggaaaagagtcgttgcagcttttggtgaggagattctgcttcctagtgagaagtggatcggccaaactcggtcagatgtgttctcgtctgattcaagcgtcacttctaaac

SEQ ID NO: 158424 - DNA, 1598 bp, Arabidopsis thaliana landsberg; identical to SEQ ID NO: 6349

SEQ ID NO: 158425 - DNA, 1359 bp, Arabidopsis thaliana landsberg; identical to SEQ ID NO: 6028
  unsure (1)..(1359): unsure at all n locations

SEQ ID NO: 158426 - DNA, 249 bp, Arabidopsis thaliana landsberg
gcctgaatccccagagtgcgacgaaaatgcagcagcaagtaagaaggtcatctcgaataggagtaatttattttgttagcatcttcttcaattgatgataatggatggttgatgatgatgttgcaggggagtaagagtggatctgagatggaggtgacatgggacccccacccgaacattaatatcttcagccgtcaaaacaaaagagtccatgacctcgatgacgatctcaaatccgccaagggtctt

SEQ ID NO: 158427 - DNA, 1526 bp, Arabidopsis thaliana landsberg
tgcaacttgctctgctcttgcggttagggcgaaagacgcgaaaacggtgattggagaatgtgaagatgaagaaggagggaggtttgtgaagaagatgatgacgtttcttgattcggtagaggaagaggtgaaaatagcgaaaggtgaagagaggaaagtgatggagcttgtgaaacgtacaacggattattatcaagcaggagctgttacaaaggggaagaatccacttcatttatttgttatcgttaaagattttcttgccatggttgataaagtttgcttagatataatgaggaatatgcagaggaggaaggttggtagtccgatatcgccttcttcgcagcggaatgcggtgaaatcccggttttcctccgaatttcatgtcggacagaacttggagtgattctggtgggtcggattccgatatgtgagtttgcaaagaccatttttaatcttgatgatcatattgtttagaggagaaatgatttgcttggttgtaaataatagaatcgtttggggtatttgattatatttttttcctacaaaaaaaactttttgaagtgttaataagatttgatagtccgagactccgaggtatttttctgcatagtgttcataagaacagagtattgcaatttgcactaattcatattatgaatcagttttaggatctttggttacattttcaccaacctaaaatctgatggatgaaacaaattcagcccttttacaaatttctcagaagcagtctaggtcaagattgctaatgattattctattgtttttcatttcttgccatgtcgtaaattcctgaatttttagttttagacttgataaagacagaccacgaagtcaagactttgaatagacaaagaaaggttgttgatttgaatattgtttggtacagtaaaaaaagaagaagtcattctaacaagtcgcaaccaatatttacatcaggaaagaacaaaacaagaaaagcaaaaaatattctgctgattttctatggttcaacaacattagtactcagagggtggtgcagatcttaaccacgatggcttattctgcttgacgagtccaccatattcacagctagctggtcaagtgttttacaacttcaccttctggttcaaggactcaccagatggaatggacttatctttctcctttacttttccctacgaccacacttcttggtcttcacatattccaaaaccaaattagttgatgacacaaaccatgttggtattaacataaatagcttaatatcagagatatgggctttggttacttcaaagatgatgctactttcaaaagcatctctcttgacagctgaaactctacgtagctccaagaacagcttaatgctactacatgctactcgtgtgtctaaaccacctctacttacttttctgtacaggtacatttggatatatatcactaaagctctcaaaaacagcaagaaagcacaagctctgatgaaatcacatttggtgttttcattctggagactaggtcgaagactgata

SEQ ID NO: 158428 - DNA, 984 bp, Arabidopsis thaliana landsberg
caacaacaatgggaatttccagaacaaagatgttgaagaaggctgggaattggttgagaaccttgctcaatcagatggtaattacaacgaggactgcgataggaccgtcagaagcacagctgactctgatgacaaacacaggaaggagatcaaagcgctgtatgacaagctggacaggattcttcttagccagcaaaagcatgtgcacttccttgttgatgacgaaaaatatcaggtccaagatgggagggtaaccagttggaagaagtcagctacaaagggtataacaacttcaaaaccaacaaccccaacctctcctaccgcagcacaaacgttgctaatcctcaagatcaagtgtatcctccacaacaacaacaaggtcagaacaaaccttttgttctttacaatcaaggttttgctcctaagcagcaatttcaggggaattaccagccgcaaccaccacctgggtttgcacctcagcaaaaccaaggtcctgctactcctaaggctgacatgaaacaaatggtacaacaactgcttcacgggcaagcctctggctccatggatttggcaaagaagatatctaagttacataacaagctggactgtagctacaatgatctcaatgtcaagatggaaacactgaataccaaagtccgttacttagagggacattctgcatcttcttcagctccaaaacagacaggccaactaccaggcaaagcaattcagaatccaaaagaatatgctcatgctatcaccttgcgtagtggaaaagcacttccaactagggaggaacccaacacggtcactgaggacagtgaagatcaagatggggaggatttaagtctcgagaaagatcaagctgacaaaccactcgaccagccactcgagcaaccactcgaccagccacccgagcaatcactcgaccagtcactcgagcaacctctcgagcggccactcgacaacgttactcgaccggcc

SEQ ID NO: 158429 - DNA, 829 bp, Arabidopsis thaliana landsberg
  unsure (1)..(829): unsure at all n locations
atgctcatcgaagtaaacaccctccttcagggntgctgggatatccgatatgagatcttaacagccattcacagcactcgtgaactgaacaattactccgctccttcctctgttgaggcacctattacagctttccacggacagtctttcaagttgtccgaaaatcggtggaattcctcaccgaggccgactgttgcctggagccagggctccctcagaagagatccacactgcctagaaggcctacaagctcgctggagtatcgtcttttttcgaactcaggcctaaagaagggcttgcgctcgtgaatgggactgcggtggggtctgctttagcctctacggtactgtacgatgccaacattttggtggttttctccgaagttgcttccgccatgtttgcagaggttatgcaggggaaaccagagtttaccgatcatcttacgcataaactcaagcaccatcctggtcagatcgaagccgccgctatcatggagcatattctagacggaagctcttatgtaaaagaagctctacatctccacaagattgatccgcttcagaaacctaaacaagatcggtatgttcttgggtatcaagcaactagtttcttgtaacttaagtaacccttttgatttgctttctgattaaattgactaatagtttcgtgtttaaattaacagttacgctctgcgaacatctccgcaatggcttggaccgcagattgaggtgataagagcagcgactaagatgatcgaacgtgagataaactcagtaaacgataaccctttgatcgatgtttcaagaaacaaagcttccatggtgggaac

SEQ ID NO: 158430 - DNA, 1002 bp, Arabidopsis thaliana landsberg
ctggacaataaagaaagaaaaaccattttaaaaatctttttatactaaaactccacagatctcccattctgagatgcagagtgataataacaacaattgagaccaaagcaaaatccgaaactgtcaccgttttcctttgtcttcttctctgccaaaatctttcaatctttatcttcttcctttttcttgtttttctaaaactttctccatcttgaaaaccaaaacaacccaagattaataatatacaccaatgggtactggttggcgacgagccttttgcaccaccgcccctagaaacagcgatgccgcggcgccggatctcgacaagcaacgcaccggctataatcttaccccaagtcctagcccaagaagctgcgttaagctagcttttctatccggaggaagtaatccttcaactccccgatcaacttctagtcctagcctacgttgtcggactgcagatgctcaaactcccacggcggaacaaacttcgacgccaagatcggcgactaagagtccaagactgtctttggccgctatctctaacccttcttcgcctcggtcaccgttaaaactctctctgtttcgcaacagcttcaaattcagagtaagaaacatattaagcaacaaagagataaaaataacttataaaggcatgtttttgatggttggttaactttttgcagagtacttgtggaatatgtttgaacagtgtgaaaacagggcaaggaacggcgaagtatacggccgagtgttcacacgcatttcatttcccttgtattgccgactatgttcgtaaacagggcaagcttgtttgtcctgtttgtaattccatctggaaagacgcttctctccttgttcctcataagaatgcaactgaatctcccctggacgactctgtttccgtaatccaggagaagcgcgttgttgtcacgtcttctcccagagcaaaaccaaggccaaagcagagtgattattcgagattttacgacgatgatgagc

SEQ ID NO: 158431 - DNA, 1338 bp, Arabidopsis thaliana landsberg
  unsure (1)..(1338): unsure at all n locations
atctctctgttcgattactttttcaacgagtctcagactctcccaaacatgctctcctgcaatctcatcatcaaagcacactgcgaccaaggcagcgtcgaccacgctcttgagctctaccgccacattttgctcgacgggagtttagctccagggatcgagacgtacaggatactgacgaaagccttggtcggtgctaaaagattagatgaagcttgtgatttagtgagatccatgagccgctgtgatttcgccgtatacgacattctgattcgagggtttctggataaaggcaaattcgtaagggctagccaaatcttcgaggaattgaaaggaccgaatagtaaacttccatggcgaaactatcacaaggcgattgcaatcttcaacgtttcgtttatggactactggttcaagcaaggcaaagacgaggaggctatggagattttcgcaactctcgaacatgctgaattgctcaacaccatttccggaaacggagttttgaaatgccttgtggagcacggtaggaaaacagaggcctgggaattgttcttagatatgatagaaatctgtgattccgagacggttggcataataatgtccaaggagggttttttcggcgaaaagactatcccgtttgagcgagtgagaagaacgtgttataccaggatgatcgcgagtctctgccaacaaggaaacatgttggaggcagagaaactctttgccgacatgtttgccgacgttgacggtgatgacttgttggcaggacctgatgtttcaacattcagagcaatgatcaatggttatgttaaggtagggagagtcgatgatgctatcaagaccttgaacaagatgaagatttctaatctcagaaagctttctattcatcaagccacataactagactctttattntatttttatccatgttgattctgaaaatcacacaataaatttgtttaaagggggtaaacaaatttacttaactctctctcgctatttagtgaccaaagattcaatgaaaagaagaacaaggttgcttagagacaaagttagggttttgcccaagaacaatgaagaaaactagggtttttagtattaaatttcggatccttagaatagaggacaaacccctctatttatacactattaagatggttaaaagatttgttaaacttctatttcttcgaggattgaatcttctaatttcctttatctccaaagacttcctattttcaaaggagaaaacttctttttcttcgaattaggaagtcggctagacggtctccctacttcgggctaaagtcggcaaatgacctccttattttggcccattaa

SEQ ID NO: 158432 - DNA, 1021 bp, Arabidopsis thaliana landsberg; identical to SEQ ID NO: 4296

SEQ ID NO: 158433 - DNA, 906 bp, Arabidopsis thaliana landsberg
attcgatttccagcagaatccataaacttagagatgaagagttgcagccacagttgatacagttaattcacgggtaaatcatctctctatattttgacatctttttacagattaagctgaaaaaactgatattttgtgttttgaaggttgataagaatgtggaggtcaatgctgaggtgccaccagaaacagtttcaggcgatcagggagagcaaggttcgatctctaaaggcgaacacaaccttacaaaatgactctggctctacagcaattcttgatcttgagatagagcttagagaatggtgcatcagcttcaacaactgggtcaacacccagaaatcatacgttcagttcctaagcggatggctcacgaaatgccttcactatgaacccgaggcaaccgatgacggaatcgctcctttctctcctagccagatcggtgcaccgcccatctttatcatttgcaaagattggcaagaagcaatgtgtagaatatctggagagaatgtgaccaatgcaatgcaaggttttgcttcaagcctacacgagctatgggagaagcaagaagaagagcaaagggtaaaagcgcattctgagcagcgagatgcagagtcagagagaagtgtggtttcgaaaggtcggtcagagagtgggatatcagctttggatgatttgaaagtggatttagattcaatgaggaagaggctagtcgaggagagaggtaagggtaaagaaaccattaagcttgtgaacaacgcgtcttcgagcagcttaaaagctggtttagttcccattttcggggcactgagaaaattcacatcagaagttgtgaaagctcatgaaattgttaggcttcaacatcctcagacctcctctagtagagagtgtggacttaccacataaagc

SEQ ID NO: 158434 - DNA, 1565 bp, Arabidopsis thaliana landsberg
  unsure (1)..(1565): unsure at all n locations
caaatcgtctacatcagctgcgtagaggaggtacgatactccttcgtcagccacctctccgaagctctccggcgcaaaggcataaacgatgtcttcatcgatagcgatgattcgctttccaacgagtctcaatcaatggtcgagagagctagggtttctgttatgattttaccaggaaaccgtacgatatctcttgaaaagctcgtgaaggttctcgattgccagaagaacaaagatcaggtggtggttccggtgttgtacggcgtcaggtcatcagagaccgaatggcttagcgcgctggattcgaaaggattctcatcagtccaccagtccaggtattctcataaactactttgccatcttcttctataaagctagatttctaaaacaaatatggtgcaggaaggaatgtagtgactcccaccttgtaaaagagattgttagagatttgtatgaaaagctcttttatatggaacgaattggaatctactcgaagctgctggagattgagaannnnnnnnnnnnnnnnnnnnnnnnnnnnnnnnnngttgggatttggggtatgcctggcataggcaagactacacttgctaaagcagtctttgaccaaatgtctggtgagtttgatgctcattgctttattgaagactacaccaaagctattcaagagaagggtgtttattgtttgctggaggaacagtttttgaaacaaaatgctggtgctagtggtaccgttacgaaattgagcttgcttagagatagattaaacaataagagggttcttgttgttcttgatgatgtccgcagtcctctggttgtagagtcttttcttgcagggtttgactggtttggtcccaaaagtctaatcatcataacctccaaagataaatcggtgtttcgcctttgtcgagtcaatcaaatatacgaggttcagggtttaaatgagaaagaggctcttcaactcttctctttgtgtgcgtctatagacgatatggcagagcagaatctccacgaggtgtcaatgaaagttattaaatatgctaatggccatccattagctctcaatctctatggcagagaactgatggggaagaaaagaccaccagaaatggagatagcattcctcaaactcaaggaatgtcctccagctatttttgttgatgcaatcaagagctcgtatgacacactcaatgacagggaaaaaaacatttttttggacatagcttgtttcttccagggagaaaatgttgactacgtgatgcaactgcttgagggttgtggtttctttccacatgttggaattgatgttcttgtggagaagagtctggtgactatttcagaaaaccgagtgcggatgcataacttgatccaagatgttggccgacaaataataaatagagaaacaagacagactaagaggcgcagcagactgtgggaaccttgcagcatcaaatatttattagaagataaggaacaaaacgaaaatgatgaacaaaaaacaacttttgaacgtgctcaggtctgttatcatttaatagttttatattgaacctattttatgagcc

SEQ ID NO: 158435 - DNA, 2890 bp, Arabidopsis thaliana landsberg
ttcaatttatgcaggagttagaaaagtgtttcctctagcatttcatggcgcatgtgctgtgcacattgaaaggaacgtaagggcgaagagtccggggatatgaatctcagcgcttgttggtcgagctgctcgggcattcaattttggcgactttaaagaatggtacaatgagattgtcaagcgaagcaagaactgttcagcctatttggatgctattctacttgaacattggactcaagcgtattgtctggctaaacgctataacatcatgagtagtaacattgctgaagtgttgaacggtgctatagcaaaaattgttgagctaccaattgtgtctatagtggagtctatcagaataaagctgatggagtgatttgtttcagacgggagaaagcaaaaaaactaatttgtttgtgagaaatcatcacgccaaaggttaacgagctactccttcggcaccataaggcttctgctggtttacctgttaaagctgtttcagaatggagttttcaagttgggtctggcgtaaagcagtactacgtggacctcgcaatgaagacctgtacttgcttgcaatttcagaagctggaaatacccttctgccacgctttagctgcagcaagaaagaaagaagtccttgtgacggaattggtaggtaaccattacacggttacacaattctgcggggcatatgaaatgtttatttatcatgtgcctaatgaaagtgatgaagtcatccctccaactgtgcaagagactaaatttctgcctcctaagaacgagaatggtccaggacgtagaaggaagagaaggatccctcctacgggggagtatacggtacgtcaaagtatatatattgaaataagtagacccaatgttacactaatagagattttaatgtgacagggacagaagagcctcaaccgtggaccgcataaatgttttacatgcggtgaaacaggtcataacagagctacttgctctaacatgcctcgttaaggttagtgcagctgtttatagattactttgtagttaattatgcggtattggaattgtttgtgaactttggctgttaatacttgtggtaggttctataaaataaaaggaaaactttttgaaacataagaagctgaataatgtgtagcgggaaagtaattttttttggaacgctaggcagtggcgaatggacacagccctgcagcagcaatatcttttgtttctcgggaagacacgcctgagaataagccctactccatcaagtaactttaatgtatataccaaggatggttatatccagtttgtataattaagatgttgagcatcaaaaacaaatgatgtgtccggttcctatgaatgaaaatgcttcttatggtgtacctgcttattgtaagaagcgtgcaaattgaacaaggaatagaaatacattaaggcgggtacagaacaggctggaaaatatgacatgtcgagataaaaggtgatgagaacatggcctaaaacgtaaaggaaagtacatgagagaaacaaagtagtcgattagcataattcctgaaagcgaattgcaaaaaaatacacaaaacaacgacgacagaggttctcgacagtgttgttgtttagaaaacagtgagggagatcatagccaaatacaaacgtatagtcaaaccaaccacaccttggtaagcggaaggtagcagtttgatgtaaaaccatttcagcaattgacacagctgcctcattagaaggaatccaagaaaaaggcctacatcgcttgcatacccccgtcataagaacctgaacaaacaagaactagacctagtgaaaaccttgcataaatgctggctggacatgtcgcaccaaggaggtcaaccgaacgcgtaagccttcaacaaactgtgcatctggttgccacgttccaaacaacgcaaaaacaaagggcggtacatagaatctacatttgcatgcgaagttacgaaaacaaactcatcaatatcagcttcggcaagaacactgcgatcgaaaaccatagtcaggaagtcaggtccagaggctatcaaagaacctaattcccaaaacccatgatgtgctacacggcggacaatgtcaagtgataataggtttctagtcaattatcctaaaacttcaatcatgtcgttgtagtattttaagttgtcaatccaaatgggtgtgatgctagcaatcaagatgcaatcagagttcacaaaatcaagccaagcaataacatgttttggggtgttctagcagtcctaagtgaacatgcaggaaacagaaaatctagaagaatagaaaagcactcgaccaacacagcttgttgccaagccctggggggggggtcgagtgataggtcgactaatagacagaaaatgtaacaaggatactcaactgcacagtctgtttccagacaactgggtggtcgagtatgaggtcgagtaacaagaaagaactgcagaaattaagcgacagataacaagatgcagtaaacaacagtagagtaaacaaagaattcaatcagataaagaattcccgaggatggggtaattgagtagtttcgattcctcagtttacaggtgattgacatgctcaataaattaaccctagacaacaagttcattaaccaaatctaagtgccaccgcaacagagaccctcaagttaaccaagtcccagactcaatcaccattgacgagagctaacctaacaggcattacgaatcaacaagttaaagccaaaacgctccctgcaaccaataccttggtacagggtcacgaatctctggaattagtggttcagacatttcatcgaacactttttgtgcgcggaaatgtctgggctcaaattccagttgatccgaaaggaagaggcattaagaacaactaa

SEQ ID NO: 158436 - DNA, 475 bp, Arabidopsis thaliana landsberg
aattattctcagatggagaaacccatctccatcacgacggggaagtttcggaccaacaacaacaacaatcataacaatgtctggttcgttgttccactcttctttatcctctgcatcgggctcctgtggttcaactactctgctctcttcaccgagacagacaaaacacgctttctcaatttccgacgtttcccagaaatcaacatcctctcaattcaccaaagatgacggcttttctcgatttccctacgacccatctcctgattcttgctgctccggccggcatatttacgttcatgaacttccgtatagattcaatggtgatctgcttgataattgctttaagattactcgaggaaccggggaagacatttggccttacatcgaaaactatggtttaggccctgtgtttaacatttacgagaatgtgttgttggaacgctagtggtttaccaccaatcagtttctgctcgcg

SEQ ID NO: 158437 - DNA, 1261 bp, Arabidopsis thaliana landsberg
ctttctcactcttttttatctctcaaatttgaccttctccgttgttctttcgcatcgctcaggttcgtttcgatctcgaattacatctcctacggattcaatatttgttcaacctaattgttcccatttctatcgcacgaagattagttcggggaatctaatcgtaatcataatgtttttttagattgcgacgaaattattgtgatatttaggtaacggagctcaggtatagaatctgtgtgtcgacttgattagggcagatgtagaaaaacctgagaagtagtctttttcagattaactagggttagggttctgatttgattctcggttttaagcaggagcagaagcttcaatctgtgttaatttcgcgtaacaagggtttggcggagcaagatctaactaagcttgatgtaacaaagttacatcctctgtttcctgaagtcatttctcgccaagcaaccataaatatcggtaaattacactctgcttttgccagctcctctaggtctatagtataacttgatgtcaaagaaaccaatactgtgctaaatatatctcaggaaccattggtcatgtcgctcacggtaaatcgactatagtgaaagctatctctggtgtacagactgtccgttttaaaaatgaattggagcgtaacattaccattaagcttggatatgcaaacgccaagatttacaaatgtgaggatgagaaatgccctagaccaatgtgctacaagtgagtccttcttacaacagtgtttttatcttctacttctactataaggtttgagtcaaggtctaacaacttatctgttgtattagggcctacggaagtggaaaggaagacactcccaattgtgatgtccccggatttgaaaactccaagatgaaactattgaggcatgtctcattcgttgattgcccggtatgatgagttttaccgttatctttattcttcattaattaccattttcatttgatagtataagtgtataaccatttcatgtgtcaatgagctgttcgtttattgtgtattatcgatgttgttgtgctccacctgcatgattttgggtctctcatttaattgggtgaagggcttaaagagtgagggttgatggagaagtattcattgatgtttacatcttttgcttttcttatctctacttcattcttgttgaatgtattcttgatctattcttcagggtcacgatattctcatggcaacaatgctttatggagcagccatcatggatgtgcactac

SEQ ID NO: 158438 - DNA, 549 bp, Arabidopsis thaliana landsberg
agctcgaatctttcaatgagttactcaaggatgaatctgatgatattgttttgttgtgaaggttaagttagtgaccgaaggaaaggtggtccatggctagcaagaacagggctatactcaggtggaaggagcagagaatgctaaaagagactatgtgccacgtgggtcttaccagaaccaaagaggtcgtcgaggtgctcgaagaggtggtggtggctatcagaatgggcgaggaggacgaggtggtggtggtggctaccagaatgggcggtacgaatcttatgatcaatctggtggaaacggttatcaaaggaactactacaacaacagaggaaggggacgtggtggtggtggtggtggagaaaatggccattcatacaacaactaccaagaccccaatgttgctgttgcgtcttagcttttgtgcctctgtcttttgggtgcgtctctttcattatcttgcgtttatgctataacgcatataagcctaatctcgtgtttgaaacgtttgacaatggctcggttattgctatgaactttttttttttt

SEQ ID NO: 158439 - DNA, 1468 bp, Arabidopsis thaliana landsberg
  unsure (1)..(1468): unsure at all n locations
tgttcttgataataaggctgatttgggtatcatctttgatactgatgttgataggtagtaactgcagctatctctgttacttaggagaatttattagattgcctcttacaaagatttttgtgaaggtctgctgctgtggattcatctggccgtgaattcaaccgtaatcgtcttattgccttgctatcagccattgttctagaggaagtgagatatgctctaaccattctaccactaccgtgattgggtatcacatatattgtgtattaacagtttttgtattctgatgttttttccttgtccatccagcaccctggcacaactatagttacggatagtgtcacttcggacggtctgacctcatttattgagaagaagcttggttagccaacaatttaccaccatgttgttaattttctctgtgactttttcactgacccagacttattttaggcggaaagcatcacaggttcaaaagaggttacaagaatgtcattgacgaagctattcgcttggtaataaatgatcgtatctttcgagaactcatgcttcggagccaattgttgttagctatcttaagttgtgttagaattgatacagtatctaaaagtgttgagtatagaaaagggtatattattaagttgcagttgagttagatagagaaaccatacattctggcaggaaaagcttactccgccttatggaccattgataattcttatctgaaatagaagttgtgatgtgatggcagaactcggttggggaagaatcacatctggctatagaaaccagtggtcatggagctctaaaggaaaaccattggctcgacgatggggcctatctcatggttagcatattttctcatttttacatgattttcgttgtttgaagaacagaaaaaagaaaacgaagtnnnnnnnnnnnnnnnnnnnnnnnnnnnnnnnntagctgcggcccgagctgctggtcaagggagtggcagcaaagttttaacagatcttgttgaaggtctggaagagcccaaagtggctttagaactgaggcttaaaatcgacaagaatcaccctgaccttgaaggaaggtatgattgatgacttgcttcagttctcgactagtttttttattgcatttcactaattagtgaaaattgtagtgatttccgggagtatggagagaaggtcctgcaacacgtgtcgaactcaatagaaacaaatccaaatcttataatagctccagttaactacgaaggggtgagtgttagatatatgagggctccctagaatctgcctccacaacatagtataaatctttcatctcttttgcaaaaaatagatccgcgtttcgggctttggtggatggtttcttctcagactttctcaccatgatcctgttcttccccttaacatcgagctagacatatgtataaagcttagcttcatcccaaaatatcaaactctcacgcggattt

SEQ ID NO: 158440 - DNA, 359 bp, Arabidopsis thaliana landsberg
aaatatttctctttttggaggactttggacaatcgttccgctactgttcattttctctctctttgaagttttttccagtttttacagatctagttttttctgcctctgttcttcatcttaggttatgaatttgcaagacaaagcaggagtaaggcaagctatcttctccgacattgcagcggtggccctttctcggtggatgagaggcttctcttccgtttcttcctggttatggacgtcggtggagatcggtgaagtctttcttggttcaaccacttggttagacgttgtagctgtggcggaagacgctgcggattggtgggttttcagtgcgtgtttgatggttaacaaactggatc

SEQ ID NO: 158441 - DNA, 429 bp, Arabidopsis thaliana landsberg
tgatggcaaatatttcataattagttattaccataaatccatacaatgttcatttaagttattatcatctcctgttatatccatgccaacttctttggtagggacagggcagaaccgtgtcattgatgcttcgttcattgtcatctgtgaaagggcaaaactcaaagtatatattgtcttattaaggcttatcatttaattaatgttttcttttctttctgttataggaaataaatagattatagaatatattgttttaaggagagttagtgctgacacctatgcaaaagctacaacagctcttcttggagtaccactaagtcacaactcttcttttcttgaaggcccaaccttggctcctcctcatgtaagggaagctatttggtgtggtagcacaaactccacctttgaagaaggtataacaaactt

SEQ ID NO: 158442 - DNA, 1328 bp, Arabidopsis thaliana landsberg
ttcacggattggtttcgatctctccttcttcactctctctctttctcgtgaaagcaaaacagatctcaaatctcgggagcaacaatggagtttctggtaacagttgcggaattcagcctctggctgctgctgatcgtcttattcggatttctatccgttgttgtttttgaagcttggagaaggagacacagtaacgtgtacgttttactcaatttcttcgaatttgttccgatttctgaggataagatttgattgatttgttttggattttctcagctctgtcgagaccgtgactacactcgacgatccgaaatctataaaaccggtaacgtctgattgatttatcgtattagtttacagtgattttctggcaatagtgtggcaaagaacgatagcgttttgaaaatcagttaattatagttaatggaactgagattttctcgttaaaaaggttttgcgttggcgatttgaacacttgattctgtgtttcgctaaaacgaatgttgaagcttcacgtagtctttaagaggaactgtttccattagtttagctctttttttgtatcaaatgttacattttggtttagcaaagaagcttgagaagttatattgtatagtcgtgtgaaacttgataagtagtttatggagtctcttccagatgcagactttggaaactcttaagttagtggcttagctagaaaaattaagtgttccattataatgttgaatccatacatagattgtcttgtcaattataacgagtttgacttgcttgatcgcattttctggtggttgaggaatctgattttacttttcctgaccctgtttttcaaactttattatcagattccttgccctcatattaccgaccctgccgagaagtatttgtctttaatagttccagcgtataatgaagaactgagacttcctgctgctcttgaggaaacaatggagtaagttagacaacttccacttattcgaatctcccttttactggattgtgtgtctgcttccaatcgtgagaagtttgcttctcttgcgaaacagcagcacaagtcttatttatgcatactacagaggcataattgtaattcgcctctggtttgcagttaccttcaagatcgtgcatcacgggacaagagtttttcttttgaggtaaatactaagtagttttccatactaagtagttctccttacaactgattaaggtggattcttaacatagatatggcctttgtatggtgaatatgtatgagcttttaaaacgtttttgtccctaaatttgatttacctaactctattaaacaaaggagagtaatgcttacacct

SEQ ID NO: 158443 - DNA, 11963 bp, Arabidopsis thaliana landsberg
atgtggatcactacaccacattctctcaagcggttatctccacgtctgattccataatcaaacgtgatgcttctccctcggttccaaatcacacgctttataaatatccccttcacgatttggaaacggcgcttcatctcattatccaatctgcaattctctacccggcgggcattgtccacggtcgtattgtggagggaaggcttttccaattcatctttccgacggatgaatctctggaaacagttctccgacgtggtccatgggcgtgcaatgataggatgctcatcctccaacgctggactcctcaaatgtcgttgctcaatttcattcccttctggatccaagttaggggaattccatatcagttcctcaatcgcggtgtggtggagcacattgggagatctctgggtcaggttctagaggtggattttgatgttgcagcggtggcgagaatggatttctttcatgtgcacattcattgggacattacccatccttttcgattttagaggaatttccagttcagtgacggagttaatactctccttcgcttcaggtacgaacgactcctgggattttgtgaagtatgcaggatgttaacgcatgaatcaggggcttgcctcattcaaaatggcggtgaggaagagaacgacaatgatgaagatgacgatcagcctcagagcgtgttccaaatcagggtgtcataatcagggaactcaatgaggaggaagcaatggaaatggacaacaaccaggtcaacaacgtggtgatagcagatgtggtgccaggacaaaatggggagaatgaaatcacccactctcctcgtagtgggtctaatgaagacagcctctcagacattgatcccaatcatgactctctagttgattttgagcattacgacatgtttagtggcgagagaaatgacagtgaactcctgaatccgatcccaattttcgaaaattcttgtggtgatatcccaggcagccctagcaacagagtttactctagatccatcctctggctctcatggattcggagatcgtcatagaccctccaactgaagcagtagttgaccgtggtaagaggaagagagatgacatgttggaattctctgaaccacaggggcactctaaacacacaatctgcgagaatggggagggcagcggaacctcccgtgaagacaaccaaggctgaggtgcggtgggcccgaatccaccacttccgccatgaggacagcctgctggaactgtcggggtttaggcaatgactccacagtttgacgccttaaggagattaatagaatgaatctcctggacatcattgctctatctgagacaaagcagcagaatggctttattgaagagaagggtttagagttgggttttagtatggttgtaacagtcccaccagtaggtttaagtaggggcttagttgttttctggcgtgattatgtagatatctctatttgcttcagttctcccaatcttgtagatcttttcgttaaaagtaatgaaggtgattcagaagctacaaaattatctccaagattctggtcaaccggctcaaaacacatctctcgggattaatttcagaaaaccaagctgctttcattccaagccgtatgatcaccgataacatcatcattgcccatgaagtatattattctctcaaatcaagaaagaggcaggcaaattcttacatggctctaaaagcggacatcacaaaagcttatgataggctggaatggaagtttcttgaagaaacaatgagacatatgggtttcaattctacttggatttcttggataatgaagtgtgtctccacagtaagcttctcggttctcatcaatggttcacctcatggtcacatcaccccttctcgtggtatccgtcagggcgatcccttatctccatacctattcatcttttgcgctgaagtcctctctcacatgatgcatcaagcagagccaaataaacaacttaaaggaatcaagctttcgacgagaggtccaaccatttctcacttattgtttgctgatgactctctcttttttactttagcaaatcacagatcatatcacgcgataaagaaggttctaagctcttatgaggaagtgtcaggacaagctgtcaacttaaggaaatccgccattacgtttgggaaaaatgttagcagtgatactaaacgtcatatgcggaatttgctaggcattcataatgaagggggtgtaggcaaatgcttaggtttgccggaacaatttgacaaggaaaaatccgagatgttccgctatattgtcgaaaaagtcaaagaaaaaactcaaggttggagtaagaagtatttgtctcaagccgggaaagaagttgtaacgaccgcgtcccgcgttcataaagaggcaggtttgttttaggagaaaactagatcatggtcgaggaacggaccaaaatactaagtaggaagaacgagaaagtataagctaaaccagctaggtgagctggacaagctgtatgaactagctaggtaagctatgtgagctaaactagctggaagactagctagctcagctaggtgagctgaccgacagctcgactgagctcagtgagctgatcaagtactgacccagctgggtggtccggtcagctgacactcgagctggtggactgtcgtagctcacgggtgaagaggtgtctcggccaaaaagtgtaaggtcgagcgggtaccaacgaacggttgcatcgtccaaaggatgcaaggaacagatgtgacctttcgaaaggatgcaaggaacggatgtgacctttcggaggggtgcaaagaacggatgtgatgcttcaggaagcatccattcgccccctatataagggaggacgcccaaggaatctcacatcatctcacaacatccaaaacaccataaaacattcttaaaggagtcccaacacatcctagagttgttggtcggaaagggggtgcggctcggcgagtataactcgaccgaactgatgcgcatgctacctcccggtccaacggttcgatggagtgtagaggatggagagggtagaccgttcgtcttagagacgaatcggatctggtagaccgatccttggatcggatcggccagaccgatcgtcagacggatcggatcggccagacggatcggacagaccgatcgtcggacgggtcggatgggacaggccgatcgtctgacggaacgggtcggacagaccgatcgtcggatgggatggatcgagaaaagtgttcgaggaagcacaaggataagtgcatccgaacacacccaagggtcgcccatggatgcaatcttaccgataaagggagaaagcaccaagaatgggtaaggaacgtgattcaccatataggatcaacatcgtggccgccttcatgtatctatctcttcagccatggtgaaaccgattagagatcggtaagaccaaagggtgactcgacggataaccaacaggaaagtccacggtgggaaccgatggacaaaacggatgttggacccgcgagcaaacctaaggccgacggaagaaagatttcatgggctagcctacgatgatccagtggatgaatccacggacccttgggtatgataaggatatcgttcggaccgcatggatggatcattaagccgaaagctttatcgaccaccatggactggacgggtaaacggttagtaaaccgtgggcggtcgtagtgttaaacgaccggaacggaaacatggatggttcgataagccgagggctcaatcgtccaccatgtagccggaggggcgtacgtttggagaacgaatggaccaataagccaagagcttgattcggccatcgtgaaccaagggaatcgtacgatccccaatctctatcgttgtacttagaccagtggggttggttggttgtatggctaagtaacgatagggattggttcatcaattcacgaccgatgacgagtcgttgaacgaatggagtaaggcgacaaacgggctaaggaatcaaatccgcatattgaccaaggtatgtaacgatctagcttattagttaagatagacgtttggtaattgaccgtgaaagtaggataaaggaatatgcgattgtttggcttagaatggttagcgaacatatgcatgtcttgaccgagtaaaggatcgatctaagtctaaggaacaaagacgatgaaaccggtacaagaattggttagaattaaaccaaggttagaaagacttccgctgtgtaataagagagcgattatagaatttagcctcgtaaaggcaattctatgttgaatcgcgaaaaattaagaggttcggccgggaagaggcgcgaacttgagtacaacgtcgccggacgccgagacgtccgggacggggtctcacaagttggtatcagagcatgcttgatcctaggatggataggtgctcgagaaaacgttatagtaaggttttggcggataaggaagttgagggatcgatgtgtttggaaacggaaatagttacccaactcacgatcacgaaccaagatattatccttgtagtcaaaacttaaacatgacggaaaagtgagttgatatattcggagatggaccgatatcaatggaatttggatctagtcggaacttgactaagatcgggtacagacttagtcgggatttgactatttctggggttttgatcttatcggaaattgaccaagatcatggaaaaacgacaaggtcggaaagagacctatgtcggaaatattgaccgagtcctttggggaccaaggttggaaatattgacaaagtcggaaaaagacttaagtcgagaatatgatcgagtccgagaaaggaccaggatcagaaatttgatcgaatgtcggaagagacaaagatcggaaaacattgatcaagtccaggaaaggacaaagatcgggaaataatgatcgagtccgggaaaggaccaggatcaaaaatttgatcgaatgtcggaagagacaaagatcagaaaacgttgatcaagtccaggaaaggacaaagattggaaaacgttgatcaagtccaagaaaggacaaagatcggaaaatattgatcaagtccaggaaaagacaaagatcgggaaataatgatcgagtccgggagaggaccaggatcaggaatttgatcgagtgtcgtaagagacaaagatcgggaaacttgatcaaactcggaaatagagatttgatcaaatgtgatatctaaagtctcggaaagactaaagattaaggagtaaacaagatcttaaacccgctgaattcgaggacgaattcagtttaaggggggtagacttgtaacgcccgtgtcccgagttagggagtaaccaagatcttacacacgccgaattcgaggacgaattcagtttaaggggggtagacttgtaacgaccgcgtcccgcgttcataaagaggcaggtttgttttaggagaaaactagatcatggtcgaggaacggaccaaaatactaagtaggaagaacgagaaagtataagctaaaccagctaggtgagctggacaagctgtatgaactagctaggtaagctatgtgagctaaactagctggaagactagctagctcagctaggtgagctgaccgacagctcgactgagctcagtgagctgatcaagtactgacccagctgggtggtccggtcagctgacactcgagctggtggactgtcgtagctcacgggtgaagaggtgtctcggccaaaaagtgtaaggtcgagcgggtaccaacgaacggttgcatcgtccaaaggatgcaaggaacagatgtgacctttcgaaaggatgcaaggaacggatgtgacctttcggaggggtgcaaagaacggatgtgatgcttcaggaagcatccattcgccccctatataagggaggacgcccaaggaatctcacatcatctcacaacatccaaaacaccataaaacattcttaaaggagtcccaacacatcctagagttgttggtcggaaagggggtgcggctcggcgagtataactcgaccgaactgatgcgcatgctacctcccggtccaacggttcgatggagtgtagaggatggagagggtagaccgttcgtcttagagacgaatcggatctggtagaccgatcgttggatcggatcggccagaccgatcgtcagacggatcggatcggccagacggatcggacagaccgatcgtcggacgggtcggatgggacaggccgatcgtctgacggaacgggtcggacagaccgatcgtcggatgggatggatcgagaaaagtgttcgaggaagcacaaggataagtgcatccgaacacacccaagggtcgcccatggatgcaatcttaccgataaagggagaaagcaccaagaatgggtaaggaacgtgattcaccatataggatcaacatcgcggccgccttcatgtatctatctcctcagccatggtgaaaccgatcagagatcggtaagaccaaagggtgactcgacggataaccaacgggaaagtccacggtgggaaccgatggacaaaacggatgttggacccgcgagcaaacctaaggccgacggaagaaagatttcatgggctagcctacgatgatccagtggatgaattcacggacccttgggtgtgataaggatatcgttcggaccgcatggatggatcattaagccgaaagctttatcgaccaccatggaccggacgggtaaacggttagtaaaccgtgggcgattgtagtgttaaacaaccgaaacggaaacatggatggttcgataagccgagggctcaatcgtccaccatgtagccggagggcgtacgttttggagaacgaatggaccaataagccaagagcttgattcggccatcgtgaaccaagggaatcgtacgatccccaatctctatcgttttgcttagaccagtggggttggttggttgtatggctaagtaacgatagagattggtccatcaatacacgatcggatcagaatcgttgaacaaatggaataaggcgacaaatgggctaaggtgtcaaatccgcatattggccaaggtatgtaacgatgtagcttattagttaaggtagacgttagggaattgaccgtaaaaataggataaaggaatatgcgattgttaggcctagaatggttaccgaacaatatgcatgtcttgaccgagtaaaggatcgatctaattctaagggacaaagacgatgaaacctgtacaagagttgaatcgcaaggcaattctaaggttagaaagacttccgctgtgtaataagagagcgattatagaattaagcctcgtaaaggcaattctatgttgaatcgcaaaaaattaagaggttcggccgggaagaggcgcgaacttgagtccaacgtcgccggacgccgagacgtccgggacggggtctcacatcatcaggcttttgccttttgtgtaggaatctgccttcctctgatgagtttgatcaaattgattgagtcgttgcagagccgagattctcccatgataaaatcgatgcgtttcggggagaggtgctcggttgcgtttctacagaattttgggaggcataatgggaacctcatgtttttcttttgcggggcgagaggaggtgtagtgactgatctttctgtcctgccttccagatcaagtccttcaaagagtaggtctgtgcgctctttcctagcaggtggaggagactcacctcctttcggtgttcagtcccgtttctttcgtttgggagtttgctcctcctcctgctcgtcgggaggaggggtgtcggcattagcgtttgaaccttttttagttttggcccccggctgcgattaattttttaacgccgcgacattcctcgatggaatgtcctctctttttgtggtacttgtaatatttttcgtggtcaagttctggattctcgtcctctgctacctcttctattgcaaataaggtatgctaccctagtgtttggttttcctttttgaagggttttttagttgcaagggaagcgttttgtgctttagattctttgaatcttagggccgaaacggcgagctcctctccggactccggctttggcgaagtagacagctttgtgaagggcatcgtcttaagagaccagttgcctaatggtgagttcctcacgaaacctagaggaaaaccacaagccgttgtgaagggcggctatggctacctcctcgtttaggttcgcaatctttgatttgattgctttgaatttttcgacgtaagatcgcagaaattcgttctgaagttgggtgacaccagagaacggcttcagacgtcctgtttacgatgagtaccgagtactgtttttagaaggcgggggcaagctggtcgaaggtatcaatagagttccctttgagactagcaaaccatttgagtgcgtcacatacgaggttctctgcaatgacctgcttcattttctttgtctatcaggtacgctcgtgttatagccagacagaaggctctcagatgagcctttgggtcactcgttccatcgtactccaggaaacggagtctcccggcgtctaagatgtgacaatgggcgatcctatccgtgaatggggtgcgcctggtttcttcgatcactcgatctatgctagatgcatttgtgaatgcatttgaaccatgttcgcatttgttacgtggatcgatcggtgcttggggattagttggaccgttaaggaatgtcacttccaggtatctggggaatggatgagggattagcgatagaggtccgttgttgcgctgagttccagggaacgcgggagctgcacgcggttgttccctttatcccccatgtgtacctagggggcgagtagcctagtggtagcacaggtgggagcggtagccttgggaaagcaggcgttgtacctgtctcagtccctgttattgggttttcgacgagagtgtgcacgggtgcctgtaaaaaggcgacctgccggttgagaggaggtgagacctctatcgaggcgaagtctaaacgagtccttggagtgggatctgttggggagacggttcatgtcatatctatggggatctaggtagggatcccatttttgtggggaggaatttccttgcatgcggtatcacgctctacctcctgcgccatgcgagaagagtcacgtttctgctgacccactattgcggtgaggttgcgatgcggatttcttgatttttgcttatgttgatcagttcaggatcattgtgcgaagctcggctagctcattggcagatctcggagggacctgttcagaagggttagccgggttatctccgttaggaggctatatcatgacgttttgctccccgtccctggtttgcgagggggggggaaggatttggtcagatctagaagaattcgagttttgggagatgttctccacatcaatgtcatggatagcatcggcctcgattccaagagggagatccgttggaaggtgcctgtccgtgacattgtcgtttgggatctgaactggtaagccagatcttgacgaattggatgaattgggatccatgatcgttggtcacaattgatgtgttagtttcggtgttggaatgatctagatcttcaagattatgagaaaggaggaaatgatccatgatcgtgggttctgaaatccacataagagatttgtacttaagattatgagaaaggagggctagatcttcactgaagccgtgagagttatattgctaagaacgaatggacttttgtattaattttgacaaagcttttacaatgagaaaagagattacaagtgtaaaagtgtgtgtgtgccaatgtgaactagattgaatgtcccttccaagtcgtccttgctcccttatataggtctacgcacgtgtaagctccgtccgggatctacggagatcctcctggatattcggcaggtcagttccgagatatcatggtcctccgcgaatatctcctcatcagttcctaggtcattattcgcttatctccctgcatcaggtgactgggcttatctggcccaaatacccattcgcgtatgtgggctcgtcagctgcgtaggtcctctacttggtgggcttggtgggcttttgtgggctggcttggtattttcgcaggtggattcctggaggggaatacagctccaacaggtgtgtatcttcaaccattggtagatgatttgaaggatctatggaatgaaggtattgaggtttatgacttgctgtctaaggagaaatttcatacttaaagctatgttgttatgggctaattagtgattatcctgggttagggatacttgttggttgtaaagtgaaaggtaaacaagcatgtaatgtttgtggaaggatacaccgtttagatggctgaagtttagtcgaaagaatgtctatatgggcaataggaaaaggttgagacctggacatccatatagacgaaagaaaggctggtttgacaactccatagaatctggttttactcgtagaattctgactggttttgaaatatttgagacactcaaatattttagaaacgattatagacagaccattagagaagaaaagcaaaaggaaaagatctgatttcgatgataatgaggagcttgcaaaggaagaatgtgaagaagactcagataagtggaggtggaagaagcggtctattctctatgaactatgttattggaaggttagctaattttcaaatatatatcaggttttgtaagttaaattgtttttcttattctaactaactatgtttgttttatgtgatagtttatgcatgtgcgtcacaacatagatgtaatgcatgtggagaaaaacgtttctgatgccattttatcaactttgatacaaagtacaaaatctaaagatggattaaaggcacgccaggatctagaagacatgggtattagaagcaatttacacagccaagttcgaggtaagagaaaatacttacctccaattgcctattggctttcaaaggttgaaaaaaacatttttgcaagatgatatctgaattcagaggccctgatggttattgtgcaaatattggtaattgtgtgtcactagatcctcctgaaataggcggcttgaagtcacacgatcaacatgtgcttttatagaacttgttacatgttgccttgagaggcactctgcaaagaggtcctcggattgccgagaatagaatatgcaacttctttaatagattatgtcagcgggtaattgatccagataagcttttatcattagaggcagaggttattgagacattgtgccaacttgaacggttttttccaccatctctgcttgatatcatattccatgtacctgtacatcttgcaagagagacacgtttaggtgggcctgttcacttcagatggatgtatccctttgaaggtactctatgtttaatttctgataacttttaatagttcatcaatttagatactcttgtagtgatctaacagattgcaaacttgaccaataggtacatgaaaacgcttaagtcatatgtaaagaactatgcaagaccagaagcgtgtatggctgaaggatatatggcaggtgaatgtattgcattctgcttagagttcttacagaattatgtaccagttcaagagaatgtaaaccgaaattaagatgttgagttatctgcaaccattcttgaaggcaaaccattgcaaaaaggtaggcaagttattcttactgataatgaacgagagatagcccatcgatatgttttaatgaacatggcagtgatgaatccatatgtagagtaagttcacctttgagaacttttactaaatcgattgtgaagtatatgaaattaacttgatatcttttgattgttaggatgcatatggaagaattgcaagctaatgatatccgatgtggaaaaaatgagactcttctgtggaaatttcacacagccagattctcattgtggataaaagaacaaggttattga

SEQ ID NO: 158444 - DNA, 4190 bp, Arabidopsis thaliana landsberg
tttgattgcggtttcgctaaacaatatgttaactatggcgggagattgcgccgataatttctatattagagtcaattcgcaccacactcgtaacattgtttgcgcttaggaggcaaactgccagaagtgaggataatatcttatcgtctaaggtgcacgatatgctaatcgagaattacgagaaaggagctggatgtgctgtgctaaagattggggatgggctatatgaggttagagaaaagagaggctcagcatttgcagttaacctatgggagagaacgtgtacgtgcagggagttccagctcctaactatcccctgctcacatgccatatcggcggctatagaagaagggctccgcgtggacacgatggttggagtccatcacacgacccccggcttagattgtcataccaagcactcataataccggtacccgacacggaaacgctgactccttcaccaaatgatgtaggaggtggaaaattggctccaccgtatgtgcgtcgaccgcctgggcgaccaaggaaacggagattattcttaaaaggagaattcaaggtaacatatttgacatcaaagctaataaaatatttatatggtaatactattaggatgtaaccatcgcttccatttgtagcgagcatcaagaaaaagatgctcacaatgcaagtcattgggacataacagggtaacctgcaatggaccagtaccggtatgtcaaatattttctgttaatgactatattatggaatatttatatgatctgttttgagtgcagggaccgtagaaactatggttcaaggacgttttttggcgcggaaagtgatggatgctgccaggattaataagaaatgccctggagatgtgtataaataaggaaccttaagcgatcagaaattttaaatgtgtatatgtacggctattgatcgctaaatgtaatattatcggaatccatccacttttcaagtagaaatgttaaattataatgtcatattttatctacccaaacagatattctgataacaaaagtagtagccgctaattcctagatattcgatgactcctgcacaaatagttatggtaagcgtgtatccactaagtttattaacaaaaagaaattgacattgagattaaaaatcagaatcagaaacacataataagattaataagtataacagtattatctgctaacagtttgaacaggataacctagtatttaaacgcaattaagagaaaccacataatatgataaacatgatagttacatgctattaatgttaactcgataagattgttacgatgacagctaaataaatagttgagataagcatggaccagctagcgttttttacatgatacattgttatttcaatgaagttcataaaaaaaccataatacgataaatatgatagtatgttatccactaataagataagattgtattcaaatattaataaaataagacacagaacccgtaatatgataaagccttgataactttgttaatcattatcggataaacgtgtttatgtttagaccggatctgaaacccatattatggtaaaacattgataacatgtttatctgctacgatcgttaaccacataaaaatcataacaactcactaattcaggacactcttaataaaatgttaataaaatcagactcagaaaaccataataatatgaatcacgataatcttgttaatatccagataacctcttatccaagtaaccttgttaatcactatcagataagcgtgtttatgtttagacaggatctgaaacccatattatggtaaaacattgataacatgtttatctgctacgattgtttaccagataaaactcataacaactcaccaattcaggacacttttaataaaatattaataaaatcaccaattccagataacctgttatccaaatacggtagttaataagataaaaaattaataacaacatacacaattcagaaaactatgattacaagacaaaatgtagcgaaagcgtttgaagattatcctagttagacccaacaaagaagatgaggatacatgattcgatgagagaacataaacacaaatgtaaaaatattcgataacacatcagttatctactaaccgccagcaaggattaaagcggagactagcttcttcacttcactttgaaggctgccaacatcaaaatccacacattcaggtacacccctggtagcatgcgtgtgtatgagaaatatagagaatatgcatgtgtcaagaggcgaagttacctgtggaatgacagaagggcgctctatagtaaatggatccggaagaaattgactcataacaggattgaaggctgcttgtttgaaaatatatggtgtgagaccccgtcccagacgtctcggcgtccggcgacgttgtactcaagttcgcgcctcttcctggccgaacctcttaatttttcgcgattcaacatagaattgcctttacgaggctaaattctataatcgctctcttattacacagcggaagtctttctaaccttggtttaattctaaccaactcttgtaccggtttcatcgtctttgttccttagacttagatcgatcctttactcggtcaagacatgcatatgttcgctaaccattctaagccaaacaatcgcatattcctttatcctactttcacggtcaattaccaaacgtctatcttaactaataagctagatcgttacataccttggtcaatatgcggatttgattccttagcccgtttgtcgccttactccattcgttcaacgactcgtcatcggtcgtgaattgatgaaccaatccctatcgttacttagccatacaaccaaccaaccccactggtctaagtacaacgatagagattggggatcgtacgattcccttggttcacgatggccgaatcaagctcttggcttattggtccattcgttctccaaacgtacgcccctccggctacatggtggacgattgagccctcggcttatcgaaccatccatgtttccgttccggtcgtttaacactacgaccgcccacggtttactaaccgtttacccgtccggtccatggtggtcgataaagctttcggcttaatgatccatccatgcggtccgaacgatatccttatcacacccaagggtccgtggattcatccactggatcatcgtaggctagcccatgaaatctttcttccgtcggccttaggtttgctcgcgggtccaacatccgttttgtccatcggttcccaccgtggactttcctgttggttatccgtcgagtcaccctttggtcttaccgatctctaatcggtttcaccatggctgaagagatagatacatgaaggcggccacgatgttgatcctatatggtgaatcacgttccttacccattcttggtgctttctccctttatcggtaagattgcatccatgggcgacccttgggtgtgttcggatgcacttatccttgtgcttcctcgaacacttttctcgatccatcccatccgacgatcggtctgtccgacccgttccgtcagacgatcggcctgtcccatccgacccgtccgacgatcggtctgtccgatccgtctggccgatccgatccgtctgacgatcggtctggccgatccgatccaaggatcggtctaccagatccgattcgtctctaagacgaacggtctaccctctccatcctctacactccatcgaaccgttggaccgggaggtagcatgcgcatcagttcggtcgagttatactcgccgagccgcaccccctttccgaccaacaactctaggatgtgttgggactcctttaagaatgttttatggtgttttggatgttgtgagatgatgtgagattccttgggcgtcctcccttatatagggggcgaatggatgcttcctgaagcatcacatccgttctttgcacccctccgaaaggtcacatccgttccttgcatcctttcgaaaggtcacatctgttccttgcatcctttggacgatgcaaccgttcgttggtacccgctcgaccttacactttttggccgagacacctcttcacccgtgagctacgacagtccaccagctcgagtgtcagctgaccggaccacccagctgggtcagtacttgatcagctcactgagctcagtcgagctgtcggtcagctcacctagctga

SEQ ID NO: 158445 - DNA, 1076 bp, Arabidopsis thaliana landsberg; identical to SEQ ID NO: 32125

SEQ ID NO: 158446 - DNA, 947 bp, Arabidopsis thaliana landsberg
  unsure (1)..(947): unsure at all n locations
acttgattcttcaattccttgaatttcccatttcatcagatgacagaacgaatcagagcaagaggacccagatcatcctctgttaactctgttcctctgattcttgacattgaagacttcaaggtaaggttttcagttgcttatgttttctcacttttgaatcataagggatattgatttttttttttgtcactgacagggtnnnnnnnnnnnnnnnnnnnnnnnnnnnnnnnnnnnnnnnnnnntcttgccgtctttcctagacgaagaagcagattctggggatggccatggcaacattgctggagttgatggtttgacaaatgggcatttacgtggacagtctgctcctttgtcctctgctcctttttttcctgaagtagatggtcttttgtctctgttcaaagatgcttgcaaggagttagttgatcttcggaagcaggtgagtgtcttgcgtctacatcgatgactagcccttgttttattcttttcatcgttccgatatctgaggtttttgttaattattttggaaggttgatggaaggctcaatacactaaagaaggaagtttcgacccaagattctaaacaccggaagacactgactgaggttggcagaccaatactactactttgattaaattccttggatacatggatcactgccctatgtagaactgacactccgattatttctttaaatggtaattgaattctctttctagatagagaagggtgtggacggtctgtttgagagttttgcaaggttggacggtcgtatttcaagtgttggacagaccgctgcaaaaataggagatcatttgcaggtaaaatttaccttgcttataaccaactatctggtggtctatccaatattaacccatgtttcctttgtcagagtgcagatgctcagcgggaaactgctagccagacgatagatcttataaag

SEQ ID NO: 158447 - DNA, 585 bp, Arabidopsis thaliana landsberg; identical to SEQ ID NO: 43157

SEQ ID NO: 158448 - DNA, 344 bp, Arabidopsis thaliana landsberg
gaatacaacgatggccctgagctctggccaaaccttaacgaggttcgttctattcttataggttaagcgaacttccggtagagaagcagaccaaatacatgatggaccagaaggatctcatgaacaagatgatccaagacgcagagaagaagttggagaaggagaagatgcatactcgtgcgatgaaacttgggttaatggctgggtctaatgatctaatcaccgatactgattgttcggaggaactggccagagcagctgatgtggttgataagaagctcaaagccatcagagagagaatcaaggctgttgaagcaggagcaccaatcatcaagagagactag

SEQ ID NO: 158449 - DNA, 587 bp, Arabidopsis thaliana landsberg; identical to SEQ ID NO: 75763
  unsure (1)..(587): unsure at all n locations

SEQ ID NO: 158450 - DNA, 612 bp, Arabidopsis thaliana landsberg
cttgtgaaagactgtttcaagtttacttatcgtggatattgttcttttctcttttgattagtgtacaggagtactcaaacttggtggggaaattggctgtgtgcttagtgaaggcccgtggctattagttggcatgccaaatcttgtcaaggcaagtattcagtatgattcctcttaaagagtacttttctttgactgtcacaatagatatcaaggaacccctttcattcttagatgcttatggggttatgtctcattgttgttgatacaggcgtggaatattgaaaccaatgctgaccagagtctaagtggacctgttggccaagtctattctcttgttgtgggtactgatctgctctttgctggaacacaggtaaatttccaagttttcttttcttgctgagatctctgcgaaatagtcggcttttggttaaataagtgacaagttctttacattctgtgcaggatggctctattttggcatggagatataatgctgccactaactgttttgaaccagcagcgtcactgacgggccatacacttgcagttgttaccttatatgttggggcaaacagactttattcaggttccatggacaaaactataaaa

SEQ ID NO: 158451 - DNA, 329 bp, Arabidopsis thaliana landsberg
  unsure (1)..(329): unsure at all n locations
tgtgtcacattttagattgagcggtataaggcagagattaagaagcttcaggaatcagaatcagatatcaaagccttatctgtaaattatgcagctctcttaagagagaaagaggttagtttctgacacacaatcttcaagcctttaactatttttctctctttttctnnnnnnnnnnnnnnnnnnnnnnnnnnnnnnnnnnnnnnnnnnnnnnnnnnnnnggagaatggctcattgaaacaaaatctgacctcaactagtgccgctcttaaagaggctagaaccgacatttcaggggatcaaacaactatgctatcaaggtagacact

SEQ ID NO: 158452 - DNA, 490 bp, Arabidopsis thaliana landsberg
ctaattgaaaaaatggattttttacggaattgtgtagatgtatatgcaggaaatcaaggctttggtacatcaaaagcgtcaccgtctcattattaatatctctgacattcaccaccacttcagggaagttgcctctaggttcgtcatcttctcaatgtgtcttcctcgaatttttaatcggttctttagtataaggttatgaatttacggcagattttagggttttgttagattcagtgaggttaatttggggatttttaaggattcactacaattgtcatatgttttgtgaccttaaagttgattgctttggtttttttggataggatactgaagaatccaaatgagtatatgcagtcattttgtgacgcagccactgaagctactggtgctattgaccctaaatacctgaagccaggagagcttgtccttgttggaaatgaagaaaaattttgtttctcgcgttgttactcctagagagcttgtcttt

SEQ ID NO: 158453 - DNA, 822 bp, Arabidopsis thaliana landsberg
ggattgaggaaaagaaaagtgactggaatttagggtttagactccggcgaagaaggagatttcaaagcttcgaagacagagaaaatgtcgtcgactctcctcgagcaaactcgctccaatcacgaagaggttgaaaggttggagcgattggttgtggaagatctacagaaggagccaccgtccagcaaggacagattggtccagggacatcgtgttcgtcacatgattgagtctattatgctcaccactgagaaacttgtacgctttctctcttcttctcgtcaatttttaatcttcttttctatttcccgcatatgtttttatgtctcttctcttttgaatacgttagatcagagcagagaaacttgggttgctgatttttttttaaataacaggttcgtgttgagtgttgcctctttttctgttaattgctttagctttttaggttatcattgtggggtttaagttagctttgaatcactctggcttgggtgttaaattgagaagaaacttcagagattggtgttgaatataggttatagttggggtcttaagtgtgtatgtagggattctaagttttgagctaagcatgcttcagtgttatttcacaaatttgagttaatttttgttgttgataattaactcaaacttggattaatgctaaccttgattcttgtttgttgtaaggttgaaacctatgaagataaggatggggcgtgggatgatgagattgcagcgcttggtgggcagactgcgacagggacaaatgtgtttagtgaattttacgatcgtttgaaagaggtttgttctttatcctttgca

SEQ ID NO: 158454 - DNA, 821 bp, Arabidopsis thaliana landsberg
  unsure (1)..(821): unsure at all n locations
tggttctaacttcagatgatctacctttgtggggtatgaactttgtatatttacttgaaacatccaaaatttattatgttctttgtttgttttatatagttttaatactgtctcattgctgttgtaggctttgtgggtgagctgcatcctgacaaaaatagtgaaaacggcaagcatgttctttacacacataagaacattgttgtcaaatacaacaaagaccaggtcggttgttaccacgccattaagcaatagtatggatatcatgtgaactacatctgtgatcttatgtatctattttaatagatcattcatgttaatctcactcaagacaacccaaggccattggaagcagggaaaaaaatggacctgacgtattctgtgcaatggattccaacaaatgtcacatttgctcgccgctttgacgtatatctggattatccgttctttgaacaccaggtaacttttagcatgctatgaattagtcttgtacccttctgctactgtctgtgattccaaatggttcactggtttataatgtatcacactgaataccccatttcatgcttgttcataagtgcaagccataattattcttccaagaatctaccaaagttctatattccatctcttcaagatttctgttcaagctttataagccttctgagagtttgttctttttgcagatccactggttctccatctttaactcgttcatgatggttattttnnnnnnnnnnnnnnnnnnnnnnnnnnnnnnnnggactctcagaaatgattatgcgaagtatgctagagaagatgatgatcttgagagcttg

SEQ ID NO: 158455 - DNA, 839 bp, Arabidopsis thaliana landsberg
ttttgtgttctgttggtgttggagcactttcttctagagaggccgaagggagagctaatatgtctgctggtgaaaaggtaaacatgcttctttcttttttttcaaaagaatatactggttcattgcaaaatattaaattgtcctgcaattctttttatttcaggaggcccataaattactacaaccagcagacaaaactctaaagaccatggctattgaatttgctgaataccaggtataccaatagaattatgttcgaatttaactgataatctttccatctgcgtatcagtaatctacaatgtatcattctttcttcattgcaatagttcgtccatgtctaagccatccataaatgtctcaggtctgtgtagatatatttatcacaactcaggcctatgttgacatggcttcaatttccgttattccaagaactactggaggacaggtaatttccaatattccttaccctttctgattatcgaaaccatgttgagcttgatgtctaggttttgccgcacttacgatttcaatcttttaactattttttccaggtgtattgttattaccctttctcagctctctcagatcctcccaagctttacaatgatcttaaatggaatattactaggccacagggttttgaggctgtcatgcgagtcagatgcagccaggtatgtttttgcggtagagggttctcttcatgcattattctgttaactccagcttaaggctaattttctgtaaaccatcgtttccatttattgtagggtattcaagtgcaagaatactctgggaatttctgcaaacgcattccaactgacattgatctaccagcg

SEQ ID NO: 158456 - DNA, 161 bp, Arabidopsis thaliana landsberg
tgtgatgctaacaattaagatgtgatcagaagtcactaagtcaagctaagcaataacaggttttggtctgttctaccagtcctaagtgaacatgcagaaaacagaaaatcaaacagaaacagtaaaacactcgaccaacacaactctttgcagagcactgg

SEQ ID NO: 158457 - DNA, 265 bp, Arabidopsis thaliana landsberg
gaaaacgctagaacaataactttgatcgttcttcttcttctcttgaatcggaaacaatggcggatgaacataagcatgaagaatcttcacctaatttggatccagcagtggaggttgtagagagggaatcgctgatggagaagttatcggagaagatccatcacaaaggtgattcgtcgtcttcatcatcatcagatgacgaaaacgagaagaagtcttcgtcattccgcttcaaagtctttgaaatcgaaggttatcgtttgtc

SEQ ID NO: 158458 - DNA, 217 bp, Arabidopsis thaliana landsberg
gaacatggttgagggaaagcatcccctcacatgtcagatgactgttttgtttgtttctagattgtgtagcgcgacctgtgacttaaagttcactgtagttacgccagacagcccggaattcttcacggaatgtgtttaagcgtgccttgagatttggggttcttatgcttgcatgaacaattgttgctgtaacacaaattacaaaaagaggttgagt

SEQ ID NO: 158459 - DNA, 686 bp, Arabidopsis thaliana landsberg
  unsure (1)..(686): unsure at all n locations
agatttatcaaccaaaaagtgtgtgccatgcaattcgaaggatctgcgcgccatgaccgaacaaagnnnnnnnnnnnnnnnnnnnnnnnnnnnntgtttgtacttcttattatggtaggtgaggtcgtaaagtatgtatccctcaactattccttttacacaggttactggatgggatttggccaatgaaaatgatacattaaagctgcaccggtcatggagggtgaaaagttttactaaggggcttgatttcttcaaacgtgtagctgatatcgctgaatcagaaggtaaacaaatcatcagcagtatagcacatgtgttctgtgacctttctgaataagattaaaacaagaagatagctcaaggaagttctgttactattttgtctcacgcatggaccgataatgatgcaggtcatcacccagatttgcatctggtcggctggaataatgtgaaaattgagatatggacacatgcgattggtgagaatcatggtctgtgtttatatgaagatatgaatcttatcaaatgcctgaaccttacgaagcccctcatcaagtgctgattaagtgatatcggattcttttgcaacaggtggtttgacagaaaacgacttcattcttgctgctaagatcaacgagctccaagtggaagatcttctgaggaagaagaaagttgctaagtga

SEQ ID NO: 158460 - DNA, 279 bp, Arabidopsis thaliana landsberg
gagatttctcatcctgatgaccattttcattctcaaggtttacccccaccttcacctttaccgtttattatcattccacattctatggccgcaaaagaagacctcgaaagaagggctggcggtgcaaggcattctcagaggctttccccgaggcatgaagaaagagagaaacgacgctctgaagagaatttatcagtttctgtggatgatgcaaaacgtagaagagatgatgatattagggaccgaaagcgagatgaccgagaaacaatcactgtgaag

SEQ ID NO: 158461 - DNA, 319 bp, Arabidopsis thaliana landsberg; identical to SEQ ID NO: 64868

SEQ ID NO: 158462 - DNA, 1169 bp, Arabidopsis thaliana landsberg
atggcttctcacaacgaaaacgatgatattcccatgcttccgatttcagacccatcatctcgtactagagccagagctttcacttccaggagtcgtagcgtttctctctcaaaccctacttcctccattgaaggatttgacacttctactgtggttttaggctacacgggtcctcttcgaactcagagacgtcctcctttagttcaaatgagtggtcctcttacctctactcgcaagcatgaacctctctttcttcctcatccttcttctgattccgttggtgtctcttctcagcctgagaggtatccttcttttgctgctcttgaacataaaaactcctcagaggatgagttcgttttgaaacacgcaaatctcttgaggtctggacaattgggaatgtgtaatgatccttactgtactacttgcccttcttactacaaccgtaaggctgctcaaatccctacttctagagtttctgccctttttgattccacggtaaagttttgatttttgttactttacattcacaaatatagcttcaggatcaagtaaatgtcgttgaaacagagtcttttgttttcttgctagttccataacgctctgtatgatgatgctaaaggttgggcaaggagatttgcttcctctgttaatagatacttacctggaatcatgaatcctcatgccaaagaggttcaaacctggactaaattcttcgccctttcatgcttgttagctatttttatagatcccctcttcttcttcctcataaaagtccaagaggtatgtttttccttccagagatatcttttgcttttccaagtgttgttatcttgcctttacaccacctttttgaccatctttattttctcactgtagcaaaacaaatgtattatgattgattggccgatgactaaagcatttgtagctgtaagaagtgtaacagatgttatattcactatgaacattctacttcaggtgcttttcttttgcttacatttttccatctctttataaacaaaatatgttggctttagtgctcacgtttgccatattggttgcagttccgattggcctatgtagctcgtgagtctacggtagttggagctggccagttagttagtcatcccaaaaaaattgcccttcattacctcaaaggaaagtttttcctt

SEQ ID NO: 158463 - DNA, 482 bp, Arabidopsis thaliana landsberg
gaggatatgaagatataccaagatgaaatctttggacctgtcatgtcattgatgaaattcaagtaaacccctaacaaaaactaacttctcttctcaatcattgtctcgttccattacactaataatatcggaaattgctttcacaggacggtagaggaagggatcaaatgcgcaaacaacacgaaatacggtcttgcagcaggaatactaagccaagacatagacttgatcaacacggtttcgaggtcaatcaaagctggaatcatttgggttaattgctacttcgggtttgatcttgactgtccttatggtggctacaagatgagtggtaattgtcgtgaaagtggcatggacgctctcgacaactatctacaaaccaaatccgtcgttatgcctcttcacaattctccttggatgtaataaaattgtccataacatatagaaagaaaactttatccaatgataataaggaggcttgaatt

SEQ ID NO: 158464 - DNA, 358 bp, Arabidopsis thaliana landsberg
  unsure (1)..(358): unsure at all n locations
acatccgtgccgattcggttgttttctctctgaatcttgcagtttccactcatgtcaaaatgtgggtttatcaagaaacttgtgtcggaatcaagcaaagattcagattccactgttatcaagataccagatattccaggaggctctgaagcatttgagctagcggctaagttctgctacggcattaactttgatatgagcacagagaacattgccatgttgcgatgtgcagcggagtatctagagatgacagaggaacactctgtggaaaatctcgttgtaagagccgaagcttacttgaatnnnnnnnnnnnnnnnnnnnnnnnnagttcgatcacagtcttgcacaaatcagaga

SEQ ID NO: 158465 - DNA, 59 bp, Arabidopsis thaliana landsberg
atttgaaattggggttacactgggatcattgtcctgtggattattctgcaactcaccta

SEQ ID NO: 158466 - DNA, 698 bp, Arabidopsis thaliana landsberg
tcgatgataatcgatactccatgaagattttcttcgagattaggaagcagaagtatctcgaggccttggataggtaacttgtgtctctcaacaacaacaagaatcaaatgttttcatattgccaatcaatcacacctgctgcttcttctatctaggcatgatcgtcccaaggctgtcgatattttagtcaaagatttgaaagtgttttccacttttaatgaggagcttttcaaggaaatcactcagctcttgaccttagaaaacttcagggagaacgagcagttatccaagtatggggacacaaagtccgccagagctatcatgttggtggaactcaagaagttgattgaagctaatcctttattccgtgataaattgcagtttcctacccttagaacttcacgcctcaggactctgattaatcagaggtattctttgtcctttcttgttcacttcaacaaattttcttcttgtcagctactttaactccttgtttctatgtggctacataaacctgcagcttaaattggcaacaccagctttgtaagaacccaaggcctaatcctgatattaagactctctttgtcgatcattcctgccgcctaccaaatgatgcacgagcaccatcccctgtcaacaatccgcttcttggatcattaccaaaagccgagggatttcctcctctaggcgcacacggg

SEQ ID NO: 158467 - DNA, 553 bp, Arabidopsis thaliana landsberg
atggcaggaaaccaatctttaaaagattacttgaagaagtatgaaagtagtgatgttgtagagaagaagaagaagaagaagcagaagaagccatctaaacctgaaccaagaggtgttttagttgtcgacgaagatccagtttggcaaaagcaggttgatcctgaagaggacgaaaacgaagatgattcagcaggtaaattgcttgactgtttcttgtttcttggacttgtgcatctgtaatgctttcacttccctgatctaataacagttcacatttacatattgtgttctcttttcatttgtttcgtatagaggaaagacctctggttgatgaagacattgaagttaagcgaatgaggaggttggaggaaattaaggcaaggcgtgctcataatgccattgctgaggatggaagtgggtgggtacgttacatctaaccgtgaagacacacaatctgatatttctcctcacgtagacaaaggactcgtaatgactcgcccagctctgagcctgggcctagacggtcgggttcggatagagttgatacagatat

SEQ ID NO: 158468 - DNA, 750 bp, Arabidopsis thaliana landsberg
atgggaaaatacattaagaagtcaaaagtcgccggtgccgtttccgttaaggataaatctcacccaaccgctctaggtttccgtaccagagccgccgccgctaaaaacctcgccctccaccgtctccgttctcattccgacgaagcagactcctttaactacctccagctccggagccgccgtctcgtgaagcttccattactcactaataccagaaaacagcagaagcaacagctcattcctagtgtcaatcaatgtcaaacgaaaaaccctagggctagttccggtccggcgaagaaattagagccggatacgacgacggaagaagcttgtggtgataatgagagaatatctaggtctgattgcaattttggagataaaggttttgatttggaatcagaaaacaggtaactttaactctgttttttttttcattttaaagctccaaactttttttttactacaatacagagattgagttttgatatgttggtctctcataggagcatgataagtgattcaaaatcaatacaaagtgagattgaagacttctttgctagcgcagaacagcaacaacagagattcttcattcaaaagtacaaatcccattttctttagtgtcttgattctcttgagtttttagagtttggtctgactttgggggagttatggttttgcaggtacaactttgacattgtctcggacaatccattgcctggacgttacgaatgggtcaaagtgatgccatga

SEQ ID NO: 158469 - DNA, 461 bp, Arabidopsis thaliana landsberg
gagacggtgtttgcgatgttggttgagatcacggaaagagcaatggcgcattgtgacaagaaagacgttttgatagttggcggtgttgggtgtaacgagcgtttgcaggacatgatgaggactatgtgctctgaacgtgacggcaagctatttgcgacggatgaccgttactgcatcgataatggagctatgatcgcttacacaggtctactcgcgtttgttaatggtattgaaacaccgatcgaagactctacctttacacaacgatttcgcacagacgaggttcatgcggtgtggcgagagaaagaagctgtactacttggggataagaaagttgcagcgaattgagtctgtgcccatttttgttcatttttcatcaaatttgagattgaatctctctctactcgataaattggtttttgctaagtagttaagacttttaaatgtgttttattagccaa

SEQ ID NO: 158470 - DNA, 1746 bp, Arabidopsis thaliana landsberg
atccgattcaagcttgtgaaagtctctctgcaaatcttgttgctctgctgctacaacaatggcgcagaaacaacagacccttcaccaacaacgaccattctcttcctctcctcgttcttattcttcaatctcaaaccgtcccatctttctccttagccgcaacggtctcctccttgtccttctcgctctcttccttctcctcgctgtattcttaccttggccaggatctcctttattgctatttccgaacaaagtctcttctccttcttatgcttcttctttgtctccgcatgccaaatctgaatggcgtaactatacccttgctcaggccgctaagtttgtcgccacgaacggcactgtgatcgtctgcgccgtgagctcaccattctcgccttttctcaacaactggttgattagtgtttcatgacagaagcatcaagaaaaagtccttgtgatcgctgaggattacattactctgtatagagtcagcgaaaagtggcctggccactccgttcttattcctccggcactcgattctaaaaccgcatacagtttcggttctcaggtaaagttttctcctatgagatatctttagctttcagatcacaagatctagctggaaatggcttatatactcgcaatgagtagattggctcatgtgacttgcatatattactctagatgtgtttagtgttacattatgaggttccaactcaaacccaattgacaataaatgaatttgtccatagatattttataccatttaagatatttgcccaagttccgatgtgggacattattcccaatatatagtacagttgatcctataaaaaaagatggtcaacttgtggatgtattagtagcagccatttttcttccggatcttgatcgaatttgaatggttatgtattccctgtttctgtgtgtgaagaaaacttatgttttcactaatttactcatcatatccgactagggtttcttcaatctgacatctcggaggccacaacatctcttaaacattttggagctaggttacaatgttatgtacaatgatgttgatatggtctggctacaagatccatttgactatttacaaggaagctacgatgcatacttcatggatgacatgattgcggtacgtaacatatttgcatcttttgcatcttaattctagtgtttatgtaattttattcttggtttgatttttgtgctgccagattaagcctttcctccctcccatgatttaccacctctaagtaaaaacggagttacttatgtatgtagctgcatgattttcttgcgacctacgaatggtgcaaagcttctaatgaagaaatggagcgaagaacttcagtcccaagcttggtctgagtccatccgttttaaagcaaatgatcagcctgcttttaacttggcacttaacaaaacagcccatcaagttagtttttgtttctttcaatatcgacgcatagaatcttctaatatacttatgaatgttggattgtgatcttctattgagcaggtaaaagtctacttgcttccgcaatcagctttcccatcagaaggattgtacttcaggaatgagacatgggttaacgagacaagggggaaacatgtcatagtccacaataactacattatcggttacgacaagaagatgaaacgttttcaagactttagtctatggctagtcgatgatcatgctcttgagtccccactcggaaaactagagtaaattcgaatggc

SEQ ID NO: 158471 - DNA, 1138 bp, Arabidopsis thaliana landsberg
ggagggaaaagcaatgtttactttgccaagtcattggacgagaggttcatcataaaacaagtcgtcaaaaccgagctggattctttcgaggattttgcacctgagtacttcaaatatttgaaggaatcactcagttccgggagccctacttgtcttgctaagattctcggtatctaccaggttagtgacaatataggagggaatgtgaacttgtaggactctgaaatgaaataagtgagcatgtgaatgattgatttggaatgatatttgttgtaggtctcaattaaacatccgaaaggtggaaaagagacaaagatggatttgatggtgatggagaatctcttctacaacagaagaatatctaggatctatgatctcaagggatctgcacggtcaaggtacaatccaaacacatccggagcagacaaagttttgttagacatgaatctgctagagacactgcgcacagaaccgatattcctaggaagcaaggccaagagaagcttggaaagagcgatatggaacgacaccaacttcttggctgtaagtgttttcattacccccaattcatattttgttcttaagtgttttgattaatctgtttccccattatcctcttgtggttagtctgtggatgtaatggactactcattgctggttggattcgacgaagagcggaaagaactagttctcgggatcatcgacttcatgagacagtacacatgggacaagcacctagagacttgggttaaagcttcaggcattttgggtggacccaagaatgcttctccaactatagtctcaccaaaacagtacaagaggaggtttagaaaggccatgaccacttattttctcactgttcctgagccatggacctcttgagtgaaagaaaagaaaccatttttcatcattcttttgttcactgattccaatttgttcttctcaaataaaaagggaaattggttaacagacacatataatataatacaggttcgaacctgactgattgatttatcttttttttttttttggtgtgttggtttctctgagttctggagaattgtatattgtaattatcggccaaactaaagccccccaaatttaaagaaaaagaatactaatgatttgcctttttctc

SEQ ID NO: 158472 - DNA, 498 bp, Arabidopsis thaliana landsberg
tgacttttagctatgacttctttgcttttagattaatagttttctccctgcaggtctgtgccatcaaggcccctgggtttggagagaataggaaggccaatttgcaagaccttgctgcccttactggtggagaggtagtacatttgttgtgtaatgtgttagtcttgtcaacaatggaatattattgacttggcttgatacaggttatcacagacgagcttggcatgaatctggagaaggtggacctaagcatgctaggaacctgcaaaaaggtagcctttgaaaccttaactgatatagacatggtggctcttagtatgaactagatttggctattacattctcagcatatccttgttggattgtaagtgtagttgagacttgtctggctatttgtataggttacagtctccaaggacgacactgttattcttgatggggctggcgacaagaaaggaattgaggaaagatgtgaacaggtaatttttaaccttatac

SEQ ID NO: 158473 - DNA, 3129 bp, Arabidopsis thaliana landsberg
ccaattggtgcactgaacccggagcggctgaaaaagtttcaagaaaaacactctagctttgaagatccagtcatccccaaatttcattatggttcacattactcaagtgctggagcagtaagttatcttctctatgatatctgccatagtttttatcatttcttctcttacattttcttcgttttaaaactctgttcctcctaatcaccaaagaaagacaataactagtattttgatttgcaagaggatagagttttcactaaatactaatgatggtctaataatttgttatttcttgtgtgtaggtgttgcattatctagctagagtcgaaccttttacaaccctttcgattcaactgcaaggtagaaagtttgatcgtgcagaccaaatattttcagacattgcagccacttggaaaggagttctccaagatatgaataatgtgaaggagttggtaagacttggttcctcccaaaaacattcaaacgagtatccataatcgccgtcctttgctttgcaagtgaagagcctagccatatttattttgcttcctcattttctcttataggttccagagttgttctaccttcctgaggtgttggccaacgagaacttggttgaaaatcttggtatgattttatttctagttcctttccttgtccacacaaaatattactcctgaaactgggaagtagaaactacctttttgatattgttctttgccaatcagattctgtaaaacttcctccttgggctaaaagcccaaatgattttgtacacaaacaacgaatggctcttgagagcgagcatgtctctgcacatttgcatgaatggattgatctcatttttgggtacgttttcttcttgaaccagcatcttgtgtaaaacttggtgtgaaaacaaaatttctgtgtaagatagttggattttttttatcacttgtgttgttcttatgaacttatgtatgtaggtataagcaacgtggtaaggaagctacactggcaaataatgttttcttctacactacctacgaggggactgttgatattgataagatcacagatccagtaagttatctctgcctgttggagtttcaaaaatttggtattaccttgtttctgaaatattcatgtggctatttgatgaaggtaaaacaacgggctactcaaaaccagatagttaatttcgggcaaaccccttcgcagctatggactgtacctcacatcaaaagaatgcctctaaaagatgttcttcatatgcaggtaaatgcttgtattaaagattcatggctcttcctctgtgttaaatttcaccattcaaacttgacaaacactttaaattcttgtttagaccatcttccggaatccaaaagcgataaaaccgtatcctgttccagctccagaacactgcaacttacctgctgcagccatcaaggcatcttcggatactgttgtgattgttgacatgaatgtgcctgcagcacatattgcacaacacaagtggcaaccaaacactcctgatggccaaaatactcctttcatctttcatcacggaaagccgagttcaactggcggaacattgatacgcatgttcaaaagtgattgggaatatccccaagcacaagcatttgaatcaccaggaatcagaagttcatctgtcacttctattactaacgatggagacattatcactggtaagcagttttagagattatgatctgtgtgaaagtttggtgattgataatatattcatcgttttattaaaaatccatgtatgttaattaggcggacatgtggataatagcatcaagatagtctcatctgatgaagcgaaaacactagaaacagcttttggtcactgtgctcctgtaacatgcctggctctgtctccagacaacaacttccttgtgacaggttcacgagatacaactgttttgttgtggagatttcacaagggattcacttctcagacaagcgagcctgagcagacaacaagctctgcaacgccttcctccgcaagcagcaacaacttggcgaacaaagccaaaaagcatcgcattgaagggcccatacaagtgctccgtggacaccaaagagaaataagttgttgctgtgttagctcagatcaaggaatcgtcgtttcgtgctcagagtcatcagatgttctattgcattcgataagaaaaggtcgactaataagacggcttgttggcgttgaggcccatgctctttgcatttcttcagatggagttatagtagtctggagtagattagaaagttgtatcagtacgttcaccattaacggagtgctcatttccaaagcaagacttccttcctcttgtaccataagctgcatggaactatccatggacggacaaaatgttgtgattggcgtgaactcattttccgacattgatggttcaaagagttttaatatccttactggtgaagaagattcatcaagtagaagcaaagaagttgagagattgaatataccatctccttcaatttgcttcctcaacttatacaccctccaggtatattcaaacaatctattgatgtgaaacactagattgctcttgatgtcgtggctattgtcttttgacaagccaaaaattcttcttctgtaggtatttcatgtgctgaagcttggtgaaggccagggtataacagctatggctttgaatacagaaaacactaacctcttagtttccacagaagataaacagttgatcatcttcaccaatccagctgtaagtgatgttacactgttcgcatttgagcttcttcattaattgccaccatctactgcagttataacaaccctgatggttttgttatcgttaattttgtttgaaattgcttgcagttaagctcgaagttggtggatcagacagtgaagcctggctcggaatgacgaatggatctgactgtttcgataaactcaacagcaactcaccatgaaatgactcactccaagatctgcagccgagtaacagaggattcgcagagggaagagagttggctaatgatggaaaagaagaagaaaaagaagaagaagaagaagaagaagaagaagaagaagaagaagctaagcaaggacttttggtgcattttccaggatactga

SEQ ID NO: 158474 - DNA, 794 bp, Arabidopsis thaliana landsberg
atgtcgatgcaggtatagggggtgtcaatcgagtccacagttattgctagcaatcaaggtgtgtacagaagcaactaagtcaagcctgattataatgatggtgaatttctagtaacaatcctaggtgaggattcaaacaacaaaaataagaacattaagagccctactcgatcattgggtcgaatagaaccaacaagcagaactaaaatgtaatcaacaggggatataaataacaggtaaataaaagtgcaatcaacagggaatacaaataaatctaatagaagttctaaggatggattcattgataagggaaactctagggttcatcaggtggctaacaggcgaaaggcagatacccttgacgatagattcaaaaattgggtcaatcaattctcgtgacagagacccccataactcgacgacttcctaatcttaactctcgttgatgaaacataacagagcagggtttaagcaacaatctaccaaagtcaataaacagtctaaacatccaatctcttgggctagaatctacaaatatttggaattcgtagatcagacatccatttgaacgtcttttggacgcttgatacctatggtcgaattcccacattagccaccgaaaactgcataggggcctacaaatccagaaggaatctaacctaatcttaaccacctgactaatatagagattaccctaatctaatccatcctcaagaaccctaatcactactcaagcaacataactaagaacacaaacctagaaattactgaaatcataccaaaatgtagatcta

SEQ ID NO: 158475 - DNA, 1624 bp, Arabidopsis thaliana landsberg
gatctccgtcccattctcttcgtcattcatcactctatctgcgtttcgttgagcgataatgggtaatttatatatccatctcttctctgctcataaatgttcctgatctcgtggatccgttttttcgctttgatctgatcagttttcgttttgaccaagcgttactcgttttcgatttcagtttctttctaagctctgtgatttggattgtgatctgtctgatgtaaaattttgatagtctcttttgctcattagatggtaggtgattgattcttctttcttctatttagtagcagatcagtgtattagatgattccgagtttcgatttgcttaattgttgttgaaatttggggtttcaatgaaattttttggctaggtttctagtggattaacagttatcttagtgattcgaaaatgcgaggaatcaatcaaaaattaaggattctgggtttaaaggagacactcgatgcaacttgtggggaagatttaaagcctagattttgaagatgttattgaataggaagactgaatttcagatcttgctttgttcagagacactttgggcttacttgtacatagtgctaattttattactttctttattgcttggacgttgcagatgccgcttgctctacccagcttatcgatggggatggtgtctttaatgtttctggggttgatcatttcatcaaggaggttaaattggacgaatgtggtctttcatacgcggttgtctcgattatgggtccacaaagtagtggtatgtatcaaatccttgaatgtaaaaagtgtcttctttggaatctattttttgtatattggctgattttatgtcattctggttgaatttgcagggaagagtacgctcttgaatcatttgtttggaaccaactttagagaaatggatgcatttagaggaaggcatgttctaatttttgtatacacttcatcagaagaatacttagcttctaatttatatttatttttccgctgcaattctttgttttcaggtctcagacgactaagggaatttggattgctagatgcgctggtattgagccttgcaccgttgtgatggatttagagggtaccgatgggagagagcgtggtgaggtgtgtaaccttggcccttttcatattcggttcttttaatatttagcatctcacgcccagttagtatttatttagcttttgcactaattgtgaatgactttgatgaaatttgaattgtactgattagagtcataacatggtttcatgcactgtataaatcttaaggagctcacacaaagaaattgttgtctaaaagagaatgtgtcagtgcagaatagctttacttacacagttttcttgtatatggataggatgatactgctttcgagaaacagagtgctctttttgcacttgcagtctcagacatagttcttataaacatgtaagtggtgttctttactttgttttctttgatattaatagataacaggacttcttttgccgtctttatcttatatcttctcggatttgtaatgcaggtggtgtcatgatattggtcgggaacaagcagcaaataaacctcttttaaagactgtgttccaggtatgtgcctgtatgttcttatcagga

SEQ ID NO: 158476 - DNA, 1290 bp, Arabidopsis thaliana landsberg
tggtacattttctaagtacttttagttataagtttgaaatgaataacgtttttggtattataacagaaaggttacatggttcatgcgaccaagtcagccacaacgattccaaaagaacgcttaaagaaccgcatagtcttccatgatgggcgtttagcgcaacgtccaactccgttaaacgccattatcacatacctatggcttccttttggtttcatcctctccatcattcgcgtctacttcaacctccctttacctgaaagatttgtccgttacacttacgagatgctcgggatccacttaaccattcgtggtcatcgtcctccacctccttcccctggaactcttggcaacctctatgtccttaaccaccgtaccgcgcttgatcccatcatcgttgctattgctcttggacgtaagatctgttgcgtcacttacagtgtctctcgtctctcccttatgctttctcctattcctgctgttgccctcacccgtgaccgtgccaccgatgctgccaacatgagaaaacttctcgagaaaggtactttacacatcttctcatcatatattactagagcatacctataacaagtttcactgtccagggggttcaataggagtttctatttctttctttttatttttcgatgaatacatatatagtagcccatgcaaatctcaatatagtaaatattactttggtatggtctttgatgtttactttggtacctaattaacgcatcttctaaccaaatttatataaatgaacataaaataatattgtttacttcttttgaatattgacttacattcacattaatctttagttgagaaattaaaaatcaatggacttgttgagctaatgatatgtttttggtgtataacaggcgacttggtgatatgtccggaaggcacgacgtgtagagaagagtatctactgagatttagcgctctattcgcagagctaatcgaccggattgtgccagtagcgatgaactgtaaacaaggaatgttcaacgggaccacagttaggggtgtgaagttttggacccttacttcttcttcatgaacccaagaccaagctatgaagccactttcttggatcgtttgcctgaagaaatgactgtcaacggtggtggcaagactcctatagaggtggctaattacgtccagaaagttatcggcgcggttttgggcttcgaatgcaccgaacttactcgcaaggataaatatcttttgcttggaggtaatgacggcaaggtggagtctatcaacaacaccaagaagtga

SEQ ID NO: 158477 - DNA, 429 bp, Arabidopsis thaliana landsberg
atgccggtatctcagatacaagctgatattatcgtatcgaaagacggtaacggcacgtgcaaaactatatcggaagctatcaagaaagctcctcagaacagtactcgccggataattatctacgtcaaggccggaaggtaaaatgactgttttacccttcgtattaatcgatgtttttaactgttatgtccgtgaatgacgaaagtgaaaactaaaaacctgtacggaggtttaataattgcgtatctctgactgtgtctgtgatctctgtttttttttttttcttggaaagatatgaagagaacaacctcaaggtcggtaggaaaaaaattaatttgatgttcgttggagatggcaagggtaaaactgttatttcgggaggcaaaagtatatttgacaacatcactactttccacacggcgtcatttg

SEQ ID NO: 158478 - DNA, 2026 bp, Arabidopsis thaliana landsberg
  unsure (1)..(2026): unsure at all n locations
gtagagaaaatggagatatcagttgcatcggtaacagtttctgtagctgtagttgttgtgtcatggtgggtatggagaactttacagtgggtttggcttaaaccaaagatgcttgagagttacctgagaagacaaggtcttgccggaactccttacacgcctcttgtcggtgatttgaagagaaattttagcatgctggctgaggcaagatccaaacccatcaacctaacagatgatatcacaccacgtatcgtgccttatccgttgcaaatgctcaagactcatggtatgcttcccggttggcatcttgattcctctttgtttagaactattttgtagagtatctagaaaaagtttcaactttcgtatctctatgtggttgaaacagggaggactttctttacatggtttggacccataccaacaatcaccataatggatcctgagcaaatcaaagaagtgttcaacaaagtttatgatttccagaaggcacatacgtttcctctgggcagattaatagcggctggactcgttagttatgatggtgataaatggacaaaacaccgaagaatcatcaaccctgctttccaccttgagaagatcaaagnttaaaagctttatttttcagtcatgaatcaagttgtatgctcattttattctcaactaatttgtgcattctaacttctatgtatagaatatggtccctgcgttccaccagagctgcaacgaggttgttggcgaatggggcaagttagtgtcggataaagggtcgtccggtgaggtggacgtttggccttggcttgtgagtatgactggagatgtgatctctcgtactgcttttggcagcagctacaaagaagggcagaggatctttgagctacaagcagaactagtacatctcatcttacaagctttttggaaagtttacatccctggatatcggtaataaaagatctcaacctgcctggttttagaacttcactagtgctgcaaactattacagattgtgaaccatgatgtgtcatatactcatattctctctgtcttctgtttgtgtagttatctccctacgaagagtaatagaaggatgaaagcagcagctagagaaatccaagttatactgaaagggatcgttaacaaaaggttaagggcgagagaagctgggaaagcagcaccaaacgacgatttgttgggaatacttcttgaatcaaatttggggcaagccaaaggaaatggaatgagtactgaggatgtgatggaggagtgcaagttgttctatttcgccgggcaagagacaacttcggtacttctggtctgggcaatggtgctgttaagccaccaccaagattggcaggctcgtgcacgagaggaagtgaagcaagtttttggcgataaagaacctgatacagaaggcttgaaccagctcaaagttgtaagtaaaccgaaccaaaaaccttcaagtgacgtgagttcttttgttgcattgaagctgaaagatttgatccctcacagatgacgatgatattatatgaagtccttaggctatatcctccagtagtccagctgacccgagccattcacaaagagatgcagctaggtgacctgacactaccaggcggcgttcagataagtctaccaattctgctaatccaacgcgacagggagctgtggggtactgatgcaggggagttcaagccagatagattcaaagacggtctttcaaaggcaacaaagaaccaagtctccttctttccatttgcatggggaccgaggatatgcatcggccagaattttgccatgttagaggcaaagatggcaatggcgttgattctacagacattcaccttcgagctttctccttcatatgttcatgcgcctcaaacagtcgttaccattcacccgcagttcggtgcacaacttattctgcccaagctataattctataaccacatgtgctagatgtcaaataaacataggaaaataatccagatcataatataaaactcaaatctttttcttatttaag

SEQ ID NO: 158479 - DNA, 324 bp, Arabidopsis thaliana landsberg
taaaacaaacccaccaatttttgtttttgttataagtccattatgtgattgattttatttaatttcttcttctttatttatggtttatccatggagcagaggagactctaatgacagaagcaaccacaaaccttcctcacggtctttaagctctcaccctagggacttattcgtttttggtcgttatgttctttcttgtccttgtagtgttccgtgggcaattctaaaacggttgaatatttgtacagagggatccgaatcactcgatacatatataaagccacagaaaaaacttccttcagaaaactgcagaaatctaaataa

SEQ ID NO: 158480 - DNA, 555 bp, Arabidopsis thaliana landsberg
  unsure (1)..(555): unsure at all n locations
gcgactacatatggattggactatgaagggaatgtgtgtggtagcaagcatcgtcaccgtgaccttactcaacttgagcttagatattggttaaaccctaaccaagtttatgaaagtggtttgaaagatggggaacttaaattggctaatgctagaactatttgtctcttgnnnnnnnnnnnnnnnnnnnnnnatactctcaactgggtatgtgactatcctgacggcgagattcgtctcaagatgaatgattggatcgataggaactatgattattttgagtttcttactccagaaatgaggaattcctctcttcagcttcagggtccttgttaccctgtaatattccctagtgtgaatggtaagaggcacacaaagcttattcttattttctattctattgcttttttgtaacaaggtttgttcttttgattctttagtttattggagctgccaatatattgctcgtgcttcaaattcatccttacgccactggcagcagatgggtggtgttaatattcaagaggacatgatcatagacaaatcaattagaag

SEQ ID NO: 158481 - DNA, 956 bp, Arabidopsis thaliana landsberg
atggatgacggggaaattgctccatcgcagaacgcatctgttgttagacaacattcccgcccgcgaggaaacaggtctgtctttccattggctgctctgttttttttttttgtcaacttcatatatggagtaatgtagtagttgtaaccatgaaatttctgaattacaatgacaccgtgattagactttttttgttttgttttttggagccaagtgatatgaacacagattcacttagaaatgaagagtgattcatatatttgatttgtctataaactcttcagggaggatgaggttgacgttgaccttgaggaattgatggtcatggaagcaatatggctctctgttcaggtaaaattatttgtttgtataacttttgatattaaatttttcagttctctcatagctttttaaactgattctaacaggaaacagggacgcagagaaattcagcttcaggggaaattacctcttctaggcagtatgtaacagataatcatagttatgtttcttcaccaccacgagtgactccaatcgtagaaccagcaacaccgtcttcatcatctggtgggctttcttgtgcaatctccgcacttgctgaacgccaaatggttggcgaatcctccagtcacaatcataatcacaatgtcaacgtttcttcatacagtatgcttcccggaaattgtgacagttactacgacatagaacaagaggtagatggcatagacaaccatcatcatcatcgtcatcattacgagatgggagaaacaggaagcagcaacagctatgtaagttcttacatgacaggcgagggcttccacaactttcctcctcctccacctctggtcattgttccagagagttttgaggaacagatgatgatggctatggctgtgtctatggcagaggttcatgccacgacgacatgtgcaccaactgaagttacctggcaataa

SEQ ID NO: 158482 - DNA, 1479 bp, Arabidopsis thaliana landsberg
atggaagacgaaggagatgtggccactgcttttactctcgctaggatactctctaatattccgacttcgagaggaggaccgactagcctagtgaccttcgatatacatgccttgcaggtctttatctacaaccctggtcacctctctttttgttctttgagttgatggttttatctagattctgccttgtcttcgtttggattgtaggaaagattctactttggtgatactatacttccatgctttgaaagtggtataccattgctcaagagcagactccagagtctacctgattctgataacgtaagtctctttccctctttttgtcacatttctatcatgttgagtagattatcaacaagattcaattcattttggttactgatcttcatttgcttcagatatctattgcattcccagatgatggagcatggaagcgtttccacaagcaactccaacattatccaacggtactatattttctcatacctagacgatatcgcctttgcacatctcattagcatcttacagtgaacccatgtggatcgttttaggatttagtaagctggatttaattcaggagcttgttcttcaagcttacattagatctaactccaaaagaagcattgcatcatccaatcttgtacagaaaatctgtacattaaccttttgacttaccaagtaatcctacttgtcgttcagattgtttgcaacaaagtaagaatgggagacaaacgaatagtgcgtatcaaagagggagacgctgaaggaaggcacgtcgtgattgttgatgatttggttcagtcgggtggcacattaatcgaatgccaggttctgtactcagattcaactctcaaaagtgtaactctgtactcacttcttcataactaaccactaattcttgttcccttcagaaagtcttagctgcacatggagcagcgaagataagcgcatatgtaacacacgggatcttccccaggagttcatggaaacgtttcaagcttgacaccaaaggttactacaaccattatacaaatgttttgaatcagtctaaacagagtcatgccagtttctttgcgatgtggctaaaatcttggttttcttttctttccgtgatgcaggtgatcccgcggaaggtctgagctatttctggatcacagactcgtgtgggatgactgtgaaagaggtgatgaataaacctccttttgaagttcttagcctggctggctccatagcttctgctcttcaagtttaagcttatgtgattcgagaagaaatccagccgcaagtaatttttgggtttgaacaaatctgatttataaactttggtgtatagttctcgatcaaagcattttccacggaagaggttatttgttgttaatgttctgtaggaaaatccaaaaatgtaataatgtttcttctgtcaaagagagaaaaaaaaaacaatgtttcatttcacttcttttatacttgttcgtt

SEQ ID NO: 158483 - DNA, 255 bp, Arabidopsis thaliana landsberg
tcttttgctgctatcttttgtgtattgaaaagcccttaccgttaccggaacctcaaagagctatatctgtgtcgagaaatacagagatagtggagataaagcaatcttcatcgcggaaagggaagaagattctgatgttcaaggcattgatgagtatgagcaagtccagaaactaaaatctctctttgtatttgataaatgacttagatttgtacaaaactaatgtggaataagagagagtaatgcttattttgt

SEQ ID NO: 158484 - DNA, 687 bp, Arabidopsis thaliana landsberg
gtctcttcttccttttccatataattcgatacatgcatctctctaatctttatatccggatttagacgaatcatcatttgctttggtctcttcttaattatatattgatgcacattttttttttataatatcagatgtacagaacagtgaagacatccgacaaagcagcagcttcgtcaggttagtgttagagaaataattcagattctttatgggtcaaattattggatatatatgatttaataattaattgaaatgtgattctgatagaaccctaatttgtttttttctttcttcttaatgttattcaggacaatctgatgtctatgaaaatggatcatcaggagataataactcagacgactggatgttcgatatgaatagaaaatcgagagatagcgaggaattgacgaatcctctagagaaatcaaatggtctatggaccaattcttccgggtacgtacatatatgtacatacttccctagctagatatagatgatttttccatcgttactatatataactaactatatggaatgtggaatctcgctaagcatgtgcatgcttctatatctatattagcgtagttaagaactgggtaatgtttatgtttctgctttgtagtcctgttttgtctctttctcagccacaaacccaatagatccgagttgagacaaaacacatga

SEQ ID NO: 158485 - DNA, 2123 bp, Arabidopsis thaliana landsberg
aaattatacactcctcctgcgggttcagggtttatctcagggtttacttccttctcacgtagttcttcactcaatatgaatccactcacacagattgttccatttggaccgagttcttatttgtcggcacaagctagagttgttgaagaccatacaatgtctcaagttattgtacaagcagttgcagatggaggtggaactggtatgctggtagtggtgacaggggcaaaccatgttgagtatgggtcaaggggaacaggattgccggcaaggatctctaggaagattccgaagaaaagtcaacttgttgtgttacttgatcctgaaagacagtttttgcggaaagagggtgaatctccagttgctgatttcttgtggtattctgcggccagaccctgcagcagaaactgctttgaccgagcagaaatcgctcgggtaatgaatgcggctggtaggagacgagatgcccttccccaagtatgttttctatgatttcgtttatgagactgactctctgtttgattgttacttactgtatctggcgttcttatgcttacagtaaaaatgaactctaaacctgatctccattattagtattagtacagttgtactttattcagcactcagtttattctgccctattttttttgctgtttagagttgactgtggagttgagttttactttcttttgctcactttgcttttatgtcttagtatgctgatagatttttttccattgttccaggacattcaaaaaggattagaccttggtctggtgtcacctgagattctgcagaatttctttgatttggagcaatatcctcttatttcagagcttacacaacggttccaggtatatccattccggaagatattcctctagtgaatctttttcttcgaatatgcttttcactaaataatgtgttatagccttcatatccttccactgtacattaacttttcctgtatttatcttctctagccagagttaatgatagcttcaactagtaagtaaaccatacttatgatgatcttttgtgttacagggattccgagaaaggttgttggcagatcccaaattcttgaatagattagctattgaagaagctatatcaataacaacaacacttgtagctcaatatgagaagcggaaagaaaatttctttgaagaactcgactatgtgatcactgatagcgtaagagcatcagttgttgattttttcacagtttggctccctgcaccaaccttgtcttttatctcatatgctgatgagacaattgggccaaacagcatagatgccttaagaggcctcctagggtccatacctgacaatgcatttcaaaaaagtctaggtggacaagagtggactctgaatcttaggattgcttcagttattatcggtggcttgaagcttgctggtgttggagttgtttccagttttgcagctgtgggatcttcaaatgctttgtatgcaatacgaaaattcattaaaccagagttgggtgttggtgagcaagcaaagaggtctcctatgctgaagacggcccttgtgtatggaggttatctgggaacatcttcgaatatccgttatcaggtatggtgatgcgcggtgctttacatgttgactcaatgaatgagggatattaatgaaaagtagttaaagttgcttaatgaccacagcaatatattatgcttttgcatcttagccaaggaaggccttttgatgaagaacagtatgctttgaatttatgcctttaaaatcatattactttcaattgcagataattgctgggttaatagagcatcgcatttctgacgagctttcttctcaacctctacttgtaaacatgatttcatttgttgttcgagtagctaactcctactttggaactcaggtcagaattaggcctgtactatgatctcttcttgaattctttgtctcctttttccttattattatttttggttaattcttgatataccgcttaacttcattccaacttttttcataaaaacgcagcaatggattgatcttgcgcgctctacgggtctgcaaactcagaaaagtgtcacaactttcaaccaaatccccgaggttgcgagccaatccacagtggaata

SEQ ID NO: 158486 - DNA, 511 bp, Arabidopsis thaliana landsberg
gacgccacggtgtctctatctcccttgctgtctcgtctatataaacttgcacgtctccgctgattagaagcacaaaactcacaccccaaaaccgatccaaattccgagaaagacaaccaaattttccttttcctctgcaaaaatgtttattgagagcttcaaagttgagagcccaaatgtcaaatacacagagaatgagattcactctgtgtacgattacgagacgacggaggtcgtccatgagaatcgtaacggtacatatcagtgggtcgtgaagccaaagactgtcaaatacgatttcaaaacagacactcgtgtccccaaattagggtaacgaatatccaaaaagtttgaatctttcacttgttttccttgatttctccgcttgaattcatctgggtcggtgttaaaattcacattttgaatctttttgtgtggatagggttatgcttgttggttggggaggaaacaatggatcaacactaaccgctggtgtcattgctaacaaaga

SEQ ID NO: 158487 - DNA, 363 bp, Arabidopsis thaliana landsberg
taattcgaacccttcaagattttcttctctctatctctctgtttctctctgtttctgagatgggtttgtttggaacgaagaagatcgggaagtatgagataggaagaacaatcggagaagggaatttcgcaaaagtgaaacttggttacgacacgaccaatggtacttacgtagctgtcaaaatcatagacaaggctttggttattcaaaagggtcttgagtctcaagtcaagagagagattcgctcgatgaagcttcttaaccatcccaacatcgtccaaatacacgaggttaggatatgcctctaatgtctatctgtctcatcaagttactggtgttcttattctgagtgagatcttacat

SEQ ID NO: 158488 - DNA, 625 bp, Arabidopsis thaliana landsberg
cttgtgcaggataatgtgatatctactcctgaaataaaaggaaccatcttgcctggaattacccggaagagtatcatcgaagtagctcgtagccaaggtttcaaggtaaaatccaaattcccttcttcaaatttttggcaacagtcttgatcaagtatgtcagaaaactgaggaacttgagttacggactgcaaatacttcatggttttgtaagtttaacaaaatttcggtttaagagtccttaattctgattttcaggtggaggaacgaaatgtgacagttgatgaattggtagaagcagacgaggttttctgcacaggaaccgccgttgttttatctccggttggaagcatcacttacaaaagccaaaggtacaagacctttttttttaccagttaacaactaaagctaatgaatcacaaagtttacactaagaatcttttccgaaaaatcttgataggttttcttatggagaagatggctttggaacagtctcgaaacaactctacacttccttgacgagcctgcaaatgggtctgagcgaagataacatgaactggactgttcaattgagttaaaaccagtcacgaacatatcaatattatacatatggatgtgttagtag

SEQ ID NO: 158489 - DNA, 1113 bp, Arabidopsis thaliana landsberg
  unsure (1)..(1113): unsure at all n locations
gacttaacgcagttggtgagagtgtatagaagcctttgctctattataataataatcttgttggtactattactcttttggaagttatggctcaacatggctgcaaaaatgtatgtataatttgccactacacaacaagctcgaatccatttttactttaattgatcaattctcatgattagctacttttactctgtttccagcttgtgttttcatcatcagcaactgtgtatggctctccaaaagaagttccttgtacagaggagtttccaatttctgctttgaacccatatggacgaacaaaggttgttttcttgacaaaacccacttgagtattgtggttaattatgaagtgtgaatctgacttattatggatgtttttgtagctattcattgaggaaatctgccgcgatgtatacggttctgacccggaatggaagattatattgcttaggtatttcaatcctgttggtgcacatcctagtggtgacattggtgaagaccctcgtggtattccaaacaatctcatgccctttgtacaacaagtcgctgttggtaggagacctcatctcactgtctttggaaatgattacaatacaaaagatggaacaggggtatgtacttgtcttttatgttttcataaaacaagaagaggttttcaacattttgatctcatgttttgttttaggttcgagattacattcatgttatcgatttagctgatggacacatagcggctctacgtaagctagaagattgcaagatcggtatattatgatttccattcgtttctcttatctactacaatcattctcaagtctcttaactttgtntgtgtgttgtttatattcaggttgtgaagtgtacaatctcggaacaggaaatggaacatcagttcttgaaatggttgatgcttttgaaaaagcatccggaaaggtaaaaagtgacactttctttcatctttagatacttggattctaagtcatgttttgttaaacctttgaactcttttgtggatcagaaaatccctcttgtgatcgcgggacgtcgaccgggagatgctgaagttgtatacgcctcgacggaaagagcagaaagtgaattgaattggaa

SEQ ID NO: 158490 - DNA, 3771 bp, Arabidopsis thaliana landsberg
atggcgaacgaccaatttatgagtggttggactgaccttctccattcttcgtcgaagcttctggagcaagctgctccttcttctcagtttcctcctcttcaggttcttcctctttccgctggttttgaggttcatcgttaaagattagttcgattgatttttgtctgtttcactatcagagaaatttagatcagttggaagcgttatcgaagaagctcaaggctaaaaccctgaggaacgaagctccttctcagtctattgctgccactaggttaatctcatttttaccgtctcattcacttgttattgtgttttgtatgcgaacaagaatttgaaatgtcttgaattcattgctcagctttcaaatgggacgtagctactacccaaaagcaagcgttaattctcttgtctttcttttttgtcgttggacattttgcagactactcgcacgggagggaatcaatgcagagcaactagctcgtgatcttaaatctttcgagctcaaggtgacatttttcatcttagctgtctctccttataatgtgcttcaaggattactttgtctattggtgtgtttttccttgagataagaaagtacaatatgtgagtaagtagttttctttttacttgtagtgaaacaaatttttcatatgtcgtcaaacgaatctacttctttagctgtcttagcaaacaaattcatgatcacttgctgttgtctgactgtgtctttggtccgactattggtattgtaaggcattggagtcccacctttgtatgcttacacatctctcagcttgctgtctgctattcaaatgtgattattcttttttgccactatgtgatgtttttatttattttgaatactcttaaaagacaacatttgaggatgtgttccctgctgaggcgacgagcgttgaagaatacctgcaacaggtacttctatttctccaaggtttactatatctatcatcatatagattgattttcttggcgaggattggtcgatatgatgtgtattgttattgttttgttttaggttcatgaaatggctatggtatcagctattcaggaagcccaaaaggataatgttcgaagctttaatgactacatgatgaaagtgttggaggtttgtattctggctatttttaattttaatttaatgataagtcactgtgatacaattctgcaatgttgttgtttgtcaattctacatttgtactatgcttttatctttgtaaagagacttttcatggatgtggatggtttgctaagtgatatattagaaagatatggatgctaaatattgaatgtgaattttgacttgacaggaggattggagaaaagaaaaacgtgacttccttcagagcctcagcagaatatcaatgctacctaaaacaaatatgattgatacaagcagagaggctcatgctggtcaactagtgccggtgggttcgagtcctcgagtatcctcaactccaggcaaagaactcgtggctctggctaacatacccattcatgagaaaaaagcatatgtctatggggaggttgtgaagaaacttaacacttcaagagaacgaggcatgccatttagagtatgtatttcctataccttgtcttaaaacttagtattggttcacttgaattgaattactgttgatacttgtagctgaaaaaaattcatttccttatctacttttagaagtctagctagaattgttataactttctgttcggtatgcactctagctttcatgcagcagccattgaagctggctaccctcatattgattgtttggttgtgctttctactgatcctatttttacttttgtatagcctgctatgtgttttaaggacgcttatgatactcttggtgctgaggtaactcgtggaaaatcagtcaacatgcagaaaatatggcagcttgttcaggtaatcttttgactggaaactatatcttccagccaaccaccctcttaaggattgtttttatctttccacctttcttaatttcatgcaaatgactgattgttgacaaactttttccaggcaataacaggtgaagattcagcagttcgacagggtgtttcgaagaggatggccctcgcgataggtgcaagacatcatttacaacatgggcatgagaaatttataatggacacaattcaaactcaccctacacaggtatccattttttgtatacttaataagaagagttaagacttgtatgtcaatacatattttgattatcctctgcctcaaatggttgggtgctgtctgaaaaggttccatgatctttcaatcctatttcaagaatgttggtaatcattttgacatgtttcttgctttttatattcctgttctaggctgctcttggtggatctgttggaaatttgcaaagaattcgtgctttccttcgggttagtgtcccagattgaaaccacacagaaaatgttcatagggctgtttagctttcttattttcatgttatctatactgtgcagattcgtttgagagactatggagttttagattttgattcaactgatgctcgtaggcagcctcctgttgatactacttggcaacaggttttggattatctccctcttgctttgaattttaaaccttttcaggaccatatgattgagatagagagatttacactgcggacctgaatgagttatatctatctcgtaaaccccagatatatttttgcttgcgaactgggtattatgaggaggctagggaaattgctcggtcaacacggtcatctcagcaatttgcaccactggtaggtttactttagattttgatatattatacaagcgttttggaatcagctctttctttacatttcctttttttggcagcttacagagtggattaccacagatggtatggtggctgcagagtctgcagctattgcatcagaagaatgtgagaaaatgctaaggatgggcgatcggttgggtcgaacagcttatgacaagaaaaaactcctactctacactatcatttctggttcccgtaggcaaattgagcgcatactgagggatctatctacactctttaacacaattgaagatttcttatggttcaaattgtcatgcataagagacgtcactggtggatcctcatctgtggtcctgaatgatggccttgcgccatacagtttggatgatcttcaggcttatctcaataaatttgagccttcatactacacaaagaatggaaaagaccccttggtatatccatatgttttgcttctcagtgttcagttgctaccggccatcatgcacttatccaaagaagcaggagacggagggtataatattgatgctgttcatatagctatttctttggtggatcattccgttttatctgaaggctctgggactggccacaaactaagtgtgatggattctaatgctgaggcatctagcatgattaggcaatatgggtcaatgtttttgcatcacggagatctccaaatgacggtagagtattatgcacaagctgctgctactgtaggtgggggacaattagcttggtctggaagaagtaatgtggatcaacaaaggcagagaaacctaatgctgaagcagctactgactgagattctgcttcgagaaagaggtatttactttttgcttggagcaagaggttctggtgaagaaggtcagcttggaagatttttccctgattctagattgagacaacagttcttggtcgaagctgcacatcaatgtcaagaagctggattatatgacaaa

SEQ ID NO: 158491 - DNA, 574 bp, Arabidopsis thaliana landsberg
gtgatgataacaggtgatcaagctttgacagcttgtcatgttgcaggccaagtgcatattgtatcaaacccagttttaattcttggacgatcagggagtggtaacgaatacaagtgggtgtcacctgatgagaaggagatcatcccctacaggtgcagtcatatttttaggacagttactctagaattaaagcattctcatgttttataatcttaggtagtcacatgatagcagcagtattgtgtctctctttctccatgctactgtttttaactgtctttgaagtgtgtgctccccttggtgtggtgttttaactttgacttacaatattttgctctacatgtaatgattgctcaagtggcaaagatctgacacttgcatggtttctttcattctcctgcttctgacctgagaaaggatgacctcgtttttgttttcagtgaaaaagagatcgaaaccctggcagagacccatgatttatgcattggaggtgacagcattgaaatgctacaggctacatctgctgttttgcgagtcattccctttgttaaggtatattacaccttgtaatctt

SEQ ID NO: 158492 - DNA, 439 bp, Arabidopsis thaliana landsberg
  unsure (1)..(439): unsure at all n locations
gactcagaantgagatctcttgtttttcacagaagactggtgaaagcttctatgaagcatgagagcgtttcaagggttacaccaaccaatgccctcatcatggcttcaagaaagcctctatgctcagcactttatacagaggtgttctaccacgcataagaatgcttctggataccgccagcaatggaaatttccagaacaaagatgttgaagaaggctgggaattggttgagaacctagctcagtcagatggaaattacaacgaggactacaacaggaccatcagaggaacaactgactcggatgacaaacacaagaaagagatcaaagcgctgaatgacaagcaggacaagattctttttagccagcagaagcatgtgcacttccctgttcatgacgaggaagttagctacatccacaatcaaggtggctacaaagg

SEQ ID NO: 158493 - DNA, 610 bp, Arabidopsis thaliana landsberg
aagcaaacaagcttgacactaaaagaagaagatatagctgttacaaacgtcaagattgatttagctcgtgggagagaaaatcctcttgaatggtaaacaaagtacagtttagcttctctgttttctcaatttcctcattaaagttctaaccaacttatccttgtgcttgacttctttagcatcaacttctataaggtacatacataaaagtcttcgttcttgttatgcagatttgattctctaaatgtgtaaagagaggaaaccttgaaaataacacagagaatctcaataaacaaattgatttttctatggtatttacaggattataatagtgcagagaagtttgtgatacctgaggacagagttagccacttgttaccaacaacatatcaagaaatgatagtgagagtatatgccaaaaaaccagaattggtatgtgattattactctcttttatgattacattactgtttcgttttatttaaccacaaagtaacgtttttatttttctggtttgcaatgtttattctacaggtagaagcagtttctgaggcatttgaaaacttccaaatgagaacgtatggaatcaaagctcaagtactgatgtaac

SEQ ID NO: 158494 - DNA, 2209 bp, Arabidopsis thaliana landsberg
gtgatttattcagaggaggatcggaagctcaacaaagatattactattggtcttatccagcgtgagttgcttagcctagcggagtacaatgtccacatggcgaagcatcttgatggagggagaaacagtatgctgaattgcttaacctttgttgatgtccttgtgtggtaacattctttttttgttttggctagtgaacttgttttaacaagttgtttgttacgcagagaccgcaactgactttgctatttctctactccaatccttggtcactgaggagtcgagtgtcatttcagagctccacagtcttgttgatgcgctggcaaaggttgcaattttaacattcttctgcgtttgttgttgcagtcgcatattcttgttctattatataaaaaaacagttaataggtgtgaaaacatacaactagggaagggataggttcaattttttttttttgtggttaaatctactgcataacactgtttatcatataatgccaactgacaagtattgtggttaggttcaaatattatgaaatttggcattgttatatttggtgacgctgcaatttgtattcttgttttggttgtagcttgcctcaaaatccggatcttctgagtcattgcaacagctaattgacatcatacgaaatccagttactaacacagctggcctctctgatagttcaaccggaaatgataacaacgataggcaaaaggatgagaaggtgtcagatgtcttcattaccgaatgttgcctgtaatcagactgtaaatgtatatttgacatgttagctttttcttaggttgcgtgcaacaccactaacacagaagagagtaccagcttggattatgtggaatcagatcctgcgggtttccagaatcgggtaattgtctgcatgttattagcgtttatgaacttctatattgatttagagctctaccttttcttttttaaaagttgattgggaattgcatatatctaaatttttcacttgcaaaagagtaaatcaaaagctaaaatgtttgtatcagcacaatgaatttgcaagctacaaaaaggatttcaaaacaaacgtttctatgaagctattttcgttcagtatgcatgtttttttccttatttttgtcttgtagatggattttaaattttcactttaattccctgccttagatacatgtgtttgtagtttgaaataaaatcagttttatgtttgaacaaacatctctcgtacttcttgtttatatcttgtttttgtcttcctctgtatggtttggcaggtgtccacgctatttaaaaactggtatcaaatctgcgaacttcctggtgcaaatgaaaccgcatgttcacaatatgtcctgcatttgcaccagactggattacttaagggagatgatacaacagagagttttttccgaattcttctggtgattttaccttttaagaatgttttagcatcagcactttcaaatcttgagaggcatcattattgattttggctttcctttctgtaggaactttctgttgctcattgtatatcttctgaagatattaattccggtgctgtgcaatctcctcagcaacctcagagtccatcattccttatcattgatatgtatgcaaagcttgttttttcaatattgaaggtagagtgctcatttttttttttgcattcttcgtggataattatacccaaaatacattgccggctaagctttttatgttttgtttgtttcttatgacaatctgttcagtatttccctgagcaggagtctagcagtaggttatttcttctttcagaggtaaggggacacatactcttattggaaataaatctaacttctactataatggatggaaaaggtgagtggtattgattacctgtttcagatcatggctgtcacagtgagatttattcaaaaggacgcagaagataaaaagacatcactcaattctaaaccatatttccgattgttcatcaactggctactggacttgtgttccctggatcctgggacggatggtgcaaactttcaggtgcattttgttgtccttgaagtagctgctattaattgttatcactttaattaatcttttgttgcaggttctcacagcttttgccaacgccttccacgcaaagcagcctcttaagattcctgctttcaggttaggacacaaacctatttctcaccgtgcttctattaaactg

SEQ ID NO: 158495 - DNA, 777 bp, Arabidopsis thaliana landsberg
tacgagaaaagattcagtatagacgaagcctttgagtttctcttatctgttacttataaaatagctggtaatatttgatttatagcctctaggtttcccatcaatatgcatctttagctatattgttagtttcagctgcgtgatagttgttcgatgaaatgtctgaatgaatagaatgttgtgaattcattatgactttatgagtatagaggaatatagtaacggcttattgattgtttgttttttttggtttggggttttctagattttgaacctgaagctgagttgcttgtgtgaagtgtgattacttaattcggttatggctgcaccaaacgttcgtagtattagcagcttctctcgcaacatatcagttgtgtcatcgcctcaaattcctggtctcaaaagtggtcctaatggcacagcttttatatcgtctgggattcgtgatcttgacagtgagctttctcctttttatttacacatcaagtctcatgaggataagagagtctggttttggggctaaaaggtttgtcttttattatttttccagggatactaggtggtgggcatcctatggggagcttagtaatggtaatccaagatcctgaagcaccgcatcatatggatctgttaacaactttcatgtctcaggggcttgttaacaatcaaccacttctttatgctagtccttcaaaagatccaaaagggtttcttggtactttgccgcatcctgcatcatccaaagaggataagcctactgcgcccgaccctgatcag

SEQ ID NO: 158496 - DNA, 776 bp, Arabidopsis thaliana landsberg
atgaaggagttgcaccaaaatttggatattactgcaatcagtgagttaagtagctggaaccgaatgcaaaaggtaaatatttactagtacattcttcattttaacctctgcaacagtgggacacaattagcaagagaaatatttttggtgcatagaggaacctctatatatctaattggcatagttgtgacatatatgtttcaggacgaagacgtttacacattcttcgagccagagttgaccaagaaagccaagtcgctttcttcttcaggtagtgactcccccaagaaggtatcatcgaccattgttgacctcaagggagagaattacttctccgtagctattggacaaacgcacacaaaggctcgctatttccttgactcatctgatgacgttgtgaaacttattggcaagctttgcacacacaacaatgcttgattctctctgtaactagagatgttagctaaatgatactattgaatattttaattgtgcaaaactcatttgcatcgttctgtttgtttctgttttcagtttgtttctttgactctttcttccctttgttctttaatggattagaaactattttcttaagagattttattgtcttgcccttacaactacgaaacacattatttattaagccaactagggaaaacagaggtacttcaagtaaggtttggtttataaaaccttataaattccctactgcttcttagaaacatgatacagacaaacaaaaacacactgggaaacaaaagccacttaagatatat

SEQ ID NO: 158497 - DNA, 1617 bp, Arabidopsis thaliana landsberg
aggcgcttctctgctgcaaattgcctttactgtgtttctctcttcccctttataaaaccgcttccgtcgtcaatggcgtgagcctaaacaagaaagaaaaaccattcttctctcttttcgtttttttcattctctctctctctactccatcgttttcacacttttctcgccgccctttatccttatccgataaacccacaaataaagacagactcttttgttctttaaacagagattgtaaatccagagccgccggaaaatacaaccgccggtttactctcaggtctctctttcactctctgtttctatctctggttcatactcttgtgtcttctgggtttgatacaaatgataatgcaacagcttttgctctatttgaatactgatttgaaccaataagttttcattttttaatctttttggtcataccctgtttctgattctgcgataaagagatgttaaatctagaaaaatccaaattctctctctgttaagcatttctcaaaagcttcacgctttctcagttaccggagaatataccgttgcaaacagattccaaccccacttatatgtgcaggataagttcataataatcgattttacaaatcagtttgaagaagatgaagtacgtacttgtaacaggaggtgttgtgagtggattagggaaaggaatcactgcaagcagtgttggtgtccttcttcagtcttgtggtcttcgcgttacttgtatcaaaatcggtatctttctttcgttgagttcaaaatgtatatgatgtttacttgtggggcactcaacctaaagccatttttttatatctctagatccgtatttgaactatgatgctggaaccatatccccttacgaacatggagaagtgtttgtcttggacgatggtagtgaggtaaaaacaaaaaccaacttgcctgtgttttatctaccttttgtattcaaacacttgaaaacgtttttgatggatttgcaaaaaaaggtggatcttgatcttggaaactacgagaggtttctagatacaacattaactcgagataacaatatcacttacgggaagattcagcgggtaactacagaatgtttatctttgatattatctgcaacaagcccataactaaagtacctttgctgttgttgtttgtcacagtatgtgatggagaaagagaggaaaggagattacttaggggaaactgttcaggtaaatgaaagtttcaatatttctattttgtcatcataaactttgagttttaagttttggttggtaattgatattagattgttcctcacgtcactgatacaatccgagaatgggtggagagagttgcaatgattcctgtcgatggaaaagaaggtcctcctgatgtttgcatcattgagttaggtggaactataggtaacattaaaaccgagaatttcaattttctttgtttgcttcttctctatataaaacagagaaatctttgtgtttgcaggagataatgaatctaggccttttgctgacgcacttagccaattatcatacagtgtaggccgtgagaatttctgtctgatccatgtcaccctcgtgcctgtgctcagtgttgttgagtgaacaggtttgtttataa

SEQ ID NO: 158498 - DNA, 184 bp, Arabidopsis thaliana landsberg
ggtgaaaaaatgacggtagtttggaacttacacaagttagggtcgatcgcccagagattttccacgtttctagagtagatggacggttgagattacattttgtcgatggtgtcgagaatcccattagagcttattctggtcctcaagaaattgtggccttagaagaggaatctaaaagaactag

SEQ ID NO: 158499 - DNA, 844 bp, Arabidopsis thaliana landsberg
aagatggttcctaccacctatcgtcctactcacaaccgtacacttccaccaccagatcaaggtgaaacaaaaaatcgtgcttttttgaaaaaccttgcgtgttttttcggctagagattttagaatttcgttacattttatatatagtgtcaaagatttgtcttatgaagttgtgatcttgaacttgctttgattgagtgatttggtttctgtctttactatgtatcactttttagatcttttggcaaattggtgttaatcagattcaacagtctcgagttttcacggatcatgtcttatgtttttactaatttgtatcttgtttgttatggttgtagtgataactacagaagtgaaaaacattcttatacgcagcttctatcaacgagctgaagaaaaggtgaaacagctctcaactctcattcctcatagtttgtgattctttgattcaaatctccgttgtttccctcgtatatatagttcataacacaggatttcgtaggaaaatagacaaaagaaaacgatatagaacaaatcttgaacttcttcagataacaaaactgttgattttgggtgtgttatccgaaatcttaattgttttttgtcaattgcagttaagaccaaagagaccggctacagatcatctggcagcggagcacgtgaacaagcatttccgtgctgcgtcttcttcttcatctactcagggcttataaaaaacttaagttcaagcctataacaatggtcatttgtatgagtacctcttattagtgttttcaatgtagagaaaagaaaagataagagcagttcatgagaggaatgtagtgaaaatgtgtgtgtacataac

SEQ ID NO: 158500 - DNA, 459 bp, Arabidopsis thaliana landsberg
gtattcacaattgatgttcagtctggagatgtcattgtcgctggaacagatggagtgtatgataatttatacaatgaagagatcacaggagtggtggttagctcggtgagggccggtttagacccgaaaggcacagctcagaagattgcagagttggcacgtcaaagagcagtcgacaaaaaacggcagagccctttcgcaactgcggctcaggaggctggctacaggtattacggaggaaagcttgatgacatcactgccgtcgtttcttacgtcacctcatcttaagagaccaaattgatgatcttctgtttaaacggtccaatcccgccaaaatctgacgataccttttcttttattttttgttgtgtttttttgaaaaacttgttacggtattaaaagtcctcaggaggtcattaaatgtgtatttttcacggaatcaaaatatagtttagctaa

SEQ ID NO: 158501 - DNA, 925 bp, Arabidopsis thaliana landsberg
gccacggctaaatggggaacggaagggagtctttgctacgcggtcccctcatcgaccttgtcccattggcctcaccgttgctaaggttttctgagcgtaatccgttcctcctgttgttaataaagacatattgaatatcttgaccaaaagtacttaatggtgattaatccttaggtggaggaaatccaaaaggataaggttctcctctctggtgtcgatctggtggatgggactgtaattctcctttcccttactcatgtcagctttttgagtaatgagtagttcgttgattgttttgacggttttggacagccggtgctcgacatcaaaccatatttaccatactcggacagtattcaaggagcctcagtgccaaactgggtaaaggtaatgtacattcttgtgaattgatctttctaagtttttcgtctatgtaactgaatactgctgagacttgaagatcattgtgagtaactgcgtccttacctgagtaggtacaagtaaagattaaaacaaattgaatatgaatttcaggaggactgctcattggctgtggcttctgtgactttctcagataccttctcttcatccatcaccagctgctggaaactgatagtgagtgacttctgacctgatcatctcttctccatttactgttttaacataatagttgctatgcgcgcaggaaaagaagtctctatatagttcagcagatgagtttaggagcttgatcacgcaggtcctgtcatgggacatacgatcaatgtcgcaacggaacaagccacaagatacattggatgaggaaattgtttatcacttggttctggagggactagacgtgtcttacatgatagataatgaaagtaatattctcgttcaggatgtttctcttcccaaaaacctgcaagatgttgcaggaagctga

SEQ ID NO: 158502 - DNA, 413 bp, Arabidopsis thaliana landsberg
gtttcttcttgtttgttggatcataatgaaaccgcagggtgccgataagactgggatgttggccgtacaaagcttgaggaccaaaaaaatggtgacaattctaaccgctacaatcgccatccttatcttcctttctctagctgcggtaactaacaacgcatttaaagccagtcatctcatcactgccgctgatgacatcttctttggctcacaaaatgctaaaatctttgtcctaaaatatgcctcagcctcgttacttcttgcagcaaggcttcttctttagctcaattgccttgagttatttaatggatgcaattttccttatcaacgcaatagctaaaaagcatgaaggagactgtgactgcgcttatgatatcacggggacaagttcgtttagggagtatacaagattg

SEQ ID NO: 158503 - DNA, 884 bp, Arabidopsis thaliana landsberg
ctctccctctccatctctctgctcgcttgtgacagtaaacatgggagctctcaattatctttctgagtatttctctaaccatttctacgtctcaataagaaaacggaagaaacgtaaagtcatgcaggtaactaaaatctctaaacgcagccgtttagttgttgtttcgtcgtttattagttgcttaaccttttcaaaattttgctaataaacagacggtgaatattaaggtgaagatcgactgtgacggatgcgaacgcaaaatcaaagaacgctgtttcctccatcaaaggttcgttcttcaactctcaagttccacgtagtcaattaaatacgactcgcctttctattagttagggcaaacaattaattatgcttcaagttaattatctcctacacgaaactatgcatacagatataagaaaattttaaactttgactctctctacctttaaaataaccatgattatgtaatctaacacgtcatattccaaaaaacacaattcccttccaaatcagccaaacatggccttactaatatatacacaccactcgttttttttttcttaggagcaaaatcagtggaagtgaacagaaagatgcacaaagtaacggtgagtggctacgttgatcccaagaaagtgctgaagacagtgcagagcactgggaaaaagaaagctgagctgtggccgtatgttccatacacaatggtggcttatccatatgccgccggagcttacgacaagagagccccgccgggttttgtgaggaagtcggagcaggctcaggcgcagccgggaagtactgacgataagctcatgtccctctttagcgacgagaaccctaacgcctgcaccgttatgtgaataagtatagatagcatg

SEQ ID NO: 158504 - DNA, 5493 bp, Arabidopsis thaliana landsberg
atgaagaagaagatgatgatgatgatgaaaggaaatggatctaaaccttccttaaactctttgatatcttctctgggcgattcgatccgcgagttgattgaactcagatcgactctgaggagtaagtctaagtcgaacatgaacatttgtgttgttgtttctccacttctcagctccattcgctgattttaattttttgttttgttttcgtttatagtggatggagatgtcagtatcacagggcttatagcgatcattgcgtcatttcagtcggtagagcttcagatacaagctatcaaagacttattgcgtcaaaggaaagaagctattcccaacggcaagctctcgagatttttctattcctttactctgtttaatattgagatgaccgtatctgagattgagactctacaacgaataatttctgtaagatttttggtaaattttttattctagaaatagggttttgctagaaacagatttcatgttatgttgcatttgattgtaagccttatgctgagttttactcgaacatggcaagggtgttgcatccagagttgttttcagatgatacaaatacatggtaaagctcttttcagatcctatcatttgtttctgttaaatccactattataaactaagattacttgtttttccagtttgatccaagaagatgccaacaacggaattagtcctgaggtggtatattggttattgttttgtgtatattgattttggtttctggcatttagtttcaatgatgttcttagctagtttttgtgtgatttcaggcggtggttgttgtcccaagcccaaccgaggaaatacaacagaacaaccaacttcaaaatgaaccggtaaagaagccttctctgaatccattatggtgtttgagattttgtatatatgttttgagcaaagacttgtttatcatgctttctgagtgatatgactttagctcatcatcccaacttgttccctttcctcattatttgattctatctgattggtaactactttgcatatgcggtttttctctttctgatacttgtacaaataactcctatcaaattaatggttgatttctcctcactgtaaagtcttatggtccacatgcttttagttttaccaaacacacacacatgatgttcttactaagatttggtgaacaacattgatatgcaggaacgtgaaagcaagacagacagcagttgctttggtaaaagaagatggtaaggagctaggtttaggcttgtatttctaattaaattccacagactgtagttgcaattataagcactgtcccaacttcttggccctcttctcgtgtctaagagtaatactgtgaaagttgtaactatagtatagcaatactgattatcatggcatactcactttgaatagataccttattatgatctctcaaattttggcttacattctggttctctaatctatcattactgtaagtactgtacatggttttgtcagcatctttccctactccaaaatcaaacaaacggctttatttaatgggctaaaaaggctaacattgtacagtccttagttgaaatgggcctctatcaacaaaaccttactctgttggtgaaattatgtgtaaatgataataattatgggcttgagtacatcctataaagccctaaaaaaaacaagggactttcacgtatcccacatcggaaagctaagagatattgatagaggaaatgatagtataaatagacttcactctctatggccttaaaccacgcagccatgtggtgagcacaaagcgaactattctttcgccttttactaaagaataccgtgtgctctccacgctaagtggcatacgcctatttttggagggctctcgcattacagtgggacccaacatctaccctagtctgaaatcttaataactcaaaactccgtttgttagttattgggccttaagtttaatgggctttaggctaatttaacggaactgaatttaacctgtaagttggatttgttatttgagagaaagttcagcattgtatcaacttccggttatgaccggttggtatgagtttccggctatgatcggttttgtttcaggtgggacgaacatccacttcgtcatactgtagttgttgctggttctgatttaagaatttctgcggcgactgactatgaacctcttcgtcatcgtttcagctgccgagttcctccttatctgcgtcgcgtatcttcctttgctcaacgacttatgtaagttcgccttccagggttgtcacacttttttctcaaatcagatagtttgactgaaagtcgtcgatacgattgatgttcgcagattggtcaactctcaagtctcttacaccaccggctggtatcgtggcggatttgttagtgaccaatggaacaatcttcacgagcgatagctctttgccttttgccgattccatggcgattcgtaatggcaggattcttaaagttggaagctttgccactctcaaggtccttcacttcttttatccactctttcaatgttcaatgtggttgatgctgctttcatactacttcactcgcatgaatgaagctgaaaattttgacacttttttggtctcatgtaatttgtgatttcgatgaagacaggcttttataggagatggaactatgtaggtgaatctggaggggaagattgtagtgcctggacttattgattcacatgttcatttgatttctgggggattacaggtgataatggcatagtgcaaacttatttctgtgttcttgcttcttgcaatgatatgtaattatgtatattgttaagttaacctgagagtagatgattacatgccattgtttgatcaggtttagacatgaacaagtatactatactctcgtttatcttatatcttttccttttgcttttaatgtcttatcgcttgagcatagatggcccaagttggacttcgtggagtgagtcaaaaagatgagttttgtaaaatggtgaaggacgctgtgcagagtaattaatatttcattattatatgaacaatcatattgtggttacacttctttattggtgtctgtttttagttatgatttacagtgtacagtgaacattttttgcttacgttggggttcttagtagtgggagagtatttaaattactatactgcttttatatgtgtaacaaaaaaaaattagatgcaaaagaaggctcatggattttgggtggtggctggaacaatgatttctggggaggagaattgccctctgcatcatggattgatgaaatctcccctcataatcctgtaagaaatctgcattttgtgtttgtcaatagtcaacaatcaacatcattgcctgatttatttctcttcatgtaggtttggttggttaggatggatggtcatatggcattggcaaattcccttgcggttaagattgctggtgttacaagtttaacggaagatccagttggtggaacgataatgaggatgcctagtggcggtaatgcttgtttcaagtaatttagcacttggtctattatgcttccaattcttgggattgcagagaaactttctgtgttgtgagtgtatactaaaatcagatggtacttgcttttatgattgtatcaatgcagagccgacaggtcttttgatcgatgctgctatggagcttgtcactccgtgggttaaagaaatctcagtggatgaacgtagggaagcactatttagagctagcaaatatgctttgactagaggcgtgacaactgttattgatcttggaagatactttcctggcactacagatgagctctcctggaaagactttcaaggtgcaataaatggttctgttaaccctgagtgggatgagttgtcatattcacacttgcatactgctagagagaaattgatgactcttacctgatagacataggatagaatttgttttagtccaaattttttttgagttgaatacttctttttatggtacagatgtctatctatatgctgattcctcgaagaagatgatgatacggacttgcttgttttttcccatcacaacgtggtcacgtttattggtatgatttcttcagaagcaactcttgttttctgataaatagaattgagtatttttacaagcagttttgtgcttctttagcacgaaaaacttaagtgtatattacagcattcttcaactttatgttttgcaatttacatatagttcccatacatcatcagtgaaaccttttcctttcctgattttcaaattctctttctatgtttattagcagcattcacccattctcttttcaccgttgcacatttatgcttgttctgcttttttacttgaaattttatatgtgctcatcttccttgacttcatactttcaggatcttaagcttcagaagggatctgtactgagtgaatggttgtatctcggtggcgtcaaagcatttattgatggctctctaggttccaacagtgcacttttttacgaggtgaagagtactatactatctctaattcatctgcaatatattctaaaagtactttcatatattgttcatattgatgaaatatacatgtagcaattcattgtacatgttatcatccttaagcagcactagtatacatttttctgcaggaatatattgatacacctaataattatgggttagaagtgatggatcctgaaaaactttccaacttcactatggcagcagacaaatcagggcttcaggtgtctccttgtttacttttgtctattgcttgctcatcggcctatttagtttagcttataattttgttttgctgtgatcaaggttgctatccatgctataggcgacaaagcaaatgacatgatccttgacatgtatgaatccgttgctgcagccaatggagaccgggatagaagatttagggtgaagtttgctattataaacctattcctctgagctatttgctagctcgtctgcttcttctgtctgtacttaatatctctgaactcctggtcacagatagagcatgcccaacatttggcaccaggatcagccaaccggttcggtcaacttcacattgtagcttcagttcaggttagttacttcccagcattaagcatctggcttaaaactcactttcttgatctaacctaatgctcgtgaacagccagatcatttgcttgatgatgctgattctgttgctaagaagctcggttctgagagagccgtaaaggagtcttatctattccaatctctcttaaatggcaatgcactcttggcacttggctcagactggcctgtatgttttcgaaaatctctacacatatacaatgtttttacatatagtcaaactttgcttcgtttgttttccctccaggtggcagacattaacccgttgcacagtatcagaaccgcggttaaaagaatacctcccaagtgggatcacgcttggattccatctgaacgcatctcttttacggatgcgctgattgcgtaa

SEQ ID NO: 158505 - DNA, 334 bp, Arabidopsis thaliana landsberg
tgtccatgttcaaatggtcggcttatgtagaaccggggaaggttaagccggtgaatgtgaaaaaagcaccgtctgaattcaaggtaccaggggcagaagtcttcttaggccagatctaataagtatttccagagttgctgtttcttctgagatgccactaataataagtttgatccgatcatgtctcaaggatcagcccaagtaacagccttcacttcttttgttttgtttccacagtttcagtttcagatagaacttatgtgtcttgccgtttctccccaaatgtgcatctggttcataaaatgaataaaataccaatgtggttgagggatat

SEQ ID NO: 158506 - DNA, 1394 bp, Arabidopsis thaliana landsberg
  unsure (1)..(1394): unsure at all n locations
aggttgggaagttgataggaaggagctggagtttattagggaagctcataagttaatggctgaaagagtttggcttgaggatttggataaggatttgagagttggtgaagatgctactgttgataagatgtgtttggagaggtttaaggttttcttgaaacaatacaaggaatgggttgaagataataaagataggttggaggaagaatcttacaaggttcgttttttttttttgaacaatgagatattgttagcttagtggtggctaagagaaggattctaataaagatgatgtttttatttatacagctcgatcaggatttttatccgggtaggaggaaaagagggaaggattacgaagatgggatggtaaatattattatgctaatggatttgattgtttgattagtttgctaggtgatgaactgtttgtaagttaattgctttatttttctttgtgcagtatgagcttcccttttactatccagggatggtaagaattcttattctaagccttgtatattgtaactaatgattggtttaaatgagcaatatcgtaatgtccatgcaggtttgtaaaggcacagttaccactttacatctgtatcagggagcgtttgttgacattggaggtgttcatgaagggtatgtttatgtctctttactttgtaaagatagacttaccgtggttcttgtatttagggtatataacgtaatataatgttgtctcttgtttcatatgctttttttgaaagatgtaagtttatgtgtctattggtttgcagatgggtacctataaaaggtaatgactggttttggatccggcatttcataaaagttgggatgcatgttatcgttgagatcacggtaatcttaaggcacatattcttctttcacatttataaaaatctgaatggaaattgcttcattctcctttttcttttgttctttcaggcaaaaagagatccataccggtttcggtttcccttggagttgcgcttcgtccatcctaacatagatcacatgatgtatgtaattcacacgtatttaattctctttacatatccagtaaaaattggcattttggttctgtcctcaatggtcttggttatggtatatgtgttgactgtttttacattcctgctccagatttaataaatttgacttcccaccaatnnnnnnnnnnnnnnnnnnnnctaatccagatgagatacgggtcagtagaatcctttcctagaatatcaatccatttcgtgttctcgtgaagagtctccctcttatctaatacattgtttgtacagcgagattgtggaagacctcctgaacctagaaaagatccaggatcaaagccagaggaggaagggctgctctctgatcacccttatgtcgacaag

SEQ ID NO: 158507 - DNA, 516 bp, Arabidopsis thaliana landsberg
atggactctctaggggaggatgcgtcttggaatcaatcttcctctaggaacagtgatcttgacttcctacctgaacgaagtgtctcagcaacggagacttcagctgatgttctacacggaattgctatcaaatgtggagctaaggtatgtaaatatcatcatgattaccattaattccatacgtgagttgatgtgttattattccatgacattgtaggtggagtacaaaccaagtttagtttctagtacagatttgcggttctctgttgaggtacgtattgctcttagacgtatctgtttgtatggtgtcagtaattttggtggaaccttatgctctttgagatcctatatttcctttgagtgaggttactttgttgattgtgtcaactgtacattaaatctgtgttttttttgcaggcttggctttctaatcaaaaaattggagaagggattggcaaatcgagaagagaagccctgcacaaggctgctgaagcttctatacagaatttagctggt

SEQ ID NO: 158508 - DNA, 969 bp, Arabidopsis thaliana landsberg
atggaggaagctagtgatgctctgcgagtaagtcagaaaggtacctgaaaatgccgaaagttgttatccatgaagattagttgtagccactaaactacaaaacaaagttcacaaaccaactgaagattagttactgaaaaatcataacaccatgtgaattgattatgtatagaaaccaaagttccatgtccattattgataatagttttttagtcaattatcctaaaacaccaatcatgtcgttgtagtattttaggttgtcaatccaaatgggtgtgatgctaacaatcaagatgtgatcagaagtcactaagtcaagccaagcataacaggttttggtgtgttctagcagtcctaagtgaatatgcagaaaaagaaaatcaaacagaaacagtaaaacactcgaccaacacagctctttgcagagcactaggtgaggccgagtaacagacagaaagtataacagggatactcgactgcacagtctgttgccagacaactgggtggtcgagtatcaggtcgagtaacagtaaagaattgcagaaactaagcaacagatgacaagatgcagtaaacaacagtagagtaaacaataaaataaatcagataaagaattcccgaggatggggtaattgagtagttttgtttcctaagtttacaggtgaatgacatgctcaataaattatccctaaacaacaagttcattaaccaaatctaagtgccaccgcaacagagaccctcaagttaacctagtcccagtctcaatcaccattgacgagagctaacttgacaggcattacgaatcaacaagttaaagccaaaacgcttcctgcaaccaataccttggtacagggccatgaaactctgaaattagtggttcagacatttcatcgaacaccttttgggcgcagaaatgtttgggctcaaattccagttgatcagaaagcaataggcattaagaacaactaa

SEQ ID NO: 158509 - DNA, 726 bp, Arabidopsis thaliana landsberg
gatctccttgcaatattatgtgaatggctccaagacaccttttttttatttggtttggcgctttaccgtgctgtttgtgggttttcagattagctttttaaacataactggattccgcgattttcctctaggggatttgccgatgattcaggtacctagatttttcattctcagtagaatataagtattacttccacaccttccctgtaatttccgatttagatctcttttcatactttataggtgttgaggcagacatcaaagaatgtctttgtaccactaactgttggaggtggtattagagactttacagatgctagtggcaggtacatgttaatcttttcagcctgtttctgtgaacatgtctgtgcaggcattatgttcttttatatttcagcaaggactttgcaatttttattccctacaacaatttaacatcaagttaatttggctcaggtactattctagcttggaagttgctgctgagtatttcagatccggtgctgataagatctccataggaagtgacgctgtttctgctgcagagaagttcataaaatcaggggtaagtttgtagttgcccgtctaatttatccgagttgtttttcatgctagtatctaaaaacggaaggatcattttatccccattttccgcgtttttgtaggtgaagacaggaaagagtagtttagaacagatatccagagtttatggaaatcaggtaattg

SEQ ID NO: 158510 - DNA, 812 bp, Arabidopsis thaliana landsberg
agtgggaaattgtagacaagaaaggaacaaagaaggagactttaaggttggatttggttgggaagtcctctgagcagtacaaaggagcttatgttattgtctttaataccggacattggtggactcatgagaaaacatccaaagggtactaaaatctctctcaatctactggaatatttgctctgtctttgtttgtgttgtataatgtagaactgattttggagtttgtttcatagggaggattattatcaagaaggaagtaatgtttatcatgaactcgctgttcttgaagcttttcgtaaagctttgactacatggggtcgatgggttgagaagaatgtgaatccggcaaagtccctcgttttctttcggggctattccgcatcccatttcaggtaaacgcagaccgtctttaaatctgcttatgtagagtctcaatcatttaggtctagtctaaatcttgacacttttggaattgttttgcagtggtgggcaatggaactcaggaggagcatgtgatagcgaaacagaaccgatcaagaacgatacatacctaactccatacccgtctaaaatgaaagtgcttgagaaagtgctaagaggtatgaaaacacctgtcacttatctaaacatcacgagattatcggactacaggaaggatggtcacccgtcagtataccggaaacagagcttatcggaaaaagagaaaaagtcgccattgctgtaccaagactgcagccattggtgcctccctggagtcccagacgcttggaaccagctcctttatacagctcttctcagccactagataa

SEQ ID NO: 158511 - DNA, 844 bp, Arabidopsis thaliana landsberg
  unsure (1)..(844): unsure at all n locations
agctaatagtcatggaacagctaacactgcggaccatcaccaagctcaggaccttctacacctgcaactcatactcctggagatttgatctctatgcctaatctgccgcacagtggtgttcctccaaatcaatgatgatgtttggcactgaaggcactgggactcttacatctccatcaaatcagttggtgggtttccttaaactgttgatgggaatgaataatggtttctgtaatcaatatgaattagtagcgttannnnnnnnnnnnnnnnnnnnctgatatggatcgatttgtggaagatgggtcacttgacgacaatgttgagtcttttttatcccaggaggatggtgatcaacgggacgctgttacacggtgtatggatgttagtaaaggtgtgtgttttagtctcacttaacattattcgactataacacggtgaacttttcttcagtaatccaacagtatttctcaatcactacaatgatggctctgcactaggttttacgtttactgaagtgaattcagtacgtgcgagcacaaccaaagttacctgttgccacttctcatcggatggaaaaatgcttgctagtgctggacatgacaaaaaggtaagccagaaatcatcattaggtgttctagcgttctgaaacttagagagcctcttggtttggttcattttgcaggctgtactatggtacacagacactatgaagccaaagacgaccctagaggagcacacagctatgataacagatatccgttttagtccaagccagcttcgccttgcgacttcttcgtttgacaagactgtcagggtttgggatgctgataatgtaaagtga

SEQ ID NO: 158512 - DNA, 460 bp, Arabidopsis thaliana landsberg
tttcatttcatcttcaccaaactctcatggacttcgattccgcagtgagtttttatttctctcctaatctaatctttctttacttcttaattttgacacaaaccctgtgatttcattcattttatgaaattggacatgttattcttgaaatattgcaaacaaaccctttttttcttgttttctttaggacaaaccagagagtgtggaggagacagtgatgatggaatacgacgaagaaaccaatcaattcgacgtggaattttgtccggttgagcatcctattgaaccggaggaagaagatccgcccggtttaatgtcccgtacccatattatcttcttctcatccaccgtaggtgaaataattaccccaaatcaataagtttctcatattgacccatttaatcacagctttttaaattggggaagaaacccaagggagaaaatccaaaacccggggtgg

SEQ ID NO: 158513 - DNA, 325 bp, Arabidopsis thaliana landsberg
tttcaggctatgttaccgatgaagagattgagagacgggagcaagaactaaggcgagctcttcaaaatgccaagaagtttcgagtgagagatggagtttcagtttgaagttgcacaggttcatgaacaatcataaatggctaaatggattaaaactagaaatctcaatcgtatgtctttagactctctactgacattaatgaattcattccctgcagtataatccaccattcactctcccgtttatgcgccgcaacgaggtctctctcgaagttgaaagcaaagaagatttgccccatcacaagtacatacatacatacatacat

SEQ ID NO: 158514 - DNA, 359 bp, Arabidopsis thaliana landsberg
taatgtcacaaactctgcaattacctttctgtaaacctctaagaaatccgatgacactttgattggtgatttccttcagcttcgagctgcagcagaggcagttggtgaaagcagtttagagagcaagtttgcagctgctagcgagagcttgcgacgaggtattatgtttgcaaattcgctttacttgtaagtactctcttgcagaatacagcttgctgtattgggtaaccatgggacacagcatgttgaaacataacttcattgagaaatgcttgtttgtactttcctatgtatctcgaatcgcgacgatagctctttgtttgccaacaagttagataatgaagaaatttgcagagctc

SEQ ID NO: 158515 - DNA, 995 bp, Arabidopsis thaliana landsberg
ataagaatatgcacattcttggataagaagaaaaaaggggatgacaatgaggagagtgggggagttgaaaatgaaacttctatgaaggaacaagataagttaagaaaaaaggtcaatgagttgataaagaaacagaagttgtcagcagttagaaagatcttgcagtcacatgactatacgaaaccatggatcgcagatgttagggctaaggtctgtttatgcttggctgcaaaattgttggagaggtagaaagattatgttggctgcataagttgctaatattttgatattttctaatatatatcccaggttgaaagtcgcctaatagagttcctggtaagaccagtttatatgcagtctccagctgatcagcaggataatgttctgcctaatgtccgacctgcatttgtgcataccttcaaggtagcgaaaggaagcatgtgagaaatttcggtctatgactttcaactaggcttatcttcttgccctgaatgtcataggctcatattccagtctttcttgtacaacaggaattctggagaaaaatatggtgtaatcgagtgtgaccctttggtccgcaaaggcttggaaaaaagtgtaggtgatctattcgcgttttgtttgttatcagaacaaatttaacccaaaatcgacaaaaatagtgttgactctttttcagagctcggagtcatttattatggtcattttgtcgaatgttatatctaaagagggtttgacttgggtagcccctgtaaattagattaaatatttctgggatttgaagactaaggtataactgagacatctaatctatatattgttggaaatgtgaatgtcgcttttttctttgtggtgcaggggagatatgcagtgatgccatacatgccaatgctggttcctcctctcaaatggtcggggtaaataagctttctttgctgtatacttaccccaaatgattaaataattgcattgcatggtatctcaaacataaattc

SEQ ID NO: 158516 - DNA, 845 bp, Arabidopsis thaliana landsberg
tttaatacttggctttttgtggagttgaaggctctggtagtgaccgattgattcttgaagcttaatctttgattctcttgatttgcttttcagggttctggaagagatggttcaaaccccaaacatggctcacaaggtcagcgagaaaacaatttggtttatgcaactttcttcttcttctttattcacttagtctcaaaacactctgtttttctaatgaagatgtttttgtttacacagctcaacgtagagaatctttaaatgcgcaagaagacagagttgagccatgtcatctaagctcttctctttactacggtggtcaagacgtatactctcgatccaccaccaaccaaacttaccctccagtgagtcttcttaacttatgtaatgttttgctaatcacttccaaaaacagaggacttgactgatgagaaaatacgtctttcaggttaaaaatgaccgtataagaagcggagaatacgactctaatggacagaacccgcaagatgtttcaagaggaaactggtggcaaggttctctttattactaaagaaccacttcctttagtttctttagaaatctctccaggaacacctgaagctcaagccaagtactaatatctacttaaccaagactttgtataaataagtttatgcagaaaaaaaaagttattaggagatttctaggttaagtaataatatcgaagaattctcctagtagtagtgtctcaaatagatttctctagtacttgttataatcaactgtatcaatatttactctgtttttctctgtctcgtgccaacaaagtgatgaaatcattagccttttttaccaaacgcagaaac

SEQ ID NO: 158517 - DNA, 727 bp, Arabidopsis thaliana landsberg
cacaaaaagaaaagaaaaagtgttggagatccttccgagagagacgcgacatctccttcctcttcgaagatgagtggtactgtgaaggatatcgtttcaaaggaggagcttgataacttgcgccacagcggagcaccactcgtgcttcacttctgggcttcttggtgtgacgcttcgaagcagatggatcaagttttctctcatctcgctactgatttccctcgtgctcacttctttagggttcgtcgtctctgttcgaattttatctctttcaattggtttttgactttgattggttttatttatcttcttaggtagaagctgaggaacatcctgagatatctgaggcttattctgttgctcttgtgccgtatttcgtcttcttcaaggtaaactttaggcatattgattctttgtttggttgcaattttttggcttattgacaaagcttgaatctttgtcactgcactgaatccttttcttattgaaggatggcaaaactgtggatacacttgaaggggcagatccatcaagtttagctaataaagttggcaaagttgctggttctattactcctgcaagcttagggttggctgcagggccaacgattcatgaaactgttaagaagaatgcgaaagcttctggacaagaccgagctcagcctgtatctaccgctgatgctctcaagaatcgtttggaaaaactccccctgttatgttattcatga

SEQ ID NO: 158518 - DNA, 578 bp, Arabidopsis thaliana landsberg
  unsure (1)..(578): unsure at all n locations
tgcgctctcatttagacgaatctgttccaagtttcggtctggacctaccagagagttttgccttcatctcctcgagaaagatacagagtcaactgaaaagaagacataactgaaatttcctcataaatgtttcagttaacagaaaaacaggtgtacaagcttctagcaacggctttgtctgaatgtctagcttccgagggtgataaaaattctaacttggaaaaatacatcaaactgattcatggcttgggatatgacttaataaatgtaagtctatatgaaaactttagttctcaactattattgcatcaaaacagagtgggaaaagttagtttttggaatttttacacagaaaaggttctttgtttcagatgttgaaggaggtgaactttgagcttcatgtccaagagccttacttcacccaattgaaaggtacattttctggttacttgattgtagtattacaattatatttgctcaatcacacttccatttccgggtgcctctcaatttgtcagatgaagtgaaanctgttgaaggaaaatgcgcagtgggagacaacatgaggtcgggtgttt

SEQ ID NO: 158519 - DNA, 278 bp, Arabidopsis thaliana landsberg
tgtgatgcaaaaagatgagatgtgatcagaagtcaagccaaggaataacagttttggggtttctaacagtcttaagtgaaaatgcagaaaacagaaacaaaaacagaattactaaaatcactcgaccacaacaggctgatgccagaagtgggatgtggtcgagtaactcgactgcacagtctgttgccagacactggatatggtcgagtatacgggtcgagtaacagacaggaaatgagacaactgtactcgactgcacagactgttacagacactgg

SEQ ID NO: 158520 - DNA, 5616 bp, Arabidopsis thaliana landsberg
  unsure (1)..(5616): unsure at all n locations
atgtggaacattgatggtacgtccttagctcctcctggtaccgacggttcgaggatgcagacgccttcacatcccgctgatcatccttcttacacggcgccttctaatcggaatactccgacggttcctactcccgaggatgcagaggcgaagcttgagaagaaggcgagaacatggatgcagctaaattccaaacggtacggcgacaagaggaagtttgggttcgtggaaactcagaaggaggacatgccacctgagcacgttaggaaaatcatcaggcgagtttctaatttttcaatttcgatttcgaaatccagttgactgggaaacgaatctggtccaatttctttgtattattaggtttgggttaagttagattgaaactgactctgcgttttgattcagggatcatggtgatatgtcatcaaagaaacatcgacttgataaacgtgtatatcttggagcacttaagttcgttcctcacgcagttttcaagctcctggagaatatgcctatgccctgggaacaggtaattattcacttagtgatctatatctcgctttagttgttctcctgctctgctcaaaattttgaactcagatattttccaggtccgggacgtgaaggtcttgtaccacatcactggagctattacatttgtgaacgaagtacgatgggttgtggaacctatttacatggctcaggtgggtgaataatctccctctctcttcttttgtgtctgtgcatttgtgaatttgtgagacatgttttctagtgatgattctttcgtttgcagtggggttctatgtggataatgatgagaagggagaagagggatcgtcgtcatttcaagagaatgcggtttccaccatttgatgatgaggagccccctctagactatgctgataacctgttggacgttgatcctctagaggcaattcagttggagctagatgaagaagaagattctgctgtgtactcttggttttacgaccacaagccacttgtaaaaacaaaaatgatcaatggtccaagttaccagacgtggaatctctcacttccaattatgtcaacccttcacaggcttgcagcacagttgttgtctgatttggttgatcgcaactacttctacttgtttgacatgccatcattctttactgcaaaggcactgaacatgtgcataccaggtaacgctatactctatgttctcctgttctgatatcttcgttttcacagttgttgtccttctgttctctttccctgattcaatttggtactctttttcaggcggtcctaagtttgagcctttgcatcgtgatatggagaaaggagatgaagactggaatgaatttaatgacatcaacaagcttataattcgatcccctctgcgaactgagtacaaagtagctttcccacatctgtacaataataggcccaggaaagtaaaactctgtgtctatcacactcctatggttatgtacataaagactgaggatcctgaccttcctgccttttattatgatccattaattcaccccataagtaactctaataacactaataaagaacagcgcaaaagtaatggttatgatgatgatggggatgactttgtgttaccagaaggactggaacctttgctaaataactcgccactctacactgacactacagctcctggcatttcattgttgtttgcccctcggcctttcaatatgaggtctgggaggactcggcgggctgaagatataccccttgttgcagagtggtttaaggagcactggtaagctaatttttctgatgctactgtggttctctttccccttttgaaatttactagacattgtattaacttcttagttatctcattttctgcagtcctccagcatatcctgtcaaagttcgggttagttaccagaagcttttgaaatgttatctactgaatgagctgcaccatagaccccctaaggctcagaagaagaagcatttgtttcgatctcttgcagctacaaagttttttcagagcaccgaactggattgggttgaagtgggtctgcaagtctgccggcaggggtataatatgctgaacctgttgattcacaggaagaatttgaactacctgcaccttgattataacttcaacctcaagcctgtgaaaactctgacaaccaaggaacgaaagaagtcgcgttttggaaatgctttccatctctgccgtgagatcctccggctgacaaaacttgtagttgatgcaaatgtccagttccgacttggtaatgttgatgcctttcaattggctgatggcctgcaatatattttctcccatgttgggcaattgacaggtatgtatcgttataagtacaggcttatgagacaaatcaggatgtgcaaggatttgaaacacttgatctattaccgtttcaatactggtcctgtgggtaaaggaccagggtgtggattttgggctccaatgtggagggtatggttgtttttccttcgcggaatagttcctcttctagaacgatggttagggaatctgcttgcacgtcaatttgaggggcgtcactcaaagggagtggccaaaacagtcacaaaacagagagttgaaagccattttgatttggagcttcgagctgctgtcatgcatgatgttgttgatgcaatgccaggttcgcttcttgcgtctataactgatttgtttttctcaaggtcgatttcctttaattttatctatccaagttggtttatactgtcttctaatgtgcagagggtattaagcaaaataaggcgcggacgatattgcagcaccttagtgaggcatggcggtgttggaaagctaatataccatggaaggtccctggattacctgtggcaattgagaatatgatcctccgatatgtcaagtctaaagctgattggtggacaaatgttgctcactacaatcgtgaacgtatcagaagaggggctactgttgataagacagtttgtagaaagaatcttggacggttgacccgtctttggctcaaggcagaacaggtctgtaccttgtcacaactcgtaaaatcaaaatcattgttgtttgacaaagatggttacgaagaggcttcatttttttgtctgattgaatttagttccttttattctcgattgcccagttctgtaatacattttccttgtaaaattgttgcaggaacgacaacataattttcagaaagatggtccatatgtcacagcggatgaaggaattgcaatttatagcaccactgtaaattggctggaatctagaaaattttcagcaatcccattccctccattatcatataaacatgacacaaagttgcttatcttggcccttgagagactgaaagaatcatatagtgcagctgtgaagttgaatcaacagcagagagaagagcttggtttaattgaacaagcttatgacaatcctcatgaagctctgatgcgaataaagcgtcatcttctcactcagcatagcttcaaagaagtaagttgataatgcacctattctggagcagttttctgaacatatagatctcaaggttactatgttattctgatggtgaatacattatttttttctgcaggttggcatagagtttatggatctatatagccatttgattccagtctatcaaattgatcccctggagaaaattactgatgcttatcttgatcagtatttgtggtatgagggtgacaagcgccacttgtttcccaattggattaagcctgcagactcagagccgccaccgctcctggtttacaaatggtgtcaaggtatcaataatttgcaaggcatatgggacactagtgatggtcagtgtgtagtgatgctccagacgaagtttgaaaaactctttgagaagattgatttgacagtgttgaacaggtatctctctgtgaaatgcttatgtgattacagacatagaacttagactttctgtagtaacacgtcttttttgttgtttctttcagccttcttcgtttggttcttgatcccaagcttgcaaactatgtgactggcaagaataacgtggtgctgtcttacaaggatatgagctatactaatacgtatggactcattaggggactgcagttcgcatcgtttgttgttcagttttatggactagtgttagatcttttgctccttggtttgactcgagcaagtgaaattgccgggccaccgcagaggcctaatgagtttatgacctactggaatacaaaagttgagacacgccatcccataagactgtattctcggtatatagacaaagtgcatataatgtttaaatttacccatgaagaggctagggatcttattcaacgtcatctcaccgagcgtcctgatcccaacaatgaaaacatggtgggatataacaataaaaaatgctggccaagagatgcaaggatgaggttaatgaaacatgatggtatgctcctttttatatttagatagactatcattatgcaccagatgttgtctcattatttatttatcttgcagtcaatcttggtagaagtgtcttctgggatatgaagaatcgtcttccacggagcatcacaaccttggagtgggagaatggcttcgtctccgtgtacagcaaggataatccaaacttgcttttcagcatgtatgcgttttgtctcagttttctagtggctcttgtacattagtgctaggcctttgtttttgtcattgtttgatagtgcagcttaaatagtgactggggtttgcattcttgcctgcaggtgtggatttgaagtccgcgtgcttccaaaaatcaggatgggtcaagaagcttttagcagcacaagggatggtgtctggaatctgcagaatgaacaaactaaagagaggactgcagttgcttttctacgggctgatgatgaacacatgaaggtgtttgagaatcgtgtgaggcagattcttatgtcgtcagggtcaactacatttaccaaaatcgtcaataaatggaatacagctctgataggtatatcctgtagtacgcctttcttttggcagtactgattacgtttaataatgtttggctagcatgaagctgagcacgtttatttgttttatacaggcctcatgacttacttccgtgaagccactgtgcatacgcaagagctcttggatctgcttgttaaatgtgaaaataaaatccaaacgagggttaagattgggctaaactcaaagatgcctagtcggtgagcaaatgctatcttactatattgtgtttgacgtatcatagttgtatgttatgttttttaaacctgattgttcatcttttccttggtagatttcctcctgttatcttctacactccgaaagaaattggcgggcttgggatgttgtctatgggtcatattttgatcccacaaagtgaccttcggtacagcaaccagacagatgttggtgtaagccatttcaggagtggaatgagccacgaggaggatcaactgattcctaatctttaccgttacatacaaccatgggaaagcgaatttattgattcacacnggtgtgggcagagtatgctttgaagaggcaggaagctcaggcccaaaatagacgtctgacctggaggatctgga

SEQ ID NO: 158521 - DNA, 1640 bp, Arabidopsis thaliana landsberg
  unsure (1)..(1640): unsure at all n locations
ctcttgagcacacacacacatacaagactctcctcacagaacgatttagatttaatcgggaaaaagttcagtcagtgacactaatgttcgaatcgaacatggttctccaaacactatcttcttcttctcctccaattcaccgtctctatcttcaccattctcagattctcccttcttctgggtcacccagcaannnnnnnnnnnnnnnnnnnnntccaagttcctctctttcgcttcacccatagtttacaatctcactgtactctagggtttcctctgttttttccccaatcaagaattttgattcgtaaattgttcttacgatagaagaagattatgtggaatctgaacaagaacagagtcaaaatttacccttttattttgttcatgaacttgctaatcttcctccttgtttttgaacttgtggatgaaggcagatacatggaaggactttggccattcgatcttttcatggtacttcacttcttcttccctgcttaaagtttcatactttactatacatctagatgtttctgcttgaggtttagattgatagctttagattatgtctttgcagaaatttctgctagaggtttaccggctttgaacaaagcttccttgaagaagctaccaatcaaaggatctacctttctgctggggcagagcttgttgatggtttctgctcacccacatttggcagcagcagcagaaatcataaagcctgaaccgatttacgaagttggatgtagtatttgaacttagtattcagctttcttacttgctgttactactggggttgcttggagttggtactttctatgtgatccgtcaagtacttgtacgcagagaactagacctctccgctaaagaattgcaggtaccagacaatgtgctctttgtggtagaaaacagtaggataagtaactgagatggaacgagtctagagtagagatgtaatattgatgtctctcgtatcattgtctgtctcttatcttttaatgctattcacataataattgtagatattatgaacattagacttatttaagtagctatgcttgctcaacgtttttgttaatttgatcaaatctggatgctatggttctattgttgtctttatgacctgaaggagcaagtaaggagcggagatgcaagtgcaacagagctctttgagcttggtgcagtgatgttgagaannnnnnnnnnnnnnnnnnnnnnnnnnnnnnnnnnacaagctatccagaaatgggacggtgatgatcaagatcttgctcaggtaatagacttttacactaataccgttaccaagtaaataaaaaatcaattgacactgcaatatacaattcctgagacaggtctataacgctcttggagtgagttatgtacgagaggataaacttgacaaaggaattgctcagtttgaaatggcggtgaagctgcaacccggttatgtaacagcttggaacaaccttggggatgcttatgagaagaagaaggagcttcctttggcattgaatgcgtttgaagaagttttgttgtttgatccaaacaataaggtggctcggcctcggcgagatgcgttgaaggatcgcgtgaagctttataaaggtgttgtggctgttaagtctaagaaacggtga

SEQ ID NO: 158522 - DNA, 1362 bp, Arabidopsis thaliana landsberg
cttcttcttcttcttcttgtctccgatgtcagccatggatgttatgattcactcttcaagctttctcctcccttgcgacgaaactagtacagggacgagatacgctctcgttgttctgaaccagagtttgccacgattcactcctcttctctgggaacatggtactgatgaatcgctctattcttcagaatatatatgactctgttttcttggggttattctaagattggtttcgaattttctgtgtagaacagcaaaacttcgtctctgtgctgatggaggcgctaatcgcatctacgacgaattacctctcttcttccctcacgaagacccttttgtcattcgaaacaggtctcagatttatgtctctatttctctcatagagaaaggtttcaggaagaagaagttgaaactggaaagttttgtctttttattttatagatagttctgagaattgtactttttaggtataagcccgatgttatcaagggagatatggattctatacgccgtgacgtcctcgacttttatgtttactgggtaagctctttcttcttactattattatgcattagatcacaacagtgtctgtatttgatctaacatgctttttctccagggaactaaggttatagatgaatctcatgatcaagataccactgatcttgataaatgcatttcgtatatccgtcactctactttgaatcaggacagttccagagtaagttcttttttttaattacagaggaatgctagctccctgcgtttgtttctgtgcaacattttcactatctgttttatgttagctccagattcttgccactggagcactcgggggaagattcgatcatgaagccggtaatctcaacgtcttatatcgatatccagacacaaggatagtccttttatctgatgattgtctcatccaactccttccaaagactcatcgacatgaaatacatattcactcttctcttcaaggacctcactgtggacttatacccattggaactccatctgccaataccactacctcagggcttaaatgggatctcagtaagtaacatcttccatcatcatcatcatcatcattatcagatcgatctaattattctggtttttttttataatcgtcttacaggcaacactgagatgagatttggtgggttgataagtacatcgaacttggttaaagaagagataatcacagtcgaatcggattcggatcttctctggactatttccatcaagaagacaggacttcctgtacaagaccataaacctatgatcctaatatggaaagtatggactgtgattgaaagtatgatcctaaaattatcaataaaaatgaaaactccttga

SEQ ID NO: 158523 - DNA, 4240 bp, Arabidopsis thaliana landsberg
agagttttggatctacgagccatctgctgtggacccgaacctcgtatttgcctccggacccgaacctctgtttggctcctccgctcgccgttgaaaaatttccgcactgatatcgatcactttatctctctcccttctctctctctttctcttcttctcctggtttcgttaattcttgaattcgaaaaccctaaacaacttgttcctagaaattgagcaagcaaaggaaagctttttttcatcttcaggtttccatttgttgtaaagctaaacgtgacacaagtgtgtaagttcacatctctgtttccctctgtggaaaccctaattcttgctatatatcctaaaaagaaatgatttttttttttacccaattattgtaccgtgtcgataggtagtgttattgtttgaggttgaattctcggttactgtaatgttcatgttattattaaccatagcttcgatttgcagtgagattgtgtttgcggcaattttgatctcaagtgtgttctcgagttttccaatcaaattctgtatttttttcgaaattagcttaattttcagctgccataagagtgtttatagctgtgaaatcggaaattttcagctggtttttgtttaatgaagttgatgctgtttactgaaatgagctctccaagtttacttgattaggtgttaagagtttctgatgttgactggaacttaggcgtcagtgtaccctaagttccaatctaaggaaacaatgcttattctgtttccttgtaccatgtgggctctgcatcaattctctagtgtctcactttgctgccctgtggtttttgtttcctctttgcagaaacaacacttgtattggctttcttctgtctagtgtttttgtttcacttgttgtgttcaactctaaattttgcagtatctgttttgtttgtttagcaggagaacctatgagtattcaaagcatgccaattggaggtagctcatgaattctggggaaagaggtgtttatatgttcccttttttcttacacattcggaatttagatcaacgaacgcacaatgttgaacttgtttctgtgtttttttcaaaggctcagataattacaaataatttagagtttctttttctatgcctggaaacgaatttggggagaagatccacaatttttttggacaagaaggcctatcccaagaccagcaacatcagtctcaggttgttgacagaagctggtccagttttaataatggtctagtcggtaaccagaggcagattgacccatccctcattgccaatctgaagagttataacacacaacaatctggtactgattttgtctccttttgacactgaattccacaacttgcaatcattaatagctacatatattgctagttttctaaatggagcttttttttttttcttatgtcagttgatcatgagagaggtcatcaagcttcaaattcacagcatggtttaaactatactcagcagcctataaggtccgagttctccagcagtgtattgcgagtactccagccatccgcaactggttacatgcatggaatccttatgatgcaggcatctccaaatgaggaaagttgtgtgggagtgaatgtagattctagtagggataggttatcagcaaggggatttactccagaacttcataatgttcctatgaggcttgatatgggagaatctccggttaattatgatttctttggtggtcaacaacaatcaaacacacagctctctggcatgctccagcctttgccaaggcagcagatgacattcaatgatatgcaactactgaagcagcaagttatggttaagcaaatgcatgaatatcaaatgcaacaacaacttcaaaagcaacagctagaggccaggcagctcaattctttgaatagaaatgcagtcaatggaagttgcgcaagtgatacccaatcacgtatgattaatggcatccctcttcagaatgcgtctagtaactggtttcagccagatctcatgacaggaaatacaaactggatgcatcgcggcatctcaccagctgttcaaggttcatccagtgggctcatgattacccctgagcatgggcagtcgaacttaatggctcaacagtttggaccttccttgtacggtatgcctgttagtgggacaaatgcacctcaaaatgctttttcttccgttcagatgaacagattagctgcaccgcatggttctgcaaacaggagttactctctgaccaatcagccaacttcatttcttaaccaaggtgatgttcaggatagtcaaatgcaccctcgatccacataccaggagaaagcgttgttctcccagacatcagtgccagattcaaataataggcccaattttgaaaatttccagcaagataattcccgtgagaggaacatttcagcgcaggataaattttgtcagatggaggattctggtccagcagaaaaatcatttatgaaagtgcctgaaaatatgaatgcattgcagaagtcgtcagcattagatcctactgaagaaaagattttgtttggttctgatgacaatttgtgggatgcatttggaagcagcactgatatgagcttgcaaggaaatcttatgtccagtaattctgacctattcgatgcatgcccctctttgcaaagtgggagttggagtgcccttatgcaatctgctgtagcagaaacaaccagcgatgacgccggtgtacatggatgggttaacagcaatactgtcccacatgcgaattcgcacactgatagtagagcccaggatttgggtgcaaaggcttcaaatccactaagtgagagattccacagtgattccactggggcagctgttcaacatttgcctgacaaggtaaataaagtttcagatcatggcctgtttgagaagcctatggctcaacttagtcaaatggctggtaatataattcattcttcaagtattgatgaacagaataatttgtgttctattcgacagaatgagggcattgaagatagatttggtatttggaaggctgcttccaatccaaatgtagctgctctgaaggaacaaaatccttcaatgcaaagcacaagctatggatttggcattgctggtgcaggaaacgattctaggcatttggataataactctttggagaaggctatccctcatctgaattctagagacggcagtcagattcttgagtcatattcgagtaataatgctggatcaaatgaaatggtaaatacccgtgatttgtctgtgttacctggtgggaaagaaacacaatcaccttcaagatctgatggtttaattagggatggattgaatcacaaagattcagcgaattgcatgctgcagtttggcccaactatttctcagagtttcttcaacaagaatcatgcagtctcggctggaccagatcatcaacaaatcagtcctcaaatagctccatccaggtttagtcaatatgaggcttttaagaacggactggtgcaacccgtgaatgatacagggagattcactctcttgaagataggagaacgatattctaaccttgggaattctgatgatggtttacattctgttcaatcgtcaaagcaattaaatactgcggatcctggttacattgttcatatgcagcaaatatcaggctccacaccaggagtggagactctctcatctgcctcattgccttgtggtgctactgaccaacttctaaaggtttataaaccaaagaagcgcaaaaacgtcacatcagaacttttatcttggagtaaagaagttatgcaacgtccccagaggcttaagactctcgggtgtgtggcttatgagttctattgttagaaaagatttcatatccattactattttaacctttctgtattctttacagtgaggccgaggttgattgggccagagcaactaatcgatttgctgaaaaagtgagtttcctcattacacattttcttgcagggtctctttgtacaatgttgttgaatacgctgatggctttatgttctcacaggtggaatttgcgactttacttgaggatggcccaccaatcagatcaaagagaaggcttatatatacaacacaactcatgcaccacctgtttcgtccccttcctggtagggtgaaatctttagttactagctatgagtttgtggcatattctgctgctagagctgcgctaggcgatgcatgtagctccgcttcgactgacaggattgagggcttttag

SEQ ID NO: 158524 - DNA, 1011 bp, Arabidopsis thaliana landsberg
caactagaccaggtcctccgatcctaggatgctgcaaacacatgaagatacattagaacgaggaacaacaacagtttcttagatattctatgtgccatgaacttgacaacgaaaagggtattttacatccaaacctgtggtgctaaagaaagaaatctgtatttatccagggcatagcgaaccacggcctcattctcgctagggttaattgtgcacctagcaaaatggcaaacaaatattcccaggtaagcttgcagtaactctcagttactcatgactatgtgactgaggacatgtctcattatgttgttaggcctcatccgcttaacttggagtcttggataatgcaaaaattcagttcagattatgtttgcatacttacgttgagtatacaagaattccaccaacgcgaaccaattgaacagcctggtccaacattttccgctggtaccatccatggtttctcaaagatataacagtctcctacaagaaataagcaaattcattccacaagtaccaccctctgaaaagccttggaaacacagattctactctgaattactacaaacactttagattttggtctacatgtataacagtatatatatattgcttcaagaagttactaagaaatcatatttccgccacatagaactgtttaagttaaggctaatccacacatgttgacacaaatactagaatgtgtacatgttaactcgtgcgaattagaacttaataaagcaaaatcacaaaaaagtagaagttcccacaagacggataagtcttgaatttatcttaccagtccagcgaaaagacgaggtctcaagccaagggcagaacaaggagcatctaaaaggaccctatcgaaactattaggcgggaaaccttgtgattttccagctcttccaccttggcattgagttcttccacgaccatttttcaaccttcctttattcttcctgatgtaagcttggctaacattatcccctccatttggctgttcagtgctgt

SEQ ID NO: 158525 - DNA, 1836 bp, Arabidopsis thaliana landsberg
attccagtcccacttgacaatattgttgtcagaacgcgataggaaaactcccaccacacattatctacccaccaccaaccccacataaatgtgtgtatacacactccaccaatattgacctatatatacatgaatctcaccgaccaatgaataacataatcacccctatacacacatgatagctcgagttgaaatgagacagtacagacaaaatcctgtacttatgcgggtaggtgggttattcagaaaacaatttgaagacgcattggagacaaacaaccccgaagcacattacttggaagggctcaggtacgcttgttgggaaaaagatttaaacatggctaaaaaacacattttcaaagcgataaacaaagtagatgaggcactgtttgtgatggcaatgttgacaatttgtggtggagagaaagagctaggtgagtttttcactgaacagttgtttgcacaaccttgggccgaggtattggctatgggagactctctatttgcagctcttgagcgaatggcggttcgtcaaggtacagcttacaggcgtacatggaatggggcccatcccccatgtgtatcaatccacaacatatataataggtgccaagagtgctacatattcttttgttccaaagaattctgtcggcgctgttagctgttaggagcttctcatcctaatcggccgataacatgatatgaccgggttttacttgttgtatgtctaatgttttagtatctgtggaaacttgtcaccagtcgggtaactcttaaaaataacgtaatgtttgttgacattacatgttgtatgtatgttgtgttatgattgttatgtctaatgtctcgttgtttcatttatattagttaaatattactaaatagtttcatttgcaacagtggagatctaattgtatgctaacagaacatgtcaaaacaataaaagccatcctacatgtatattaatattagttaagaatccttgtttaagatcaaacaatttaaaaatgtatctatgaataacaagttgtacgctaacataacatgtcataaactttacaggcaagcaatttcgattaaacatgattgtttacaagcagttttaggtatgtcgtatgtcgagttaggcagttttagggatgatccggcggaaaagtgacttgattttgaatggcttctcgagacgtgcgagtaggttagttactttgggcgggcaagtcggtgagacacttcggacggacgagtaaacgagctactcaagatagatgggcaaacgaggtacttcggacgggtgagctgacgagctgcttgagacgggagcgctgataagctacttgagacgggccggcccgcgagatacttcggacgggtgagctgacatgctgcttgagacgggcgagctgataagctacttgagacgggccggctggcgagatacttcggacgagtgagctgacgagctgcttgagacgggcgagctgataagctacttgagacgggccggctggcgagatacttcggacgggtgagctggcgagctgcttgagacgggcgagctgataagctacttgagacggaccggctgacgagatgcttcagacgggtgagctgctctttgtctctaagtgtcctcgcggaaccccctacctgacgcgccaactgttgatgcacgaatcacacaagtacgaaaatgggatctctagggaaggaagaagaatctttctattaatgacgagcccgcgacttaggcgaattggacgaattacaaaggatgatttcgtcaacgagcataaatggagtaagaacgagccgattgtagatgaaagacgagcttga

SEQ ID NO: 158526 - DNA, 1487 bp, Arabidopsis thaliana landsberg; identical to SEQ ID NO: 16711

SEQ ID NO: 158527 - DNA, 424 bp, Arabidopsis thaliana landsberg
attagcttcagtatccattggcggattagcctcaggtgcgttttgtttcgttctcttcttttatattctcttggatcttaatttcagagatgggtttctttgtttgttctctatttgttgtatttcgcggtaaaatttcatgtttgattgttgcattgatctgtgatatgatgaacttttcagtaaagttactttcttttggtcttggttgtgatcaatgctagatgcttattaagttttttgtgtgtgttgagcttaaagtatcatttttgttgattattgaaatgtttttgatccagagtgctctgatcaaggttttggagggtgcatttgagtgagaagatgttttcggctcagcataagattcataaggagaagggtgtggaactttctgaattggatgagcaagttgctcaggtttgat

SEQ ID NO: 158528 - DNA, 207 bp, Arabidopsis thaliana landsberg
atttttcgggttttgtgtttgcagatgtatacagatagttggattgaaaatgcagcatatggtcttatgggaagacaggtaaacattttattagaatgtcttaggtagtctattgttgcttcagctggcttcgtttagcgaaatcgagtatcttattcagatcattgagaaggatgggaggataaagtttgaagttaacatcattcc

SEQ ID NO: 158529 - DNA, 969 bp, Arabidopsis thaliana landsberg
cttttcatctgcagctgcttagttggctttgaggtttcactttaaagagtttgcatctggttatgtagacaagttttcgtggagatatgagatttccaacaagtagtcccctactggttcaggatatcattgtcctgaaaacaaacatccaaagtcttagaaggtgatgtgagttctccatatgttacgccgtcttggatggttaattggactgagccaaagaagtaggcaaacaaagtcgcttgatgctgagccttacgtagccagggttaagccagtgctaatgatcgacactgttcaggagattgctatctatatccataggtttcataaccttgatcttttccagcaagggtatgatagtttctctatatctagttctgagtgaattgaagcaatgttctcttcttgttctaaagagttgttacttgttgtatcttttaattcttttagatggtatcaaataaaaatcagcatgagatgggaggatggtgacaacaactcctgtggaattccttcacgagttgttcagtatgaaggtactcttatccatcagctttcttctgaatcattttcctctgtcttgctacgttcttgtgattgagttcactattccattccctgaatttgatgtctatttgtcctattctgtgtacttggagactttgttttcagtatactaacatataatggctcatatacctgtgtgtcacagcgcttgattcaacctcaaacgactcatatggagtgtggaagatagatgataaggatagtagtttcttaacacagcccttccgcattaaatatgcaaggcaggatgttcgtctctgcatgatggtctcatttactatgcctctggaaagatatgaggtaccagtatttctctcctttgttctattcatcttttttataatgtattctcacaactataggctaatactgaaaaatgagttgcataatattaaacaa

SEQ ID NO: 158530 - DNA, 663 bp, Arabidopsis thaliana landsberg
caacgttacgccggtttggctccgacgaaagaggaaaaaaaacccagagttttggtcctcgggtcgggttggcggggttgtcgggtattaaaagggatcgatactagtatttacgacgtcgtttgtgtctctcctaggaaccacatggtcttcactcctctcttggcttctacttgcgttggtacgcttgagtttaggtctgttgctgaaccaatctctcgtatccaaccggcgatttcacgagaacccggttcttattacttccttgctaattgctccaaacttgatgctgataaacatgaggtaattgctaattggatattaatattggtgaagttcttgaaattgaggaaaagtcttgcagatgtatctatttttttagttttctgtttggatttttctacaatttgtggatgtagaagtagtttcgtttagacattgtttcaaacgctaattttgcgttcacatttaggtatatcaaaatttccaaattgtaaacgcaaacgcgacttttgtgtttgtgatgaaagcagagtgctttggactgttgtatatgatatgtgtgaatcatgctcttggtttaaacaggtgcattgtgagactgtaactgaggggtctagcacattgaagccatggaagttcaagatagcttatgacaaactg

SEQ ID NO: 158531 - DNA, 569 bp, Arabidopsis thaliana landsberg
atttcggaatatgttttgtaacattggtttgtattttggtgatcagagagtccgaagaaggttgaagagaagaaaatggcgacatggggaactgatattcctgaagatttggaattgaacgaggaggcacttgcaaatgctcttaaaaaggtaagaaagacgccacagtttcagttcatattttctcttgccaagactcttgtttctctgccctgcaaggtttatctgacgtgttgttgtttgtgtgcaggaggatctaagtaggagggaagaaaaagatgagaggaaacgcaaatacaatgtcaattacaccaacgatgtgacctccgaggagatggaagcttacagaatgaagagagttcaccacgaggacccaatgagaaatttccccggctgataaatgtcttttccctttcaccatattaagctgaagaaaccttgtttttaagtttcatgtctttaaataagacccttgttattcatgtcattatttgttactgtcttcatgtccacccaaagattcattatataacgtatgaaactagaataaattttcttagccaaatcaa

SEQ ID NO: 158532 - DNA, 2338 bp, Arabidopsis thaliana landsberg
atgggaattgtggaaaggataaaagagatcgaagccgagatggctcggacgcagaagaacaaagctacaggtttctctttacattatataacgtatagatgtatagacattgatttgtcatatatttctgaaacaaaagcagaagaaatggtcagctaatgaaaatattgttacattttttggacagagtatcatcttggtcagctcaaggcaaaaattgcaaagctcagaacacaactcttagagcctccaaaagtaatgcaacttcttattgtatatagctgaagcagagtatttagtcttcatttctaaatgtctttcaaatctacctaacagggctctagtggaggtggggatggttttgaagttacaaagtatgggcatggacgtgttgcacttataggatttccaaggtctatcctaaattcacgcccatccatgatccatgtatatgtatttgttccaacttcagagtccctcactatgtgtttgtggctgtgatttgcagtgttggaaagtctacgcttttgacaatgttaactggcacacattctgaagcagcctcatatgaatttacaacacttacatgcatccctggagttattcactacaatgacatcaaaatccagttgcttgatcttcctgggattattgaaggtgcttcagaaggaaagggacgagggaggcaggtttaaatcgaattgattcttattttttttagtctctaatcccttgctatgaaataaacttagatggaaactgtttgtttttcaggttattgctgttgcaaagtcttcagaccttgtgttgatggttcttgatgcctcaaaagtacgagctatggtttagatttccatataagtattgtgctggttctgtctttttttcgtttttgctattttagtctcagtacttcttcttcccaaaatcgttttagagtgaaggccacaggcaaatactgactaaggagcttgaagcagttggtctgcgtctgaacaaaagacctccacaggtaaatctcatctttatcaatggtctcccttaatatcttataaactagaaactcttgattctctttcactttatctgcttaatttctgttttccatctttgaaaatgctgcactatcttgatgtgctaccatttagtggtgttttgctttctctggtctaacagatatactttaagaagaagaagactggtgggatttctttcaacactacaacccccttgactcgcattgatgagaagctctgttatcaaattctgcatgaatacaagattcacaatgctgaggtttttaagtccatctttaatcttgtttttattcagcctcggacaagaatcattacgtgcctctcttgtccgctagttaggagaagaactccaatgggttcagtaataaaaatttcaggttctatttcgtgaagatgctacggtggatgactttattgatgtcgttgaaggcaatcgcaaatacatcaaatgtgtatatgtctacaacaaaatagatgttgttggaatcgatgacgttgataggctggcacggcagccaaattctattgttattagctgcaacctaaaggcaagttcttttattttgactatagtagtgtctaaataagaatcctatccagtgcggttctaggttcttcataatggtctgattcctgtatagtctgaaacttgtgaatatactggaacagtctggtctaatggtaaatgatggtgttgcttgaaacagctaaacttagacagactacttgcaagaatgtgggacgaaatgggacttgtgagagtttactcaaagcctcaaagccagcaaccagatttcgatgaaccctttgtcctctcagctgtaagtataatatcctcaacactattcaggcttattttgtatagataagaatttacagatatgtttttcatgtttgtacttcacaataacatctgtgacagtaatatttgattacatgtgtcactcctcaggatagaggtggctgcacagttgaagatttctgtaaccacgtccacagaactctggtgaaggatatgaagtatgcactagtttggggcacaagcgctaggcactaccctcaacactgtggtctttttcatcatcttgaggatgaagatgttgttcaaattgtcaagaaaaaggtacagaagcataaactattttctgatctctgtctcatgatgagaatgctacatcaaatgttgatgcttgtcgaaatttcaggtgagagaagaagggggaaggggacggttcaagtcacactcgaacgcacctgctagaattgcagaccgagagaagaaagctccactaaagcaataa

SEQ ID NO: 158533 - DNA, 3704 bp, Arabidopsis thaliana landsberg
  unsure (1)..(3704): unsure at all n locations
atgagggaagaactagcaggtaactcgaatatcgcagtaatgttttcctttcatgtctgtttcatgtataactggaatgatggaaccaaataatcaatatactttttaatgatttccaggttcaaaatcattctgggtcgtttacagattgataaccagctacctctaactttaatgccagtactattggcaccagataacactggagatagtcgtcaaccagtgcttaagatgacaattacaatgtgtaacgaagaaactgatggcattcaagtgtatccatatgtgtatgtacgggtatgtattctagtcaggtttatctgcagagtactcaaacataactttgagatactatctgaagcacatgatgtattttctattcaattgacaggtaacagataatacctggcgactaaacattcacgagcctatcatttgggcttcagctgacttctacaataagcttcagatggaccgtctccccaaaagttctagtgtcgcgcaagttgatcctgagatacatataaagtattcttgtcttctatagaatttttaccagatacgaaggccacattatttggccgttttggtatgcaagtctagcaattttctaacttaagtgattggatgattttgtttgtgattttcagcctcatagatgtttcggaggtaaggctaaaggtctcactagaaacagcgccagctcagaggcctcatggaattcttggtgtttggagccccattttgtccgctgttggaaatgctttcaaaattcaggtggttgattttcctttgaagttactcccatttatgaaatggaatagtgattacatcttcctagtaatagaactaattgttgggatacctggttccatttcgtggtagtctacttcatttgagaactgactactaaaaagttagaacttgttgtaaattatgaattgttgagcatgagtttgtttaagccatactctttcttaactcccagcacacgagataagtaacacaggggataagtagctcagaagcttttttccttggattctcatgaaacagcttgtagctagaaagcatttcaattgcctgacaccacaggctaattcatcattttgctatagttggaatttagtactgacaaatagagaacgagaaatgttgctaatgtttcaaaatcatatgtacatataggttcatctaaggagagtaatgcacagagatcggtttatacggaaaagttcaatacttccagccatcgggaatcgcatatggagagatctgatccacaatcccttacatttgattttctcagtagatgttttgggtatgactagctcaacattggcctctcttagcaaagggtttgccgagctttcaactgatggtcaattcatgcaactacgggctaaacaggtacatttcttgctataaaatattgaattgatcactttggcagtttgctcaaaagaggtgtgaatatgaatcaggtttggtcgaggcggatcaccggtgtaggtgatgcaattgttcaaggaacagaagccctggcacaaggtgttgcctttggggtttcaggagttgttacaaagcctgtagagagcgcccgagaaaatggtattctagggtttgcccatggggtaggacgggcgttcctaggatttattgtacaaccagtgagtggtgcattagattttttctcattgactgttgatggaattggagcaagttgtagcagatgtttggaggttttgagcaacaggaccgccttggaaagaattagaaatcctcgtgctgttcatgctgatggtatactcagggaatatgatgagaaggaagctataggccaggtactggctcagcttatttttcttgtctactagtgagaaattttggatgcttccaaaacttcataattacaagtcggctatcctattgtttaatatttcaatctaatagttttacattctaagctccttatacgatatggtgtaagttatactgaaatattgccagaaagccacgaacttacattcttctagttacgcttgccactcaccaaactagttctgatttatgttggttatctcgttttgcagatgctccttcatctagcagaagcaagtcggcactttggctgtacagaaatattcagggaaccctcaaaatttgctttgtctgattgctatgaagagcatttccttgttccatacaaacgcattgtcatggtgaccaacaagagagtcgtgttattacaggtttaaccaactagaatacgatttcacatgcaggttttccattagcgtctcaaaattgtttttattaactgaatgtttgcttccatttagtgctctgatctggataagatggataagaaacccagcaagatcatgtgggatgtgccttgggaggaacttatggcgttggaattggcaaaggcaggtagccaaaggccctcgcatctcatactgcatctgaagagttttcggaagtcagagagttttgctcaggttataaaatgcagcgtgccagaagacttaaatggactagaacctcaagctgtccgaatctgttcagtagtgcgcaaaatgtggaaagcatatcagtctaacatgaaaaatcttgtgctcaaggttattgctatcactattctcattatagttatagaattgataatttggctatgattcaagtgaaatttacatttgaaattactactcccaagatgctttggtcttctattttatagtaaaaatataatgagaaaacatgttttaagttttctggtttatattccacataacttactaaccagtgtaaattatgcatatattgaagctcataccagtgcaacacacctaatgaattttctttcttctcattgcaggttccttcaagccagagacatgtgtattttgcttggaatgaggctgatggaagagactcaaaaacatacaaaaacaaagctattattaaatcgagagaactttcttcttcaagctctgtctcagatgataaaaagcttgtcaaacatagtatcaacttctcaaaaatctggagtagtgagcgagaatccaaaggtcgatgttctttgtgtaaaaagcaggtaagttcctttccatcgcaatctatatctttgagcttagaaaggggtttccctgttagtacagaaaatttctgattttcttgccttctagattttatttcttttgatgacactcgaaaattttgggttctagcctaagctaagaggtggagaccaggatcaaaatcttaaacccttgtcatcaatacatgtcaataagaatccttgatttataactttatgagacgaaacatgtataattcaccccccacatcaaccgttttgaggttttctttacaattatttcctttttggctttcaggattctgaagatggaggagtttgcactatctggagacccagttgtccagcggggtaagtatagccaaaagagatttaaaattccaaaaatctagtttattatttcttaacttggttatttagtaccctaatggtgatgctgtagctgcattgagccgttgannnnnnnnnnnnnnnnnnnttgttgtttgccagattcgtgtcagtgggtgatgtagctcacgttggtagccatcccccaaatgttgctgctgtctacaataacaccaatggagtgtttgcacttcctgtgggttatgacctt

SEQ ID NO: 158534 - DNA, 499 bp, Arabidopsis thaliana landsberg
ttcggtgaataaagttagggtttttaattgattcaataccttgtggaataaattaggggtttttggaggaagcatagaaggaaggtcttggtgacggctggttgtttgggaagtgggtatttactctacaaactatacaattcccatactcgtaggcttgctgatttggaacgagaactcgctcacgagcgtgaaaatgacgaaatcatcaaaacccagttaagttctgtgctcataaaatctgatcctttagacttcagttcttatggattctctaacggacctgtcttgtttgtactcttgtttagaatgaaagcacatttcgagagtattcagatgattgtggattcgaccacactgcctcacgcaatgcagtttttgagtatccgtatcagcgaggagatcgatgtctctcatgttatggacagactgaaccaagggaaaggaatgctgagtccacctgagaaacttcagctctgggatgagctcaagattttga

SEQ ID NO: 158535 - DNA, 424 bp, Arabidopsis thaliana landsberg
ctacccagcaaagggaaagtcatatcggaaccctatgggacggttcttgttctgtctagctggaattttcctatatgtaagattcggatcttaaaatagttgactatttttattttctacaagaaaggattacaattttgagattttattttaatgtttgttgtcagctttgtctctggatccattgattggggcaatagcagcaggaaataccgtgcttctcaagtcatctgaactaagccctaacgcatctgccttccttgccaagacaattccagcttatctcgatactaaagccatcaaagttatcgaaggaggacctgatgtcgctactatcctcttgcagcatcaatgggacaagatcttcttcaccggtatcaatccattcactcgcgatgacttgcttgtagcggaatacgcgtga

SEQ ID NO: 158536 - DNA, 922 bp, Arabidopsis thaliana landsberg
gttttcacaaatccccaattctctctaatggcgtagtagtacctcacattgtattagatctatctcaatggagaacaacaatcttggtcttcgatttcgtaagctacctcgtcagcctcttgctctccctaagctcgatcctttggtaattaaactctcctcaacctttattcgcgttttctctctcttttcgttaatgtgtttcttctcttttgtttcagcttgatgagaatctggaacaatggccacatttgaatcaattggttcaatgttatggcactgaatgggttaaagatgttaacaaatacggtcactatgaaaatattcgacctgattctttccagactcagatttttgaaggacctgatactgatactgagactggtaactatgatgcattgtttatttttattttttttgcttttgtcaattattgtacatcaattaactctctgcttcttcagagattcgtcttgctagtgctaggagtgcaactattgaggaggatgttgccagtatttccgggaggccgttttctgatcctggatcctctaaggtgtcttcttttactcacttcattgctctgttatatatttctcatcctttggttcttactttgaaggtgttacttttttttttttttccagcattttgggcaacctcctttacctgcttatgaaccagcttttgactgggaaaatgaaagagctatgatttttggtcagagaactcctgaatctcctgcagctagctattccaggttttttttttttgcatgtcactatgctttacctgatcttattatctttgactgatttgaacttctgttctctttataatcttaacagtggattgaatatctctgtcaaagttttgtctctagcttttcagtctggcttatttggggaggattttgactaac

SEQ ID NO: 158537 - DNA, 993 bp, Arabidopsis thaliana landsberg
atggagcagtttctcttcccaatattccctcatatatggactggattggatgttcaaggtttgtcggtattggaaagatcttcctcccggcctatacactttgctgcctttgttgcagtggccttaacccctcgggttactttggatacttgtaacacccctattttacaattagaccatgaggcccaagtccagcccgctaatgatttgaacccaagtgaaaacctaatgatcccacgtgattataaaaggagaacgcaaactccaaaccaagtcacaaaaaccctaagccggcaacctcgcaccactcagaccaccggagatcgttgttgtgttgagccggagtcaccgcgtgaatcatcctcaccggagaggtaacgcacgagaatcgattctggttttgatctcttagtttctttaggattgtttttctttaggattgttgaaccaatctaactagtgaatggaaccatcgtagatctgtgccactccgccgttccaaccgccaagcaaactgtaagggagactcgtcgagaaaagccaccgagaaaggtaatcgggaatcttctcgtgttgttatgtgattgtgttatttggttattaaaccatgatctaaattaaaccaattaaaaccaatgaatcgtgtgtttagttagaggttacgtgaaattgtgtcgtgaggacgaagaatatgacttcattcattgatttagttgttagagtgccggttaattgccaaaccggaagctatcattcacgtgaatgcatgaatccaattgtggacgtagtgttacttgtagtgaatgaatcaatatttaattattagatttggttggattaatttattaaattaagtctagttaatttattgaaggatatatagtttgggttgattatgaaattaattatagattattaatggaaatcatctttgatcgattatttaacccgtcgcagattgagatcgttattggaccttttcccgttgctgtt

SEQ ID NO: 158538 - DNA, 1272 bp, Arabidopsis thaliana landsberg
agaaccgagctgacagaggggaaaatatacatgatgaaagggctagtaccaataaactcagattcagaaatactttacttacatgcgagagggtcaagctcaagatggcagcctttgtctccaaaagattctgaaaattttcagtaagtggttttctttagtagacacactggaatctatctcattaatttgttcaatttccctgatgatgttttcaggccctttttcaaccctcgtaaaccaatctctttgtcaaatcttggtgaaattcctctttcaaggttaatctcagtagtccaagctttttatgaaacactctttaccgcactttgctaatctataccctgtcatctctaattatgtccttcagtgaatttgatatcgctgcgtacgttgtatatgttggaaatgcatacacggatgttctacaaaagaagcagtgggtgtttgtgacagatggatccgcacaacattcaggggaaatctcaaacagtcttcttgctataagcttcagcacctcattcatggatgatagctctgtttcccacatcagccataatttggttggatccgtggtatgtacaaattctaatctttgtctagttttacacagagagaatatgcaccaagagattaaattttgaaaaatatatgcttgttatgggtcttaatttttggcaggtcggattttgcaatctaattaaaagagcaaaggatgtgacaaacgaaatttgggttgctgaggcagcagagaactcagtctacttcataaacgcagaagctgcctactcttctcacctcaaaaccagcagtgcccatatccaaacatgggctaagctctcttcttccaaatgggtttgttctcggtgccttcctcttggtataattattcggttcaaaaagattggtcttttgtattaagccttctaggggtgctcaattttcaggtcattcatgaacttcggcaaagagtcttatctataatcggtgcttgtaaatcaccttcatgctgaagataaatcataccccacctcttctcttaagttttgtttataagttatctaaccctctgctgattgtatctattaaagcccattttgctacatcaatttctgaaaattgaaatgtatgatctactctcattgatcaagtaactttgaattattttgtgttgtaaacatatctaaaggtttgatgaagttgcattaagaaataacatttatgctatatatgatgctacaacttatcaggggaaacaatggttatgtagtt

SEQ ID NO: 158539 - DNA, 497 bp, Arabidopsis thaliana landsberg
atactcttcgtcttcttcttcctccgtcccacctttggaaaagttctcgtgagtcttctctaatgtctgtacatgtcaaggtacataatatattacttattcagggctgctttaaatcttggtttaaaactgatattttccatttcaggaacctgtttgtgaaacttgtggcgacataggttttgaagaagcacttgtcttttgtgactcttgtaagattgagtctatacaccggtgagttcaattctcgatttctcctatggtttgattgaattgtgttgtttataacctatttcacttgttctttagctattgcataggcataacaccgactccttttacggaatacataacttggatctgtgaggattgtgatgagagtgacagtgattctgattgtaaagaactggatcagactgctaagcttacacatatcttgaagaagagtgacaaaaagaagaagaagaggaagaagaagaagaagaagagtaaatatc

SEQ ID NO: 158540 - DNA, 2690 bp, Arabidopsis thaliana landsberg
  unsure (1)..(2690): unsure at all n locations
catttttttgtaatttctaaaataatattttgtaaaaaaatgaaaattgttttatgataatataaagaaatgttttattgtagcctaaagttcacgtccacttcgtgtgtggtacgtttaaagtaatatagataaaggatacttccaaatagttttggattctcttgcaatggtggtggtattaagaacttggactgaatcacggtcacacgcattacaaacaagagcagagagagagagaccacatctgatttcgcatgaaacattccaaaacagtgaggacagaaacacaagacttcagttttaattttttttttcttttatctttttgactgtcgctacttcgattccaacacaatcaatcactgtgtttaaaagggtttctcagtttccttatcattaaccttttttttatcatcttctctacactcttcaccaatagcttcactctttttggtcatggcttgtataaacggcgagaatcgtgatttttcttcctcgtcatctttgtcttctcttccaatgattgtctcccggaacttttctgccagagacgatggagagaccggtgacgagtttcctttcgagaggattttcccggtttacgctagaggaacccttaatcccgtggccgacccggttttgctggattttaccaattctagttatgacccaatttgggattctataagagaagaagctaagcttgaggttttctccttatgctccataatcatattcttattattgatttatacgtttttcatatatgtgacttcaattcaacaaagacagaaactttgatattgttaatcaacttcgattttctacattgaaaggttatgataatgacattcttgtgtaccttttatatcaatccgacaaaaccgtggggtcgaattctcactaaatgctttctctgtctctttaactacttgattaaagcttttaaatttttcttgctgttacgtatttctctcacccgtctactttttcagcgtcaatttttcattaactacacgaaggacaagttaaggaacagagtttgcgtgtgtttatgttcctttaatggtgaatcttgttgtgcgtttcaggcagagaaagagcctattttgagtagcttcttgtatgctggtatcttagcacatgattgtttagagcaagctttagggtttgttctagccaaccgtctccaaaacccaaccttgttggcaacacaactcttggatatattttatggtgttatgatgcatgacaaaggtattcagagttcgattcgccatgatctccaggtaaaacattccatctaatactgtaaaaagacatgatctttgttgttttcttatgtatctcaatgatttgcaggcatttaaagatcgtgatacatgcttgtctgtcgtatagttctgctattttacatctgaaggtaatctttactcgaagttgagagacagaacatttctcacatggaatgagtgacttatgaagagttttcccacttgcatttcagggttatcatgcgttacaagcatatagggttgcgcataaactgtggaatgaagggaggaaactattagctcttgcattgcaaagccgaataagcgaggtagttggtgatcattgtcttttggttgagtcttgctggagctgcatttttgagctcaatgtctgatctatgctgtggtttctctcaggtttttggcattgacatacatccaggtagagttttgagcttcatatctctgctctcatctgtttgaacattctcagtttcccttctctgttgtaatagttgatcaggtttaccggtgaattgattgctggttatacatattacttgaattctctttctgcatagcggcaagaattggggagggaatattgttggatcatggaactggagtggtcattggtgagaccgctgtgataggcaacggtgtctcgatcttacatgtaagcgtctcttctccaaaccattgcctgtaaattcaataccgagatcatgattttcttttcagtttttcaaggctacttgagttttcactgtcacagggtgtgactttaggaggaaccggaaaggaaactggcgatcgtcacccaaagataggtgaaggtgcattgcttggagcttgtgtgactatacttggtaacataagcataggtgctggagcaatggtagctgcaggttcacttgtgttaaaagacgttccttcgcataggtataaaaccactgacatgcatctaaatatcaatctcgttgagcttttttgtttgaacattgctcaaattgacattttctctcgggcgtttctgaagcatggtggctggaaatccagcagaactcatcgggtttgttgatgagcaagatccatctatgacaatggagcatggtgagtcttgattgtgaaaatagtattctgattttgttctccattgctcaggctttcgtagtgtgccaatatgctagttgannnnnnnnnnnnnnnnnnnnnnagagttctttcaaaatgtagctgttgcttatagagagacaataccaaatggtaacttactttcttaattcctacagtgaactgtgtatttatatatctgagtatagtttgggatctgaattgaatcctgcttttttgttaaaacaggatcttcagtaaaagggagttaaagaaagagacattaaaaagagaacatga

SEQ ID NO: 158541 - DNA, 5266 bp, Arabidopsis thaliana landsberg
atggttcaacagaccaaaccagttgacgttcaagacccacctaatattgatcaacccagaaacattggtgctggtgatgccccaaggattcatcaccaaagacaagggatagtgcctccacgagtgcagaacaataactttgagatcaagagcgatctcatttccatggttcagagcaacaagtttcacggcctccctatgtaagatccactcgatcacttggacgagtttgataggatttgcagcctaacaaagatcaatggtgtcactgaagattgtttaagatcagactatttcctttctctttgggagacaaggcacaccactggaaaaagactctacccccagactccatcaactcctgggacgattgtaagaaagcttttcttgccaagttcttctctaatgctcgcacatctagattgaggaacgagatctcaggcttcacacagaaaaacaatgaaattttctatgaagcttgggaaaagtttaaaagttacaccactcggtaccccatcacggttttaagaaggcttcattattgagcacactctacagaggagctttaccaaagattcagaatgcttctcgacactgcctccaatggaaacttcttgaacaaggatgtagcagaaggttgggagttagtcgaaaatctggaacaatctgatgggtgctacaatgaagactatgatcgctcagtgagaggaactggaggaatctgaagatagacagagcaaagatatcaaggcggtgaatgaaaagctagacaagctgttgttagcttagaagaagcagatacactacatcactgatgaagagtatttccaaatgtaagaagggggaatgatcaacctgaagagctgtggtacattcagaaccaatgagggttcaacaagggctacaacaactacaagcccaacccaaacctttcctacagaagcactaatgtagctaacccccaagatcaggtgtatccaccacaatagaatcattctaagccttttgttcagtacaaccaaggttatgtccataaacaacatttcaatggaggctaccaacagcagaatccaccaccagggttcactcaacaaccagaacaagccccagcagctcaagatcctgaaatcaagcaacttattcaacagatcattcaaggacaagctactggaggtatggcttctgacaagaagatagctgaattacacaacaagatatattgttcttacaacgatctaaatgtcaagtttgaagatctgaattcaaaaatcaagtatgtggagagtcaatttgcatcaacctctcctccgaagcatcctcagcaacttccagggaaagcagtcctgaatcctaaggactatgctactgcaaatgctatcaccacccaccaagaagatgagtctccaccaaatcatcaaactcccaatactaaggacagtatgattcaagaagggggggattcaactcaaattgctgcaactgccatccataaattcatctggaccatagagcacacacctttgctgaaacactcaacattctggaaaaaagttcaaaattgaaaaactcaagaaggatcagaatcaagagatgattagcagtgcctcaactcaagaaacatacaagaagaaagtcatccacgaaaaacttgatgatcccggttcattcactctgccatgctctctaggaccattgacattcaataggtgcctttgtgatttgggagcatctgttaaccttatgcctctctctacatctaaaaggctagggatcatggaatacaagttctgcaagatagccttactcttagttgatggttctgttgcacatcctcatggtctaatagtaaatctgcctgtcaagattggaaatattgagatacctacagattttgtggtattggacgtagatgaagaaggcaaggatcccctgatcctaggcagaccattcctagcttcagctggagcagtcatggatgtcaggaatggaaaaattaatctgaaccttgaaaaaggcatcaagatgaagtttgacatcagacaagcttctgggaaatcaacaaaaggagttcagaattttgcgattcaggacatggatgttgataaagaagcaaagctagaacctcaccaaaagtcaactatacttctcaactcagcaagctaaagaggacttttgaccacaagaagagagcaacagaaaggcgatctcagactgaagatcctacagaagatgactggtatgagatgagaaaaaaaattaaatggcaaagcagagtcatagaaggattatcttcaagagtgatgaagctgaaagatcaattatggatgtttgaaaaaagagttaaaaagttttccaatggtattaaccgagagaagatggaaactgcactaactgtcaaggaggacgaaaatttcacaacataatggtttccaccagaagatcagaaaggagttcacttagaataaagaagcctagagagcaagttgttgagtgagaagaaaactcatattccgacttattctccaggaatgcctaaacagtctaccaacccctctactgaagaagaacaccttattcatgattatgttgctgaagaactcctagagctctgggttggatacaaagctcaagaggataccattggggagctaacttacaagatggaaggactgaaccatgcgatcttggaacttcaagaaatagttaaaggtaccccagttttgaattgaggattggtcaaaagagccttgttcagaagaagaagactactctgttgatcagaaggaagcttattttgaagaaaaagcaaatgagtactcatcctaccatatctcaagagaggatgcagagtatgattcaagcactttaaattcaaccactgaagatgaggatttctctgttcctctcttcaacctcttttctcactaagctctgtaagagtcaagtttagtgacttaaaacaagctcacttgggaggaagtcccatgtctatccatgtatataactttctacttttcttgttatttttgatatttttgtttacgtgtttcaggtttgttttagagaccctgagggagtcaacggtcgagtaaatttaaatcaagtaaagaaaaatctcaaccgttgatcgagtagaatgaggaggagtatttttggccgttgatttgaatgaccaaatgagagaagcatcaccaccgtttgatttcttgcgattcattttggtccgtttgatcgagtaattgaagatggagcatttctcaccgtccgatcgagtgaagaaaccaaagagaccctcttcgtagtcaccgacgcctcgtgacccgcctccactgaaacgctgatgtccctttttcttcttgtcccctccataattactttggtccccccattgcaattcccgaactcagcaacctcatctctccatctcccataccaaagcatcctcatctcgaatcgttacaatcctctctttatctccttcacttcccttccttatcaaaaacttttcataaattcatttgtttctcccatcattcaatctcctaatctactgaattttggttttgagtttctcccacctttgttcttgatgatgaacaggcgctcacttttgtcaaggattcggaacaaagctctctccccatcgaagaggtaccaaacaccttcttcgcatgcagcagctcgaggaccttctgaactatcacccttggggtcgagcaggagagaacaagcaagtttcgagatcgatcatagtgaatcgagccaagaggaggaagtgatgcaagaagaggagaccttcagctctccagctggaaatactcgatcccgaaagtcgagtaagctttctacaagagaattctcgaggaacaaggcatatatcactcgagggaagaagcctgtggggaggaggtctggagctggtagatgaagactccgaggaagatatggcttcaccaaaggaagatgatcaaacggagaaaggaggcgatgatgatttggaatcaaagaagtgttcaactcgaaatgaatactacaagctgctaaagcgcaatgagttattaggaactcggtaccctcatcccgagaccatggagagactcggcatctatgatgatgtagactatatgtttaagcaatgcaacctgaatattcacatgtttcggccaatggaggggtatgagaaagagaccattcagtttctttcatctgtggaattgctcttatatggagagtcagagggacgatgaaatcaggccatacggaagtttgggatacctggagttttgtgtgtatgatgtagagtatcggcttccaatagagcatctcgagctgatgtatggatttccaagcggaaaagacacaagtcatcgttttgacaagagagagcttcagtcattcagggccacacttcgtaagtgctctatttgcaagagagcggaatggaacctttgtcaatggggcactagaattgatggagacagcactgcaagagttgcttggtttagcatcggatggtacggttctagttggagatcagacagacactttggtctcattctacctaatcgagcacctgctgagttacagaggatgagctaagggacttaagaaaccaggaagaatggttctgggaggagttgtgacaccaattctgagagcttgcaatgtacctctacaatcaacgtcgattcctccaagatggattgatatgcaacaccttatcaattccaagagtttttggtcgcaggagaagaatgacctatataagtataggttcgatcaccccacagcaggacaatttatttttctcctcccaaatcccgctttcacttcgattagagatggtggcaacattgagttttgcccaccattagagaacctctatttttcaggtgatgaagttgtgccgatggaaggaatgaataatgatgagaccccaatccatcattcagataatgaggcagaacctatggacgtgtcttacgcaacacaacaattttactttgaggagtactccgcaccgagtcaaagtaaagactcaaaggaaattcacaagcgccttggtttcctccagagctggtgtatgttccacaacaaggctctcgcgacactcaacaagaagtttaacaatctccaactcaagatcaactgttcttcttcaactacaacaatgccacataacatgccttttgggagaaacggatccactcgtcatgaacctatgcatttcgatccgccttcaaccaccaagacagtcgtcatatga

SEQ ID NO: 158542 - DNA, 4321 bp, Arabidopsis thaliana landsberg
atgaggtaaaacaatttgatctaaataaaactaatgctttttaaatattgaacttttaatattagaagaaaaataaaagttttatcaataaataacaaacattaaagatgaattcacatatataagtgatatacataaattcaaatttatgaatagtagcctcaattattatatttaaatagccaattcgactattgaattgaaagttatgcataattaaaatttaaaaattataaaaacgtttggctattttttcaaaaatatatatatcgctcactcataaatcatgtaattgactgctctgatgatttttcaagaatataaaagtatcataaaaatcaagaacgtcgtagaaaatcatgatattattacaagaaaacatagtgttttccgaccaaattcctaccaaaactttggtaagaaaaaacacttaccaaaaccttcgaatttccgtcgaaatatattcgttagattgatgaaagaaatttctatcgtatttcctacgacatatgtagtaaaaaacgaaatattaaataaatatggaaagaaaatcctaccttaaaagattttgtattattgaaacctgaatctgatttacaattatcatgtcttagcatcgaattagaactcatggataccctaaaatacttggacttccttactcattttaaccactcatgttagttcaagtagctgactccccttattggaggagttaaccccgacactaaacctaaaccttctttaaagccctttatcacttgtgagtgtccgtgaggtcttattttcattgagcttggtagaaagtgttaggttcgtaacgtcagagatagtgtctcatgtagttctagttcgcgttttccgggctggataagactaggtaggcgctcatattatgggttgagatgtgtctaaaagaaagaaaaggggaaaaaaattctaggggaaggaagctaaagaagttagaaaaacaaaaaggctagtaaaggttttgggaatgttaaagaaaagaatggggttcttgttagctaaagaagaagggcaaaaagcccttagttttaaaagattaaaaacaggaaccatagttgttaaagaaatccaaatccgctagatgtatcaaagtgttgagaaagcttctcctagagttaagagaaaataaaaaaatgattagaaaaagggcttaaaagattcatgaagcctattctgtaagggactatctttgtctcttgacctttaccttagccaaatgaggtcattgatgatgcattgtttgattcacgttccagaactaataaatgttaaagggattggtagatttgaaaacatgtgtaggtcgagcataagagtcggattgattgataacaaggcatggctaacgtttttgagtagaattcgatcatatcgcaacttagaactatcaacttggacattgatttcataaggtttatgaggtgctttggctctgagtccccgctttcaaacctcacctccagcttgttcttgattgtttgcttgagggcaagcaaagactaagtttgggggagttgataagtgtgtattttgcatgttttgagcatccatttgtcatcactttagcatcatatcatcactgttttataccatttcacatcatttgtcatcactttgcatgtttaggatagttttgcatgcatgttgcatatttgcgttgatttcatgtgatttggagctgttgacgagctatctggaagaagcggacctgatcgtgacaaaccactcgacccagaggtcgagtaggagcttcaagacctcaagagaccactcgacccccaggtcgagcagaggacatcaccacttcacttcaccactcgaccacgaggtcgagtcccctcgtttccatccctcgatcacttcacaaaatcacttcactcgaccttgaggtcaagtgtcttcaccttcatcttcagacaaccactcgacctcctcactctacctagaggtcgagtatctccatcacaccactcgactgcatactcgatgacaagcttcagagccttcttcattccgcactcaaccagacactcgagcacaaggaagaaaagaagactctagctattcactcgagctctcactcgaccacgttggtcgagtacagttcttaacccgtccaaatacttcgtcgttttgagtattagggtttcgggatatttggctataagtagcatgtacttctcattttcgcaagagagttttttttacctagtttttatttccgcagaccttgtgttctagactttttgtaatccggatttctctttatctattcagtattcaatattcagtttctgttcttgattttcgtttactgttattcattctgttatcatactggtgctatcatgttttcaacctgttcaacgttaatgctttctgtcatgatgtctgagtagtgaataggattctgaggatgggttagagtagtgtagaattctcagtatgctacgtgattgagtatagattgatagatcccttctgggttagttgttcttaatgcctattgctttctgatcaactggaatttgagcccagacatttccgcgcccaaaaggtgttcgatgaaatgtctgaaccactaattccagagattcgtgaccatgtaccaaggtattggttgcagggagcgttttgactttaacttgtttattcgtaatgcctgttaggttagctctcgtcaatggtgattgagtctgggactaggttaacttgagagtctctgttgcggtggcacttagatttggttaatgaacttgttgtctaaggttaatttattgagtatgtcaatcacctgtaaactgaggaaacgaaactactcaattaccccatcctcgggaattctttatctgattgaactctttgtttactctactgttgtttactgcatcttgttatctgtcgcttaatttctgcagttcttttttgttactcgacctcatactcgaccacgccagttgtctggcaacagactgtgcagtcgagtatccctgttatactttctatctgttactcgacctcacccagtgctctgcaaagagctgtgttggtcgagtgtcttactgtttctgcttgaatctctggtccctgcatgtccactcagaactgctagaacacaccaaaacctgttattgcatggcttaactttgtgacttctaatcacatctcgattgttagcatcacacctatttggattgacaacctaaaatactacaacgatatgattggtgttttaggataattgactaaaaaacctattatcaaaccactctacatggagtaacctgaggggtatattgctgatgaacaaaaagatcaagtgtgcttgtgaaagaagtcactttatgggtttaaacaagcgccacgttagtggaacaagaagtttaactcctttatcatggatcaaaactttatcagaagtggtcatgattcgtgtgtttacataaaacaactgagtgatgaggagtttgtgtatcttcatgatacacgtgcatgatatgttgatagcagctaagtccatgactgaaattaacaagatcaaagaagcgttgagtacatgttttgaaatgaaggatatgggtgcagctagtcgaatactgggaatcgacattatcagagacaaaaaagttccatactcaagtgctattggcaacgttatgtatgccatggttggcaccagaccaaatgtagctcaagctattggagttctaagcaggtttatgggcaggccaggtaagattcattggattgcagtaaagtggctgctaatatacttaaaggggtctaaagatttgaatctggttttcaccagagaaaaagattttagagtttagggtttcagtgactctgactatgcagaagatcttgacaggaggcgttcaacgacaggttatgtgttcacagttggtggaaatacactaagttggaagtcaaatctgcagagtataatggcattatcaaccagtgaagcagagtatgttgctttaactgaagcagtgaaagaagctttgtggattcaggggttgttaacagaaatgggattcaagcaagagaaaattactttgtggtgtgactcgcagtcagccatgagtctgtcaaagaacaacacgttccattaaagaaccaagcacattgcgattaagtacaactttatagggatgtgattgaagaaggaagtgttgaagttctcaagatacacacttctcggaatcctgcagacatgcttaccaaaggcattcctgtgcagaagtttgaggctgctttagagtttctaaagctactaaggtgaggt

SEQ ID NO: 158543 - DNA, 980 bp, Arabidopsis thaliana landsberg
atgaagtttggatttccgttggcgttcacgacaacaatgctagcttggagcaatatagagatggcatcacagcttagggcccaccacgagaagggaaacgctctcagggctctcaagtgggccgccgattatctcattaaagcccatcctcagcctaatgtcctgtacgaacaagtgggtgaaggaaactcggaccacaaatgctggatgagacctgaggatatgaccactccgcgtacttcataccaaaatcgatgctcaacatccaggttctgacctagcaggtgagacagctgcagcaatggcggcagcgtctatcgcctttgcaccatctgataaagcctatgccaatatactcattggtcatgcaaaagatttatttgcattcgctaaggctcaccgtggactttaccaaaactccattcctaacgcgggtggcttctacgcgagcagtggatatgaagatgaattgctgtgggctgcagcttggctccaccgtgccaccaacgaccagatttatcttgattacctaacagaagcagaaacaggaggtccaaggactgtttttgcctgggatgataagttcgtgggtgcacaagtcttggtcgccaaggtagtttatgactatttcactaaagaaacatatcactgacttatttgacaagaaacaaacataatacaaaaatttgcaaatgcagctagcacttgaagggaaagtagagagcagtgaacagatcgtagagtacaagagtatggcggagcagtttatctgcaactgtgctcaaaaaggtgacaacaacgttaagaaaacccctggcggtttgctctacttcttgccgtggaacaacctccaatacaccacagccgctactttcgtcctctcagcatattctaaatatcttgaagccgcaaaagcctccatcgactgtcccgatggtgctcttcaagcttctgatcttctccaagtcgctcgttcccag

SEQ ID NO: 158544 - DNA, 894 bp, Arabidopsis thaliana landsberg
acaatcttatacacatttgttttagttggtttagataatgtcttgatgcggtttggttgcatatgcagactgaggctgagccagaagttgggagtttacttgatgatcttgggcttcgtgagaaacaacaatttgtgagcactttctgtggtcttgcatgatcattcattgccgattaagagacatattttgttctttttcttttgttgatttgctttgtgtttctcatccccttattagagcattctctatcttttcagccaatttcacagaaaaagcggtatattgtgcggaatggtgtacctgtgatggtaaataccctacttgtttcctttttctaatgggttgctgcttctttatgtaatgagttgttgttgtatagtttacgaggctgatatgttctcctgttatcatgctagctacctaccaatcccatagagctggtcacaagtagtgtgctctctacccaatctaaggtagatttctctagatataagtgtgttacttatttattacattgaaattacttgtcttgatagttatttgagacatattatatcaacgttgtataagtttctgtgcactaccaccagaaactagaagctctcttctaccaaagtgctttttatcttaccagtatatcatagatccctaatagtactaggttttacttgcagtttcaaatcttgttggaaccatttttatggaagaaaaagtcctcaaaagtctcagatgcatctgctgaagaaaggtgattataaacttgtcttccagaccatcagcaatgttagtcacagaatattataacttcagcgtcatttcccattttctctgctgtagtgtaagcgagttctttcaacgccattttggacaagaggtttgttgctacctatc

SEQ ID NO: 158545 - DNA, 554 bp, Arabidopsis thaliana landsberg
  unsure (1)..(554): unsure at all n locations
tcgtatccaaagaatacgacgaaacacacaaaaaaaagtatggaaagaaaaaagcaagaacttacataaattggtttatagaaagaaaaaataaaggtgggccgtataattggagtccaaatttcttcaataattattttatgtcttcacttatctaaaaaataaaataaataaatcttctctccactgacattggtaaaggcatagatcaaagacagaaacagctgttcttcatcatcatcgtctctcccaagaaaaaccatgataatgaagaagaaaggaagagtttatccatctcctcctcctcctcctcaatcttcatcatcttcttcttcttcgaaccatatcaacgaagaagatgatgattctctctctgtgttgaagcttcttnnnnnnnnnnnnnnnnntcttgtttctgttctctcctctgaagaaagagaggttcttgcttacttaatccgcacaggaaccaccatttccgatagaggaaaatcatcttcaaagaataagacgaagaagaagagcaacaaatctagcaaaaagggctttccccc

SEQ ID NO: 158546 - DNA, 546 bp, Arabidopsis thaliana landsberg
gaatacaataaaagagagtgagagatggctaaatcagatatgttgccgttcttggcgatggtgttggtgcaaatcggctacgcaggcatgaacattacgtcgaagatggctatggaggccggtatgaagccactcatcctggtcgcttatcgtcagatatttgccactatcgccacttttccggtcgcattttttctcgaacggtaaaaaaaaaaccatactaatatctgcccatatacatcttatttgatcaactaacgattttagacatgtatgaattacacgattaaaacaattgcatcgatgaaatgttgaatttgttttaattcttgaataaagcatatgggtgtttttattacttttttggggttaaaagtaattaggttttaggtggtgagtctatgttttacaaagatcagcaagaaatgctaaactttgattagctaaatttttcttttagcattgtttttttgtgttttcaagtttgtcttaactgcgaaagtagaaaatgatgaaatcatattcatcaacataaacgtcaaaatg

SEQ ID NO: 158547 - DNA, 1476 bp, Arabidopsis thaliana landsberg
ctcctctccggaccatcagctgcgtcgccggagacgatgaaaccagagaagcatcttctcttccttcttcgatatcttcgcttttcgtgaaaggtatgtctgatctgattcctccctctttgaaattatgttccactgtatttaggtttctacgaaattgaatccgtttccactattagggttctcggattcagtgagtgaaggacgtttaaagaaagtcttctccgagtttggacaagttaccaatggcgagtctctctatataggatgactcataatctcatatacaagaacattgaatatagtgaataggttgatttgaagctcattgtttagcttgtgactgttcaatcgtaaacgagaatgaagcttaggaggttcattagggtgagtagaagaaaagccagagaatttgttatgctgatcaatgatttctctttaagctcttgactgtgataagcaatggtgtcagagcttccattgtctactctatgatatctaaagctcctaaatcttatttggagtagagcttgtggtactcaaatagtgaagacctttgtgaggtttttgttactatgagtcgtggtccgaagcaataccatgataagaggatgaaagatatgtgcttttgatatcacaaagtggtgttgagcagaagcagaaatggaagctctgaaacgaaaaaacaagtcctcatgagctaaagagaagctattgatttgctgaaaactttctctgcttttcttcgttataatcacgtctttagatagagaaagaaatgagagaattgtggattcttgtttgatactatttatggtggaatcattggctagatattatttgttgtttcttagtgtttttcttttcccttcatataactgtaaaacctacgctaggtcgattataagcaaaccttgtggttagtgagtcaatttttaacagcattaagagtatcaataggttagcttgattaaggaatttgcgatttagcatcagtcagaaacccgttcaatcttatttttcttactgtagagcactacttttctggcagtaaaaatcatcgcaaacgaaaggactcggcagtcactaggatacggatatgtctggttcaacagcaaagaggacgcacagtcggctgtcgaagccatgaacggaaaggtatattataaacttctttgaattcaatttatcctctatggtgtgggtttcatactttagtgggtcttcaagatccatttgaccaaaccttataacttgatcccggattggttatttgttcttgattgaacaaataacatgaaattgttgttgatactggtttatgttttagttctttgatggcaggttcattcttgttaaatttggtcagcctggtttgtcccgtcgccggagaccacattccgatttcctttttgtaaataaatgatcttaaccatttactgtatgttgttttatgagagaaggtaatatacaata

SEQ ID NO: 158548 - DNA, 1357 bp, Arabidopsis thaliana landsberg
gttggcttcgtctgatcggcgatcatgaatccaagcccaataacgattgatctcatcttggagatattggcgagattgcctgcaaagtcagttaagaggtttcattgtgtgtcgaagcgatgggcatcaatgcttagttgtccacatttcagagagttgttcctgaccaggtcctcatctgctcagccgcgtctcttattcgccatcgaaaaacataatcagtggagcttgttctcgttgcctcagcgtctgactccatatgagaagtcttcttcgtcgtctgttgtagtaacccctgaatttcacatgaagttccctccagatggtatgctgatctatcctcgtcatgaccgacggttttcatttggctatgcctctggtttgatgtatttctatggtatgtggatcaacgagcacaattacgatggagtgcctgtgatatgcaaccctttaacaggacggtatgccagcttgccttttctggaaaggtatagaaagacgaattaagctttttcgggtttgatccgattgacatgcaattcaaggtattgtgcatggcttatccatttggtcctgataatcagtaaattcttacatatgaaaccggagaaatgaggtggagagagataacatgttccttaacacatgatattgtgagtgaaaggatatcaatatgcatcaatggggttttgtattacttaggtgacacgtgtgatgtttacaacgatgacacgtctgagaagatgcatgatttcaagtttatttacctagagagcttttgtcatttgattaactataagggttaggtttgatttattatgatgatgtcactgatgatgccatgaagttgcgtgtgtggattctagtggatgtagaggaacaggaatggttaaaatatgcttacagtttgagggatgataaattctttactcatgacgttttcgttgttggagtgactgctacaggtaaaattgttttgtccatgcaaagttttacatctggaaaaccgttttatgtttctacttcaatccagagatgaacactatccaacgtgttgaaatccaaggttttggagaatgtcagcatgaatatgactactatcgtagtagagtagtttacgtcttcgcagaccatgttgaggataataatgttaacgatccaaagctactcgagtcaagtatctatgctccatatgtgaagacagaagattaagtatcagaatcagaagaagaagaagaagaagaagaagaagaagaagaagaagaagaagaagaagaagaagaagaagaagaagaagaagaagaagaagaatcaaaagaacgagaaaaggagaagaagatagagacggtcatcggag

SEQ ID NO: 158549 - DNA, 609 bp, Arabidopsis thaliana landsberg
atagttggggacgaggttacaagcaccaattcatcttcagcatcatatccaaatccttcttaaaattttcttcttcctcctttaccatctccagcaccggacctagtcaaaaagtctttcttctcaaatggatcaaaagcctcttggattgctcacgatccacgtcaagagagggattaatctcgccattcgcgaccatcgtagcagcgatccttacatcgttctcaacgtcgccgatcaggttccttttttattgtctcaattctttctccttgaaatcgatagagaacaaattgccttatatgaatcaagtctccgaataacgattcttctctgttcctgaattgttcatatgaattcaggatttgggttttcttcaaatcctctgttttatctcctctgctttgggtttttatcaaatcctctgtttttatttcctctgctttgggttttcttcaaatcctctgttttatttcctctgctttgggttttcttcaaatcctctgttttgttttgtctaatacaaaaccaaaaatgaaatctttcagacattgaagacacgtgtggtgaaaaagaattgtaacccagtatggaatgaagaaatgactg

SEQ ID NO: 158550 - DNA, 450 bp, Arabidopsis thaliana landsberg
  unsure (1)..(450): unsure at all n locations
tgtcttgagaagtagaaattcattttctagttgatgatatcaactgccatgcttaattgtgatgcaattgtgtctcaggtatccctacaacaattntttgcatcaccatgtggagaatgtaattctctcatgtatggagagcaaaaactctcaacttgttgaccatcttctcagtgagtgcaatcttattgggagtatactagaggcggaaaaggactccaacataactgctggtgattctgataaggtgaagatacttaattgctaatgtctgaggttggcatcattatttattaacttggtttacatgcgatgtctcagcttcagcctacagtccctgcagagggtaaaaagccactcaggattggaaacatcggtcatttgactcgtatctccaacaaacttcttcagctagctaatagcaatgtcgaaattcagtcacatttgcag

SEQ ID NO: 158551 - DNA, 2004 bp, Arabidopsis thaliana landsberg
ctcatcaccaaacctcctctctccctctcatttacctctctttcctcaatgctcccttctctctctctctccaccgccaaccgccacctctccgtcaccgacaccatccctcttcccaactccaactccaacgccacccctcctctccgtatcgccatcatcggattcggaaactacggccaattccttgccgaaaccctaatttctcaaggccacattctcttcgctcactcccgatccgatcactcctccgccgctcgccgtctcggtgtctcatacttcaccgatcttcacgatctctgcgaacgtcatcctgacgtagtccttctctgtacttcaatcctctccatagagaatattctcaaaacgttgccgtttcagagactccgtcgcaacactctcttcgttgatgttctctccgttaaagagtttgctaaaactcttctccttcaatacttacctgaagatttcgatattctttgtacacatccaatgtttggtcctcagagtgtgagttcaaatcatggctggagaggattaagatttgtgtatgataaagttaggattggggaagagagattgagagtctcaaggtatgagagttttcttgagatttttgttagagaaggatgtgagatggtggagatgagtgttactgatcatgataagtttgctgctgaatcacagtttataactcatactcttggtaggcttttggggatgttgaagttgaaatcgacgccgattaatacgaaagggtacgaggcgttgcttgatttagctgagaatatctgtggggatagttttgatttgtattatgggttgtttgtgtataataagaactctttggaggtgttagagaggattgatttggctttcggggctttgcgtaaggagctttttagtcggcttcgcggtgttgtgatgaagcagtcttttgaaggtgaagcaaagaaagttcatgttttttctaattgtggtgagaatgatgcttctttggatatgatgaggtatgtagttagttagttagttgcattgtgtggtgtgatgcattttggatttggtttcttattgtaaatagttatcgatttgtgatcttgcaggtcagaagatgttgttgtgaagtatgaatataactcccaggtgtctggtagtgttaatgacggttcgaggctcaagattggtatcgtcgggtttggtaattttggacagtttctaggaaaaaccatggtcaagcaaggtcacactgtgttagcctattccagaagtgactacactgatgaagcagcaaagctgggtgtttcgtatttttcagatcttgatgatctatttgaagagcatcctgaagttattattctctgtacgtcaatcctttcgactgaaaaagttctcgagtcactaccgtttcagagactgaagagaagcacactttttgtggatgtactttcagtaaaagagttcccaaggaatttatttcttcaaactctcccacaagatttcgatattttgtgcacgcatcctatgtttgggcctgagagtggtaaaaatggatggaacaatcttgcctttgtgtttgataaggttaggattggaatggatgatagaagaaaatcgaggtgtgacagttttcttgatatctttgcccgtgaaggatgtcgtatggcggagatgtcgtgtgctgaacatgattggcatgctgctggatcacagtttatcacacacacagtgggaaggcttctggagaagctgagcttggaatctactcctatagataccaaaggttatgagacattgctaaaactggtggagaatactgctggtgacagctttgatctgtactatggactatttttatacaatcctaatgcaatggaacagcttgagaggtttcatgtggcttttgaatcattgaagacacagctctttggacgactacattctcaacattctcatgagctagctaaatcatcttccccaaagacaactaagctattaactagctaa

SEQ ID NO: 158552 - DNA, 953 bp, Arabidopsis thaliana landsberg
tcgatcccgcttgaagagactccttccagtgggcgctcaaatgggattgtgtgtagttacatgtactacattgcgattgattgctggaagctgcttcggtaacaactgctattcgagaggacatcttcttgtagatggggattggtaaaggtctctataaccttttataggtggcttgtgagttatacacaccacaccacaccattacatgtctcttactatgaggtttatccaataaaatcatacccgggatttggtattggctgcttgggaaagctgaattctgcatacgaaaacgattaagagtttatgattggtttctacaagtttctcgcaaagtaagctcttctcttcacggtgttatcagaaattcgattcatatatatgaggggctgatttcacagtttaatagggaggagatggcatgtgaagaagctgagcttggacaagatggatttgaacagaaaatgaaagcactacaacaattacaagaacaggtaatgttagctttggttactataagaaaactatctctccaaggtcaatgtctaactattcgaatgtgcttactgcagcaactagagatgcttaagtatatgcgtaaattctctctggatgatcaatctgctatccttcaaaaggtaaacaaaaacaaaaataaaactgtttttacactttttaactaccatgataatattttccattagcatgaacagaaaaagtgttttattatggcttttggtccatcttgcttaccggtaaatgagaaactgtctgagtctagtgaggactgattcatattagattggtctaatattcgttgttcttgtccaaaacagcttcagaagcaattagaaaatgcgggttttgagccggaggcgtctcttttgtcaggagaggaaatggaggaagctggaagaagaagagtttcacctgtttttggaagcagatag

SEQ ID NO: 158553 - DNA, 802 bp, Arabidopsis thaliana landsberg
tcacggaaaccaacgccgagaattccgtcgaacacttgagctgcgttttaaagttctccaaatggcgccttttgcctactaaaaaacctttaccttcttcacagagatctaacctctccttttcccaatgttcggcactccgtcttcatcgccgtcattcggcactccgtcatccacacccgcctttggcacatcttctccggcgttcggtacaccgtcagctacgcctgcgttcggtacgccatcgaatccttccttctcctccggcggatttggctcttcactcttctcgtctcccttctcatctcaacagccacagcaacaacaacaacaacaacaacagcagcagcagccgagttcactgtttcagcaacagccatcttctaattttggttttcagtcaccattcaacaacaccgctcagcagcagcagcaaacgcctttcccaaatgctcaattgactactcagatggctcccgttgctccaattccttactctctcgccgatcgtgatgtccaggtttgctatttctttgattccagatctacaatccctaaaccctagtctttccattgattgataagccttgattttgatttaggctatcattgaagcttataaggaagatccaacgaatcccaagtatgcttttcaggttagtttaggtggaaaattctggattctttagctatgtggtgatgatttttgtttatgttaactgttgtttcctttgttatgtagcatcttttattcagtgtgactgaaccacagtaccgggtgaagcctgcagctgtatcagat

SEQ ID NO: 158554 - DNA, 1172 bp, Arabidopsis thaliana landsberg
tttcatatacttcttatacacaaatctatgtacatatgctatgaatgtcaggaatatccggaagaatgtaggacttatgattatcatattttcaattcagaaagaagagagaagctggtggacacgactgctgaaatcggaagagaaacctgcaccttacatcaaagtcgactggaataaatggtgtgatgaggatgaggaggtcaactgtaagtcgtaaaaatatatgttacaagccaaagttctcttttcagttcaatctctagatgataatcgaaaatcttctcatattacatgcttgattaagtaaccttgtttgaaaagacataggaaaatcacaagtattctgatctctatatgataatttgcttctaacgttagactctttttcgtttctgtttcaactgaaacagcctctgatgatgagagtgcagtaagtgttttctcataatcgcctaatgtatatctttctattgttgtttagtaaagccaccctgtttgattattttccctctttattttcatagtttgttaatcaagatagtgaaagcagcgatgacgatggattgctctgtaagtttcaagaatctttatcttcttatagcaatgattacgtacatttcacatattatatctatgtatacctgcaagtagagattaagtgaagattgatggattattgtgttaaaggccaaagtattagtagcaaactattatgtgattcagttctggttagtgccaaatataaatctgaacttgtctgtactgatcttactaataacattatatttggtcagatcttcctgatctggaaaaggcaagaaacaagtagcttaaccgcaacaacaaccaaccaaccaactctggaagatgaagaaaaagtaaaagactacgagctgaaacatagtgctttaggatgatccggtttgttctgtacctgactaaaccgaccacctatctcttccggtttactcaggtttacctctgatttaggtttcgtagggtaatcagcattagttgtctctgatgtagtttggcttttttttctgttatggttggttcacaagttagggttcggtatgtgaattctaccgagagtaggaacttataaagtaatgtaagggttgaactctaatagactaataccgttgaatgactatgtctttttcaat

SEQ ID NO: 158555 - DNA, 178 bp, Arabidopsis thaliana landsberg
tgtaatgcaaacagatgagatgtgatcagaagtcactaagtcaagccaagcaataacaggttttggaatttctagcagtcctaagtgaacatgcagaaaacagagaatcaagcagagacagtaaaacactcgaccaacacagctcgttgcagtacagttgggtgtggtcgagtgacag

SEQ ID NO: 158556 - DNA, 934 bp, Arabidopsis thaliana landsberg
ctctcagggagtgcggatgttccctaattccaatcaccacgaagaaactacacaagtttccatgtcgatgccgggtttccagtctcatcattatgcaccaggaggaagaagcttcatgaacaataacaataactcacaacctttggtaggagttcctatcatggcacctccaatttcaatccttcctcctccaggttccattgtagggactactgaaattaggtacccactagtcatcatatcatacagaaactctttctacattttcatagttgactaaagacttatttttgtcagatcttcttccaagccaataggttcacctgcgcagttgacgatcttttatgccggttcagtttgtgtttacgatgacatatctcctgaaaaggtatctcaatcattttcttccatatatgcatctcttttactcgtaaggtatggtactcatttgctttattctttcatttctcaggcaaaggcgataatgttgctagctgggaacggttcctctatgcctcaagtcttttcgccgcctcaaactcatcaacaagtagtccatcatactcgtgcctctgttgattcttcagctatgcctcctagcttcatgcctacaatatcttatcttagccctgaagctggaagtagcacaaacggactcggagcaacaaaagcaacaagaggcttgacgtcaacatatcacaacaaccaatctaatggatccaatattaactgcccagtaccagtttcttgttctaccaatgtaatggctccaacaggtaaaaaacaaagtcagagacctgatactacattcgccatctaacttactagtattttcatggatgtaacttcattctcgttctgtttcttatgcagtggcattacctctggctcgcaaagcatccctggctaggtttttagagaaacgcaaagaaag

SEQ ID NO: 158557 - DNA, 722 bp, Arabidopsis thaliana landsberg
agccaacttgctcattgttcaggacgatgaagacttgacagaagaacaaattaaggatgaaatcaagaaaatcaaagaggcatatgctgatgacgaaggttggtgtttatttcctctgtgtggagttatgttctgtatgagtcattgtgtgtctgtgtgtataaatgcaaatattcattttagtccttgtagagtttctgtatctctcatgtgctaattgattttgtcttttctgtttttactcattaaaattttcttttatgttttgtcagaatttccagatgaagtagagactcccattgatgttcctgcaagaagacgttttgcaaagtacaggggtcttaaatccttcagaacctcctcgtgggatccaaatgtaataacactgtcttgatgtgaatttcattatatttttcacagttaagtgttgctaattttttataatttattggcaaatgcaggagtctttacctcaggactatgctagaatttttgcttttgataatgtcgcaaggactcaaaagcttgtgctcaagcaagccctgaagatggaagaagaagacagagatgattgtgtaccaattgggtcatatgtacggctgcatattaaagaagtgcctcttggtgctgcctctaaactatcttctcttgtgaacacaacgaaaccaattataggatttgggattctccagcatgcatcaagatgtcggttctgcatataa

SEQ ID NO: 158558 - DNA, 445 bp, Arabidopsis thaliana landsberg
ctcctctgaaatttttaagacaacatacatttcttcttctctttgtttgacccacattttctctggaaaaaattcgtctactttctccgatcgtctcttcattgatcggaaaaccaacaacgacccattattcctctcctgtttctggcgcaaacccttgtatcaagttttgattcttggtaagaaaacatttagggatttgaagagaaagaacacgatgatgacgagtatggaaggcatggtggagaaaggagtattggatgatattataagaagattgttggaaggtaaaggaggtaaacaggttcagctttcggaggtcgagatccgtcaactttgcgttaacgccagacaaatcttcctttctcagcctaatcttctcgagcttcatgcccccattcgcatctgcggtctctttctctttctctccctctctttgtggtga

SEQ ID NO: 158559 - DNA, 371 bp, Arabidopsis thaliana landsberg
tgtagacgaaacgcatcatgtccctggatataggattgctaatggccggtgcaaaagaaaggggagagctggaggctcgagtcactgctttgataagcgaggttaaaaaatcaggttagtgatctgaaatcttaatacgtcaaagacttctaaaattagtatggcacattcctaacagtgttttttctttttgttctctcataggtaaggtcattctcttcatagatgaagtgcatacacttattgggtctggcccagttggaagagggaacaaagggtctgggcctgacattgctaacctcttgaaaccatcactttgaaggggtgaaacttaagtatgaatgctgaatgaatcgatgttttgctgtttt

SEQ ID NO: 158560 - DNA, 1089 bp, Arabidopsis thaliana landsberg
atgggtcagaagaaaaaagctcccgcgccgttggattcggctctgatcaagctcgaatgcgagaaggcactgaagtcattcggtcgtgggagctacaacaaagcgattcgtctcattaaggattcatgctctcgccatcaagactctgccctaatccaccgtgttcagggaactatctgcgtgaaggttgctgctgtctacgaagatctagctacgaaacagaagtatctccggaatgcaattgaatctgctagaaaagctgtggagttgtctcctgattcgattgagtttgggcatttttatgccaacttgctttacgaggctgctaatgatggaaagagagagtacgacgaagttgtgcaagagtgtcatcgtgctctctctatcgaaaatccgattgatcctgctaaagagagtttgcaggatgaaactcagcttaagatattgacacctgaggctcgtattgttcatgtgcaggatgagctcaggtcactaatacagaaatccaacattagttcattgtccacttggatgaataatctgggaaaaggtgaagagaagtttcggttgatacctattaggagaatggctgaggatcctattgagagtaacttggttcagaccaggaggcctaatgagattaaaaaggctaacaagagtattgaagagataaggaaggaggttgaagttagggtagctgcagctaggttgttgcagcagaagtcagagtgtgagaatgtaggcgctgttgacaacaagggatcagatgcaacattaggttcggggaagagaagcggtgagaggagaaagcatgggaatgcaaggagaaacggctccacagcggatagaagggatcgggttaagtcatactgggattctatgagcaaagaaatgaagaaacaattgcttagagttaagcttagcgatcttaagagtcattttagtgcttcaaaggatgggaatgaaaatgagattattagtgaagctctttccttttgtgaggccaataagacttggaggttctgggtttgctgccagtgtagcgaaaagttcataaagtctgaggcttatatgcatcatattgtgcag

SEQ ID NO: 158561 - DNA, 1425 bp, Arabidopsis thaliana landsberg
atggggcatggacatcctgtcactaagcagccctcacgtcctgcaagtcgtaatacctttgatgaaaatgttgactctaagaataatctgtctccatctgcatcgcaaggcattggtgcaccatctccatacagctatgcagctgttctgggttcgtctttgtctagaaatggaactccagatccacaggccattgctagggtgcctagtccctgtcttactcccattgggagtgggagagtgagttcaaatgataagaggaacacaagtaatcaaagcccgttcaacggtgggctcaacgagtcttctgatcttgtcaatgctttatctggcatgaacctgtctggcagtggcgggttagatgaacgtggtcaggctgagcaagatgtggaaaaggtcaggaactatatgtttggactgcaaggtgggcataacgaagtcaatcaacatgggttcccaaacaaatctgatcaagcccagaaggcaactggcttgttgaggaattcacaattgagaggggcacaaggatctacctataatgatggaggtggagtagctactcagtaccagcatcttgatagcccaaactattgtctcaacaattatggattaaatccagctgtagcttctatgatggctaaccaacttggaactaataactattctccagtgtatgaaaatgcttctgcagcatctgctatgggattttctggaatggattccagacttcatggtggaggttatgtatcatctggtcaaaacctctctgaatcacgtaatcttggcagattcagtaatcgaatgatgggaggaggtactggtcttcagtcacatatggcagatccaatgtatcatcagtatgctgattcgcttgatcttctcaatgatccttccatggacatgaactttatgggtaattcatacatgaatatgcttgaactccagagggcttatcttggagcacagaaatcacagtacggtgtcccttacaaatccgggagccctaacagccacaccgattatgggagtccaacatttgggtcatatcctggcagcccattggctcatcatcttctgcctaattctcatgtgtcaccctgtagccctatgagacgaggtgaagttaatatgcgatatccctctgcaacaagaaactacgcaggaggggtaatgggttcctggcacatggatgctagtttggatgaaggctttggatcttcaatgcttgaagagttcaaaagtaacaaaacaagaggattcgaacttgctgaaatagctggccatgttgtagagttcaggtattcccttgaatgtcttttatcttttttcttgtgtacaatttgtcccaagctaacgtgtacttggggattttcatgaccagttcggatcagtatggaagccggtttattcagcagaaactcgaga

SEQ ID NO: 158562 - DNA, 653 bp, Arabidopsis thaliana landsberg
  unsure (1)..(653): unsure at all n locations
aaggatccagtccctaagaacccaatagagggtaaagaagacaggttggtttggtatttgtttttctccattaactacagatcttatttattttatttcacttgtttcatggttgtaactccttaatttctaacatttcagggatgcagtcacttttcctggatttgtggataccgtctatcttgatgctcccaatgaattgcagtttgataatggcttgggtgataaaataatcatcaaaaacacaaagtacatttactgagacacttatatggctttctacagggtctatgtttcgttctgtgcctcatgagtactacttgtttttgaaaaatgcagttggtcggatgcggtcttgtggaacccgcatactcagatggaggcttgttacagagactttgtgtgcgtggaaaatgcaaaggtatatcagtttacacttaagtctttcctctttacaaaacttatagactcaaaagtttataactcttccttgtcatttttaattctcagcttggggatgtcaagctagagccgggannnnnnnnnnnnnnnnnnnnnnttctcagcatcggttgaaaacattgtactttaaacttataatgtccagtggatccattttcttaagcaataaaagttttatttcctctcccaaa

SEQ ID NO: 158563 - DNA, 554 bp, Arabidopsis thaliana landsberg; identical to SEQ ID NO: 11825

SEQ ID NO: 158564 - DNA, 732 bp, Arabidopsis thaliana landsberg
  unsure (1)..(732): unsure at all n locations
tctcacaccacaccaaccacttcttcttcttcttcttctacataaaacctaacgccatggattcagatttcggaatccccagagaactctcccctcttcagcaacttcgatctcagtacaaacctgagcttcctccttgtctccaggtcccttcttctacttcatagatctacttccttccattgttcctatcattggatttatttgagtacttagtttcttattcaatattatcattcttggatttctgcaactattccaagtttttgtttatcttaattcgatgaactttgctccttaagcagatctgatttcgagattgtattgttctcggatctgttttatttcgattcctaagtttcattggcagtctcttcagctttaatcagttgaactttgtcattttcttattctggttgaaattcgtttcaggggactactgtccgcgtggagcttggtgatggaaccactgtggctgaagctgctgattcacataccatggctcgtgctttcccgcataccttaggccagcctttgnnnnnnnnnnnnnnnnnnnnnnnnnnnnnnnntgatgcgcacatcattaccgagcttccttcagttaggtgtgtgaatctgtttgctctctatctatatgtttctggattggcgtttgtgttcgatttaccttctattcagcttaagttagttcaatttctaaagtagagttggaattgtgttttgtgaaggcaa

SEQ ID NO: 158565 - DNA, 1695 bp, Arabidopsis thaliana landsberg
atgacaaacgtgtggctgtcaatggaacatcaagctattttgtggtgtaaccaattggttgttcaagtaggtaaaattcccttatttgtaatctggaaatgccatgttcaacgaatttgaaaatttgtatgccatgcaggtttcacatacgcttcttagtatggttgactcgaaaactaatcagccattttctgatactcataagagactttgggttttaaccagaatgcttcaaagtgcattagctcaaagtttcaatggaatgacacccatggaagtctctcatgagttacccatattggcctcaaagggtaatagtaccatctctaccctgaacatatgtatatcttgttttctctgaaaagaagtcctcaaataaaggatataaatttcgttgtattataagcttgtctaatcgtgggggttattaacatttatcagtatatgttcttaagtaatccgaatataaaaagctggaggtatattttatctatcaaacaattgcaatggctaattttgagaacaattcattaggtgtacatattacttgtgggtacatggattctcttatcatattactgtctatgtttccaggctctacgtgtttcctggattggagggatgatgctctcgatagggctctatacatacaagctagcactgtcgcgattttggcaatggacgagagaaggcgcaggttggacatagatttattggtcagtgctgatagtattcctttagggatgtcattttagacctatatatcacttaaataactatatcgatctcccatgaaacattttctgtacaataggggtcaaatggaaagaatcactttatatttgtcacaaatctggtgccttgttgtggagtaagactccatctatggcctgagaaggagaaatcgaattcaaatttaccggtttgtgaaagggtcttggaagttacatcaaagatggttctcattccggcaggccctgcaccaaaacaggttaatatatactgtgtctgacaaagtaatttagtgatcgactgcaacattgctggatttgtttcctgtaacacaaactcaacgttctttgtgtatatgtttactagtcggaaccagggagtcagactgaacaagctcccccatctgcagtactgaagctggggcctgaagacatgcgtggattcagattcttgactatctcagttgcgcctcgcgaagtattttctcaccttgatacatatttggtttctttcaaatttcagcagtttttgaatgacaaaaagcatgtaactgaaatgagaccttctcttgcacaggccgtttctggtaaacctccagtagcagtttccatggcagtagggcagttctttaatcccggagacggggccgtggaggtctcatctcaatcaatgctcttatccacttactgggcaaaggttattattctgaaaagaggccacacttttcctttgcatctctaatgctttgaactaagctagtgaagtcattagttacctgatttcagttttgggttacttttctgcaggaaatatttttgaaggaggaccatcctctagcttacaatctatcgttttctaccagcttaggtctattgcccgcaacactgtccctgaaaactactggatgcggaattaaaacttttggtttaccagacggcgagacaggagacttggacaaggata

SEQ ID NO: 158566 - DNA, 1220 bp, Arabidopsis thaliana landsberg; identical to SEQ ID NO: 6490

SEQ ID NO: 158567 - DNA, 869 bp, Arabidopsis thaliana landsberg
cgggagagcccaacgaagagacatatcgccatttcaaagctaaacaaccagataataatactgaggtgttttcttcttttctcactgatttctctatgaaattgccacacccaaagtttgagtcttttatgttttgtttcctcactgatagtgtttttgttgtttagctcaaatcattgcttaattttttttctctttgtaacaactttactgtctttgaaaattgaaagaaaaaaaaacccaatgattcacgggtttcaatccttttcgatttaatctttatataagccaccattgaatcattaataaaataaagatctttgatgagaagaagaaaataaaaatcattttttttgcaggtttttatgcttataattggggtgaaagagacaaatccagagtgtgtgtaaattaggtacgagaagaatttcagctaactcttttgagagaggagaaaaaagtaatagatggttggggaaatgacgaacaatggaagaatccggccatcttttccggtgaaagatctgaccagtaatgaaggatctgaatatggtggccctgttgagtttaccagagaagatgttgaaactcttcttcatgagcgaatcaagtacaagagcaagtacaattacaaggtctctctttcctttttttcttatcttcttaatgtttggtttggtgtctgaattcgagatctctcacttcatgcaatttacataagcaagtctatcaaatgggttatctttgcaggagagatgtgagaatacgatggactatgtattacgttgatgatcgaagtttcaaagattagaagtccaagagtatgggacattcacaagtttaaatacaagagttgtttgaataccctt

SEQ ID NO: 158568 - DNA, 378 bp, Arabidopsis thaliana landsberg
atcaatgtaccagactgatttgtatcttgtaatggaatgtgtgtaggagcggaagatactggagagaggccctgaaaactggcaaaaagcttgctttatcccaacaaaatcagacgctaatgtggttacattcaggagatggtttaacaagtacagcgaggctcgagtcgattggagaggaaagtttgatccatttcttcttcctcctacgcctccccgagaacagctcttcgacaggttatttatctcgcttgtgaggtttaatgaaaagtagtgctaaacatcctaatgataaaagttgcgtgttccaggtattggtcgcatgttgagaactgcagcagctgcaagaaagcttacaaatatctcaatgcgctagag

SEQ ID NO: 158569 - DNA, 295 bp, Arabidopsis thaliana landsberg
caattgccagtcggaagaaaataaggtcgaaagcattaaaagggacaagacagctacagaaaagctgctgcaagagaccatagaaaaacatcaagctgaacttacttctcagaaagactattactcaaacgcattagctgcagcaaaggaagctcaagcgttagctgaggagcgtaccaacaatgaagcgaggtcagagttagagaatcgtctaaaggaggctggagagcgggaatctatgctagtccaggcgctggaagaacccaggccccccttaagcaaaaaggagcaacag

SEQ ID NO: 158570 - DNA, 469 bp, Arabidopsis thaliana landsberg
  unsure (1)..(469): unsure at all n locations
ataaaaatgagtgcagcagctacaatgcctatgccccgagaagcgtctaattacgatgagatctctatgcaacagagcatgctcttctctgatagtctcaaggtagattctaaagtatcaagttgaataatcttaatggattttgtgatcattgctaaagccttaaatcttctgtttacatgttctgcaaatagtttagtaaacatctttgttatacaggatctgaagaatctgagaacacagttgtattcagcagctgagtatttcgaactatcctacacaaacgatgaacaaaaacagatgtgagtgagtttattcctctccctaattgtgattgttctcttttcttggagttttgtaagtttttacttgtgtatgtagagtcgtggagnnnnnnnnnnnnnnnnnnnnnnnnnnnnnnntgaatacagttgaccatttggggtctgttacatataaagtaaatgac

SEQ ID NO: 158571 - DNA, 1894 bp, Arabidopsis thaliana landsberg
  unsure (1)..(1894): unsure at all n locations
atgccgaagtcactattcactcgcaatgggtccggtttatctcaaaaaatggatcaaagccacgcttcacacagatttgtttcggttcatctcgtaaaacgtgccaaagttattgttcacccacaacgggtctggtttgtcttgaaaaacgtgtcgaagccacgtttcacagagatatgttttggttcgccttgtaaaacgtgccaaagatactgttcacccgcaacgggtccaggttgtctcgcaaaacgtgttgaagctacgcttcatatagataaaacatgtcgaagttactattcactcgcaataggcattgcttgcctcgtaaaatgtgccgaaagcacttaaaccattctctgtcttgtgcctaactaacatatccaaattttaaagataggcctgtcaagctcaagagaactctcgcacaacggactaagggggggggggtgcttattgttggacatggaccatgccccttttatcttagaaggcccgaaacatatttcaacaaggaagaggcctttttaccttcacagggtacgtaggtagtccatcatggatgcaactataccttctaaaaatcctaattctttctatgtttttgagcaaaacccaaatgtatttcataagacgttaaaacctcctttgtaatcgagtcttggatagaatacctagtgaagagaaattactagatttgttttccccttttaaacaaatctatcgtgtgaatccttnnnnnnnnnnnnnnnnncgtctgtgnggaatacaaaaaactcttaacgcgtatcattcatctaagtattcgctgtacgctcaagaagccaaaacaaatagatccgtctacttttggggcgacctcccgtcaaagtccaatgaaccaggtgacgagtaacatactcacggattgcctcatagatcagctttccatgtattctatccatagttcaatccgacatctctgctcaaagttatcgacatttttctgaagtcgatgctgtctgtttctttacagatccgtctgaatagaccagtctgacttggaaccgatttcccgacaagtcacagtgaatctcgcaacgagtaatatgttccacagaattggaccacgcctagttcagatacctcttctgagagttatctccgtttttctatgtcagaggtaatctgttagagtacaatccgtctgaaatagtccagctagcctcggggctgatttcccgacagatcacacagaatctcgtgaagggttaatacatctacggatcgcccagagagtcgtcttttcggagaagttgacctcgccttaatcgaagatatatgctgagagatataaacgtttacctcaagcaagtgcaaccagtcatgagacccaactctataaaaccagtcagcttcgggatcgttttccttgaaaatcctgatgaactaggcagtgatatacctatctacaggtcggcttctttgcacttgacacaatttccctgacaaatccgcagctgtcggaacagccaacttacgaatcaaactccaagcgacctggaaagaaacaagatacaatctacgcgacaacggaaagcttcgagttttatagagacctatctcatctctataggtgaattctttcgatgaatatcgctgattttctactgataagcctctaggtcagagattcagttatgtcaaaacggttgacttggaagagagtttcccggcgagttaaagagagataggagtcaatctacgtgtcgatttgaagccctgaactttatctttccaacgaatctaacctagatccaatcgaagcaatcttccaagcgatattggcgtttctttcaagcgcagattcgtctctatccgacacaccgaattcaggctcaatttcccagtgatctag

SEQ ID NO: 158572 - DNA, 1591 bp, Arabidopsis thaliana landsberg
gagacaagcttggcgagaaaaggggcacaaaagattactcttagtattggtgatggggccaatgatgttagcatgattcaagctgctcatgttggtataggaataagtgggatggagggtatgcaagctgtgatggctagtgattttgccattgctcagttcagatttcttacagatttacttcttgtccatggacggtggtcatatcttagaatctgcaaggttgaatttctctttcgctacaaacacgctttagttttttctgaaatttctaacgatctttttcttcgcaggttgtcatgtatttcttctacaagaatcttaccttcactttgactcagttttggttcacatttcgaactggattttctgggcaaaggttttatgatgattggttccagtcattgtttaatgttgtatttacagctcttcctgtcatcgtccttgggctgtttgagaaggtactagcttttctcgatctctactttatacaagagaatattcatctaatttaagacttttcttcatattgttttggattgtataatttcatctctatgttgtgctcttgctaggatgtgagtgcatccctttcgaaaagatatccagaactgtatagagagggaatacgtaactcatttttcaaatggagagttgtagcagtatgggctacttctgctgtgtatcagtctctcgtctgctatctcttcgtgaccacctcatctttcggtgctgtaaattcatcaggcaaagtatttggcctctgggatgttagcacaatggtcttcacatgtctggtgattgctgtgaatgtgcgcattcttttgatgagcaattccattaccagatggcattatatcacagtcggtgggagtattcttgcatggctcgtttttgctttcgtatactgcgggattatgacaccacatgataggaatgtacgcagccagcttacatcttcggttttctgattttttgtcttagttttttttcaacttggcaaatctgatttccttcttttcttgtctctgcaggaaaatgtctactttgtcatatatgttctgatgagtacattctatttctacttcacattgttgcttgttcccattgtctctcttctaggcgatttcatcttccaagggtacgtaaaactggatattcttagtttcaatttttttttggcattgacgaacatgtgattatattgcgaacgattctgtttagttatgacatgagagaatctgtgtctttactgatgtagggtggagagatggttcttcccgtatgattatcagatcgttcaagaaatacataggcacgaatcagatgcaagcaaggcagatcagctggaggtagagaacgagctcacacctcaagaggcgagaagctatgcgatatcacaattgcctcgggagctctcaaagcacactgggtttgcgtttgattcaccaggttatgaatctttctttgcatctcagttaggtatatacgcgccacagaaggcgtgggatgtggcaaggagagccagtatgaggtcacggccaaaggtaccgaagaagtaaagatccgatatataacatattattgctaa

SEQ ID NO: 158573 - DNA, 794 bp, Arabidopsis thaliana landsberg
atgaatgaaatggagatttatgactatctggcacttgacattttaggtgacaagccgctatacgaaaaagctgctcctttcttagacatcatgggaaaggtatctcttttgcctgtgttttgcttttagttcttttttcttctacaaatgaaccattttcgttactagtttgcattatatgatccagtcaaaattctatttgggtgaagttggtaatggagcagcaatgaaacttgtcgtcaacatgatcatgggaaggtatcatttgaccatctatcgcttcatttcttggcaaattccagattcttcttctgatctctttttctctttacctatgcagtatgatggcatcattcgcggagggaatacttctaagccagaaagttggactcgatccaaatgtacttgtcgaggtaactaaaacaccattgtccagcagaaagtttcttaccaaatgtgctataaaccccgggaaatttttttctgcaggttgtctcacagggagctatcaatgcgccaatgtactcactaaagggtccttcaatgatcaagtcagtgtacccgacggcttttccattaaagcatcagcagaaggtttgtgtaattgtgttactttctttttttagattctcacaaagactctggagtttgatgagactgtaattgacttttatccgtctataggatatgagactcgcacttggactagcggaatccgtatcgcaatctactccgattgcagccgctgcgaacgagctttacaaggttgcaaaatcttatgggttgagcaatga

SEQ ID NO: 158574 - DNA, 973 bp, Arabidopsis thaliana landsberg
aaaaacctctaatctcatgtctatgtcttgtctttagatactatcttactctctcttcgagaacttatgtctttagaacggtcggagttcgtcgacggtgttgcggcacggagtctcagtgagatctcagaagttgacgccgtgagaattggaggtgatattatatcttcagcgagacgtctcatcgcacttttaaggtccgtaggagattgtcaatggcttcatcatccacccgttattgctgaagctattagaaggtgagaaaaaaaaaacttcacctttactctttctcctgagtttttgatcggacggttatgattcatttggtctctttctcactgttttagttatcttctggtccccaaagtttggatttttattggttttgtatctgaaagatttgatttttatgatcatgtaattaaatgtgagtgttgttgtttgtgtgaaggtatgatgagctatggatgccgttgatttctgatctaacggttggtttaaagccaccgatgattttgcctcctcttgatgttgaatgggtttggttttgtcactgtttgaatccagtaagctctgattacttctctttcactacaaagattctgttttgatttggtataatagtttggtttatctttgttaggtgagttatagtgattactgtgaaaggagattctcaaaacttatagggaagcctgcgatttacgacgaagagaacgaggattacgcggttttacaatgcgaaaagatctggagtttacgatatcctttagagagttttgagaacagagctgatcctgattcacttgagactgtttctttagttaatgaagatattaaaagtctagtgaagaagcagatgtttctttgggagaagttttcagctccttacatgtctgaaaccgtttacttgatcgctgctcggttacgttacaaagggttattgttgatactacacaagtttaaggatgag

SEQ ID NO: 158575 - DNA, 258 bp, Arabidopsis thaliana landsberg
gacagcttatcagagaagaagaagatatttctgtaagcgagaaaaatggcgagagaacatgcgacacggagaagccaccggaaaacgaaagaaacgccggaagaggtgaagaagcagaagaatactgaaccaggaggaacttaataacaagtggaggaagagaagctaccgttagaggttgggatgttctattacccaaagactacggcatcgttcattgtgtctgacgctctagagccacattttcgttagagctat

SEQ ID NO: 158576 - DNA, 351 bp, Arabidopsis thaliana landsberg
tcatatagaaggtgctggagcatctgacagctccataaatgtttgagatatatccaattgtatggaagatgtgtgaggtacttttgagcaatacatggccgacttaggaatgcctaaggaccaacatacaacattcaatgtgctttaagtaacatttgattgactcatagatgcttgaaaactgatagacaaccttataggtgctttaagaaacatccaagtgactgagagatgcttgaagactcacatatagtcatagttttggaactgctttgagcgacattctcttgtccaaaacctacttgagcagcgataggcagtaccaaaagtgtttgggctatatctggctct

SEQ ID NO: 158577 - DNA, 5854 bp, Arabidopsis thaliana landsberg
gtagcttctgggttgaagcaacgccgccgaacttgcggaccaggattgtgaaacatggcagcaatacaacgtataacgtaataaagaaaaatggagttgctacgagccaccctattaactgcaataaccataggacttaatataagacttgcaagttactaaagataagatcacaaaagattaggctagggaatgcaagaagcggttcgacatttttcaccaatacgctaggacaaaaagagactcatcgtagctacttaccgcgttaccaatgcttaaaaagacttcctgagaggcttgaccagtgaaaaccttctttagagcatctgaagtcaaaggaaaatgaggtccaccagtgactatctcaccaagtcttagaaagggaccacgagacttcaataagaaagacatgaaaaggaaatcaaaaatccaagtcaggaagaaaactgatatgcatagtctttcgataaaagtggtaattcaaaagattaaaatgatataaggtttacgctagttctactggagtggcaatgatattagccaacattacggtcggagcatgacaagatgatccgagcaaggcaaaagctactccacatagtaacacaggaacacctattttataacaaaaatcacaccaaataaggaacatagcaatctcaaaacgcaacaacgcaagaagcagtaagcttaggaaatagaaaaatggcgagaaatacgcaccacagatcggaaatatccccaaggtaatacccagtgcagcagagaaagcaagctgctttggctcagtacctctacgaaaattgaaaacaaaaacaaaatcaaactcaaatcacttcgcaacatcaacatttctgcaacagagacagagatgctgatacatctatctctaacagatgcccaaaagttcctttatgagcaacatgaagatacaaggataaagctttttcctttaactattctaaatggtctatcttgcattccaataacaaacaaagagatgtttaaaaatcctttagaaactacatgatgatacaagcataaagactctatctttaactgtgctgatacatcaatctctagcagatgcccaaaagatcctttaggagccacatgaagatataataataaagactctacctttaactgttgtaaatggtctctcttgtgttacaataacaactaaagatgttttcaagatcctttagaactacatgaagatacaagaataaagactctacctgtaactattatacatggtctctcttacaataacaactaaacagatgttttcaagatccttgagaagctacattgaagatacaagaataaagactctacctttaactattatcaatggtctctcctgtgttccaataacaactaaacagatgttttaaagatccttgagaagctacattgaagatacaagaataaagcctctacctttagctgttctaaatggtctctcttgtgttccaataacaactaaacagatgtttttaagatcctttagaagctacaagtataaagactctacctttaactattctgtatagtctctaatgttccaaattaagtaaccaacaagaagcaaaatgcaaaactacagcttttaaagaccaatgatcaacaaagttgcacatgagatctatctgattcaataatcaataagcagaatatgagtgaccaaactagtcctaatttacagatctatgtaaaagagagacaaagagtcaaagaagacaaacctacgcaagatctggagaagaggatcagtgattttcttattgaaccatgcttttaatctaccttttgataaacccatcacgattctacaaaatcttcacgaaaattaattctccccagaaaaagttaacagatttcacacaaatgaacgttgatcgatcgtcttttgcgcgtctcttcacggaaccagttgaagatgggtatttccgtaaacgggtttgcgtaatcgggtcaagtattgatttttttaaatcaggcccaagcccaaacatttaagatcccaaaatgatttaagcgacccgattcgaaaaatccggttcaattatcggttagcatatacccaaattagaattgtttcgggtttcagttttgtccgggtcagatctaaaattcgaacatgtcttcgtaaaaaacccaaaacaatatacatatgataatcatatgtccgattgataacacatgactgtacaaatattttaattgcaaacatgagcgataattttttatggaataatgtaaaaaagtacggaaatatagtacataaaaattatacaaatactaagagtaatagtttaagtgacacttttgatatcacttttaagattgataactagattataacccgtgctatacaggatcggcattaatattttgtataaatataaataatatactttatttgaattatataaaaaatagtatagtatagtataaaagtgatgccataatatttttcaatgtttttactatttgcatataatgctgcattagattgactttgtttaaaaatgttatttttataataaatacaacatatgtagttttaagtaaatgtgtaaaatttgtatacaggttgttttggtaagaaacatgtttcctttgtattagaggatatttttggcctaacttagaattagtctttgtatagtattttggttatatttgtggacctaattggggcctatattagattatctttgatagagctgacaaaaaaacggacctgataaccaacccaatatccgaaccaaaaaaccgggttagggcggttaaaattttaggaaatttccttattgggtaaagttttagtaatccagtggatatccgattggtccagaaattgctcgttacccaaaaagagtattcaaaaacccaaacattaatttaatatctaaaatattaattatatttaatcgtaatattatctaattatctaagattataattataaatctaaatatgtcaattaattttggacctaaatatccaaaacaactaaactattcaaaaattatttgttatgtttgtcaaaatttagtaaaatatattcaaatataattaaatttattaaaacttaacaaatttaaaagtttttttttgtttggagacccgctatctacatacaagtttcccgtttctatttttttgggtatttttagggtctgaaactttttatccaaactgacccaaacccaactggatccgacccgaaccagaaccgaatatttagaattattctattgggtagtaaatcatatacccattaatctcaaacccgaactcgaatgggttactcatatgtccaaccctattctctgatttaattatctaaaaactccaaaaaaaacatatgttttgctgactactttttattcaaaaaaatttacatcctcttctgccaaaatcatttcataagacatcccaaaacccttggaataatgatttcatgaatgaagaatcctaatttgaatataccaagaggttttgaaaggttttaagtttttgataggtatgtatgtgagaaggtacatccatcgtgatgataatcggcttatttataattttaacttgcattatatagcaggtaggcttatattttagttaaactaaaaacttttattgtaaagttgattataaatatatgattttaaatgtatagtaaactgcgagttgtatatgttttgttgatattatttatattgtttagtgtttaaaattatatacttgtattttgattgttaattttagagtttcacatatagtataccatcttgtattaatattgatttaaacccgtcaattgtaggatttttcagcttgtattaaaaattaaatcacatcatacacattaaaaaatctaatatgttattaattattgtagtatataagattataaattttaaaataatatgtatgaaattgaatataaatattctaattatgccacagtactcagtactttttttttttaaatctacttttgacccgttatagtattttttcatgtattgaacagtttatattcgcttttaaaaattcaaattatggcatatgcgaaaaaactctaattatttttttataatgatgatattatgtttccgtaaaaatagaatcatataaagatgagaagtgaactataataattaataaaaaattaatatgataatttagatatcaaatctaatttgttgattttaattggttaattttttggaaattaataatgtatttcgttttttaatgaaatttaatttattaaattagtatttgactttttaatttttaaagagatgaattaatttactctttaaattttatttctaatggcatacctatgtaattacttacaaaaattaaggttatatttaaaatgtacttcccaaataatatagtaggattgtcaaacggtatattttatacttcaacggtatattttagtcctgagtatactggatctaaaatatctgaatcgactcaaaataacaaattcggttcggttcaggtttatatgtttaaaactttgaaaatgttacgtttttttgaattgtttggttttatgactttcatggtttataggataattcgggttaaaaaaaccgaatcaaaatatcgttcaatcataggttggggaccttggggtttaatcaaatttcaaaaaccaacccgaatccgagaataccataaccaaaccgagctaaccgaaacaatttcggttctcttttatatagacccaatcttcccagaattacccgaaatccggaagaaagactgatcccgaatcgacccgaaaacccgaatggtcagacgaagaaaccaacacactaaaaactcttggtctctttatcctccgaattttctcgccgtcgccggtgaattttgagccctagcaccgtcgtgaattaaggaggattcaacaaatcatgcttgtcggtgagaattgtgttcacgagacatactacgagattctctccgtgaaagaagatgctagctatgaagaaatccgaaatagctatcgttctgcgattctccactctcatccagataagctcaacaatacttctcgttctagctcagacgacgagaagtttctgaagattcaaaaagcttgggaagttctaagcgatgcagagctacgtgtagtttatgataatgatcttagatcttcaagacatgatggaatcactgctgatgagattagtattgaggatatgtcagtggagattactggtgatgtgattgatcttttttatcagggggggggtggtgattacttttgtgttgattctagtgagttaggaacaatggggtttgctttgttgagagatggtgattttgtttatgttaagagattgggtgcttctgtggcgtctgttgttcttccttgtggttcttgttctttgaaaacacgagtttgggttgattctgatatgaagattcctatctaggatggtctattgtgagcaaggtggtgatttgggttggtacagaattgagtaatctctattcaagatgagtttttaagactgaagtgatcgtcatagtctggttcggaggaggagttctgattgaggatggttatttgtgattgtgtggataggttcatataggaaaagtttggatggagatgatttcttgtgaccaatgtgatctcctgcaagcttttctgttgtgagttttttgtactcatttaatatagttgttgaacaacttttagtttgtaaggaacttaaattataatgagaaacaaaagggccctttggttttgctactctttttcccctctctggtttcagttatgtctccttttaaatttgctggaagctga

SEQ ID NO: 158578 - DNA, 264 bp, Arabidopsis thaliana landsberg
gcaaatcactctggttgacctcaaactcaaagtcgagtaattgccgatctaaaacacagggggtgattcagaaatccccaaaattcgactaaaaactaaaaccctagccctaattcatcctgattttgatcgccgtataaaagactcgcattttctgggcttagtatggcggttccggtgctgggtggatttccgatcttcatggtagtgagagttttgggtttcatcatcgcggctttggttttgacatggactgttcattac

SEQ ID NO: 158579 - DNA, 417 bp, Arabidopsis thaliana landsberg
  unsure (1)..(417): unsure at all n locations
gcaaatgccgactaataacgtgtaatgataatctgaatcacagtgttgaaggaacacataaaatcaactcaatagtaacacataacattaatcacaccatgaccgtcaaagaagaactttgtcgattttattatgtgagactttgagaaggcaaaagtttacttatatacttaacagggtttaatgtatatttcttaccggaagacaacaatatttcataggtacataannnnnnnnnnnnnnnnnnnnnnnnnnaatgaacaacaagaagcaagaatggacatgtatcaatctgggttcaactctgggcaccgatgttttgagcctggaatcacaccccataactgttatatactagaggctaattacatacatataaacactcatttacctttggattagaaatccaggatcata

SEQ ID NO: 158580 - DNA, 1149 bp, Arabidopsis thaliana landsberg
atgagcgacgatgaagagccaccgctgaagaagaataagctgccagtagaagaaccaaccttgattccttcacttccagaggagttgatattgagtatcttagcccgcgtctcgagattgtcttatcgatctctctccttagtctgcaagcgcttccactcgctccttacttcaggagagatttaccggttccggtcactatcaggttataccgagaattgtctctatgtgtgcttacgtttctctcatactggccgtatccctagctggttcaagctttgtcggagacctatcctagccagtgacactaggaagtcaagtgggtatgttttggcaacaataccaattccacattctcctcctttgcacaggtcaagtctcgtggcggttggttctaatatctataacattggcggatccatctcccaatcccagtcatctagtgtctcaatcctagactgctggtctcacacgtggctcgaaggtccaagcatgcaggtggagcgggagtacccatcagccagtttacttgatggaaagatatacgtaacaggaggctgttataaacactacaatccatcaaactggatggaggttttcgatctataaaccgaaacttcggagcctgtgttgagccgtgcaggtaggttgacgtttcatggctgtggtgatcaaactgataacgtagtggttgatggaaagctacacagttgtggtgggtataagggtgtggcttacaaccccaatgatggtagatgggatagtttaggatcagagatgaatttgggtctgaaatggtcttcatcttgtgtgatagagaacgtgatttactattattatcacaatgaaaatatcaaatggtatgacactaaggtaagatcctggagaactttgaatggtttgaaaacactacctaggtttgctcgttatgccaatgttaggttggcagattatggtgggaaaatggcacttttttgggacaagtttactggttgtggcaatcagaataggatgatttggtgtgcgattattgctcttgaaagacgcaataatgaagagatttgggggaatgtcgagtggtctgatgcagtgcttccgcatcaagttcctatggcctatgtatttgagtatgttgttgctgtcaacgta

SEQ ID NO: 158581 - DNA, 4556 bp, Arabidopsis thaliana landsberg
tatgaacaggttagttaagaaacagattatagagggcagaacaatcctgataggttctttcacttcattagcttcagagagtatttcagagatggagatagagtatccactagagcgagctttggtctcttccatagaggatattgcggatttggacagcgaagcttctacatacactaagacgctagatgagaccgaacatgtgatgcaactaatattccaagaagagccttgatctatgattccaaaactaaatactaatgccaattgggatccaacaaaggcccctaaaatcgagttgaaaccacttctagcagggctaaggtacgcatttctttgtgaaaaaattcttcttaccctattattgaaaatgcttctctaagtctcgcagagctcaccttattgctaagcaagctgcgcaagtatcgcaaagctctttgctattctcttgatgatattgcaggtatctctctggacttgtgtatgcataggattcacctcaaggatgagtctaagccctcagttgagcatcaaagagactaaacccgaatctgaaggatgttgttaagaaggagatcataaaactgttggaagctgggatcatctatctaattttagatagtgattgggttagtctagtgcatgtggttcctaagaaaggaggtgttatagtggttaagaatgacaagaatgagctgattcctatggtacttgatggatactatgggttctgaaatccacactagagatttgtaattgagattatgagaaaggagggctataacttcactgaaaccttgagagttatattgctaagaacgaatggactttttgtattgattatgacaaagcttttacaatgtgaaatgagattacaagtgtaaaagtatgtgtgtgaatgtaagctgaattgaatgtgtcttccaagtcgtccttgcttccttatatgggtctacgcacgtggtagctccgttcgggatctgcggagatcctcctgaatattgggcaggtcagttccgagatatcaggtccgctccgcgaatatctcctcatcagttcctaggttgttattcgcttatctcccttcattaggtgaccgggcttatctggcccaaatacccattcgcgtatgtgggctcatcagctgcgtaggtcctctacttggtgggcttggtgggcttttgtgggctggcttggtattttcgcaggtggattcctggaggggaatccagctccaacatttgccccccagcccattgagtgagtaggcaaactcgatgagcagacatataggtcatgtaagattgcgaaaatattcttgatgagatgataaatgctataagatcagtcggttttgaggataaactcaacaattttgatttaatttcagattccttaacccaaagatttcgaggagatacgcgagataagtcgctgctgatgtggacggccgagatggagcgtctcattcagcgaaccgcatctgacggtccagattaggcgcagagaagagatctctacaatctcaaaaatcgtggtgatgatggctttaaataacttcccacctctccacttgacgtcacgttaactcacacgactctcaaggtaacttctctcctcctttattatttactgcgtttagttttgtagagatagaaaaatctcgtccttttttttttgctatctccttcgtttctctgctactccctctctctcgatctgccttctttgctcttttctttcatctctctcgtccctctctatcgaaacccaaagatgagcgacttcgaagattcccagaataaaagcaaccacaattatggcgacgatgagagttcgtccgagccgaggtcggcggcatcaccgcagcgagtacaaagacgcgtcataaccctaggcggaataggtccaattcgtccgccgtctatcagagccgacaaaccgaaaaagaaaaaggctgccaagcaaggaggaggcacgccgatgacgaacagcgacctggtcgacctccggaggagatgccaggttccggtaggggtcactatgatactcccaaggccgccactgcatcgtgagaacgtgccggtcgggtggtgctgcgcttatgccaatttctttgagaaatgtggcctttttttcccgtttccggtgtgtatcctcgagatgctctactgtctcggccttgcctttccccagatatgcccgaactttgtccgccatgtattggcgttattcacccggctcgggaagtagacagagaattcaactgccatgacctgcttcagctctgccaggtcaagaccaatgctaggagcgaccaggggacgtactacatcagtgctcgtcccggatctctgatcctaggcggtttaaaggcttatcgagacaccaattggggatccaagtacttcttattcagagtagatcgtcattcaatcggcagttttgatcctgcgaggataacgaggacctggtccaccaacctgggtcagatggagacctgagcctcttggttttttgttgtttgtgtcgagtccttaactgcttttgctgaacgttagtactgatatcaatgttattttccctttgatggtttgcagcaaagaccaaggaagttactctctcagagactcgagctgttaacccttctctgacgtggtcagactaactgggccacttttagcagagatcgcatcgtagctgctcatgccgtagcttcagcagttcccttagctccagcagttcccgcaatcgtccttccagcagcacagctagatccgatcgaagaggtcccgcggattgaaccgatccccgaggctgatctgcctataggtacgagttccgtttttttctttttttttttagacaatgtacgggttactgaggcagctgcgtaactcgagctgctaactaacacatatcgtgctttgtctgttcagttcctcctgactccagctccacttcagaactcccgctcatcagaagaatgaggcgtccaagtcttcgtgttcaacgagccaacgccggggctcctgctcgtggtgatgatctgtcgaccgcgatgactgcggctcgacagactctagctgtctccagcgcatctgcctcagcatctcatccctcaattcctgagatcaataccggggcctccgctgtagcaggtcgttctgattgtgcaccgtcctctccgaagagagcttggacccagccggaggtgcatccggcggctgagttggtcgtgagtgactagggggtcgcctctcccagagaggagacgatagaatctgcggctgctatcccggacgcagctgcgtccgcggataggcggtcctcgggcaggtcccatggcggaggacgaggctccagaggtgggggcaggtcttcaaaccggtctcagaaagtgaggcagacgtccaactctggtggaggttccgcgggaagcgggcctttccactggtctaacactcacgaccgtgatcatccgatcgttgaggacgaggctgggttggcgaacttgcttcgccacataaaagggaggaactgccaggttcctggagtgaagaacatggacgaggcggctgcctatgctgacatgatggcgaacgagggcgaggtaattatcgatcactgtctccttctaatttatatctttgcgctagttatgactttcagatttgctcttggtaggcgatagctgctaccaacaagctggttgctctctatgagcaacttctgagccaggtttcctcaaagagcgagttcgaagaaggaaagaccctcatttaggagctgacagcaagtgtgaaggctagtcaggagcgcgaggtttcgttccaggtatacctcggttctgacttgtttgtatataatttatcgatgatacgatgattctaacctaattgtgatttcaggcggagatcgagaggttgaaaatggagttgtccacttccaaaagacctcgagaaaggttatgctgagaagatcgggctcatggagatcgagatcgggggattaaaagccgacaagcagacggcgaggaaccagattcatcgcttagagcagaggagggaagagctctccaaaagggtgacggacgtgacttcgactgcacaaggagcgatgaaggcggttcatgatgctaaggttgagctggccgctgcgtattcgaagttgctggctgggatcaaggaaaagtgggtcgccaaaaaggagtacacggtgctggagagtcacgcggctgaggtggcattgaacttggctttgatcgactatatcacaaaggctggcatcgatttgaccgtggagagacctcggctgcaggcagggctggatgacctgaggcgcagcgcaaatcgaaggaggtatcagacatcactctaagcaagttggatctcccgcaagtttcagagatttcgatggtatgtctgatggacgtggacgagcaagggacgccaattggcttggatgagttcgggagcaacaaagacgtgtttccgagaggtctcgcggatggttctggtgttgtctttgccacgccagccggagaatcgagggag

SEQ ID NO: 158582 - DNA, 549 bp, Arabidopsis thaliana landsberg
atgatcaaaggaaacaatggaaacagaggatcttcttcttctggttactctgcagatttgttggtttgtttcccttcaagaacccacttagctctgactcctaagcccatttgtagcccatctcgtccctcagactcttccactaaccgtcgtcctcaccaccgtcgccagctcagtaaactctccggcggcggtggaggaggacacggtagtcctgttttgtgggctaaacaagcaagtagtaagaatatgggaggtgacgaaatagcagaaccaacttctcctaaagtaacttgcgcaggtcagatcaaagtccggccaagtaaatgcggagggagaggaaagaactggcaatcggtgatggaagagattgagaggatacatgataatagatcgcaaagcaagttttttgggttgaagaaagatgtgatgggtttcttgacttgtcttagaaacatcaaattcgatttcaggtgttttggtgatttccgacatgctgatgtcactagcgacgacgatgaggaagaagatgatgatgaggaagaagag

SEQ ID NO: 158583 - DNA, 347 bp, Arabidopsis thaliana landsberg
  unsure (1)..(347): unsure at all n locations
gaaggacttntctaatccttttctttctcatagggttcatactcactaaaaatgaagatgcttgattgacgcttgaaggagttaacttgcatcaagttctcatttgatattggatttggatcctccgtggccgacatgtagagctgatttgctcgacgggatacaccatcttgttctataccatggaaccactctcatttattttgtataaaatacactctcctgctatacataattgttgatcaaaaaccctttgaaaattctcattctggaccattcatgaatccccccatttatagaaaaaacaaagtaatgaattattgattaggttttatagagctgtggtt

SEQ ID NO: 158584 - DNA, 235 bp, Arabidopsis thaliana landsberg
ttaggcattagcgcttatgaacgagattccagtaacctcaagaaaatatcaatttgccatgggaatggctgagaagatcatggaagacaacgctcagagcggccacgtggatttactagacgtcaacagagcggccctagcttcctcctttgcgcgcacaactgcgcgattgcagggctgcataaaacgcaatcgagccgctgacaagcccttcggtagtttgcctttgcgtgtg

SEQ ID NO: 158585 - DNA, 604 bp, Arabidopsis thaliana landsberg
gtatttcaggacagaaggttattggagagcctgttgtgtctggattaatccttgatgatcattggctttgggatcctgacttcacaattgcgtccaagtaataaatccttcagttctgttaatcaaatgattcccatttattctttcagattttcaaagtttttctcaatatttcaggtatgtcatgagtccacctatcagaccagtaggacatgggaaagccctacaagatgccctttccacaggaatccttcaggtttctttcctcgctgtgcataaactagagaattgcatgacctgtagcatcaaaatgttaagatcttctaaacacctttttctccttttattgggataatctctgcagcttgtaggaactgatcactgcactttcaattctacacaaaaagctctaggacttgatgatttccgcacaatacctaatggtgttaatggtaatagctgacttgactggtttcttgctttctgtgctcactgcccctgctaacctgtaaatacttttgaacttgtccatatgtttaagccttgaggaacggatgcacttgatatgggacacgatggtggtaagtacttgaggaataataaa

SEQ ID NO: 158586 - DNA, 675 bp, Arabidopsis thaliana landsberg
atgaagagaacggctaaagggttggataaagttgctgaaggttggattgaagaacacaagaacaagaggagtgatcacggtaggagtgaaaatgactacttggatatactcattaagatattgggacaagacaagattcctggtttgagtgatactcacacgaaaattaaagccctctgcctcgtaagacctatatacataaactataatataaaattttaatacatttgtaagtttatttataatcaagaaatttatatttgtgaacattttttggtgcaagaacttggtattggcagggagcgagacggccattgtggttctggtttgggcggtatccttgctcttgaacaacccgcatgtcttgaggaaagctcaggaggagctggacagcaaaattggaaaggagagagttgtggaagagttagacatcaaagatttggtttacctccaagccattgtcaaggagacatttcgtctatacccaccagtccctctcgttgcttacagagctgtggtggaagatttcgacattgcattttgcaaatgtcatgtacctgcaggtaatcaaaggctacattaccaattaatcttgagattaaagttcaacaaatattaccatattaccaaatgtcgttagttcaactggtaaagatcctacgcgaagcttagaga

SEQ ID NO: 158587 - DNA, 629 bp, Arabidopsis thaliana landsberg
  unsure (1)..(629): unsure at all n locations
acacatcgtcgctatccaacagacaaatcgtgaatttagaatttctggaaaaccctctacatctgctcgttgtttccgtcagtcggaagctgcgcaaggattctgttcaccacgagttgtttnnnnnnnnnnnnnnnnnnnacgcgacggcagatttctttaggaactttgtagatcgcgagtacgaggaggttaacgagtccgcgacgacaacaacaccatacggcggcgcaactcgccgtagtgccaccgcaaaactcggcgggattcaagatgaaataaacagaagctcgaaggtttttcttagttgaaatacatgtacatatatgaattgatcaatgacgatgtctacgctatggtatgatacgaatctttacaataaggaaataataagtgcatcgctgattttgtggctgactttgtggaccattccttactcaacgccactctgttttgaccactctgtttcacctccaaactaacttaaaccaattgttaattttagcaaaccagaataataccaaatcgtcttcatctccaacacaagaagcttgtggtaaaggagaagagagacttctctgaagtaaaggctgtctccggtgactataagacggagaagacgatggtgt

SEQ ID NO: 158588 - DNA, 449 bp, Arabidopsis thaliana landsberg
  unsure (1)..(449): unsure at all n locations
gttagagtacttaaattatggttttatttgaaagatacactttattctagcttgtaaaaccaaacaaaaactatataggtttttaaagcacatacccagtcatggcaagcggtgaagaaatgatcggagccacaagttctattccaggaagggtagttggaagcgatgagatcaatgtagtttccaagatatttaacaagattattacgactgtgagagtcatgaacgtaaagtttctgttgaagaattcttgaactgaaaggtatgtagaataaatgagctttggtgggatcttttgtcaagaatctatggctactctccattagtttcataaaccatccttctgacgcgtacctcccttccattattgcctcagnnnnnnnnnnnnnnnnnnnnnnnnnnnnnnnnnnnncatacactttcagagtttgttccattaaatcatagat

SEQ ID NO: 158589 - DNA, 506 bp, Arabidopsis thaliana landsberg
  unsure (1)..(506): unsure at all n locations
gatttagaatggaaaaccttttggaataattcaccaatttacaattcattttatgattttgccatcacaaacgacatcagagtaaatatgactaacgggcccggcccaataattcaagattagttttttttaggatttctagggtttttactttttagtatattatcttcttctctctctaaccctcagttctgttaagtacttggcttctaacaaacgctgtctgaatcatatttcgattctgatttttcttcatggattcgtatagccaataagttttttcaatattcaaaacaaaaaccccatcaaaataatctccggaccagtttctctttcgattcagtcggaccggaaaaacaatggcgtctgtgaaccctttcgatctcttggacgatgacgcagaggatcnnnnnnnnnnnnnnnnntttaagccattgaaggttgtggctccggttcacacccctaccctggtaagatccgagtagcccaacctcaaactcaagctg

SEQ ID NO: 158590 - DNA, 524 bp, Arabidopsis thaliana landsberg
tcataaaactcccgcagacgcgcccatttatcaaacgctcaatcagtcgttcaaaacgcttgataacgcttgaaaccgcaaccgcccgtttccgcaaactcccgcaaccgcaaccgcacccgctgcgtttaaaacagtcaggccctaaatcgatattaatacaaaatggtatactacatgtgaaactctaaaattaacaatcaaaatacaagtgtataattttaaacactaaataatatatttttttaaacactaaatttttttgaataaaaagtactcagtaaaacatatgttttttttaaagagtttttagataattaaatcagagaatatggttgggcatatgagtaacccattcgagttcgggtagaacccgttcgggtttgggattaatgggtatatgatttactacccaatagaataattataaatattcggttctggttcgggtcggatccagttgggtttgggtcagtttggataaaaagttcagaccctataatacccaaaaaatagaacgggga

SEQ ID NO: 158591 - DNA, 443 bp, Arabidopsis thaliana landsberg
aaaacatttggagttaggtccatacaagggaacgaagaagaacttatggcagctttgtatcttcaagtgagcatcataagtcaagcacttatctttgtaaccagatcaaggagctggtcatttgttgaacgacctgggtttttgctcctaatagcctttgttatagcacaattggttagtagactctctttgtaccataatactatccattttcattcattaccgtctgatacatgtgtcgtttttatgcaacaaacaaggtggctacattgatcgctgtgtatgcaaactggggattcgcaagaatcgtcggttgtggatggggatgggctggagttatatgggtatacagtatcattacctacattcctcttgatattctcaagttcatcatccgttacgctctcactggcaaggcttgggataacatgatcaaccagaaa

SEQ ID NO: 158592 - DNA, 1132 bp, Arabidopsis thaliana landsberg
atgcaagaatgcttcacaatcaacatcaggaggcaggtacggtgatgtaagctgtacattgccacttgttgctacggtatgcatacttttgttacgttctgatagctgtgcgtgttgtaggtggacaacattagcaaagtgattttttcaaaactaatgaatgaatggaaattgatgcacgaacttgcggtgttgcgtgccatttatttgttaggttcaggtatgttttatgtgctttaacctttttggcaataggattgtaactggaatcttaacaaatcctataaatttttcaggggaccttctgcagcattttttgactgtcatatttgataggctgggcaagggagagtcatcaaatgatgattttgagttgaacataatgcttcaggtaaccaggtttggtgtatttttaagagacactgctctcatctttatagttgttatcacttctaaaatgattccgcttgttaattgtttgcttatgtatccgagttctgttgccgtatatgtgttcatacaccaaacttatttctaaagtgtaatggtcttctacaggaatcaattagaaattcagctgatgccatgctgttaagcagtcctgattcattggtggtatctatttccagagaagacagagacaaagatgataagggtgacataatacccctttcttcaactcgtaaaagccgcgttaacagctttggaatagattgtctcgagtctctcaaattcacatacaaggtctagagaaacaacttagtcttccatccaattcgtactggtatatctcataggccacatctatgtgtatttgaagagctgaactgttttcttttttaaggtgccatggccacttgagcttattgccaatagtgaggccattaagaagtataaccaggtaaccctttctcatccagctatttttgtggtaaacagtttgttgttcctctatgtggtaattatttaattgaaaacaggtgatgggatttttgttgaaggtcaagcgagcaaaatatgtgcttgataaagcacgaaggtggatgtggaaggtctttgatatctctcaaactcatttctttcttcttagactgtatcccgtgacttccaaatccagtttgaaagagcctaa

SEQ ID NO: 158593 - DNA, 930 bp, Arabidopsis thaliana landsberg
atgggagacaaaaacgatgacgacaagaacattgagatatggaagattaagaagctgatcaaaggacttgaaaccgcaataggtaatggaacaagtatgatctctcttataatgcctcctagagatcaagtagctcgtgtcactaagatgcttgctgatgaatacggaaccgcctcaaacatcaagagtcgagtgcatcgtcaatctgttttatctgccattacttctgctcaacaaagattgaagctttacaacaaagttcctcccaatggtcttgttctctatactggaaccattgttactgatgatggtaaagagaagaaagtgacgattgatttcgagccttttaaaccgattaatgcttcgttgtatttgtgtgacaataagttccacaccgagcctttgaatgagcttttggagtctgatgataagtttggtttcattgttatggatggaaatggaactttgtttggtactttgagtgggaatacaagagaggttcttcataagttcactgtcgatcttccgaaaaagcacggaagaggaggacaatctgcgttgcgatttgctcgtcttaggatggagaagagacataactatgtgaggaaaaccgcggagcttgccactcagttttacattaatccagctacgagtcagcctaatgtctctggtcttatacttgctggttcagcggattttaagaccgagctaagtcaatcagaactgtttgatcctcgtcttcaagctaagatattgaatgtggttgatgtttcttacggaggagagaatggtttcaaccaagcaattgagctgtctgctgagattctatctaatgtgaagttcatacaagaaaagaaattgattgggaagtactttgaggagattagtcaagacactgggaaatatgttttcggtgttgaagatacttta

SEQ ID NO: 158594 - DNA, 449 bp, Arabidopsis thaliana landsberg; identical to SEQ ID NO: 62055

SEQ ID NO: 158595 - DNA, 6711 bp, Arabidopsis thaliana landsberg
tgcagtgctatcatccagaaaaatataataccaaggaagttgggagatcctggatccttcaccctaccttgttcaataggaccattatcttttagtaaatgcatatgtgatttgggcgcctcaatcagcctcatgcccctatctgtagccagaagattgggttttagtaaatacaagccctgcggtatccaactaatattagctaatagatcagtcagaatacctcatggagttctcgaagacctgcctgttaaattcggatcaatagacatccctactgatttcgtaatactggagatggatgaggagccaaaagacccattgatcctatgaagaccattcctagctactataggagctattaccgacgtcaagaagggaaaaatcgacgtaaacctggggaagtagatgaaaatgccttcgacattaacaaagctatgaagaaaccgacaatcaatggataagtcttttggatcgaagaaatggatagattagctgacgaattactggaagaacttacagaaggagatcacctagcaagtgccttaaccaacgatggagaagaagggtacctacacctagaaacccaagggtacaaagagtatcttgacgcccacataccaatggaaggaccagaagtgtttgaggaattgatcgttccctcagaagaaacagtctcaggatgcaccatgtgcctaattgttgaaaaaacaaactctactgagatgctcgaccatggaggggagaatataagttcatatgactagtcagaactcaaagttttaaaggttgaccttaaacctcttccaaaaggtttgaggtacgcgtttctcagtccaaatgatacttatcccgtcattattaatgatggactgagtgttgaacaagtgaaatagttgttgaatgaacttacaaagtataggagagcaattgcgtattctttagctgatattaaaggaatttcacctagtttatgtactcataggatccatcttgaaaatgaatcatatactagtattgaaccacagaggagattgaatccaaatttgaaagatgtggttaaaaaggaaattcttaaatcgcttgatgctgatataatctacccaatttctgacagtacatgggtctctcctgtgcattgtgttcccaagaagggaggaatgactatagttaaaaatgatttagatgagctcattcccactagaactataacaagacatagaatgtgcattgattacaggaaactaaatgttgcaactagagaggaccattttcccttgccattcattgatcaaatgcttgaacgcttagctaatcatccatactattgctttcttgatggatatagtggtttctttcaaataccaattcaccttaatgatcaatagaaaactactttcacatgtcgttctggaacttttgcttataagagaatgccatttggtttatgcaataatcctgcaacatttcagaggtgtatgacctttatatttttagatttaatcgaggagatagtggaggtcttcatggacgatttttcggtctatggcccctctttctcctcatgtttgttgaatcttggcagggtattgaccaggtgcaaagagacaaatcttgttcacaattgggaaaagtgtcatttcatggtgaaggaaggcatagtgttaggtcacaagatatcagagaagggtatagaggttgacaaaggaaaaattgaagtgatgttgtagttgcaggcaccaaaaacggtgaaggacatgagaagtttcctcggtcatgctgggttctacagaagatttattaaagacttctccaagatagccagaccgttaaccagactattgtgcaaggaaacctatatttgaattctatgaggtactgcctcaaatcctttcacaccatcaaggatgctaaggtatctgctcctgttggtcgagcgcctaattgggactatccatttgaaatcatgtgtgatgcatcagattacgcagtaggagctgttttaggccagaaaatagacaagaagcttcatgtcatatattacgccagccgaacgttggatgatgctcagggaagatatgcaacaactgagaaggagcttctagctgttgtattcgcatttgagaagttcagaagctatttggttggatcaaaggtaactttctatacagaccatgcagctttgaggcatctgtatgccaagagggatactaaaccaagactgttaagatggatacttttattgcaagagtttgacatggagatagtagataagaaaggcattgaaaatggtgcagcggaccatctgtcaaggatgagaattgaagaacctcttccgatagacgattcaatgccagaagaacagctcatggttgtagagttcttcggaaaaagctatagtgggaaagagttccaccaactgaatgctgttgaaggagaatctccatggtatgctgatcacgtcaattacttggcatggggagtagagcctcccaacctgacaagttatgaaaggaagaagtttttcagagacatacaccattactactgggatgagccttatctttacactctctgtaaagataagatctacaggagatgtgtctcagaagatgaagtggaaggtatcctgctgcattgccatggctcagcatatggtggtcacttcgcaacgttcaagacagtgtccaagattcttcaagcaggcttttggcggccaacaatgtttaaggacgctcggcagttcgtttcaaagcgtgattcatgccataaaaaaggcaacatcagtagaagaaatgaaatgcctcagaatccaatcttggaagtcgagatctttgatgtatgggggattgattttatgggtccattccgattttcatacggtaacaagtatatactggtcgccatagactacgtatcaaagtgggtcgaagctattgttagtcctaccaacgatgcaaaagttgtgctgaagctgttcaagaccataatcttcccgagatttggagttcccagggtagtaatcagtgatggtgggaagcatttcatcaacaaggtttttgagaacctcttgaagaagcatggagtaaagcacaaggtcgcaactccctatcatccacagacgagcgggcaggttaagatctccaatagggagataaaaataattctggaaaaaactgttgggattacaaggaaagtctggtctgcaaagctagatgatgcattatgggcttacaggacagccttcaagacccccattggtacaactcctttcaatcttctctatggaaaatcatgtcaactacttgttgaactcgagtacaaagcaatgtcggcggtaaaactttcgaactttgacataaaaactgttgaggagaagcgattgatccaactcagtgacctcgatgagatccgtttagaagcttatgagagctttaaaatctacaaggagagaaacaagcttttccatgataagaagatcatcactaaggatttccaggttggtgatcaggggctgctgttcaactctcgcttgaaactctttccaggaaagcttaaatccagatggtctggccccttctgtatcactaaggtccgtccctatggagcagtcactctagctggtaaaagtggagacttcaaagtaaatggtcaaaggctcaagaaatacttagcggatcaaatccttccagaggtgacatcggttcatctccaggaccttcttgatgattaaagaaataaacgagtcgagctaatgactttaaacaagctcacttgggaggaagtcccatgactatctcggagacaagggaacaacgtggagatagagtaaaaattcaaaacttttactctacaaaagacctggagatcgagtgtataacctggtggagtacaaaattttgaaagttttctgttgcatctggagacccagaattcgagtacatcagtcgagtatacgtgatgtttaaaatccaaaatttttaaaaacatcaatgtactcaaccaacataagctacggagacttgcaaggatttcttgcagtttacagtagatcttctgcagattttcttattcaaaagagcgaggaccacgcgctgcggataagctggagagagaatctaaaactcaacctccaccactcattttgaaacttcactcgacttcacaaaattcactcgacctacctcttttcatctcaccaccgacactgcaattgctctacaccacgaatcgccgtccaaagagccactcgatccagatcacttcactcgaccacggtgaatcactcgacctccgcgccaccgtcactagtccatttcttccgtcactcgacctccgtgtcgccgtcaccagttcatttcctatgtcactcgaccatccctgcgccaccgtaatcgagtactcctcctcgttcaccgtcgaagtctccgggaccactcgattaccacaaagctactcgaccacaaactatcactcgacctcaagtattcacttgacctctgcaacagcaactcgacctcttgttcttgaaagcaacagagccctgaagcactgtcagagtgattactcgacctctaggcttcaccggctgaactcaacctccacgactcactcgacctctgggagcagactcactcgaattcaagaaaagttactcgacccatttcgtctaagggaaactcaaaaacagctcagtctactcgagtacaaaattgtactcgattaacagggtctgtttcattgcatattgataacagtttgggtttcattgctatgtttgagactaacctattgacatttgagctttgagttctaaatctctacaggggaatcaggagcaattacagtggcagttcttatgttgatcctgactacaacatggatgagacagagtcatcatcttcaaggccagagagagaacagagagaatatgaaagctgcagaagaaaagctgagatagcccgggggaaaagagcgatgacagagaggtatgagcttatagacgaggatctggaagacgagtacatgcctgagcatactcgcagagccaccaaacttctgcataaacctgatgtattgtttgttgaggaatatattaagctcttcaaattgaaagagttctgtaccacaaggtattcatgctcgaccacactcgcacaacttggattgctggaggatgttcagcacttgtactagagttgtcatctggacactttaatggcttatccgtatgtagcatatgaagaagaaacgattcagttcctctccacactgcaagtggagctttaccaaggtatgacctttgatgatttggaatgcgaaggattgggattcttgagattctctgtgtatggtcatgagtataggttatcaatcaagcgcttggaaggattgtttggtttccccagtggaacgggtactaagcccaagtatgatagagaagagttgaaagatttagggatcaccattggcaactctgtaccgctgaattcttccaggtcaaagagcaatcagatacgcagccctgtcatcaggtacttccagcgttctatagccaatgtcctctactcccgagagatcatagggattgttaccaattctgatatggagatgatcgatatggctctcaaaggcactctccgccaaaccaagaacaaaatgtctctccaaggtgaaatcaatgacacacctctctctatacttcttctgatccacatgtgtggatacaagagatgggctgtcagcaataaccacaagagagcacgaggcgctctttgcataggcggtgttgtgacaccgattctgatcgcttgtggagtcctaatcacatttgatggacttgagccacgggcaatggatatcgagcatctgcatcactgcgaattcctagagtttgcaatggttggcgatagggaccgtttcaggtttgagcactctacagataagaaagccaacatccttctccacagccttgaggttacacgcataatagagggagataacattgattttaggcctgagcttgggaacctctactatgagaacgctctgccattggatgaggatgatcttatagaagaagctgctgaggatgggatggatgaagacagagaagtggagtttgacgctagtatgtatcattttattgaacatgtacctccagtgagggagagcaagagcttgagtgaagctcacaggaacaacagcaagttgtagaactagtgtaagaaacaggacaagctactccccaagtgcctcaagactatcaagtttctgatagataagctgagctgctcctcttccactatagctattccacagggacaacctcctcgatacatgccatcgaggagatttgatgagtctgagccaagtcagcatatgcctgagcctagtgagcagagagtctcacaggtccctgctagacattcgtcattcgagtcccgggagcataagagaagaaggaaggctacactcgttcgctctagcagcagatcacaacttattcactcgaggagatcactcgaccgcggtgctggccgcagcaaaaggagagaggtcaagtatcctcagagcggtgctggccgccacaaagttgatgaggtcgagtacccacatgctggagctgatactgaacagggcgactcgtctatggcctgggagcaatcacaggcagccattgacgaccaactctgttcattctttgactga

SEQ ID NO: 158596 - DNA, 772 bp, Arabidopsis thaliana landsberg
ggttaggattgatggctgccattttcacaggtaatatgctttttagtctttgtttattttcattgttagacaatgtgtcttgcatggaagccttagacttgttaaaaaatatacatatgttccctacgatttccttaagctataatgctatattacaagtttatacacttctgaatgctatggtcggcctatttcttacattgcgattgcttttgtgctgtgctttaaattgtgatttattaggcaatgcttctactttttggaacttagaaaacatataagaacagtagttgacagctttgacaaacaaacgcctgcctattgcttgaatgattactatcgttatattgtaagtgaaaaacatagagcttgctttggattttgatagattttctgacgttcatgaatttgagaagccaaatgatgagcaagctctgaaacttatgaattcatgtgcagtggctgttctcgaggagtttgaggatattcactttgcctatggtgtcagtgatgagtataggtgtccatctcgcaacctgtttatctcagctttacataatttagatattaattaagttcatcatcgattacagctttgttttgaagaaagaatctgagctctacaaaagacaatccaggttaaactaaatttctctttttccttacacttttggccgtatctccctgatatccttagtaataatacttagtattgcattgcagtaagataatatctgcagtcgcatccgtctttacatcggcatatgtgtta

SEQ ID NO: 158597 - DNA, 1368 bp, Arabidopsis thaliana landsberg
atgtccatagagctctatactaagaagaccacaagggagttaagtattacggtttcaggagatcaatgtggaggaaatggtcttatggtgaaccatcagtgtgaaggattttcattagaaccaggggattccataaagtttctctttttctaccagagtgaactctcttgggcatctggagttgctgtttttgcagtacctatgaaggcgaccgcacctgttttgatgcttagtctctacaaaaaaccggtcttttgggtgcggacgaagaaattcgcaattgcggttcttattgctgcagctgtactcattctgatattttgcttcaatgatcacttcatcgaggagaacaacaagagaaacaatagcaaccacatggagtcgagagaagttgagaaaccatctacgatcacaatatcccctgaaatggattctctgctaagatccataagcaaagaaagcctgcaagtgttcgatgaggttcccaagaacagcagcagcgttaagccagttgcttcttcacacgaagaagaagcatcagaagctgtgaatctcactgtaaagacagcgaaagacaagaagaggcgccgtaacaagaaaaagaagaaaggaggaatcaacggattaacaccagagtgcacagatgtttcaagcagttacagcggaaactcaactcctaggtctccaatatcaccagaaccacctactactcaagccgcaacgaagctagtaaagcctcctactaaaccggtcctatcgcactcagcaacgtttccggtttcaggggttaagtcaatgatcatacaacgaagctcactggctccaaatgtgagagcacctggagcgaaatcaagaaccgaagtgaaagaagagaaagcgaaagagtataggtactatgatatctggggagatcacttgacagggcttaatttgatggataagttaagggaaggggtagaaggtaaaagctcaggttttgatggagaggagtgtgagagtttctttgttaagggtcctcagaacttgttagcagactctcacaccaggtttgtaagtttctgtaaccaatggggctaacaaagaaataaagaatgaaaaacaaaaatattttatataataatgcaaggcccaatgggctttctgagcagccaccaagccattccattagtgagatataaacacaagcaacgtcaaacctagataatgaatgtcacgtagacaagtttcgacgtctttataaacttgaagggcttggttaagattccgtcctatggcctctccgctactccctgggccaccggatcagagaagaaatctcgattggtgctggtcgaagctttcttcacatctcatgcaattggtatttga

SEQ ID NO: 158598 - DNA, 1625 bp, Arabidopsis thaliana landsberg
atgatgcgggaagactactcagaactttttaaggacgaagaggaggatcatggtgatggatcgaattcaaggacgaaatccattgtagtgggggagaattgtaacacccctattttacaattagaccatgaggcccaagtccaacccgctaataatttgaacccaagtgaaaacctaatgatcccacgtgattataaaaggagaacgcaaactctaaatcaagtcacaaaaaccctaagccggcaacctcgcaccactcagaccaccagagatcgttgttgtgttgagccggagtcaccgcgtgaatcatcctcaccggagaggtaacgcacgagaatcgattctggttttgatctcttagtttctttaggattgtttttctttaggattgttgaaccaatctaactagtgaatggaaccatcgtagatctgtgccactccgccgttccaaccgccaagcaaaccgtaagggagactcgtcgagaaaagccaccgagaaaggtaatcgggaatcttctcgtgttgttatgtgattgtgttatttggttattaaaccatgatctaaattaaaccagttaaaaccaatgaaacgtttgtttagttagaagttacgtgaaattgtgttgtgaggaagaagaagttgacttcattcattagtttagttgttagagtaccggttaattgccaaaccggaagctatcattcacgtgaatgcatggatccaattatggacgtagtgttacgtgtagtgaatgaatcaatatttaattactagatttgattgaattattttattaaattaagtctagttaatttattgaaggatatatagtttgggttgattatgaaattaattatagattattaatgaaaaataatctttgatcgattatttaaaccgtcgcagattgagatcgttattagaccttttcttgttgctgttatttcgaaaccgtgttatccaaccgagttgctaaggtgagggcgggatctgtggaaacatagtatcacctttctacttttgtacttttgaagttcatttgtataggattagacattgggtgttgattgttaattattaggaattaattgttataaacattataagatgtgttgtgtgatgttatgtgttaggtgttagcgtgatatacatgttgatttgcttgacgtctttaagacgtatttttaaataaatatataaagataaataaaagagaataatgatattaaagaaaggataagattgaggatgttggactgtaatggaaccgacgggttcattacaggtcattaatcgctgacgagcaatgagaggaaggatcgagctacgggccgtggtcttccataaataggcttgaggagccattaattaacgtacgttaaaaactaagaaaagaaagtaaaagatcttgcggtgagcaagacggaagcttgactgttatagcttgctacgaaaacgtaagctatatgcttgttgtttgattctatgcttatgaatggaagttgtgtgaaagtataaatgtgatattgtgcttcaatgggcagttttgaccgcctcactgagtaattaattactcatcccccttttctccttttccccaggtgaggatgagaatgttgagtag

SEQ ID NO: 158599 - DNA, 499 bp, Arabidopsis thaliana landsberg; identical to SEQ ID NO: 52233

SEQ ID NO: 158600 - DNA, 838 bp, Arabidopsis thaliana landsberg
cttttacggaagcctgaattggttttagtacaaatattgtcaggatccagataaattgctgcaagagaaaacaataaaacctggagatcatgtgggaatgttgatacttgtccaagttatttataatccaagaacttaccttaaattgtttcttgttcacattgttccagcatgcaagttttcactatcttgatgtctccagattcttcgtattccgttccgttccgttggaagtatctaccaagatttgaacaccacagtctaaaatttcccagtatttaccagtgatcttgaactcaaattcaagctctctgaaattcacatccacagccgtatcaggtaagtttagagagatggaagatccaaagaaatacatagtagtgtacgtagcagaaacataagttcttgatcacctcgtcgtatcacatttttaggaacagggtaaaacaagaacaataataagacttttgttttagggaattgagattgtctctttacatagataccacaagcaaataatggagagttggttctacatgatataggttgaccgattctctccttgttacaactgaagcaaattgcagagtaaattaaaagattaacatacatataacataaatcactcattgcacatactttctttttggtggtttgatcaggtagtttcatgttcttggacgtggttcttcaactctatcaatttctttacttgttcaccaagggaatgattcatcgactccgtggacgaattcaccttttcttttatacttggttcataaacactagcagctattgctgctgctcttgctatttggtgcctccttatatagctcat

SEQ ID NO: 158601 - DNA, 222 bp, Arabidopsis thaliana landsberg
aggttcttctgtcgatatgctcattgctgacggatccaaatcttacgatccttggttctgaaaagcgcacattacaagcagccagtcaagtagagtcccaggtcaatcctggatcaaagtatgcaatgggatgataacaagcaataatatccaccaccagtacattgcgtattaaacaggagaaataagaaagaaagaaaaaaactgcagtttggactttta

SEQ ID NO: 158602 - DNA, 1406 bp, Arabidopsis thaliana landsberg
cataccataaatgaaacacacttgtcgtcgaatgggaatatcactcacgaagaaatgcatctgtatgcatagtggcaaaaaagagcgagacccaccgtttgatcgggaccgaatgggggggaaaggatgagatctccagactccagggaccagaagcgatttgcagaacagaacatgttttggatctcactctcagggtttcgatgtctgagggtctttattttgcaggcctggcccaatagtagtatttaattactttttaacaattgatttatctgtggatcaaattggtaattgtatgtttctctcttgattttttgtttgtcaaattgattttaacaactctaaacttcaactccttgtggcttctcagatcagatagtggcagccaaaataatgacaagaatttatattacaaacgcaccggttaggttcagtcacactaatcacataaccattttaaaagcaaaacattcgacacccaaaaggcccaaagcctctatctctagttctctacacaacacaatcctcctaattggttttgttcctgactgtacaaaagcagagctccaagaaaaataaaatttctggagctgcagcctaggttcatgatttgttttacacacacagctaagagaaaaaaaagcttcagtttgttagcccaaaaaatgacatgccggcaattatcagaaaccaacccactgtttctgtaagttccttaaagccgcaccattcccgcagaaaaaggagaaggcgggaccgagttatttcacatttctgttgatcccttcggcaactctttactatcaacacctttcttcagaaccttcagatctcaaccaaaattcaggaaggatttaatatcacaagagtgcaagatagccaaagtgatgtcacacacgtagccatatctgaattttgacttgccgactcccctgcttgctactttcagctacgagtccagtattctatgaattgtcattttctttcactaaattctcttccatctcttttcacggcaggaagcggataattagggtggtgctaaagtaactctctaagattctctgaaactgatgaacttacataagccatatataagaaactggaggcttatgagagccgcgagttcagagctcgtttgatagctgaagtataccacacatctgcagatatggattctctagcagtttctcattattgctctgcacaaaacaagaatacaatcaatgtggatcattattatacatgaaacaaaacaaagaaagctctttgattttgaggttctctttgatatttccggttctacgcatctacaccctgaattatgacgatagcaatacctgctgagccttaaagacaagcttctgaagcatgttttggtatttctctggttcctccgtcat

SEQ ID NO: 158603 - DNA, 497 bp, Arabidopsis thaliana landsberg
aaaaccatgagaggtctcgcggcttgttacagtgaacacgccattaaagtatcagatacatattgttcaggtccatcgaatcattcctatatatctccgacattacctccttcaatccccgacacagtaaccaccacttatagatccaatctcccatcttccgacaaacccgtctctgtttcactcacctggtcggataatctcaccgtcgtcatctcaacgccgccgaaatcatactctgtttcactcagaaaacctaaaggatcaagaaagttgacttcttcctccggttcactcaacgccgagatcctctgggatctatcggaagcagagtacgaaaacaacggacctgaaccaataagaagattcttcgtcgtcgtcgttgtaaattccgagattaccctcggagtcggcgacgttgaccacgagcgagacacgtcatcatcgtcgtcgtggcgagtctcaaaaacggagagaatctctgggaacctgttggg

SEQ ID NO: 158604 - DNA, 415 bp, Arabidopsis thaliana landsberg
tgtgatgctaacaatcatgatgtgatcagaagtcactaactcaagccaagcaataacaggttttggcgtgttctagcagtcctaagtgaacatgcagaaaacagaaaatcaagcaaaaacactaaaacactcgaccaacacagctcgttgcagagcactgagtgtggtcgagtgacaggtcgagtaataggcagtaaatgaaacaaagatactcgactgcacagtctgttgccagacaacggggtggtcgagtatcaagtcgagtaacaagaaaaaattgcagaaactaagcaacatgtgacaagatgcagtaaacaacagtagagtaaacaaaaaaattaattagataaagaatttccgaggatgggataattgagtagtttcgtttcctcattttaaaggtgattgacatgca

SEQ ID NO: 158605 - DNA, 670 bp, Arabidopsis thaliana landsberg
aatctaagctattgttaaaccaggaacgtgtatcaaacataggttacaatgttgttaacggcatttgcactccagtcaaagatcaatcagctccagtctatatcaccattggtgatggaggcaatattgagggcttggctaccaagtaagctaacatttcttctcaatggagccgattttttatattagattctatagattatgagtttaaatgtgtgatatggtttcttgtagaatgactgagcctcagcctaagtactctgcctttagagaagcaagcttcgggcatgcgatattctcgataaagaacaggacgcatgctcactatggatggcataggaaccatgatggttatgctgtggagggtgacagaatgtggttttataacagattttggcatcctgttgatgattctccttcttgtaattcttgagaatctatgaggaataggatttgttgtatctctatgattgaacaaccatccaaataaatgaattgtttgagagttcttgtgccaaacagaaaaagttaaaacagagatcggacagaaacttatttacaaaccgtttggtttcattgttctgaaatccaaaaattcagaaccgattgtgaataaccaaaccataccgaaccgaataaacctaaccgaaatcaaatcggattacaaaag

SEQ ID NO: 158606 - DNA, 575 bp, Arabidopsis thaliana landsberg
  unsure (1)..(575): unsure at all n locations
gtgtagcagatttgtttgcagactggttcactgaaggagaattaagcataaaggatgacagcaacggatcagaatcgatattggttgaagaagtgaaacttgaagatccaccaagaagagactgtaggtttgcttcccggagttcctttttcaaggcgagataggtagagctatatcctcctcttcgcaaccttctccttcgctgtacgtaaaacctctcatcaaggaataaacacaagttctaccaacatgattgtgtactaaataaagaaccaagctattcacagactaagcatcaaatattggaaataacaaatatcaagatgtcgaaatgtgaaaggatatcttaaagaaattcgcatggttgcgtcgtaatatggccaacgatatccaatcccaccctcttagtgcatacaggacagacctggaaaaaacaaagaacacatttttaagtccacgtttaagaggaaacatgagatgtagctaaaaaagtagcagtctgggtcatgannagatcactaatattaccgaccgaataacgaaatattcaagattggattacaggctgctaatga

SEQ ID NO: 158607 - DNA, 348 bp, Arabidopsis thaliana landsberg
attcaaaggagaacaacaagaggatcaaaaggagaaagaaggtgaaccagatcggaaagagatgtccatgaagggaatggagaacagggaaaagcatttgcttacagagtacacaaccattctcaggaacttcaaggatatgaagaaaactttggatgaaaccaagacaaagatgaagacagagaatgcgacaaaagatgatgagatcaagctactaagagagaaaatgagcctctagcagaagggtctaggagacagtaatgacttgatggaaaaccaattgtaaaacgacgactactccatcggatccatggctgcagaaaaccaaaacaagtccctggttgagga

SEQ ID NO: 158608 - DNA, 1309 bp, Arabidopsis thaliana landsberg
  unsure (1)..(1309): unsure at all n locations
tgcaaaagacaaagcttataaatgattgcaacagactcctaaaagatcttcttgacggacctctgcttgaaagcagtgaaaataaacgtcaatttatccgtgcctgtgtttctggactgcaaacccatgcagaggagaacaaaggacgtacctgtttggtaagaagaattatcatactgaccactgtatcatcttcaaaatatatgattctttattactttacagtctctggggatcttctattcttctttttagacttctggatgaaaatattatatacacttagtttgagtattaggagtattttgaacagtctatatatagctgatatccttcctaactttatatcctagattccagttgacatatatccttgacttgtgttttgatcatttcaattgcatatgcagtttattcttgagcaactatgaaatctgatctgcccgtcaaaacctgaggctgtgtatatgctgatcttgaacaaatcacacacgcaagaggagtttatccggggatcaatgacaaaaaatccatattcgagtgctgagattggcccactgatgcgggatgtgaaaaacaagatttgtcagcagttggacctgctaggtctactggaagatgactatggcatggagttgcttgtagcaggaaacatcatttcactagacctgagcatagctcaagtttatgagctagtttggaagaaatcaaatcagtcttctacttcactgaccaactccgcactgttagcttcaaatgcagctcccagcagggattgccctcccatgacggtgacatacagacttcaggtttgtgacgcttttctagtgaagtactaggccaaagatgggttttgctcgcctttacttattgtttttgataaaagcggcaaattcatcaatattgtgcggttaaaatattggccggggttagatggtgaagctactgaccctatgatcaaagacttggaagaggatggagaagactcacaggatccagactttgagtttgcattagcaggtgcaggtcgagaatatagtggtctggaaatcttannnnnnnnnnnnnnnnnnaggatcttaaactatcaatgggaaactgagattctctcctaggctcttaggcacttttcgattcacattgaaggagcgtaaaagaagaataattattataccaaagtagcttattaacatgtaatgtattcctatgcagagtttacaagatgacttcaaatccaccaagaagagaaggatgcagtccttgctcttctaaccattgctgaagatagagagacacgcgactctactta

SEQ ID NO: 158609 - DNA, 1848 bp, Arabidopsis thaliana landsberg
atcgctcaatagatgcaaggaacggatgtgaccttttggaaggatacaaggaacggatgtgacctttcggaagggtgcaaggaacggatgtgatgcttcgggaagcatccattcgcctcctatataagggaggacgcccaaggcatctcacatcatctcacaacatccaaaacaccataaaacattcttaaaggagttccaacacatcctagagttgttggtcggaaagggggtgcggctcggcgagtataactcgaccgaactgatgcgcatgctacctcccgatccaacggttcgatggagtgtagaggatggagagggtagaccgttcgtcttagagacgaatcagatctggtagaccgatcgttggatcagattggccagaccgatcgtcagacggatcggatcggccagacggatgggacagaccgatcgtcggacgggtcggatgggacaggccgatcgtctgacggatcgggtcggacagactgatcgtcggatgggatggatcgagaaaagtgttcgaggaagcacaaggataagtgcatccgaacacacccaagggtcgccaatggatgcaatcttaccggtaaagggagaaagcaccaaggatgggtaaggaacgtgattcaccatataggatcaatatcgcggctgccttcatgtatctatctcctcagccatggtaaaaccgatcggagatcggtaagaccaaagggtgactcgacggataaccaacgggaaagtccacggtgggaaccgatggacaaaacagatgttggacccgcgagcaaacctaaggccgacagaagtaggatttcatgggctagcctacgatgatccgggggatgaatccacggacccttgggtgtgattaggatatcgttcggaccgcatggctgaatcattaagccgaaagctttaccgaccaccatggaccggacggataaacggttagtaaactgtgggcggtcgtagtgttaaacgaccggatcgggaacatggatagttcgataagccgaggcttaatcgtccaccatgaaactgaaggggcgtacgtttggaggacggatggaccaataagccaagagcttgtttcggccatcgtgaaccaagggaatcgtacgatccccaatctctatcgttgtacttagaccagtggggttggttggttgtatggctaagtaacgatagggattggttcattaatgcacgatcggatacgaatagttgaacgaatagaataaggcgacaatcgggctaaggaatcaaatccgcatattggccaaggtatgtaacgatctagcttactagttaggatagacgtttgggaattgaccgtgaaaataggataaaagaatatgcgattgttaggcctagaatggttagcgaacaatatgcatgtcttgaccgagtaaaggatcgatctaagtctaagggacaaagacgatgaaactggtacaagagttggttagaattaaaccaaggttagaaagacttccgctgtgtaataagagagcgattatagaatttaacctcgtaaaggcaattctatgttgaatcgcgaaaaattaagaggttcggccgagaagaggcgcgaacttgagtacaacgtcgccggacgccgagacgtccgggacggggtctcacacattccctgaagcgaatgtgacatcctatggtcaagaaagtggtacaaccgtggttgtggccgtgggcatggtcgtggtcgtggtcgcggtcgtggtcgtgggcgtggatacactggaggacgaggcagtggagttcactttaagaactcaaactctcacaagaagtgggaaaacaaagatggtaacaaacaagtga

SEQ ID NO: 158610 - DNA, 278 bp, Arabidopsis thaliana landsberg
atgtttcaattgatccggatctgtaacattagtctccgtcgtcggagaagaagttgttgcggcggcggagtaaagaggacgaaacgcgtggtggaatctgggtttgtggaggcggagaaatggaaaaacgtgagggattttggagaaggtgaagagggaagaagatagagatagggataggattgttcttgaagctcctaccatagctttcgcgcgtgtttttcttactgtagtgtgaggaggaagagggttgtgaggtttatcggaaggttttgtga

SEQ ID NO: 158611 - DNA, 363 bp, Arabidopsis thaliana landsberg
gtaaccgattcggatagacactcaattaagatataagctgttaacctaaaaaggatgcaggtaaaatttaattctgctctcaaaggtttaattctggttaagttgtcaggccattgaactggttcatgcctcacttgctttctgactgtttgttgttgtttgtcacccaggtcttctatggtgttctcttgcagtattttgccgttcttgcaggcaacacgccctttaactttgatttactaaatatgcttgtcaaacctttgattgagatgcgtatggagatcccctactttgctgcaatatgtgctcgccagcggcttttagagacccgttcacaattttgcgaggctatcaagaatccag

SEQ ID NO: 158612 - DNA, 3329 bp, Arabidopsis thaliana landsberg
  unsure (1)..(3329): unsure at all n locations
atggtacccggtttaactgtattcgtaccgaataaaccaaatcgaaacgagaaagtaagaaatttgattggatttcagtttttttaaggggacaatcccattgaaaaaaatctaacaaaaccaacaaatcataattgcaacgaattattaacaaaatattctaactaattcatacatttctcatttaaacgtactcgtacctagtaatattatagtaaaccaataaattaccattgcaattataattagtctgtttgttcatcaccgtatacgatagcggtaaattctaccacagattattgttcgtttcgtcactgctgacgcataatttatttttgtttgatgatgctgacgccgactctgccgttgtcgcaggtgtttatgttaagggcaatgcaaatctaaatccaattaactccaatggccatataaagagtagagaacaacatatgaagcaagtaagcattagtgatttagaaccatatagtgaagaagaccgtaagtattagttccaaacattcagacccattataaagaaacagacatagaatttgtagaataaacccaccaaactaagagtaactaagagaacacaaatcgaaaagaaactcaaaattcccaagagatttgaatcagtgaataacaaaagtacctcggaatagagatttaacgtcgtatcaaaagtaactaacgacgggagatctaattgagctaaaatcaccgaaaaagcgagattgagacggcggagagagattagtttcaaagagcttgagatcgatgactataaaaaagaaatgatgaaagaagaagaaaaaataaggttaggtttgtttgtagtttcccaaacatagtaaggatagtcttgtcatttaccacatataacgcaacttttaatcgtttatcgctgactttaattagcgataataatttttagccgcaacgacttacgtttgccgcagcgtttggccgcaacgacgtgcgtccatcaaacgaacaacacctcttgcgtctgccgctgccgcaatgacctgcggccactaaacgaacacgctaaatcaaaccgtgttacttttgaacaaccaatttcggttagttccaagtttggcaaccctaaaataaaaattcaaaatgattggagactactcgttaatagacattgaaaacgatgaaatctcgttacgtttttatattttttgaactgtaatactattatgcagaagtggttttgtaatgggccgacaaaaaaaaagtggttttgtaatggatatgattcggatctattctggaaatggtctcaaaaagtagagttgagatctcaatacgaaaatgaaccctttcgtttgatttatcaaagccttttattttgaaaacgttaaatcctcactaggatctctctttatattaatggttaaaaacatatgcatgttttgtgtttttgcatcttctttttcatagacaaaagcaagatgagtcttagaaggacatcaatgtcatagacatggctttagtatcttttgagtgtgctttaaatgatgatgatttaccctgaacctgaaattttacctattaattaatttaagtgtgcgttaaaccataaaccatatactctgaacctgaaattggttctaaagcacaacctaaacttgagattggagaatgctttaaaaagaaaaaaaaaaattcaaggaaaccattaatgagccatcaaaaaatattcactaatatgacaagatgcattgtttatttttcttttcagaatcctcagtaactaccacgaaactcctcaaggaacaaaaccatatcatggattaggctnnnnnnnnnnnnnnnnnnnnnnnnnnntgtatagagattaaaacatacgcgtgtaaaagaaaacgcgtgaatcgaatgatgagtgttaacaaattggagatgccaccaaatcttttcattaaaatgaattgtggaggacataccacttttaacgaggtcatttccattgggtgacatgtggactctactttgggtggcatgttcatatctttccacatcaccatgtaaacgtgaaaacacccaccacactcacttacatctcaaacacatgtcttcattaacgtacgcagctcacaaaaaaaaatgaaactagtttagtgattctattttgccgtgtataatatacaaaatttgtaacaataaaatatttgaataagcacactataaataaacccaaagaggtgttagatttatatacttcattgtacccgaaagaccaaaaagagaatcagagagaatagttttatatcttgcacgaaactgcatgctttttgagacatggcaatcttccgaagtacactagttttactgctgatcctcttctgcctcaccacttttgaggttcataatatttttggtctttatagttccccaagaacacctagcaatattatactcaattcatatttatataataatgatgatcatgactgatatcattctcttcagcttcacgtccacgctgctgatggtgcaaaggtcggtgaaggcgtagtgaaaatcggtatgtaaccctaacttatatataacatgttggtatataacttaatatttctgatgggtgcactctcttcccaagttatatatatctttgttatggagaatgtctcaagcttttaatgagatgttatatctcggagaaggaaactatggactaaaaagcttgggattcctttgcaacaaaaaaaagaaaatatacttttgatgggtttaaacggactaaattacttacatgtgtttgatgaatgcatgaatatatttatgattgtagattgtggtgggagatgcaaagatagatgcagcaaatcttcgagaacgaagctatgcttgagagcgtgcaacagctgttgttcccgctgcaactgtgtgccacctggtacttctggaaacacccacctttgtccttgctacgcctccattaccactcacggtggccgcctcaagtgcccttaaaatttatgtttctgtttctacttctattgctatatatgtacatgtgtgtgtacgtgtgtatgtgtatttcggcgtgcaagtactgctatgttttggaggacaaaagtatatgtatgagaaactataaattaattagaagttgatggttatgcgtatttagcatgttcgtttcgtcaccgctagcggttgcgtctgcggcaaacctaccgcagattgttgttcgttttgttgtcgccgacgctgccgcagccgcagccgcaaccgcaagttttgtgttcgtttctcttacgctgcgtcaacattatattttgtttttattttatttttataaaattgtataa

SEQ ID NO: 158613 - DNA, 410 bp, Arabidopsis thaliana landsberg
agaaaaatggtcaaacagaagtagtaatcaagaccaatgggataactaatcaacaagactgtacacattgtagaactgataaaggtatttttttggaaatttgccctgtccaattcacgaagtgttgttcagatgggtgtttgaaaatgtccctttttaatatgtattgcagagaagaatccctgatcttcatcagaacacatctattggatccacagacatcacagacacatgggaaccaacagaggaaggccttctaccgtaaggggccaataaaaacttttataaaagctcatttttaatatgttctactgtttcaagttttgtcaccatagcaaactttacttatttcttttctttttgttttgtcttgaagtttgaagactacaaaacatgtgtcaatgataacc

SEQ ID NO: 158614 - DNA, 670 bp, Arabidopsis thaliana landsberg
tctccggcgccgatccaattttcgtcaaaggaacatggtatcactctcgtttcgatatctccgtcaccgatggctccttcacttggacttgcaatgcgacggagcaggaggtagcggagagagcagcaatgggaccagcctgtatctgagtatttagagctcgccgagcaatacttagggtttcagcagcctaattcggtctatggtttctccgatgctattgagggatctaaacggctctcttggacgtttgagaaggaagggactaaacttgagtggaggtggaaatgtaaaccatcagatgatagcaagaagatcgctgttaggattttggattttcttatggaggctgacataagggtaagtgaagaagttgtgaacaagacgagatcgtttgagaagatgaaaagtgaagctgagagatgtctcgcgcaaggtgaaaaactatgcgatgaaaaaacagagtttgagaatgcaacttatgcaaagttcctttctgttttaaatgcaaagaaggcgaaactgagagcagtaagggacaaagaagattcagtgagagcagttgaggaggaagagtcgacatacaaagctgaaagcttcgagagtggaaaaagtgatgatgagcagagtggggaagaagcgtcagaaaaggcagccagcagcaaagccc

SEQ ID NO: 158615 - DNA, 390 bp, Arabidopsis thaliana landsberg
taatttttttccacacaaaaaaagaagaaggaaaaggttaaaccctatactttcaaaccaccctaatcacttctctttggtttacaaaaatgggtcgaccagaccaaatgagcccgaggatgaacaataactttaatccggtctttcatgcacaatctgaacaaccggttgacgagaaacgggttgtgcaagctgagcagatatatcccaacaatggtggagtggttaaccaaccaaaccaagtaccgatgagacctggtccacctacgtatatcaatcaaattgcaacatttaaccaaccatatggagtatcaatggccggaccggtccatacacagccatcgaactggacttcaggtctatttgattgcatgaacgacggcgaaaatg

SEQ ID NO: 158616 - DNA, 665 bp, Arabidopsis thaliana landsberg
agagatgggcgtctttagagcgtggtggtggagtgttgcgttgaaacgacgttagttgaatcgccgtaaagagagatgacaaaagaatccataaaatgaaatttcgagttaaacccatgattactctaaatctcttcactcacaaaaatctctttttttaaaaacaaattctggaaatgaaaaggtgaaaaatcggaagtttaattttgaagagaggaagagaccgcgttaaagaacagaacagcttagtaagacgctgtaatgaaaatttatgtccgcgttgaaaatgtgtatatttccttgtttggtcggattttaatgttttttcttgatcaagtaaacaaaggttacgaacaaaagccaaagacaaggttttgttcttctgacaaaattataaaatagtgggtttaagttttcaaattacaagatgaaccatatatttctgttaataaaaaaatgcaaccccaacctatatcttagtaattatgtgaatgtgtaatttacacctaatcgttagctataaaacattgataccaaacacagtttatagaatgttcgcttaaatgacttatattcaaatatttactgatatttctgtctactaaattttagtgatttctaagagtgtttatggaagttttgaatgtattgagagtgtgatttga

SEQ ID NO: 158617 - DNA, 1466 bp, Arabidopsis thaliana landsberg
atgatgacggtaaaatctgtgacatcgagtctaatcttaatccttctgataacttacgtggccgcaaaaggtggtggtattcgcggtggccgttggtttggtggtagagttccaagccacggcggttctggtcatcgtaatagcggtttggttgacggatcaaatatgggtttaacgatgacgtgtgtgttgccttcttgcgttttgcttatgttgttcaaaagattctgaactcttcagaaaataaagaactggctttttaattaggggcttttcatatgacatactctcttttgttaaaagcttttaatatgatatacataacaatatattgatttttttcattttttgcaaaaatttgtcattcctaattggggacatctgattagaaaaatatgtggtacttatttacgtgaacaacaacgacatcaacattaaaaacggaacaaatacttttcaattaattatcttttatttggggatacattatgtatttgatgtcaacttttgtatttagaatctaaaataatacttattttgaaacataaaaggacattatctatttatctgttttaagaatctcgagagttcaaaagtttttacctttaaatatttttcagccatttgcttatttaaaaatattcgatcaaattgaacaagaaagttaaaatttatagagattaacacaagaacgaatgacacttcaaaagtttatttaaaactaaccaatgagaataaatggaaaaacgaagaagaaaaaggaaaatctccattattattggctaaaaattattatttatataatcgatcattttatttttctagggaaaaaaggaagagtagtcaataataagggactaaacctagacaaaataggaattggagaaagtacttttccttatgcaaaaccccaacttgttattttgtcgaagtttttctctgttacaaatcaaaaccacaagcgtcacttgtttgttttggttttttttataggtttatatttctctttcgataagatgatgaagtcttattcctcaccaaagatgatggtgatgctaaaattcctgactgccggtctaatcttaaccctttcgataacttctgttgcgggccttgcggcaaaaggtggtggtggtggcagcagaggtggtggtcgcggtcggggtggtggtgtttatgcgttcggcagacactctaatcatcatcttcatcatcatcatcatcatcatcatcatcatcatcttcatcactgtcatatggagataacgtttgcccatacctcgacttcttcttcggattgattatcttcggattagagtgcgcgtacgtcacgacaaacccacgagtctttctactcggccgtctcgtcgccggtgaacatttatcagaacccaaaacaaagagaggtgattccgacggaagagtaaagagaattcgagggtttttaaaacagtacagtgagaaac

SEQ ID NO: 158618 - DNA, 644 bp, Arabidopsis thaliana landsberg
atgacaggaaaactcccggagtcggttaaaaaaggcgactcgatagataccggattggctgtcttcttgagaggaaagacattaagggagatggtggatccgacaattgaaagctttgacgagaagattgagaatataggtgaagtgatcaaaagctgcataagagcagacgcgaaacagagaccgataatgaaggaagtcacagggagattacgagagatcactggattatcaccagacgacactatcccaaaactttcaccgctctggtgggcagagctggaagttctgtccactgcgtgaagagacaactactgaacttcacaaaaaaatctgtaagtattaatatgaagatttgagtgaggtttttgagtctcttagaagctcttggcttctctttaggctactttcatctatctatctatatataagtatggaacttagtttatataacggctttaaaattcggtggatctatttggtcgtttatgtcgtaaacagaaaatgtcctaatcacggtaatacccctttttggtgtgcataatgttggtgggtggttactgtctttgtaaattagtgttactatgttcttgatatgtttaatcatcaggttctgaagtataattcacaaattctgctcgttc

SEQ ID NO: 158619 - DNA, 533 bp, Arabidopsis thaliana landsberg
tcctgagctctctgctatttcttcttttttccttttcttttcagacgaacatagaaatatttctacttccaaatctttacggatttgtcatgacttgcagacgcaaccactcccgtcgaaggcgactgagccaaggcagagatcacacactcgtggcctgctaccgtcatacatttgttctccattgtgttccacagctctatagcctgtcacagattcgtttaccaaagttaaaacaactgagagacacattcacctcatcacacatttgaacataagactagatattgtttgacacattatttgtttgagaaatggggatataggttatacctgatagccaccgatgaccaagagatcgggatagctagggtgaaaaacaacagagtggaacttgtttccactgttgctaagctcgtggatgcaatctcctgaactcagtgaccataattttacagcgtcttcactaacagacgccaccaactctccgtttgggctccaacaaacagaatgtacatttgaggaatgtccct

SEQ ID NO: 158620 - DNA, 121 bp, Arabidopsis thaliana landsberg
ggaaagtaacagaggttgggtcgatgccacgactcttgctccttccagagtcggttctggtatgatcgttgccatcaagagattgaattctgagagtgttcaaggatttgcagagtggcgt

SEQ ID NO: 158621 - DNA, 313 bp, Arabidopsis thaliana landsberg
gcaaaaagagctaaatgcagagagcttcagatccgaccagacaatgacgatcgttaaaccgtcgcagctctcattctacggcggcggatcttcgacgttatgttcactcaaaagctcactcctcaccggtggtattctgactttcatttccctcttctacctctgtctcaattacttacgcactataccgccgtctcctgtcatacgagtaactccgattcatgtacctcataccttcgtgaatgagtatgatactgataacgaaacaccgacgatggaagaagaaacctactaccatgatcatcactcaccg

SEQ ID NO: 158622 - DNA, 1098 bp, Arabidopsis thaliana landsberg
cacactagatttgccaacttcatcactcaccaaaatccaacgtgaagaagaagatcaatatggaagctctaatgcttatcttcacgttctgtttcatagttctctctctcatattcctcatcggaagaatcaagcgaaagctcaaccttcctccgagtcctgcatgggcgttaccagtgatcggtcacctccgtcttctcaagccaccactccaccgtgtttttctatccgtctctcaatctttaggcgatgctccgataatctccctccgtctcggcaaccgactcgttttcgttgtctcttcacactcactcgccgaggaatgcttcacaaagaacgacgtcgtactcgcgaaccgcttcaactcccttgcttcaaaacacatctcatatggctgcacaacggttgttacagcttcgtacggcgaccattggagaaatctccgccgtattggcgctgttgagatattctcggctcaccgtctcaatagcttttcatctatccgccgagacgagatccaccggcttatagcttgtctctcacggaactcttcactcgtaagtttgttctttgttctttgttccaattttatgctaattagcaaaatttattataatcagaatccttagtccctagtcaatctctgcttataggtgaatttcagtgtattgtagcaaatatttaacatatgatatacaataaattttgcaggaatttgcaaaggttgagatgaaatcaatgttttctaacttaacattcaacaacattataagaatgttggctggaaaatgttactacggagatggtgcagaggatgacccggaggctaaacgcgtgcgggagcttatagcagagggaatgggttgttttggtgctggaaacactgctgattatttaccgatcctgacttggatcacaggttccgagaaacggataaagaagatcgctagtaggcttgatgagttcttgcagggattggtcgatgaaagacgagaagggaaggagaaaaggcagaacacaatggttgatcacttgctttgtctgcaagaaacccaacccgagtactacacggacaacattatcaaaggaatcatgctc

SEQ ID NO: 158623 - DNA, 411 bp, Arabidopsis thaliana landsberg
actgtcgccaccaaaacacacacacacacttgcctccttcttcaacctctcttcatcacattgcgtcttctccatccgatccttcaatcctcgttctgtttttgatccaattgaatcgcttccgtgttttgattctgtttatctttccaagtttctaatgatggcggagactgaaggatcagtggccgatgatcgagaattgatcacccgtgaaggtggtattgggactaagtctccgtggaaaacaacgacttctcctgttgagacttttgacgctcctgtaatgggagctcattcgtggcctgcactcgccgacgctgcgcaactaccgcgtcctaagaatcccccggcgcctgcacctgcaccgccgtctaaaatcattccgacatctatcccaatccctactccggt

SEQ ID NO: 158624 - DNA, 2019 bp, Arabidopsis thaliana landsberg
  unsure (1)..(2019): unsure at all n locations
atggagatgggttccaactcgggtccgggtcatggtccgggtcaggcagagtcgggtggttcctccactgagtcatcctctttcagtggagggctcatgtttggccagaagatctacttcgaggacggtggtggtggatccgggtcttcttcctcaggtggtcgttcaaacagacgtgtccgtggaggcgggtcgggtcagtcgggtcagataccaaggtgccaagtggaaggttgtgggatggatctaaccaatgcaaaaggttattactcgagacaccgagtttgtggagtgcactctaaaacacctaaagtcactgtggctggtatcgaacagaggttttgtcaacagtgcagcaggttcttttattcttcttcccagttctaccctttagttctattctttattaacatgttttgccattgccggagatattcgagtccggccaaggctctgcttgttccactgttgtgaatcaaatctaaaggctttagctttttgtgattgtcagtgtcatatgcttttttggctttaacgtctttttattttcattttttaaaaaactttacagcttagttttgtaacctggtcttgtgtttgttggactcgttgggctcatttttgggaatatgtttacgtctacttgtagatgcttctcttttatttttcttttgattttgtctttctaaatatctaatccaaagagatatgaaatgaatggacaagaagaaagccgttgccctcatttttgcttctttaggtcatatcattattgagggggacaaaactagtgtaccatagcatcattgacgtgatcattgaggaactctgttacattatattacaagggtgtggttttagattttaattcaaaactgatgacaaaagcttataatgactgatagaatgtatacaaacggtagttaacgtggagagggcttgcctttggaatggtctgctatgttgcttttcttttgaagtaactcaatctgaatcaatcacataggtttcatcagcttccggaatttgacctagagaaaaggagttgccgcaggagactcgctggtcataatgagcgacgaaggaagccacagcctgcgtctctctctgtgttagcttctcgttacgggaggatcgcaccttcgctttacggttagatccttaagctcgacacataagaccgattcatgtacttttcatccttaaaagatagatgtatatgctacagaaaatggtgatgctggaatgaatggaagctttcttgggaaccaagagataggatggccaagttcaagaacattggatacaagagtgatgaggcggccagtgtcatcaccgtcatggcagatcaatccaatgaatgtatttagtcaaggttcagttggtggaggagggacaagcttctcatctccagagattatggacactaaactagagagctacaagggaattggcgactcaaactgtgctctctctcttctgtcaaatccacatcaaccacatgacaacaacaacaacaacaacaacaacaacaacaacaacaacaacaacaacaacaacaacaatacatggcgagcttcttcaggttnnnnnnnnnnnnnnnnnnnaatggctcaaccaccacctgcacctagccagcatcagtatctgaacccgccttgggtattcaaggacaatgataatgatatgtctcctgttttgaatttaggtcagataagtagtggcacggcaatgggtgagttcgagttatctgatcaccatcatcaaagtaggagacagtacatggaagatgagaacacaagggcttatgactcttcttctcaccataccaactggtctctctgacttgtctttgcatcagagaatcttcttacaatgaacgattctgcaatatcttatctttttgcttctttgtttattctgttatctgctatcaataaaccagacaattgttgccagataatggcttttgattttgatttgttgttttatctccatgaaaatccaagttatgagatc

SEQ ID NO: 158625 - DNA, 125 bp, Arabidopsis thaliana landsberg
ctaagcctatgtttctctttatagcttaaagtgtgtgatgcaagtaaaaacaacaaagagagattttagagaagtcttttccacaaaagaaatgaaataatggcactaatatttggatatgtaat

SEQ ID NO: 158626 - DNA, 97 bp, Arabidopsis thaliana landsberg
cgtctaacgcttgtgcaatggcagatagttcgtcgaggaggaaccttaaacgatccttcttagaagatgaagattccgataaacaacctccgctagt

SEQ ID NO: 158627 - DNA, 264 bp, Arabidopsis thaliana landsberg
aacttagcgtttgatggagtgattaaaaagtacaagaatgctccagcattcttgaaagtaaaagagagttatgatccgaatggtttattctcgagcgaatggacggatcagatcctagggatcaaaggaaacccgactatagtaaaagatggatgtgcattggagggtttgtgtatatgttcagatgatgctcattgtgctccgtccaaaggctatttgtgtcgaccaggaaaagtttacaaagaggctagagtctgtacacat

SEQ ID NO: 158628 - DNA, 220 bp, Arabidopsis thaliana landsberg
ccttaaagcgagaagaacggcgagtggcagatgtggataccggagctaggagtggtgattcgctacctcttttttgtcgccgattcacttgaaccttagatcttttgttttctggagttgacatgtttgtatcagtggaaaatgatatagctggagctgaagcagatatggcagacgtttcctgttgcagttgtcctgaatgtgttggcagctctgacaa

SEQ ID NO: 158629 - DNA, 191 bp, Arabidopsis thaliana landsberg
cctcggattaatacgagtgacaaacgactctgattccagtttctcttcggcagtcgaattttttatcatcaccatcggttttgtgatttgaggttttcgaaattcatggcgcttaaaacccaaaagagagaagaaattaatggcgctcaataaaactctcaggatctgaacgctgaaggagagtgaactat

SEQ ID NO: 158630 - DNA, 108 bp, Arabidopsis thaliana landsberg
agagaaaaatataacaaattataagccccgtccccgtcactattctcttatgttgtcctaataataatccttttcaccatcccatacattcaaagccagcccggtgct

SEQ ID NO: 158631 - DNA, 381 bp, Arabidopsis thaliana landsberg
gaaatttttgactcaaatgagttgatgagtcaaatgagttgatgagtcaattggtttgatgagtaaaatgagttgagttgtaatgggttaatggttttagtggtttacccaattaacccatcaaattttgtaaaattgaattaaaccaactaaaatctctaaaccaatatttaactaacacatctaaaccaatttaataaaatcatccccaaatttaagaaatcaatcgtttctcgacctccacttcgacctatactctccaccggtcttatccacatcggagactgacaagacgacgaaaactgcttcaattgaagacgacgatgatgatgtgcttgtagtgggtcaaaagggtgaggtatgtttccactggacccttct

SEQ ID NO: 158632 - DNA, 356 bp, Arabidopsis thaliana landsberg
gactaggttaacttgagggtctctgttgcggtggcacttagatttggttaatgaacttgttgtctagggttaatttattgagcatgtcaatcacctgtaaactgagaaaacgaaactactcaattaccccatcctcgggaattctttatctgattgaattctttgtttactctactgttgtttactgcatcttgttatctgtcgcttaatttctgcaatttttgcctgttactcgacctcatactcgaccatctagttgtctggcaacaaactgtgcagtcgagtatccatgttacattttctgtctgtaactcgacttgtcactcgaccacacccactgcctggcaaagagctgt

SEQ ID NO: 158633 - DNA, 140 bp, Arabidopsis thaliana landsberg
tgtgatgctaacaatcaagatgtgatcagaagtcactaagtcaagccaagcaataacaggttttggtgtgttctaacagtcctaagtgaacatgcagaaaacagaaaatcaaacagaaatagtgaaacactcgaccaaca

SEQ ID NO: 158634 - DNA, 152 bp, Arabidopsis thaliana landsberg
cacttttaaggaaaaccctaatatcctcaaaaatggcgttgagcaccgtgtttctgacagagctatagtcttcatgtagccactcgtgccagccgtgcgggtagatctccggttagcttccgcagtggcgctgtctccgccgagggctaatt

SEQ ID NO: 158635 - DNA, 356 bp, Arabidopsis thaliana landsberg
gactaggttagcttgagagtctctgttgtggtggcacttagaattggttaatgaacttgttgtctagggttaatttattgagcatgttgatcacgtgtaaactaaggaaacgaaactactcaattaccccatcctcgggaattctttatctgattgaattatttgtttactctactgttgtttactacatcttatcgtctgttgcttaatttctgcaattctttcttgttactcgatctcatactcgaccacccagatgtctggcaatagactttgcagtcgagtatctgtgttatactttctttctgttactcgacctgtcactcgacctcacccagtgctctgcaaagagttgt

SEQ ID NO: 158636 - DNA, 359 bp, Arabidopsis thaliana landsberg
ccttccttcttcttcttcttcatcctcctcactgtttaacgcagagcgccctccgtttcttctcttctcctcctctctcttttctctctacacaaatatttttcccttcttttttcattctctttattcaatataatccttttgattcgctggtgatcggtacgagaaacttataatcacacgaggaagctgtgtttcgtttatcctcgcttaatcggaatcgaaatttgttctggagaagaaatttaacgaatcatagattcctgatgcaaaaaaaaaactatcacagatcggaatcggagacgtaaccattacataatgcgaatctggatttaacttgggtataatgatgagggttt

SEQ ID NO: 158637 - DNA, 189 bp, Arabidopsis thaliana landsberg; identical to SEQ ID NO: 62503

SEQ ID NO: 158638 - DNA, 211 bp, Arabidopsis thaliana landsberg
cattgataagggcaactctagggttcatcagatggctaataggcgaaacgtaggtacccttgacgatagattcaaaaaccgagtcaatccactctcgtgacagagacccccataactctaccacttcctaatatcaactctcgttgatgaaaaatagaagagcagggtttaagaaacaatctaccaaagccaataagcagacaagccaatc

SEQ ID NO: 158639 - DNA, 256 bp, Arabidopsis thaliana landsberg
ggtgtggaatatccagtacatcaccttaaccccaaatattagataggaactgacgtcaaaatacagttgcacaatagaccacaacgcgtattcaatgcccttacttgcgtgaaaagcagccgatgtcattctttttttgtcaacaacttatattattagaaaggatcatagagccaatggggagaactttctcaacatcaccacccgatgtgatgtctaccattaaatatacgtgaagatatttggaaaattactt

SEQ ID NO: 158640 - DNA, 550 bp, Arabidopsis thaliana landsberg
gtcctccgccgcctctcttcaacgtcccagtaagaacccacttctttaaactcttttatctactatcatattttatctacatagcatagtttgtttgttttgaaaaaaaaatctatatggaaccgttttatctgtatagttatgtgtggaatacgaacctaaaagatcttaacttctaacaattgcatactcaactaagcaaaatgttttgttgcttaaacaaaagaataaatgaaggagaaaaagtgaaaaccccatttttttgtttcttttgcctatttactagtagtcatgaatttactctgtcgttaaaccaggtggagggcttgggcaggggaagaaggagatagctaggtcgggtttaccgggtcagattgtagatcagaagcgggtagggggacctggctcggtgcctccgacgtgtagatcgaagtgtgggaaatgtcagccgtgtaaaccggttcacgtaccaattcaacccggtttaagtatgccattggagtattaccctgaagcttggcggtgcaagtgtggcaacaagctcttcatg

SEQ ID NO: 158641 - DNA, 140 bp, Arabidopsis thaliana landsberg
tgtgatgctaaaaatcaagatgtgatcagaagtcactaagtcaagccaagcaataacaggttttggtgtgttctagcagtcctaagtgaacatgcagaaaacagaaaatcaaacagaaacagtaaaacactcgaccaaca

SEQ ID NO: 158642 - DNA, 466 bp, Arabidopsis thaliana landsberg
  unsure (1)..(466): unsure at all n locations
gttgtttctgttctgcaaggataggcataaagaatatagacgtgatgtgtttgtggatgttgcaggtctgtaatataccctacaggaaaacctttctttcgtatttcgtatttcggtatgttatgatgtattgatatgcagatttgtggaactttactatttttcaggtgaagtggccaggagaattgcatttggacagttgaaaaggtttgcatggagagagctccagttagcgacagataacttcagcgaaaagaatgtacttggtcaaggaggctttgggaaagtttacaaaggagnnnnnnnnnnnnnnnnnnnngctgctgtgaagagattgacggatttaagaaagtcctggtgtaaatgctgccttcccaagggaagtagagatgataagtgtaacagataataggaatctactccgtcttatcgggttatgcaccacacaaaccgaacgccttttgtt

SEQ ID NO: 158643 - DNA, 380 bp, Arabidopsis thaliana landsberg
gatgaaatgtgatcatattttgatttaaaaacgacatagattacttatttttgttgaacggtttagattgttagggaattaattttattgaacggtttagattgaatcggatcataaaattttatgaaattgttaagaccaaattacccttaatgattttgaatagcaaaaaacaaaatcaaaaattgaaatcaaaattgaggaaaaattagacaaattttcaatttgtacttcccttttaataataaagggattaagtaaacattaaaaatgtagactataacggccccataaacggctcactttttctttgatttcataatcattaagctttcttaaattagggaaatgccgaaaggcagaaaggtagtcgtataatg

SEQ ID NO: 158644 - DNA, 254 bp, Arabidopsis thaliana landsberg
tcagctggctggtgggtctgtgtaggaaagcatggtacttggatttgcattccacagattccgctgttgttcgcgtaaatgtttggattgttcaatctgtctagctgaggactttcagggattctacctttaagcttgttgttacgcaaatccaatgtattcagctcgcttagcttggataacgttttcgggatttcgccagtgaggttgttgtgtgaaaggtctaagctctctaccttctcaagatctccaaa

SEQ ID NO: 158645 - DNA, 220 bp, Arabidopsis thaliana landsberg
atacaaagctgggaaaagtcaaaagcttaagagagttgatacgcaacacaacggtcacgtctttattccaacaacacacacatctcttagcataaaacacatattttccccaatttttctgccatatatatgattttagaccataataatttcatcaaaagttacagtttgacccacagctacagttgtcgcactccttgttgtagttcttctcgcaact

SEQ ID NO: 158646 - DNA, 233 bp, Arabidopsis thaliana landsberg
aatctcgaagatgagaccactcttaatctcgaagttgttgttcaggatagcaggaggtgcaattcctttcctctgacggtgatcacgtggtgcatctccaccaccaatgttggcagggccattttgttgattctgttcgtcagccatttcgagtggttgcctaggtacaaagttaactgtatttctcctttctctgagttcgcgagctatgcggtcgatgttatcgttgaaaa

SEQ ID NO: 158647 - DNA, 112 bp, Arabidopsis thaliana landsberg
tccttgtgtaggaaaacattaagatgagagagtaaagggagagttccaactttgtttgcttttatagatacatcaataattggcggtgaaacaaatcattacaactttataa

SEQ ID NO: 158648 - DNA, 99 bp, Arabidopsis thaliana landsberg
ttgactcttcttctctctctctctgcaaattcaaaacagtgaaaaaaacctctcttcattttttaactccctctctctctctctctatggagagacgaa

SEQ ID NO: 158649 - DNA, 519 bp, Arabidopsis thaliana landsberg
ccaaattaattccgacaataatgaattaataggtcacgtgcatttacatgaacatgatcagtcgaaatttaatacacattggctctttgtttcttcatgattcattataaatttaatttgttagcaacgtagaaatttccatagaactaaaaacgaaaacattacaaatccctccccaaaaaactgtatatttacatattcttaacaaagttattacttagttctattctccaccacccccaattcgaccgagcccgaaaaaaaaaacatccgtcttatgtataaataacatagatacatacacttagcatatagtagaaaatacaaaaaaaatagacccaaggaaaatcggactgacccttagatgattttgatgttcaaagaatctgctttggctctgtttctaactctcataattttccttcaggaacttcttttatactcatatcaaccatctctattgtactgaaccctccatcctctattgatccgatcgttgactgtgaatctatccctgac

SEQ ID NO: 158650 - DNA, 354 bp, Arabidopsis thaliana landsberg
agaaactgctggtttcatctatttggtctgaaaagcctcctccagaggtttcagaacatgttcgatgataagcaaaagaatctgtgctcattgttgagtaaaccggagtttcagatgctgaatgatcatttggatcgatgggaccaggtgactgatgatagcccacatcgtcgttttcttcgtgatttggcaaattctccatcttctcaatgttctgtttttgaaaattcctctgcttttgttgatctcttgttttaataaaagaaataaagcttagaactttcgttgtgatgtatcaggaaaactttagaatatgaatctaaatccgacaattagaatcgggaattatttttg

SEQ ID NO: 158651 - DNA, 99 bp, Arabidopsis thaliana landsberg
cgaacatatcgttttgagaagcctaagtcattgagtgaatgtgactccaagctttttgctagttgacgtccagcagccatgaccctggagcaaaagact

SEQ ID NO: 158652 - DNA, 104 bp, Arabidopsis thaliana landsberg
ggataatcctgggatcgattatacgacttgtaatagcttatgtgcaaactcataggttgtatcgaatccttttcttaatcaataaagtatccgattgtttgttt

SEQ ID NO: 158653 - DNA, 433 bp, Arabidopsis thaliana landsberg
  unsure (1)..(433): unsure at all n locations
gaaggcccacggccgaaaaaacccaaacnancctanaanaananagacaaagacacagnggcaccgcactcgaaagacagacaaagatactctaattcatctaacaggtgggctaaggcaagacccctaacttacgtctcctcataaaccctataaaaattacagattggaaaataatactctgcctcactatctaccttgtacacacaatctttctttcgcccagatgaattgttcctagttaacttgctactaatctactccacaaactgctaaaccatggcgatctgatttcgccagaccccgtacattcagcatcaccttcttctgccgtgctgaaaagggtttgatctgagcagtctaaagaagccccacacgccatattgtaggactgacatgctgaatggcatactcgtagtctgtcgtctccatc

SEQ ID NO: 158654 - DNA, 421 bp, Arabidopsis thaliana landsberg
gattgctctctcactctcagtctcactcacatcattaccattctccttcgcgctttcatcgactccgtgcaaatcacgcgcctctcctccacgtagcaccgtctcgttgagttcttccaggagacgacaagatcgccggcgatcaattgaggctatgtctcaggtgatggaattggaagatgaatccgatttcgagaagcttctctcatcggataatcggatctcgatcactggattcggttctcttctctccggttcgtacacatttcagctccttctccttcgtttgtgtataattgatcctcgagaatgattgattgcttttgttcttataatagagagaagcgcgaggagtacattcccagatttggagaatttcagaatcgcgaaattgcaaggattcagaagagttttcgctcat

SEQ ID NO: 158655 - DNA, 423 bp, Arabidopsis thaliana landsberg
  unsure (1)..(423): unsure at all n locations
gtcatttcttctgcattattgtcgccataatccttttttgttttgtaatcagtattttatcattaaacgtgacaagtactgtcttcattctccaacacataaaatagtcagaactcaataaataatcataaaattgagtactctttggcccctgtatgattagccgttaaactatcactttcgcaaaaaacttcatgtgattactttgatatttatatgtactaaaatagttttttttcttcgtcttatgttcgcatataacttaaaagataaataactcctacgaagtatatgatacgtgactccaatcaaaatctttgacttgtgagttgtgaatatgaatttaagtgaaactgtcgcccnnnnnnnnnnnnnnnnnnnnnnnnntggatacttttaaatatttttgtttaacaaattaaa

SEQ ID NO: 158656 - DNA, 311 bp, Arabidopsis thaliana landsberg
tcatatcgacaagccacacttttaaggttcaatatttcttcaactctatctgccctcttttgccacattattacatgtctatatattagttcaatacttcaatctttttatcttacagattaactatttacatgtaaaaaaaatgattggtctcttaacttttttgttgggatactgtattcttgagttaagttgttgagataatgtttatctcccactccaagtgggatctaactagtttttttctatcttcaaatcttctacatatattagatggtggtgaggatgagactaggaaagattgtgaaggc

SEQ ID NO: 158657 - DNA, 528 bp, Arabidopsis thaliana landsberg
aagccgaatcagagaagaaaccaggaggaatctctctccgaatctggccaccgactcagaaaactcgtgacgccgttctgaatcgcctgatcgagaccttatccaccgaatcaatcctctctaagagatacggtactcttaaatctgacgatgcaaccaccgtcgcgaaacttatcgaagaagaggcttatggtgttgcttcgaatgctgtgtcgagtgatgatgatgggattaagattcttgagctttattctaaagagattagtaagaggatgcttgaatctgttaaggctagatctaatgctagtgttggaaatggaagtgtggaggatgctaatactgatgctagtgaggtttctaaagatgatgctggtcctggttcagaggaggagaagagtgaggcttgagaaatttggttttacttccttattataatctgttgtctcttagggttttgctgttcttgtaatgatgatgatgacttgtggatttggtattatgcatatttgaagatgtttcttcttcctt

SEQ ID NO: 158658 - DNA, 110 bp, Arabidopsis thaliana landsberg
ggtcatgttttggataatagggtctcacatctaattgaacctgtttgttgtactcatcatagcatcctaagaagaatatgaagaactaaactattcccttgaaaagggaa

SEQ ID NO: 158659 - DNA, 212 bp, Arabidopsis thaliana landsberg
cagatgttgcgccaacaaaagcatccacacacgttttccaggtatattattgtttgctgcattgaaggaaacactcccacctaacaattttacagtatggggagacctgatttttgtttgagttttaattttccacccactacagtacctgcttaaactctgcagtcaaccgcttcttgttctaggcgataaggtcacagagccggcggctt

SEQ ID NO: 158660 - DNA, 175 bp, Arabidopsis thaliana landsberg
tagtcttaatttatttgctttactaatgaaaaacgagaaaatacgtaataaagattgtagcagtgagtattattctcttattacagactccattattccttcctttgagcaacatctatttgggggagttcttgatgtcaatcacgaaacggtacttgatgtccttcttcaccac

SEQ ID NO: 158661 - DNA, 228 bp, Arabidopsis thaliana landsberg
atgttttacaaatggagttgctaatagccaagccgcagattgcgaatcttcaaactcgagtgtggtcattacaatgtcatgaggtggaactagagaaaaggattgatcactttttgtcatcaccaccattttcactagcttgactctggtttggctcttgatgttggagctgatgctgatgttgatctagagtcatggccaaaccatcgcctctactgccacgcattg

SEQ ID NO: 158662 - DNA, 371 bp, Arabidopsis thaliana landsberg
ttaaccattttaggatgtcaagacgtgcaataagagtggtgaaggcaaacacggagaaaacgaagatcatgacgaaccacttactagtctaaagaaaaaaaacggagattgaagtctaaactgaaacttttattatgatatgaagtttatgaaacaaaagaaaaagtttatgaaacaattttaggtttttaattttccttttaccacttaatagtctaaagaaaaaagcaaggattgaagtctggactgaaattattattatgatatgaagtttatgaaacaattttagtttttttcttttttagttttctttttggtcttcccttttcctagattttgtttcttcactattctaagtttcagatgatttt

SEQ ID NO: 158663 - DNA, 433 bp, Arabidopsis thaliana landsberg
tttctttttagttttaaaataattttttcgatttagtagttgtcacaagaatcgtaaatgctaaaaagtaataatttactgcttgttatgctcaggtgggtgggttctatgcacaaaacattccatattgaagagaaaaagaattatgattgtgcaaccaagtattgctgcaaatggttgtttctcttcttgttctttagtttcctgaatgcagatgactctatctgtcttactctctccctgctcactcccatcatctctcctatctcttgcaacgtcttcattctcccatcctccatcccaaatctccaacgtatcacttgtttctcccttgtacccaacgagtccaacactttgtccaagtcctgcctcatgaattcctttatcagtatatcttctgacgttactgcttctggatctgctatcacttcct

SEQ ID NO: 158664 - DNA, 85 bp, Arabidopsis thaliana landsberg
ttttttttcttttttttttttttttttttttttttttttcttttttttttttttttttttctttttttttttttttttttttttt

SEQ ID NO: 158665 - DNA, 101 bp, Arabidopsis thaliana landsberg
aacgaggttttttttattaggtgacatcactgatacaaaaatttgagtggacgtctacaatatatcaatccttgtgttcatcatcttcaccttcagaatct

SEQ ID NO: 158666 - DNA, 316 bp, Arabidopsis thaliana landsberg
acttttttttcgtcacatactcccattaagcatatctagaaaaccaactcaacgatacaagtttttaaaaataagtatcttagaaccaaaccaaaagtccaagaccacaacggatacaaatacttccgttatacatacacacaaacacacatatatctatagtataacgtgacgtacaacattcatttccataaccagcaaacaacacacgtagtagatacaccgaaagtaagaaaaaaaaagcgatttaagtaaaaaattgattacctctgattatattgttgttgttgttcgacgatagtgatagtgttgtgac

SEQ ID NO: 158667 - DNA, 374 bp, Arabidopsis thaliana landsberg
gcccaaggagaatggaaacaaacggagcttgaatccgtcttccctggcaccattgatttttgttaggttgcagagcctatcaaattcatccaagtggtcgagtggatcctccattggcagcccatggaatttattcccctgaatcatcaagatgagatcactcttaatctcgaagttgttgttctggatagcaggaggtgcaattcttttccgttgacggtgatcacgtggtgcatctccagcaccaatgtttgcagggccattttgtttattctgttcgtcagccatttcgagtggttgctgaggtacaaagttgattgtgtttctcctttctctgagtttgcgagctatgcagtcgatgttgtcgttgaaaa

SEQ ID NO: 158668 - DNA, 178 bp, Arabidopsis thaliana landsberg
agccttggcttattccgcagcaaccccaccttttgaataatcatgagacttcttagaacagttggagatctttttttgtgtgtttaatgagagatataagtgtcttttaatttgatgtaatcggatttattcattctcatagtttagtttggtttaattcatctttgtccgttgcttt

SEQ ID NO: 158669 - DNA, 286 bp, Arabidopsis thaliana landsberg; identical to SEQ ID NO: 75519

SEQ ID NO: 158670 - DNA, 461 bp, Arabidopsis thaliana landsberg
cagagaaataacatattaagattacgacacaacttggagccagcagatttacatggtacactaccacgaaagaggttcactgttttagggaacaaacatagagagaataacaaaactaaaaagaagtaaataaagagttctttgcttcttcaacaagcaactaaaaccaaaacacactaacttcaagactcctattattactactacttcttctgctgctgctgctgcttcatcattaagattccttgtgccacactctttcaattcccatcatctgatgatttcaagtaaagggtttctccaccatcccctgaacttcctcctctgccttcaccgccaccaccacttcccatttccggcttcccacggccaaaatcatgaaacccaccagcctctccctgaaggatatggagaccactgcttcctcctcctccgctgctcgagctcattccaagctggct

SEQ ID NO: 158671 - DNA, 351 bp, Arabidopsis thaliana landsberg
gaatgaaacaaagacttctctttttgttctctcatttcatcatctcctttgacacaaaggttacagctttaacttaaattgcatatacaaacatgatgaccttatctcaatctaagcgtgtgtttgccatgcatactgaattcttcgatcatttctcgcttttcggtttatttacaaagagactgatgtaatcatggataccggtgttgttttctttcactggcgatgaccttctggtaaagctaccactttgtggaaaggtactgttctttgaggcaatgctccgaaatccaaaacgtcgtcgaattcaagcaaatacctaatcagacaaacagtcttgttatataatat

SEQ ID NO: 158672 - DNA, 243 bp, Arabidopsis thaliana landsberg
aaaatatccaaccagataatgaatttcttcaagtggtcaggttgaatttagttactaatttaacgatgttttattatatatcaaaccccagctagttaaaaaaatcaacattgtttccttttcatcaaaaatgtgcttctgaattgacacaatcgtcactgtgatcagagtttgagtcgaagttgatgctttgttcttctgcttccttatcattgtccagtgattcagaagcaggtttcaaat

SEQ ID NO: 158673 - DNA, 994 bp, Arabidopsis thaliana landsberg
  unsure (1)..(994): unsure at all n locations
atgtgagagaggagcaatgatagagaaaaaaacaactcaagcgtatcttcttctaagtttagttcatatacttctatgtctatcctttcagattcgtgtatacgccctcttctaggtcagtaccttcttactcccaatttttctgtcatatgataactaagactatgaatggtttttagagtattacctctattcacaattttcaactaaatcttgaactaatcttttttttatgtattttgagttggcagctgagccgccaagtcaaatcctaaatccaccaccaccctcgcccgtannnnnnnnnnnnnnnnnnnnnnnnnnnntcgggagtcaagttacggcagtaggagagaattcttgcagacaaattccgaggcctcctaaaaccaaaaagaagaaaattccaaagcctcttaaaaccaaaaagaagaaaatctcaaagcctcatgcagcagttccgtgatctccaaacaagagtgtgtgggaaaggctttcacagataaaactaccacttagaatccgtttttggaatacacttatcctttgaaaactcatcaagtattttattggattgtacaataaatcctcgttcttcaataaatatgttatctctttagtatcattttgatgtttgattcaatgctcaaaactgatgaaactggaccatctcatctttgacattgatatctaattttatcttacatttcatttagagatgatgacataattcattttctgaagtaaaattatatttacaaaatccatgtaacaacagctaacatgtgatgtgcataacttatttatttataaaacatgttgacaaaagaaagattaatcgatcaaataagaaaattaaagcaacaataattgtaaagagatttactagactggtaaacatgtttagatcattgaattataaacagtttatataacccatcgagagatctatcatagaacaagaaaaagaaaaaaaaacatgacttcacattca

SEQ ID NO: 158674 - DNA, 374 bp, Arabidopsis thaliana landsberg
atatactagattttaacccgcggtataccacggaaacaatttattttttaaagttagtatatataaaaatttgcaaattatatctatctataaaatatttttattttatagtttacaattgttattaagtaacgtcctgccaaacccgtcctgtcaaacccgtccagcaaaacccgtcctgcaaaaaaaaaaaaatttatttatattaatgtggatcttatttatgatatgtttataaatcattgtctaaatattttattcgatgtgggacgtagaactcacacattttcgccaattggttaatatatgttcatttttaaaatgttgaatcacaaaatatgacggaaatttttttgagatttttttaaactcta

SEQ ID NO: 158675 - DNA, 285 bp, Arabidopsis thaliana landsberg
cgagctttcagacgtcaaacatggctaaagcacaaatatgtctttgtttcatcattttcttatacctctggccaggtaatcacaactataatcatgatgttaattagtataatataattggtatgtagcgatgcatacatacgggtttatatatagatcatttaataatcttatattaattgtaatcttttccaagtactgtaacaatttagtttcatttccatgtttctcttacagaaggaaatttcatcaaagtcaccaaggcagatgtaagaacataagtga

SEQ ID NO: 158676 - DNA, 434 bp, Arabidopsis thaliana landsberg
gattaaaatgttccctacattacaaccaaaatgttatgcatttgaagctgcaaaaaaagctagtttcaatcatcttcctaataaccatcactgactacgaaactaaagcagaacatggcttgtaatcatgatactactctcggtcaaaatttcaatgctctacccaaaattgcatataacaaacacctggcaggcattatatctccgatctaagtagataaatggaactgctcaattatctctacacaagccaatcaatgatcgtttctgagagttctaaagtaatacaagtgaagcaaatcaatggcaaagtgaaaagtccaagaacacctttttactcggtatcgataatcacaacgcaattagggaaacgcattatcaaaacgaagaatgtgaaaccttgagaatcagactaaagaagaaagaatctttct

SEQ ID NO: 158677 - DNA, 576 bp, Arabidopsis thaliana landsberg
caaacaatatagtatctaattagaatggatctctaaagtcccttgctgctattctcctagccatgtttcttgccaccggacctacggttctagcccagcagtgcagagacgaactgagcaatgtgcaggtgtgcgcgccgctgcttctgcccggtgcggtcaatcctgccgcgaactcaaattgctgcgctgccctccaagcaactaacaaagattgtctatgtaacgctcttcgagcagccaccacacttacctctctttgtaacctcccctcttttgattgtggtaagatgatccatcgattaaaaccttttttactagatttttataaattattccatcaatagtgtttgttttatatttgttctcatgattttttggacttatgttttgtgaactgtgcaggcataagtgcctagttgaacaacattcagttccgaggatttggggagtttggtctgcaaacgacaagacgaataaaataaaataatgagaaatacactatttagtgttttgttttgaatttggtttgttcaatacttatgacagatctattgaatatcgttttcaccatta

SEQ ID NO: 158678 - DNA, 352 bp, Arabidopsis thaliana landsberg
ttctccccatatctctctgtattagggattccctctcttatctgtaaggaactgatgcatgactctgagtgttgaacaaatttttttctggggtttttgtagggtttggctgcttttgcattggtttatctctttatgcatttgcatgggattgttgcgtttaaacaccatgagatctgttttaatgctttgtattggtaaaaaaagagaaacattggatgaggaagaatgttttaattttcattctcttattgattcatatttaggtcagacagaatttgaaaatcaaagaccttccattacactagaaaaccaaatatgattatatagaaaaaatcaaagaatttataac

SEQ ID NO: 158679 - DNA, 1012 bp, Arabidopsis thaliana landsberg
agggggaagatggatttctgaggcatgtcctcgatcatttaccgtgattacaattgtattgcgttgtttgttttctagatctggctcactgctacgagctggggattggatctagatgggtcatctagatggattcttggactggatttacaaagctggattagcatgaacttgaacttctgtttttacggtctggtctggtctggtactccgcgcgtatcagctgtaggatctgatcgcaaagttttggactatgattactctgattcctcaatatatttatctttttgacaatagtggattctgtgttgagttcttttctaggacagcatttaagctcccgggactagatggcagatggtcagtaaatttctttgttatgccacacttacatggggtttttggtcttgctgcaggtcccaatcaagatcaaaatcaagatcaagatcaagatcgaattctccagtttcacctgtaagtctaaaagctgaaccttctttaattcacaatccatggtgtatgtttaaatacctgctcactttggttgttcttcaatcaacaccaacttaacgaaatcatgagacagactataaaatttgaagagtctgtagaacgactaggtctcaccaacctctgtgtgcactaaaaatcgcctctccaagtgtttcagcaacataatctacctctgtcatgtgttatcatttcttcttctcttaacggtattacatattatgttttacaggtgatatctggttgaaaatgaaaactggccactggctgtacccgaatcgtctcaagcttctcaggctccactgctaatagaatttgattccgatttgggattattatactggtcttcttgtatgggacgaccaatatgtctttctagttttagttgtgaacctggaattggtctgttattgtgtcattaaaaagccggaaactctgtctcggctgcataataaagttcatcagacgttgtgttgggtgtggtgaggtttttccatacata

SEQ ID NO: 158680 - DNA, 331 bp, Arabidopsis thaliana landsberg
ctttatggacttgtctccacattaaaataacagacacaatttgttccaaatacaagaccatatccataatccaaagaggataatattctactctttcagtttcatcaacaaccccttggaatcttttgcatacagaaaaatgagcatcccaaagaagtaaaaatctacaagaactggatctgtaagaagttgacactcaaaagaaaatgatcgacacacccatcatgaagcatccagcggagacccaagggctcaaacgctcacctggtacaagtgatgacaaagcatagtttagcaacagaatgttcggcgatggaaaacaaatggcagt

SEQ ID NO: 158681 - DNA, 442 bp, Arabidopsis thaliana landsberg
aggttcatcgattaatcagtataaggtcccgaggtgcgtacgcctcacaccgatcatgaaactgcttgactctagagttgtgtctgctcatttcagcccttcgttgccgcattggtcgccagaacgacgtcattaggtaaaactttatgatagatatcaaaccgatgctagctgtgcggttttagaatatgaagctctgtttctgattctaagtctccctattagatttcttattatgatgttgtgtacttgtgtttagggttttgtgaatcgcacaataaaacctctgcttgtagaagctagcattgcctgctcagtcttctatatactatacaggatcttcttgtttttatattttgcttgttacgcaatctctgcttatattatgtagatggtcttgtttaaaaaactagtttaataattcataatataatttagttgt

SEQ ID NO: 158682 - DNA, 358 bp, Arabidopsis thaliana landsberg
atcacaatgcctgtcttctttgaattccaaaccctttactagactaacactttttgtatcccccttaagaactataaactcttactctctttttttcttttcttttcattctcattctctttcccattcaatccatacacaaccccaatcccaaatacaagtctccacctagtcctagctaacccaaaaagcgtgggctaggtctacatgaaagactgctcttgtcggctcatacctaacacgttataccaagctcaatcgaaaagacctcacaatcacacacaaatgatctttggcttgaaataaggctaggctaagggtatgggaaactgctctaaaaatgagagtcaactacttg

SEQ ID NO: 158683 - DNA, 825 bp, Arabidopsis thaliana landsberg
gaggtgttgaagcaattggagccgtggtgtgaacttaaagacaaagtggttcttgtgacaggagcttcatctggtatagggagagagatctgtcttgatctatgcaaagctggttgtaagattgtagcagcagctcgtcgtgttgatcgtctcaactctctctgttctgaaatcaacagctttggtgcaatcggagtccaagccgcagctcttgagctagacgtttcatcagacgcagacactattcgaaaagcggttaaagaagcttgggaaatctttggaacgatcgatgttttgattaacaatgctggaatcagaggcaatgtcaagtctagtttggatttatcagaagaagaatgggacaaagtctttagaaccaacttgaccggatcttggttaatatccaaatacgtctgccttttgatgcgtgacgctaagcgcgggggctcggtgattaacgtctcgtcaatctctgggcttcatcgcggtttgttgcgcggtggactagcgtatgcttgttccaaaggtggtgttgacaccatgacaaggatgatggctattgagttagcggtttataatatcagagtgaactcgatcgcacccgggattttcaggtcagagatcacacaaggtcttttccagaaagagtggctcgagaaggttacggaaaagattgtaccattaaagatgcaacagactgtggatccggggcttacatctctcgttcgctatctcattcacgattcttctcaatatgtcaccgggaatacatacattgtcgattccggaactacactgcccggtgtgcccattttttcttctctt

SEQ ID NO: 158684 - DNA, 245 bp, Arabidopsis thaliana landsberg
catactcgacaatcaatgattcgactataaatacatacacatgcatagtttagttcttgcatgccttacgaaaaatatgaagaaacttgtactaagatgtttagttacacttcttttgatcagtgttacaataacagaagcaattgagaatccacacaacagtcacagacacaaagacgaaaacaagaaaggtttagatagaaggaatagaagagtcaaaagcagaagaagaagccctgagacca

SEQ ID NO: 158685 - DNA, 170 bp, Arabidopsis thaliana landsberg
gcagcagtgattgcaccaaagcagattcccatggaacatctcaaatgtttgttcaccatttttgctgtcgtttatttattcttagtgttggctttcatgaattattttcgaaaagatctacaaatacattttatgcaaaactttggtgtaatgaaaaaaggagaaatttt

SEQ ID NO: 158686 - DNA, 301 bp, Arabidopsis thaliana landsberg
acttttttttccatgaccacttaaattttgttttatttcttctaaaaatccaccaaatcactagccgtcttttaaaatctcaacaaatctaaaatccacaaaatcttacaaaatactaagttcaatacacccttttttgtgataagtgtaaaacacacaaaagaaaacatatataaatggataatggatgggaacataaaagtccacattatttatatattaattttttaattcctcttaaaataaagtacataatttattattcaatctatgaatttaatttgattatcttaatttgggg

SEQ ID NO: 158687 - DNA, 338 bp, Arabidopsis thaliana landsberg
cctcctttgtggctgcctgatcgactgaactggtcgagtagaattctctactgcttccttgttggttggataaagtagagtgtcgagtagaatccttgtaagctccttctacacctgaaaacactaaaacatgcaatatgtatgcaagatgatcctacatgcctaagtgtgtaaaataagctaaatgtgatgcaaaatgatatgaaacaatgagtgatcactaagctaaatgatgataaatacatgcctaaaatgagtaaaatacagtgttatcaactttcccaaacttatctcttgcttgccctcaagcaaacaaaaatcttaagtttaaggtggga

SEQ ID NO: 158688 - DNA, 102 bp, Arabidopsis thaliana landsberg
taacgaagtcatgaggatgagagaaatgataattcttctgttgcgatggagcttagtctcatcaagctgcaatctttttcgttcccttcttcagtttcaagt

SEQ ID NO: 158689 - DNA, 332 bp, Arabidopsis thaliana landsberg
aaaacgaaatcttgaagtcctctattatacatcggaatcttttctttttctatgttatcttgcagatccctatgcctcccatcacttgctgtctcatctttctcaatttcattcctcggtgggttagcgatatctccttctcttctctaatgggtttgaaaaaatcgattttttgattcatctgattctggtcttacagacaaaattggcatctgggttcgattctttgtgtccgtcgtaaaaaccagtgattaggttctcgtcttcgagtcggagacaatggatataagcaacgaagcaggcgttgatgcgttctcaattataggaccctt

SEQ ID NO: 158690 - DNA, 346 bp, Arabidopsis thaliana landsberg
ccgaaaacttttcttgcaaaacatctgatacaacatttgatccaaacatattacatatctcttgctttcttctacgttttttcttttcctgatctttcaaatccagtgatcaaaatagattcaaaataacatcacatctttgtagctgcatgcacaaagtcgaatcttcatcctcgtgatgtttcaagtatggctaagaaaaaaatagatttgtcattcctcatcaagaatcacaggtctcgttggcatcctttccaatgctttgaaggattcttgttcgtacggaggaggcaacaaacgttgtacatctgcaaatagatcttcacgtccagtcgcctctttgaca

SEQ ID NO: 158691 - DNA, 494 bp, Arabidopsis thaliana landsberg
ggccaagtggatgtgtaggcaccaaattgaccctgtaaacctttcggtctggtctagtagcagatttcgaaatctcaaacccggtttgtgtcggttaaggagtagtaaagcaaaagagagtttctgatgtcaaaaaaaaacacatacacatagttcacttaaaagtttctgcaagagacagatccgatattccagatatcagatcatcgatattgctcttctctgatacaacttgattatcattcagtggctgtggaaggggctggacagtggaagactcatcgagggccttcttcagctgcagcaccaacccatcttcctcatcattgtcccccacaacctctagatcccacactttgaaaatctcttgtgaagttactttgacaggatcctctgtaacattacagtcgtcagcattgtcttcaacgtatgtgctcatgaaatcatccttgaatactcgagacgatactgacgctggttcttctacttcagcc

SEQ ID NO: 158692 - DNA, 462 bp, Arabidopsis thaliana landsberg
atgcgagattgtggacccgagagcgtacaaaagcccgagaaaagacaaagatcggattcacagctagagtcgatgcgaaaatcaggcatttaaggtcgaaactgaacaagaaacagtcaaatctctcacatttttcagctcaagacgcaatgtcacctagatcattgtagccttgtatagtgtttgttgtttttctacaggtccaattctctgatgcatcagacattggagacaggtcttgaagctaattttgttgagagtttataatagagtgagatcatgtaaagagtagcctctgatgttttttctacttgttgggttcgaatttttctttatcttgtacacattatacttaggttttgtgtatacttaggacagaatgcaaaaaaacataacaaagaatcttcctttgtgcctcttctgtgcctctaatcatttaattggtcatttatataaatttgt

SEQ ID NO: 158693 - DNA, 271 bp, Arabidopsis thaliana landsberg
gtttctttctctttttgtctgaatgcaaaaggttcttcctttcttatcctttcctgatatatctcacctgccatttgcagcaagaaacgcttgagtctgtctgttatcgcctctattcttcttcttatccacccgagctttgcgaaccgctaactgaatctgcctttcatgttctttcaacatttcatctaagtttcctcctgcagaaaccaaaggccctgagcagtgcattctctctttcttttcaccgttaacctaaagataaccatac

SEQ ID NO: 158694 - DNA, 2042 bp, Arabidopsis thaliana landsberg
tgtctctctagccatggaagacgcagagagcaccaccaaagatcctgtagacagagttgagaaagtaacatggagagatctgcaagacggatctttcaccgcagaactcaagaagcttatatgctttgcggctcctatggctgccgtggttatcactcagtccatgttacagatcataacaatggtgattgtgggtcacctcggcagactctctctcgctagcgcttccttcgccatctccttctgtaacgtcactggcttcagcttcattgtttgtttccttttccttttttccactaaaattgacgcacttatctctcttactagctaccagaaccatggaaattgtatcctctcatcactttactgttactttttgatgctagatgggattgtcatgtgccttagatactctcagcggtcaagcctatggagctaagctatatcggaaactaggtgttcaggcttacacagctatgttctgtcttacattagtgtgtctccctctctctctcctatggttcaacatgggaaagcttctcgtgatccttggccaagacccttcaattgcacacgaagccggaagatttgctgcttggctcatcccaggactgtttgcttacgctgttctacagccgcttactcgttacttcaaaaaccagagcttgataacacctctccttatcacctcttgtgttgtgttctgtctccatgttcctctctgctggcttttggtttataagtcagggcttggtcatattggaggagccttggctctcagcatgtcatgctggctctatgccattttccttggatctttcttgttgtactcctcagcctgttcttagacacgcgcgccgcttaccatggacatattcgccggcgttagagagtttatcaaatatgctcttccttctgcggctatgctttggtacatcacttttctctgttcctttttcacttctcattgcctccacattttttgttagaaactcttttatatatgggttgcagcctggagtggtggtcatatgaactcataatattactttctggtctgttacccaacccacagctggagacttctgtgctctctatctggtactcatccttgcatctttccatttcctgtcacaatcttgaatttgcaaaatcataatgttattcatactacggacagtttcgaaacactttcaataacttattcaataccactagcgatcgcggctgcagcaaggttagagcttttgtcaccactacccagtacataaatgctgaagtatactttctgttatggtttcatgttcataagcaagtacattgtgcagcacaagaatctcaaatgagttaggagctggaaactctcgagcagcacatattgtggtctatgcggcaatgtctcttgcagtaatggatgcattgatggtgagtatgtctctattagccggcaggcatgttttcggccatgttttcagcagtgacaagaaaaccatcgaatatgttgcaaagatggctccgttggtctctatttctatcatactggacagtttacaaggggttctctcaggttcgagattttttcccatttcgtttctcaaacataagctagtgtcgaatatacagctccaagttgtcatgcctgttcatgttgtactcttttctgccattcttctaaccctcgtttgatggttggaaggtgttgcaagcggatgcgggtggcagcatataggggcttacataaacttcggagctttctatctctgggggtgtccccttgctgcgtctttggccttctgggttcttctgagagttgttggcctttggtttggaattcttgccggtgctgttctgcagtctcttctgctggctcttgtcactgtctgctcggtctggggttcaaagatcctttcctttgctttttgtctttcatgacttgtttctattttggaataaacatatcgatgttcaattggatgcattttgaactctaggcccgtgaagcgagggagcgaatggctgtggcccatgaatcagaacttaca

SEQ ID NO: 158695 - DNA, 314 bp, Arabidopsis thaliana landsberg
aattataaaaaaaaagaatatggtaaaataaatggaaacagattcaatattgtagatgactttgtacatcgttacacaaatctatctaacctatctaatcataatagacggtgaatattgattcctggaagctcagtttacgccacgtgtccttgggcgccgaaatcaacacctagacaaaagcctgttgacttgtagtaattcctttttttactcccggttaacattaaaccaatcagacaccaacacgtgacaagtcacctactctcttctcctccccgttcgatatctgactcggtcatctgtatccggca

SEQ ID NO: 158696 - DNA, 83 bp, Arabidopsis thaliana landsberg
atcaattacctcacaaagaattgaaagcatatcccgtggattgcatgcttccacaaaccgatcaacgattttctcatctaact

SEQ ID NO: 158697 - DNA, 109 bp, Arabidopsis thaliana landsberg
cgtgaaacataaattcagattcacgaatttgagtctaaagtactcaagaacaaaaaccaagaataataatttacaagaaaaatgcagaaattaaaatgcttaaccaagc

SEQ ID NO: 158698 - DNA, 149 bp, Arabidopsis thaliana landsberg
tgcaaaacggccaaaagtgtatgaattgagtgatgagacacagttataaagcggttacaaaaccggactagccggtataatccattaaacagattcttctcatacagttgaatcttccatagctttgatcaattttatagttttttact

SEQ ID NO: 158699 - DNA, 199 bp, Arabidopsis thaliana landsberg
tttttacttctttccttaaccaaatacttcactagttctaaaacctctcctgtgtcaactctaaattctaatatcgtctttgttaagggcttgttcaaaaaataacagaggtacacaagaaatgatccttctgcaaaaagaaaacaaagagtgggtttaaaagggtcaataagcccctaaggaaagatcccaaagccca

SEQ ID NO: 158700 - DNA, 73 bp, Arabidopsis thaliana landsberg
gtactacttctgtaagattcaattcagattctaattgtactctggatttagatttgttacgtcatgttcacaa

SEQ ID NO: 158701 - DNA, 370 bp, Arabidopsis thaliana landsberg
tgtctctcctgttgtgcccattaggggtaattcggtccggtttgctccgattggactggttaacatgctgaacgcaagcggtgcgatccggtctttggtgtataatgatgattctgttgaggtcggagtttttggtgccggatagtttagggtttatgcatcgaaaaaacctgttagctgcttaattgatggtgaagttgttgagtttggttataaagactcaatggtgatggtgcaagtcccttggtctggtccggatggtttgtcttctattcagtatttgttttacagattttgaaggtccttttttgtttaattcttaactccgtaccgttcgttgagtttttgaaagaactccgagcgggttata

SEQ ID NO: 158702 - DNA, 289 bp, Arabidopsis thaliana landsberg; identical to SEQ ID NO: 51712

SEQ ID NO: 158703 - DNA, 221 bp, Arabidopsis thaliana landsberg
atggttatttcaaatttgttctgtactctaaaatataaacactataaaaataagcttttattcatattacagtgaataatgacgagattgttatgatcatgtgctttctcataaataaaactgaagattgtggtttgttttgtcagctcacagctgtgattattttatattttgtaactaggattaatgtttatccatggctgtatttatgttctacttct

SEQ ID NO: 158704 - DNA, 583 bp, Arabidopsis thaliana landsberg
taaaaagttggttttgcatagaaaccattggtaagattaataaatggcagcttctttacagcatccatgtatagaagaagaaaataaaagttaaatctatttataagatcccaatgaaatatacaaatgggataatatggttgataccttcaaattaatctaagccaaaaatggtgttgtcaatggaagaagcttgatccttggatctgctgtagagatggagcgtctcggtgtggttagggtccaaacagagagcagcttcacagtcttgagtggccaatgacagattcccagtggcctcgtgaaatgctgctctgagatgcagcgtttgcagttctggtctgaaagctatcgcctttgacagctcttccactgcttctgtctctctctgatcatccatcagcactgccacacatacgatcacttctttaactactagaatttataagatgttaatacagaacaggaagagttagttaccggcagctcggtatctgtagggataagttcgcagagggtcgagtgttgtggccatgtcaagatcttctttggctttttcacgttcacagtactcagaccgttt

SEQ ID NO: 158705 - DNA, 654 bp, Arabidopsis thaliana landsberg
tacaataatcaaaactcgacaaatatctgtattttattttaatttgatttttaatgattgtctcatgtgtttagttattaaaaagacatttcaaatatgttgcaaaaataatttggtaataaagctgttgactattaagtaaaatgatgtttgtactttgattaataattgacagaagaaattgatggatacaaatttaaagaattcggaatctgctactgtacaatgtgattattcattcacatttaaattgaaaaagattttacatgctacatgctacatgctaccaacgtaggatttatttacagaatcattttttcaccttctcttgccatcacaaagaatcaaagaacccttgttcttcctccacacattgaatcccccaaacctcctcttccagcgagctttctcttgttcaagacttgagatcaacatatacctacagactagagattccggttttcgatagagaacttgttttgactacgtccttaggaggaactgtccgcgagaggaataagttaccccttgaatctttcctgctgtaacgcaccatatcttgattcatcactatgctgcactctctccaactctcacacttcaactaaaccccaaagtaccttaaatggtcagaaatgctatttccccttgcgt

SEQ ID NO: 158706 - DNA, 132 bp, Arabidopsis thaliana landsberg
agagagttgtaaaacggacagatatttgtaggtcccccgttttcttgagaccgtgcggttgaagaacaagtagcggaaatgaatgtgtgtagatcttgtgagcctctagtgtagacaaccttattcgaacct

SEQ ID NO: 158707 - DNA, 329 bp, Arabidopsis thaliana landsberg
cgactctattttttttttctttattttagcgagatattattatattaattggcgaaaacaacaaaatgaatattgaatttttccaggttgagccaatgaggtaaaagacgtatcattttgacattatattgtaaaagaccaatatacaaaaccccacaaggtaaaaaaaataaaaaataatcgagacactagtctacatatgacaacgactttggtccttttctacacatcatattcatcttcaagctcgtaggaactgaaatgttcgaccttgaaagtacactcgccattcacaggatcataagacacaaactgagcttcttgttccc

SEQ ID NO: 158708 - DNA, 285 bp, Arabidopsis thaliana landsberg
cctcctctgtggctgcctagatcgagtgaactggtcgagtagaatgctctactgcttccatcctggttggatagagtatagggtcgagtagaatccttgtaagctccttctacacctgaaaatacaccaaaacatgcaatatgtatgcaagatgatcctaaatgcctaagtgtgcaaaataagctaaatgtgatgggaaatgatatgaaacaatgagtgatcactaagctaaatgatgataaatacatgtcagaaatgagtaaaatacagtattatcacacgtct

SEQ ID NO: 158709 - DNA, 543 bp, Arabidopsis thaliana landsberg
tttgttcatcttaggatagattacttcaatttattttgtattaaatttaatacatagcaattaatttataataacaaaaatgttataaaattaaaatagaaatatatttgatcaaaataatattaaatcacacatattttaagcagttttagagattgacacacaatgactccacacgtcatccctcttcttcaagtaatgtgtttcacgaccaattaagcttggtctatcagcaatgaatttaatgagattatcgtgacacacttttccttcttggacaagatcgtgacaacacgactcaatgagggttccatttccaaaaacaacatagattatattcaatgcacatttaggagtgattttaacgagacaagtgttccataatgattttgcttcagcttcttcgacagaaattacaggaacaaacgcacacaccaaagctgcaacaatgaatagcgcagtaacatgggagcttagtttagccatattttttcttatgcttagaatttaccgacttattcttagtgtatgaaaagaatataa

SEQ ID NO: 158710 - DNA, 347 bp, Arabidopsis thaliana landsberg
taaatcgagaaacattgatcacaaaagaaaacttcaaaacaaacaaatgatctctaccaaattctcttcttgatattttttcaatgtaaatgcaaaaacgatgattcattctgattttaaacccaagtatataaagtcagatacacgcgaaacaatcaaattctgagacatgcacatttacacacagtagacatacattttcaaatcaagaaattacaaatccacacaccaatcgattatcaaaagaaacaaacgagggattaaatttataaattaccagaggttaaaaaacagagctaaacgatgtcgtttggatgaggagcggcggagagagcgagaggacggtg

SEQ ID NO: 158711 - DNA, 344 bp, Arabidopsis thaliana landsberg
gactaggttaacttgagagtctctgttgcggtggcacttagatttggttaatgaacttgttgtctaaggttaatttattgagcatgtcaatcacctgtaaactgagaaaacgaaactactcgattagcccatcctcgggaattctttatctgattgaattctttgtttactctactgttgtttactgcatcttgtcatctgttgcttagttgctgcaattctttactgttactcgaccacccagttgtctggcaacagactgtgcagtcgagtatccctgttacattatctgtctgttactcgacctgtcactcgaccacacccagtgctctgcaacgagctgt

SEQ ID NO: 158712 - DNA, 305 bp, Arabidopsis thaliana landsberg
tttcgtttcttggtaaaaaaaaaacacacacatcataaacaaaacactctcactcaaagccgtgaataaggatttgatattcttttgtacattctttctttcctcaagcactcttgtttttccaaggcttgagaacaccagcagcgatcgctgcaacctcaatgaggaggatgacaattgcaatacacatccattttcttgagttcttcagcaagctctttgctctttgaagtgccgtgtttcccgattgcacgtgatctagtgcacttgacacatatatgtgcgacagatctttaagaacgggt

SEQ ID NO: 158713 - DNA, 135 bp, Arabidopsis thaliana landsberg
cagtgttttcacgcccgacccgaaccgtccggtccgaccggttaacccgtgacccgaacacttttccggtttgggtttagtgctaaaacccaacaagttcaaaaccgaaaaaaaccacaaaaactcgcaattaac

SEQ ID NO: 158714 - DNA, 228 bp, Arabidopsis thaliana landsberg
tcaaatttcgtgagttttgcttcttctgtgatttgggtttcagtcactttctcgttatgtgaagtttttggtttaaagttttgatttttatttttttgttgcagaggttgaagaatgtcagctccgaaatcgggtggtgatccactaccacatccgccgaaagaacagcttccagatatctcttactgcattacaagtcctcctccatggcgttagtttctctcttct

SEQ ID NO: 158715 - DNA, 436 bp, Arabidopsis thaliana landsberg
  unsure (1)..(436): unsure at all n locations
gcaaaatcatagctttagtggtccgtactggtatcctcagattaggagctctgcagcccggtgcaactcgaaagtacggtactcctattgctcgtgggttgtatgcgccagtccatctacatgtcgttatcgctggcatgtatatgtctgttgcctgtcaacctattgaagcttttattcaggttcctttttatgatgctgctcttcttcttgttgtttcctttcatattcggattattttctcagtatttaggaatgtcattggtagcatatgtattttagaagtccctatagttcttgaaaatgaatcttaggtacatgttgtcagctggttttgctcaatagtcagcttaatccactataatctgcacgcagttgaggtttatgttagagttggcgagtatgatgagntcaatgtccacaacaatgcgtttta

SEQ ID NO: 158716 - DNA, 568 bp, Arabidopsis thaliana landsberg
tttttatttaatcaactataccatttttagctattctttggtcttcgtttcgcgtaagcattcaatgcttttttcttttatctctttgggaaacgggagtgtggtcttcgtgtgtgtgtccctgtttcattaaccagttacgtttcattctcttcttttcttacgtttactacagatttcagaaagaaaaaaaagtgtttgaagcaaaagagattaatggcagattcttgagtcattaacttttttctaattcttttaattagatctctgaacataagagataacttgcgtcattattctatggttataaagattatgcacttgattaaaataacctctagttttcctttttctcatttgctaagcaactgttcctttttcttcttcttcttcttcttcagataattatgcttgggagtggaaagcaagaaaaattctaaactttatataaaattcccagaatcaattgatccacaaagaggtaccacttttttcctctcgtcattttccataaaaagtaagccttttgattgatatttaattattaaaagaatctgccttttgggtt

SEQ ID NO: 158717 - DNA, 285 bp, Arabidopsis thaliana landsberg
taaaagctctgaaagatatcatgtgggtgtgttggacaaatcgcttttctctcttctctctttcaaacttttcagataagaaaagttatttcactgatctgttccgacatcaatggcttttttagcgttgattggttggctctactcagaaatcgtctgactttcacagcagcgatgttcggctcttacgtcccgttttaatcgggctctcgttcggcacctccagctttttcagtgaagatgtccgactcttttcccgccagcattcggctccatcagcaatgt

SEQ ID NO: 158718 - DNA, 376 bp, Arabidopsis thaliana landsberg
agttgtgcaagtgaggtcgagcacggatacctcgtgctacagaactcattcagcttgaaaagcctacatatcctcagcaggcaatacgtcgggcttttgcagaagtttggtagctctgcgagtatgctcaggcatgtactcatctttcagatcttcgtctataagctcatacctctctgtcatcgctctcttccctcgggctatcttagcttttcttctgaagctttcatattctctttgttttctctcaggccttgacgatgacgactctgtgtcatccatgttgtagtcaggatcaacagaagaactgccactgtaattgctcatgattcccctgtagaaatctagaactcaaagctcaaatgtcaataggtta

SEQ ID NO: 158719 - DNA, 142 bp, Arabidopsis thaliana landsberg
ttgaatttaaagtattgtaaccataaattaagttctcatagtaacacgcattacacattcaacaacttagccttcctatatagaactttgaaatcttagaagcaacatcgtgttgcctcgcaatctctagaaaccttcataa

SEQ ID NO: 158720 - DNA, 131 bp, Arabidopsis thaliana landsberg
gcgatgtatacgaatcttctttttttttctatcaaatattatataatttttgataaaataataaaaaccatgaaaattgaagtatgtgaatatttaaaaataagagattgagacagagaaaagacaagaga

SEQ ID NO: 158721 - DNA, 276 bp, Arabidopsis thaliana landsberg
gcaggtgaatccacacacacatcagctgaaaatttgtgattttgggagtgcaaaagtgttggtaaagtttatcagctatagctcttagtggtttagttttcctagtccatgcttagattatgacgtgtcatggtccacaggtgaaaggagaacccaatatttcttacatttgttcaagatactatcgtgccccagagctcatttttggagccaccgagtacacaactgcaatagacatatggtccacaggttgtgtgatggctgaactgctgctcg

SEQ ID NO: 158722 - DNA, 97 bp, Arabidopsis thaliana landsberg
acacaactgactttacacaaaacaaacatctccccacaaaggatatgagattttcacattgtcaatgttttcttccacctttactctctttctgtaa

SEQ ID NO: 158723 - DNA, 374 bp, Arabidopsis thaliana landsberg
gcccaaggaaaatggaaacaaccggagcttgaatccgtcttcactgacaccattgatttttgttaggttgcagagcctatcaaattcatccaagtggtcgagtggatcttccataggcagaccatggaacttgttccccagaatcatcgagatgagaccactcttaaactcgaagttgttgttctggatagcaggaggtgcaattcctttcctctgacggtgatcacgtggtgcatctccagcaccaatgttggcagggccattttgttttttctgttcttcagccattttgtgtggttactgaggtacaaggttgactgtgtttctcctttctatgagttcgcgagctatgcggtcgatgttgtgattgaaaa

SEQ ID NO: 158724 - DNA, 148 bp, Arabidopsis thaliana landsberg
accctctcagattttttctacaagctgatcaaaacccagaatccagttttcataaaaacctcatctttcttttattcttctttacacgctctgtttttcatcaatggcgtcaaggaagcttttttttgtcaaacctaaatatatctat

SEQ ID NO: 158725 - DNA, 372 bp, Arabidopsis thaliana landsberg
tcttgttttctttctttttttaggttcttctatctattacatagtttcagcgatacaagagttacatgagccgaagaaatgcctaataaagtaacctgttagaataataaaactttatccatccctatattattcaatacaaaacaaattcataaaacccttaattcatcgagaaggtttttttcattatttagtattctacgtcccgtaaacaaagatccaactcaatattactataacaaaaacaaacgcattacaaacttataaaaactccattgatttaaattatttcgtttaacaaccatcgtcatataaaggttcaaggacatttggattttccaccacgtgtcttcatgttggcgtaacaagatc

SEQ ID NO: 158726 - DNA, 129 bp, Arabidopsis thaliana landsberg
cttcacagatggaaaaaagaaacttgtcttcacgttaatcacgccacgtatctggatccaacttccaacgtgtctctcacattctcgaattcgactcttttagtggctctcgtcccctccccgcttttt

SEQ ID NO: 158727 - DNA, 292 bp, Arabidopsis thaliana landsberg
atcttcgttgaagtgagggtgactagaagtttctgctttcatcaattaaaggtttacgcgtgaagcagatcatcaggttcttatagatggtgaaaccgatcatgatatattgcttcagctctgcatagccactgattgagggttctttgaatctgaacttcttatttattgagtttgcacagcagtggcggcttcacacgatcagttggatcagatgagacttatgccagagtaccggaatatatggcactccagactcatgggcaccgtcaccgacgacactccctgtaaa

SEQ ID NO: 158728 - DNA, 201 bp, Arabidopsis thaliana landsberg
ttctccactagttgaccaatcgagagacttgtggtcttcccggagatggtttcgttcacgggtttcgctttcgtatttggaattctacttgggattcttgcgatcgttacggcggaagttgtagggtttttgtatcttctgaagcgattgaatcggaaaagagatcgtcaggaatcgaattcgagttcgactttaaaggac

SEQ ID NO: 158729 - DNA, 319 bp, Arabidopsis thaliana landsberg
tattctaagaagagtaaatattaattttattgtaaacattacccctcttattcaagtattttgtaaaatcctaataattattttcatactaaatgtagtacaatagtaatgcataatattcagagcaaattagatctcttagtgactgtaactttaagaccatgcttcatgtgaagaataatagaaggaactgggctcgatcttgtgtccttcaacgacctttatctcatagttttgtataattttcacagccactgtcttaatctgtgtcatagccacttctttccccaaacaagtccttggaccggcatttaacgat

SEQ ID NO: 158730 - DNA, 209 bp, Arabidopsis thaliana landsberg
ttggagttcatgctcttggttatcgcttgccgttgatcaccgtagcagaggctctctttaaaagaaaagcagctttagcaacaacatatgaaacaccttcttatgatctacagagatgatgatggttcactgtgcttgatcacaccgagaagcgtctcgtgatggtctgctttctactatactctattgctttgtcagaaagtgtggaa

SEQ ID NO: 158731 - DNA, 135 bp, Arabidopsis thaliana landsberg
  unsure (1)..(135): unsure at all n locations
tttctcaagttagtaagcgtgaggagttgtatgcaatattttgttcgtgtgtgaagtttaaagaaaacgttttttgcaagatcagatgaataacatgccgtcttagtctacatggcggngcgggtgttacatttg

SEQ ID NO: 158732 - DNA, 238 bp, Arabidopsis thaliana landsberg
ggggaaaagcccctgaccctgaagatgacaactttaagctatgggttctgcatcagaccaatgatttcttctccgaggattctaagggacatttctgtttgtaagttcagatatatatatatatatagtgtagttttcatttagtataccaccaatatctgtatagatcttcttttaaacttcatcaatatcaaaagtgtgttcatcaatgttaccaaagatttttgcagaacagagt

SEQ ID NO: 158733 - DNA, 503 bp, Arabidopsis thaliana landsberg
tttgatctgtgtaggtgaaaacatgggctccacttctgaacacgttctgtactagcggaaagctagagctggaactgatgtacaaagtccaaatgcaatgctatgaggatgcaaagcttatgaaagttttcccagaagtagtgaggtcgctctatgaactcgatgtcctcgctgaagacaccattctccactggttccgtaaaggaaccaactcaaagggcaggtgtgcatttagttccatgacatattataacaacttcattacgaaagcttttcttttatatcatagctaaaaagtatgaaagcactctcttgatgttttcttgtggtgaatgtttgcaggcaaacctttgtgaaaagtttagagccatttgtgaattggcttgaagaggcggaggaagaaaagtgagtgatctatgtttctaataaacaagccatgaagacgataataattcagggtttcttctatgtttcactttggctatgagctttactctgctttg

SEQ ID NO: 158734 - DNA, 340 bp, Arabidopsis thaliana landsberg
taactttgtttttgctttatttcagactatttgttatttgttttggaacttgttgcacttatttttctatgctttgttggaactattgatgtgtgttttagtgatttaacagtctatctggatgatccatgtgaaaacactaaccaaagctctacaacaatgagctgaattcgcaaagctatgcaaaaacgaccacagtgtcgatagacaccaccctggtatcgatcgtcaggtggcaactcacgtttctctaacctttaagttttgataatatttctttcaattcctctagcttaataattctggggacaatgttatttaagtatgggggagtcagtta

SEQ ID NO: 158735 - DNA, 353 bp, Arabidopsis thaliana landsberg
atgggtcttatggtgggattcatggtcgttgtcgtgttcttaatgcctaagttgatggaaaacataggtacacgtctctaaactcttcacttgtatccatgtattgataatgttcatcattaaaccgatttgtgggtctctccctctctagtagcaatcaatgcgacagtaaccaacctaacagtgtacctaatctactgaggattctagcagtgccttgtttttttatcatttcataaatctcttcaagctattgctgaattgaaacctagcaaattagatgtaaatggtttgatgagaattgttggtatgtgtgataaacagatcccgaggaaatgaagagcgcacaaaac

SEQ ID NO: 158736 - DNA, 520 bp, Arabidopsis thaliana landsberg
  unsure (1)..(520): unsure at all n locations
gtgtaaggaaatatatattgcagaaaccaatcatgaatcaacaaaaaaaatgtcgataaggaatcaacaaactcttataaggtttttgttagcacccagaaactctctcttttgttctactcgctcttccaagcgtacagaatcaacgaaaaaccaaaactatgagacttggagtttgttgttgtcannnnnnnnnnnnnnnnnnnnnnnnnnnnnnnnnnttgacaagtcctgaacatgaacacagcgtttcccgttgtaggcaacccaaagagccaactatgaacatcccatagaacttccacagtcattttattaacaactatcgtatcgttgcctcgaaacttccacttaagccgcttcacctgcaacaacgtcttaccatccacacgaacaacgagacaaggatcggtgacattcgtgtcacactcaatcaacagatcatgaaatttcccatcagcaaaaagctgagctttcgttgcaaacactctcttaccaaaaacatgctctttcttagcaa

SEQ ID NO: 158737 - DNA, 471 bp, Arabidopsis thaliana landsberg
ttttatgcacatggggaacaagtattgggttgctaacgccttggctctccacattagtcataaatggagctatgaaaatggcatttaaagcaaaacacaaacataaaacacctaatgaagcatattttctacatatattttagaactaaaggccctaacaaaaaccccccaagccgatgacattgcctaaatgtacaaagacaattagcaataatatgttatatatcggatctttacttcttcggtacctttggccgtgacctcatactggctctccttgccacatcccacgccttctgtggcgcgtatatacctaactgagatgcaaagaaagattcataacctggtgaatcaaacgcaaacccagtgtgctttgagagctcccgaggcaattgtgatatcgcatagcttctcgcctcttgaggtgtgagctcgttctctacctccagctgatctgccttgcttgcatct

SEQ ID NO: 158738 - DNA, 194 bp, Arabidopsis thaliana landsberg
gtctgtcttagcgatatcttctcttgcaactactctcatcagaccactaaacggaaacgggccaaaccggtcaccggttcgtaaaatcctctgcctgagccagaatagacagagcaaaatcggtaccggaaaatcatggatcgtcccagtaagtctctcgcttttcggttcaggcttcgtcttgggtcctcatc

SEQ ID NO: 158739 - DNA, 131 bp, Arabidopsis thaliana landsberg
ctgattaaaacttaaaagtctactttacaaaagtaaattatgaacaatatatgagatatttaaagtattaatttgagtttgcttgaaaaaaatatagtttaatacgtaaatttttaaaaaatattcattta

SEQ ID NO: 158740 - DNA, 105 bp, Arabidopsis thaliana landsberg
agagtcggattgttgttctctcacacagacttcttcactcggctctaccttgaaattctactttggtgctactcttttcacatacctagctgctgtatactatac

SEQ ID NO: 158741 - DNA, 336 bp, Arabidopsis thaliana landsberg
tgtaacgcccgtgaaccggaaaatcggttagggtttatttttaaatcatccagtttaattggttgggttaattggaaaccctaaagtgtacctataaaagaaggaaactcgaaattagggctttagttagccacatttcattttattaaggagaaaaagagagaaaaagagaaggagcagaatcgttagggtttgggagaaatcagtttcgtcatatcaaatcgtggtaaaaggtaacgaaatttagtagagttattcccaagtcctttatcgttattctccagtttacagaattgaatttggattaaaagtggttgagttattcgcagtttcgtg

SEQ ID NO: 158742 - DNA, 106 bp, Arabidopsis thaliana landsberg
tatatacaaatataaatgtattagagaatgatataatttgcattacttttatctataaaaaataattcttaaattttaaaaattactacttttaaaaaaaaatcac

SEQ ID NO: 158743 - DNA, 182 bp, Arabidopsis thaliana landsberg
tatttttttttgttttctttcgcgtgtgattattaactcgaggtaatttctctaatcccagttaatatcacacgcggaatatcaaagatcttgatttttgtaaacattgtaccaaaatcatcagaagattattagtggagttttttcgaagaagaacaaatttggtaaacatatcttttgat

SEQ ID NO: 158744 - DNA, 237 bp, Arabidopsis thaliana landsberg
agatgagtaaagtgccttagtatctcatcaggttcaccctcttcacagtcaggtaaaatataaacaaccttttcaactttgagtggtctccaccgaccattctttcgggtttttttcttattcttttggaattcgtaggtacaacgatggatgaaacaaaacaaatttgtgcagaggagtgtgtttgtgtgtttgtttattgctatcttttgcaatattaaaagtatcggaatctcc

SEQ ID NO: 158745 - DNA, 247 bp, Arabidopsis thaliana landsberg
tgtaatgtgaattatggcaggtacctctatttctataagaagggggttccacagataacagttgaatcagtagaaagcctgataaaactgatcagacgaaagaatcgatgccctctgatccatctgctgaatcgttctttgcaactacgcttgagttcatggagttccaaaagcagaaagagggtgccattggtgagagataccaggagatcaaagtatagaatctcatgttggtcaaaagaagtcg

SEQ ID NO: 158746 - DNA, 433 bp, Arabidopsis thaliana landsberg
ctagtataagggacaaagccagaggaagaagatgatatccatagctcaattggtctaaacccttccgtagtttagctctttcttcaatctctcatggtttcttcattacatttcgatctctctgttcttaaaacatttcggaccaaaagaggaaagctgcagccacagttgcaggtgaagaacatagaacactgtcccttctctctctctcttctttatctgtttgaaatacctaaaaattggttctttatctgtttctttcgttgatgagttcgaaatacctaaaattttgttctgtttttgagttactatgttgcagaaagttttaacctttgagggtttggtttagtttttatgtctactcttttctgggttcttcttgaagattcagctaaaagaaaagaaaaaaatttgttttcaagaaagttctttg

SEQ ID NO: 158747 - DNA, 110 bp, Arabidopsis thaliana landsberg
acgttctcttcaccggacgggaaagagagttcgccgtagtgatgaactcctcattcgttaaagaagaactacaggtgctcacgatctctaaagcagttctacggcggggt

SEQ ID NO: 158748 - DNA, 1386 bp, Arabidopsis thaliana landsberg
cgtcccataatcttccaaacttcaccagaagaaattcttaacaaacaattttcttcataatattaattctcaagatcttaaagattatattaatacgaagagaaaattcaaatgggtcttgatgattcatgcaacacaggtcttgttcttggtttaggcctctcaccaacgcctaataattacaatcatgccatcaagaaatcttcctccactgtggaccatcgtttcatcaggctcgatccgtcgttgactctaagcctatccggtgagagctacaagatcaagactggtgccggcgccggggaccaaatttgccggcagacctcgtcccacagcggcatctcatctttctcgagcggaagggtaaagagagaaagagaaatctccggcggcgatggagaagaagaggcggagagacgacggagagagtggtgtgttcgagagtgagtgatgatcatgacgatgaagaaggtgttagtgctcgtaaaaagcttagactcactaaacaacaatctgctcttctcgaagataacttcaaacttcatagcacccttaatcccgtatgatatagttaattatttccttaattaaattaatcagcctcttcttatttacgttaatcatatcgttaattaatttttctatgaatttacagaagcaaaaacaagctcttgcgagacagctgaatctaaggcctagacaagttgaagtgtggttccaaaacaggagagctaggtaaatttaattgaataattttgtgaattttaatatcatacttttctttctttattttggttcataaatatatattttttaattaaatttgaatttgaacagaacaaaactaaagcaaacagaagtggattgtgagtttttgaagaaagtgttgtgagactttaacggatgagaatagaaggcttcaaaaagagcttcaagaccttaaggctttaaaattgtctcaaccgttttacatgcacatgcctgcatcgactctacgaagggttccttcttgtaaaaaaatagacggcggcggcgggggtaatgaagtagaaggtggcggcagcggggctaccgcggtgattgtagatggaagtacggccaaagaagctttctctatctcctcagagcctcacttcttcaacccttttactaacccatctgcagcttgttgaatagtagtaattcgtttaattttattacttaaaatattaattttcttttttttttgggtggcattttaactagtaggaagaacacaaaaactatgttagaaagggtaagatgcgtatagatggtctcttgtacaattcccactttgtttttcagtgggattgctggtttgagaaaaagaatagtttgtaattattattttatttgtagaaaaag

SEQ ID NO: 158749 - DNA, 525 bp, Arabidopsis thaliana landsberg
  unsure (1)..(525): unsure at all n locations
ttcaagttttcattatcatccagaaatcttcttcttcctccgatcaccaccatgtgtacgttagagaaacgcggcgatctcttcctcctaaccctaaccggagacggcgaacacagattccaccccgacacaattgccaccattctctcccttctcgaacaagccaaatctcaatccacccgtggatccatcctcatcaccaccgccaacggcaaattcttctccaacggattcgatcttgcatgggctcaaaccgccggatccaaaaccggagccgcaaannnnnnnnnnnnnnnnnnnnnatcattcaaaccggtggtagcagcgcttctcgatctccctatgccgacgatcgccgccttgaacggccacgccgccgccgcgggattgattttggctttgagccatgattacgtgttcatgaggaaagatcgtggggttctgtatatgagtgaagttgacatcgggctttcgatgccggattatttctcggcgttggttagggctaagatcgggacgagtgcg

SEQ ID NO: 158750 - DNA, 455 bp, Arabidopsis thaliana landsberg
gccaaacttaagtagcccacaagaataatgcagaccaaaaaaaaaaaagcctgactattcgattaacggtcgacaaacattattccataatacactactttgacaaaaaaaaaaaaaaaattgtgtttatctaatgccaattcaccttctgtaatcactttttattcaacaaatagcattggaatcgtcaaaaatcaatttatccacaagtatttttttttgttcaattatgcgtcaaaatcttatcaaacttgtatttaacattttgccattttttgaattttctttaaatacattttttgttaatgaattttctttaaatacttgcgaaaacttttgtaacttgtgtttgtggttactctagtttgaatgtcttcccagtttccgtgtacaaaagtaaattagaaaaatttacagagaaatttcacaactttatcgacttttcaaactaaaaa

SEQ ID NO: 158751 - DNA, 369 bp, Arabidopsis thaliana landsberg
gtgatttcgagtttggaagaagcggcgagagttgggaataagtttgatgtgaggaagagtgagagtagagtaaggattgaaggtaaacagaatggtcggaaagggaaattggcggtggaagcggagatattcgcgggggctccgtcgtttgttgtcgtggaagtgaagaaagatcatggagattcgcttgagtacaacaacttctgcaggactgctcttacaccagctctcaaggacattttctggacctctacacctgcttgaatttgatgaattcttgcgtgtttcaaatttctatgttgcaatatatattgttggattctacattcgattcgtgattcttgttcttgattcttaatgtggtatcat

SEQ ID NO: 158752 - DNA, 656 bp, Arabidopsis thaliana landsberg
ctactgtcaagaaatgagtgatctgttatctcaaatcctcgctgtgatctcagaggatcacgaggctttctggtgctttgttggtatcatgaagaaagctcggcacaatttcaggcttgacgaagcagggattcaaagacagctaagcattgtatcaaagatcataaaaaataaagactctcagctttataaacacttggagaatcttcaagcagaagattgtagtttcgtttacaggatggtgcttgttatgtttaggagggagttgagttttgaacagacgctgtgtctctgggaagtgatgtgggctgatcaagctgccattagagctggagttgggaagtcgccatggagcagaatccggcaacaagcaccgccaacggatgatttgttgctctatgcaatcgcggcgttagtactacgtaggaaactgatcatacagaaatacagtagtatggatgagattgtggaagagtgtaatagcatggctggtcagcttaatgtctggaagcttcttgatgatgcccatcatcttgtcgtgacgcttcacgacaagattgaaactctttctcaatcacagagtatttgatgaagaagtcgatcaaagccagaaatgaagtgtttccactacacaaaagcccttgcactcgtctggc

SEQ ID NO: 158753 - DNA, 82 bp, Arabidopsis thaliana landsberg
  unsure (1)..(82): unsure at all n locations
ttttttttttttttttcttttttgttttttttttttttttttttttttntttttttgtttttnttttttttttttttttttt

SEQ ID NO: 158754 - DNA, 302 bp, Arabidopsis thaliana landsberg
cccaaaggatgcaaggaacagatgtgacctttcgaaaggatgcaaagaacggatgtgacctttcggaagggtgcaagaaccggatgtgatgcttcgggaagcatccattcgcctcctatataagggaggacgcccaaggcatttcacatcatctcacaacatccaaaacaccataaaacattcttaaaggagtcccaacacatcctagagttgttggtcgaaaagggggtgcggctcggcgagtataactcgaccgaactgatgcgcatgctacctcccggtccaacggttcgatggagtgt

SEQ ID NO: 158755 - DNA, 356 bp, Arabidopsis thaliana landsberg
gactggtttaacttgagcgtctctgttacggtggcacttagatttggttactgaacttgttgtctagagataatttattgagcatgttaatcacctgtaaactgaggaaacgaaactactcaattaccccatcctcgggagttctttatctgattgaattctttgtttactctactgttgtttactgcatcttgttatccgtcgcttaatttctgcaattctttcttgttactcgacctcatactcgaccacccagttgtctggcaacagactgtgcagtctagtatccctgttttattttctgtctgttactcgacctgtcactcgacctcacctagtgctctgcaaagagctgt

SEQ ID NO: 158756 - DNA, 359 bp, Arabidopsis thaliana landsberg
attttgtttcttcttcagataacttgtggccagtccctgtttatgtgggtttcaatctttaacctcaagtcttctggattgaatcatttttgtacaagaaccaaggcttttcgatatttctggtgtaggaccttttctcttgcttcgttgtctgagaataactcaagattccagactgattctagtaggctaccttactctggatcacggtactatcatagttcaagtaagcattttggtgaagattttgtttcgattctgaagaatattgatgtcccaagggattgtgttgagactattagaaatgtgcttgtgacacacaattggatacagaaattatgagagttgggtttagtact

SEQ ID NO: 158757 - DNA, 353 bp, Arabidopsis thaliana landsberg
ttaaccaaaccttatttctaactaaccaaagtaaggtagtgggctaaatattggggcctggcctgggctggcttcattcacgtaaacaacaaaccatatgtatccatatgtctttaaggacttaaaagtaacacctatttaaatcatgggataccaatgattggtaagaagggaaagaagctggcaggtgggaatccaaaacctcctgcccccggaaaattaatagtcttggaatctccgatcatactcccgatatcatctcgggatggtttggggcaggagagagagaaggcaagtgggtttgaggtagttaaaactttggaatcgtgtttagacttgaccaattcagagac

SEQ ID NO: 158758 - DNA, 1114 bp, Arabidopsis thaliana landsberg
tgatgcaatcatgaaaccattatcccagtttggagatgatgatttcgttgttggtagctgggagaccaaagaaattataagccgtgatgggctgatgaaactcacggctcgagtatttctcgcatcaattgatcagagaagcgagagagctgctggagaaagcgcctgcacagctctagttgcagtgatggcacattggttaggatccaacagagacataatcccaacaaggtcagagtttgacagtcttatcagagaaggatcatccgagtggagaaatatgtgtgaaaacgaggaataccgggaacggtttccagacaaacatttcgatctcgagacggttctccaggcaaaagtcagacccatctgtgtagtccctgaaagatcattcatcgggtttttccatccagagaaatcagaggaagaagaaggaaaagaagatgctagtctagattttctcaaaggtgtaatgtcctttgacagtatctgggaagagatcatgaaacaagaaccagaagagtcggcaagcgaacctgtgatctacattgtaagctggaatgatcatttctttgtactccttgtgaaccacgatgcttattacatcatagacacgcttggagagaggctctatgagggttgcaaccaagcgtatgtcttgaaatttgaccaagatgtagagatcaaaagattaccatccgtcatcaaagacaacaaagccgacatgggaaaccagaaacaaggtggtaagaacaagtctgagcaacccgaaagatcaaaagaatcagaagaacaaggagaagaagaagtagtgtgtagaggtaaagagtcatgtagagagtatataaagagctttctcgcagcgattccaatacagcaagtgaaagctgatatgaagaaaggactggtttcatctttgcatcaccgtcttcaaatagagcttcactacacgaaacaccttcatcaccaccaacctaatatgtttgaatcctctgcaaccgaagtaactgtgtcagaagctgctgtgtctgtgacagtggcttggtcattggcgagccaattcagcaatagtggtgggtttggttgcgaaatggctgagcttttggggataaaagtt

SEQ ID NO: 158759 - DNA, 127 bp, Arabidopsis thaliana landsberg
agagaaagagtgaatttcgagagagagagagagagagagagagagagagagagagagagagagagagagagagagagagagagagagagagagagagagagagagagagagagagagatttggaaac

SEQ ID NO: 158760 - DNA, 420 bp, Arabidopsis thaliana landsberg
agaccacctcaaagttacagtatctgacatttccagaaaaaatctaatattaccgaaaaacaaaagaatgatgacaaaacctaaaatctattgactaatcaagaagaaaaagtcaataagaatattgaactctgtgatcacggtctctaagaatcccattgtacagagccatccggttcgctggcatggtagagattctacacatagaaccggtctttcccggtttagtcactggcttcggtacgcttttccggttcaattccctcctccggtactcttccccgttacctttcgtatctttcacattatccgcgaaccgcactttctttatcttcttcccctgtttcttcgtttcctctgcatcccaagaaaacctttaaattttcccgggaaaatttatcaaaaacatccgagccatag

SEQ ID NO: 158761 - DNA, 357 bp, Arabidopsis thaliana landsberg
agcagtgaggggaagaagatcggcgagaccgtgtacggcaatatgttgaccatcgaacaaaccagggatgagaagttgaacgccgtcgagaaaaatggaatcgttggaggaagaatgcttagtgagaaggagacgatgagatgggagaagcgtcgggagagaggaggagttggggagagatcggagaccagaaagtgagagtcggagaggtaccgagtggaggcggagagtagaaacgtagaacggaagagaatgagtcatgtcgagatcgaagagcatggaatcggtgggggcgaagagagtgagagactcgtcggagagtagatcgaagagaagatcggaggtgatgatggcatt

SEQ ID NO: 158762 - DNA, 405 bp, Arabidopsis thaliana landsberg
aaaattctccattctccattttcctgcaatccaatatctttatctccaaagataatggcccagcagatctcagatatatagaagatccctcttcttttggtccactttcccttgtttacattttcccgagaaaacaaaaagaaagcttttttgcttttttttctttcttctctgctttcccagctttcaagcttctgaagtaaaagaaagaagctttgtgttaaaatctcagaattttgattattcttcggattgaaaaaaactgttccttttccttaaggtagatcctttcactcgttttgatttctgggtttcttcatcggcagattattttctgcttctttctttaaatactcatttaaaatctatactttctttcattactatgttcttctaggaatctag

SEQ ID NO: 158763 - DNA, 78 bp, Arabidopsis thaliana landsberg
actcttctcttctcttcttttcttcatcgtctttccaaccttcacgttttcctccaccttattgtttcaggttcgtct

SEQ ID NO: 158764 - DNA, 228 bp, Arabidopsis thaliana landsberg
agagacggcgaatgtgatgctgatgaatcttaacatctgatagaattttctaaagattattgtctttgttctttcctttttaagatatgggcaagagtactcatcattttgcttgatcatgagcaaattgtcccaataatcttttgttttgtctcagtgtaacgtttactaagagttcatgcttggctcaagaatcggaggtaaaattaggtttcttggttaattgaa

SEQ ID NO: 158765 - DNA, 341 bp, Arabidopsis thaliana landsberg
ttaaaaagtagaaatgatattatattgcttaagttgaagtgtttatttgtataacattttcacagccaaccagaaaacaatttctagtcaccggaatcttttactggaaacaacaaccataacatatatatcttacaaacaacttttcatctttgatattaaaccgatgcaacatttccatctttgatcttaaaccgatgcaaccggaagatcattcgaaccggtatcaaccctaaacacatttttgcttgaaggcaaaccagctactggttcatcttcaattccacattcattagttcctctccttatcatgaaataaccatcctgcaaatttcatacat

SEQ ID NO: 158766 - DNA, 279 bp, Arabidopsis thaliana landsberg
atcaaaatcaaaaacaatcagatttcttctaccaaacgattaattgccttttgggatacgattcagggcttcttttggggcctctgtttgaattaacaccttgtttgctgcaaacaataataaggaaagataaacgagatggtgtcggacaatgagatgggtttgatattagctgtgtcgtcgagcgtcttcataggttccagcttcattttgaagaagaaaggtctcaagcgcgctgctgctaatggcacccgcgctggttcgtttccccgcttgctt

SEQ ID NO: 158767 - DNA, 258 bp, Arabidopsis thaliana landsberg
cgcgtttaccggcgaatcggctctttactctctagccggagacgagatctacaattttgacgactctgcctaagatatagcaattattgggagctgcacgaagaagattttatttggtcgacggagctggaatcagctattctttcttcttctccctaatcgtttcttttagcagctctttctctctcacccgaaggttcgttatctcttaacctgattcgatccgtttctttttatttattttgcgtcatgttttag

SEQ ID NO: 158768 - DNA, 180 bp, Arabidopsis thaliana landsberg
aaccctgcctaaaatttatccaattcattgttgatgctgcgccaagttaagccgccttatcctccagagccttgagttcttgcctccattcttccaacttagagaatttctctaactgctctgggtttaggtctcgggaagcagtcttctgctgttgagcttctgtgagtcggatctgca

SEQ ID NO: 158769 - DNA, 312 bp, Arabidopsis thaliana landsberg
ttttgattccccttagaactctaactcttactctcttttttttcttttcttttcattctcattctcattcttaatcccattcattccatacacaatcccaatgccaaatacaagtctccacctagtcctagctaactcaaaaagcgtgggctaggtctacatgaaagactgttcttgtcggctcatacctaacacgttataccaagctcaatcgaaaaagacctcacaatcacacacaaatgatctttggcttgaaataaggctaggctaagggtataggaaactgctctaaaaatgagagacaactacttg

SEQ ID NO: 158770 - DNA, 423 bp, Arabidopsis thaliana landsberg
gcttaattactccatattcaaatcaattcgactaatggaaaatccagaaggccaaccaacaaacttaaggacattcgttcccaacataatccacaaaggctgaagctaatctcactgctcttccttttacctcatcaaaacggttagagttcataggacttgactccttgttcgtacctgataagtcgactaatgtgttaaaaagaaaatgttcatctcccaaaaaataaataataataataataataaaataaataatgagagattgagaagactttcagatagtgtataggggtagaaatgtttcctatgaccccattattataaaattatttggaacgataaattacaaaggttggaaaaatactgagggtgtcgatccaatatgcgagttcccatttctttactctctaaaaagaataa

SEQ ID NO: 158771 - DNA, 3230 bp, Arabidopsis thaliana landsberg
  unsure (1)..(3230): unsure at all n locations
atgggtccattcccatcttcatacggtaacaagtatatactggtcgccgtagattacgtatcaaagtgggtcgaagctattgctagtcctaccaacgatgtaaaagttgtgctgaagctgttcaagatcataatcttctcgagatttggagttcccagggtagtaatcagtgacagtgggaagcatttcatcaacaaggtctttgagaacctcttgaagaagcatggagtaaagcacaaagtcgccaccccttatcatccacagacaagcgggcaggtgtgagatctccaatagggagataaaaacaattctggaaaagactgttgggattacaaggaaagactggtctgcaaagctagatgatgcattatgggcttacaggacagccttcaagacccccattggtacaactcctttcaatcttctctatggaaaatcatgtcatctacctgttgagctcgagtacaaagcaatgtgagctgaggagaagcgattgatccaactcagtgacctcgatgagatccgtctagaagcttatgagagttctaaaatctacaaggagagaaccaagcttttccatgacaagaagatcatcactaaagatttccaggttggtgatcatgtgctgctattcaactctcgcttgtaactctttccaggaaaacttaaatccagatggtctggctccttctgtatcactgaggtccgtccttatggagcggtcactctagctggtaagagtggagattttacagtaaatggtcaaaggctcaagaaatacttagtagaccaaatccttccagaggtgacatcggttcttctccaggaacctcttgatgattaaaggagtaaaggagtcaaactaatgactttaaacaagctcacttgggaggaagtcccatgattatctctgtaaataaattttttcttgtcttgtaatttttgatttgttttagttgtgtttgtggttttcagagaaaagggaacaacgtggagatagtgtaaaaattcaaaacttttactctacagatgacctggagatcgagtgtataacctggtggagtacaaaaattataaagttttatgctgcgtctggagacacggaattcgagtacatcagtcgagtatacgtgatgtttaaaatccaaaattttaaaaaaacatcactgtactcgaccaacaggagctacagagacttgcaaggatttcttgcagtttacagtagatcttttgcagatttttttcagtcaacagagtgtggaccacgcgctgaggataagctggagagagaatctaaaactcaacctagacaactcattttgaaacatcactcgacttcacaaaatccactcgacctacctctttttatttcaccaccgacactctaatctctctacaccacgaatcgctgtccaaagagatactcggtcctgacaatatcactcggcctccgagagttactcgacatccgcgccgccgtcaccagatcatatcttccgtcactcgacctccgggaaccactcgacctctgcgcttccgtaatcgaccgtcgaagtctccgtgaccactcgattacgaccaagctactcgaccacaaactatcactcgacctcgactattcactcgacctctgcagcagcaactcgacccttgttcttgaaagcaatagagccctgaagaactgtcagagtgtttactcgacctctaggcttcactggctgaactcaacctccacaacttactcgatctcctgaagcatacccactcgaatccagagacgatactcgatccaaatcgtctaaagggaactcaagaacagctctgtctactcgagtacagaattgtactcgaccaatagggtttatttcattgcctattgataacaattttggtttcattgctatctttgagactaacctattgactttgagctttgagttttaaatttctacaggagaatcatgagcaattacagtggcagttcttctgttgatcctgactacaacatggatgagatagagtcgtcatcttcaaggtcagagagagaacagagagaatatgaaagcttcagaaggaaagctgagatagcccaagggaagagagcgatgacagagaggtatgagcttataaacgaagatctggaagatgagtacatgcctgaacagactcgcagagctaccaaacttctgcacaagcccgacgtattgcctgctgaggaatatgttaggcttttcaagctgaacgagttctgtagcataaggtatccttgctcgacctcacttgcacaactcggattgttggaagatgttcatcacctgtaccagagttgtcatctggacactctgatggcttatccgtatgtagcgtatgaagatgagacaatacaatttctctccacgctgcaagtagagctctaccaaggtatgacctctgatgagttggattgtgaaggattgggattcttgcgattttctctgtatggtcatgagtataggttatcaatcaagcgcttggaaggattgtttggcttccctagtggaacgggatctaagcccaagtatgacagagaagagnnnnnnnnnnnnnnnnnnnnnnnnnncagctctgtaccgctgaatgcttccaggtcaaagagcaatcagatacgcagccctgtcatcaggtacttccagcgttctatagccaatgtactctactcccgagagatcacatggactgttactaactctgatatggagatgatcgcaatggccctcaagggaactcttcgccaaactaagaatggtatgtctctccaaggtgaaatcaatgacacacctctctctgtacttcttctgatccatctgtgtggatacaagagttgggctgtcagcaataaccgcaagagagcaggaggcgctctgtgcataggtggtgttgtgacaccgattctgatagcttgtggagtcccaatcatatctgtcggactcgagccgcgagcaatggatatcgagcacctacgtcactgtgaattcctggagtttgcaatggttgacgacttccacaggttcaggtttgagcactctacaaacaggagagctaacatccttctccctagccctgaggttacacgaataatagagggagataatattgattttcgacctgaggttggacgcctctactatgagaacgcctcgccattagatgaggaggatcttctagaataagctgtttccgatgggatggat

SEQ ID NO: 158772 - DNA, 542 bp, Arabidopsis thaliana landsberg
tcttttgtggcatcactcgatcacttttcttaaattaagaaagacagaggattttgcatctttatcaaggatgagaagggaaaggaggccattttccgaacttagggtgtggaatgtatttaggtgggaagtgtggaaacttgggaagtggtggacatggtttctttggaatcaccaccactggcggcttgaagattggtttgtagataggaaccgggtgcttgtagatcggcttgtgaagtggaggaaatgtcttctttgggatcaccactggaggcttgtagataggcacgggtggcttgtagatgggcttgtgtatctttggtggacacggtttcttggggataaccactggtggcttgtagataggcactggaggcttgtagatgggaaccggcggcttgtagatgggtttatgtgcaacctttggtggacacggcttcttagggatcaccaccggtggtatgtaaattgggggacaaggcttcttgatcttaggaaacgttaacggtgggagattaagcggaggaggtaaagggaac

SEQ ID NO: 158773 - DNA, 208 bp, Arabidopsis thaliana landsberg
agtttctgaatgtgaagcttgaggagagttctatatccttttgaattgctgtaatttggatcttacatagacgagagcagtccttctggatctacgcggtttaggcgggaggaggttttggtattgggaatgcgtttaaaagctaatcttatacgtctattcaggttggtttgatcgatctggttccttatttattttaccagagttt

SEQ ID NO: 158774 - DNA, 85 bp, Arabidopsis thaliana landsberg
aaaaaggtcaacggggcattccgagaatcgaactcgggacctctcgcacccaaagcgagaatcataccactagaccaaatgccct

SEQ ID NO: 158775 - DNA, 279 bp, Arabidopsis thaliana landsberg
tcgcatcaaatttccgtttttgctaccgtcgtctctggtcagactcagaggtatgaaccaactttcctctctgatttagcttctctttgtttctcataaagatggatttttaacaattgggttgttgattaggttatgggttttttctcaggaaacacggagcttgagcaactgacaagactgtttcgtgtttggggctttcgaagagagtaacgagattcgcgggtttcgtcaattcctggtaaacttacgatcccagtttcgatttttttctactga

SEQ ID NO: 158776 - DNA, 430 bp, Arabidopsis thaliana landsberg
ttgtttgatgaggtactgaagatggggaagaagctactgataattaaacaatctggggatgatgcagtgcctgaggatgatgatgttgtggttttgggatctattgctttgtctatggagtttgcaaagaggttttatgagttgggttcttctccggagtgtcatcaagggtaataggaaattgatatttgctctttacaaggagtttttgcagttggagaaggatatgtcgagttctagtatcgaagtatctatcgtagaagcttctcgtcctggcaacgatgaagttcctgaatcggttcctgtgtctgagtctgaatcaaatgttgtttctaagtctaagaagattgttgctaatgggtcttcttcaaagaagaagggtttgaagaaatgttcaaagactaaaaaagacagtgtcaagaagggtgct

SEQ ID NO: 158777 - DNA, 150 bp, Arabidopsis thaliana landsberg
ataccttttgcatttttttccaagccccactctaaatatatttataatatataatattatagtggatttgttcgattacaattacatgttattattttccaaatttaaatccgaattttagatactaggttaaaaaaacggtattttaat

SEQ ID NO: 158778 - DNA, 341 bp, Arabidopsis thaliana landsberg
aggttcgtgttgaatgttttgttgatcaatattttcaggcttttatcaatgttccttggtggtcccttgtgttttatactgtgattggtccgttcatgacaccaagatcaaagagcaagcttgtgtttgctggtccttcgcgttcagctgaaaccctattcaagtaacattgagtccgtttgttttgtttcttgaaaccatttatgtttagtctcttaactctgtttgaaaaatgtggactatagatacatatcacccgagcaagttccagtacaatatggtggattgagtgttgatccttgcgactgcaatccagacttttcgttggaagattcagcctc

SEQ ID NO: 158779 - DNA, 121 bp, Arabidopsis thaliana landsberg
aaaaggcgtctgcttttacgttttctacttcacagcaatggcggattgggctcaagttctcgtcggagttgtattataagttatcctttctccgggacttcttttctcgttgaccggacat

SEQ ID NO: 158780 - DNA, 271 bp, Arabidopsis thaliana landsberg
  unsure (1)..(271): unsure at all n locations
atctcaggtagcaacgcggaacagtcgaccgtatcaggagatagcatgtctcagttgggcaaaccgggtgcggtcctcatggtctgcaggttatgccaaaagaaaggtgaccactggacatcaagatgcccacagaaggannnnnnnnnnnnnnnnnnnnagcctttaacagcagaaacttgtacatcgaccataactggaactggcagggcggcttatgtcccgccaagcatgagagaaggtgcagacagaaaagctggtggttcagaca

SEQ ID NO: 158781 - DNA, 192 bp, Arabidopsis thaliana landsberg
ggatgcgatgcacatcatccattagcaaggcaatattatcctcaagtgcggatgttcccatgacctattaacattcaagaaaaaacattaatggtgatattaaacaaaagacttgtgagccaagaaagagttaccaaatcgaaaagtttagtatgatcgcagtaaattttgatataagttatccccaatctc

SEQ ID NO: 158782 - DNA, 2818 bp, Arabidopsis thaliana landsberg
atggctcacgaacagaatcaacaaaatggccctgccaacattggtgctggagatgcaccacgtgatcagcgtcagcggaaaggaattgcacctcctgctatccagaacaacaactttgagattaggagtggtctcatatcgatgattcaggggaacaaatttcatggtctgcctgtggaggacccgctcgaccaccttgatgaattcgataggctctacaacctaacaaaaatcaatggtgtcagtgaagacggattcaagctccagttgtttccattctctttgggagacaaagcacacatctgggagaagaatctgctccatgactcaatcaccacctgggatgcattgcaagaaggcttttctagcaaatttcttctcctacgccagaactgcaagactgagaaatgagatctctggattttcacagaagactggtgaaagcttctttgaagcatgggagcgtttcaagagttataccaaccaatgccttcatcatggcttcacgaaagcctctctgctcagcactctatacagaggcgttttaccacacatcagaatgcttctagataccgccagcaatgagaatttccagaacaaagatgttgaagaaaggtgggaattggttgagaacctagctcaatcagatggtaattacaacgaggactgcgacaagaccatcaggggcacaactgactcggatgacaaacacaaaattcttcttagccagcagaaacgtgtgcacttccttgttgatgacaagcagtctcaagtccaagatgggaagggtacccagttgaaaaagtcagctccatcgtcaacaaccagggtggctacaaaggatgcaccatctttcaaacccaaccatcccaacctttcttacagaagtactaatgttgaaaatcctcaggatcaggtgtaccctccccagcaacaacaaggtcagaacaaaccttttgttccctacaaccaaggtttcgttcctaagtagcaattccaggggaactaccagcaaccaccaccacctgggtttgcacctcagcaaaaccaaggtcctgctgctcctgacgctgatatgaaacaaatggtacaacagctacttcacgggcaagcctctggctccatggagatggcaaagaagatatctgagttacataacaagctggactgtagctacaatgatctcaatgtcaagatggaaacactgaataccaaagtccgttacttagagggacattgtgcatcttctttagctccaaaacagacaagccaactactaggcaaagtagttcagaatccaaaagaatatgctcatgctatcaccttgcgtagtggaaaagcacttccaactagggaggaaccaaacacggtcactgaggacagtgaagatcaagatggggaggatttaagtctcgagaaagatcaagctgacaaaccactcgaccagtcactcgagcaaccactcgagctgccactcgacagcgttacttgaccgaccactcgacctgtcatcccagcagcatcaccaactgctccaaagccagttgctgtcaaaaacaaagtaaaggtctttgtccctcctccctacaaaccgcagctttcatttcctggccgtcacaagaaagcgttggcagacaaatatagagctatgtttgccaagaacattaaggaggttgagttgcgaatacctcttgttgacgctctagcgctaattccagactctcacaagtttctgaaagacttgattgtggagagaattcaagaagtgcaagagatggtggtattgagtcatgaatgcagcgctatcatacagaagaagatcattcctaagaagcttagtgatcctggttcgttcactctaccgtgctctttaggtccattggctttcaatagatgcctatgcgatttaggagcatcagtcagtctcatgccgctctctgtcgccaaaagattggggttcactcaatacaagtcctgcaatatatccctcatcctagctgacagatcagtaaggatccctcatggtttgctcgaaaacctcccaatcaggatcggtgctgtggagataccaactgactttgtagtcctggagatggatgaagagcccaaggacccattgattctagggagacctttcttagccactgcaggagctatgattgatgtcaagaaatggaagattgatctaaaccttggcaaagactttaggatgacctttgatgtcaaagacgcgatgaagaagcctaccatagaagggcaactcttttggatcgaagaaatggatcagttagctgatgagttactggaagagctggtagaagaagatcatcttaacagtgctttaaccaaaagtggtgaagatgggtttctgcatttggaaacattgggataccagaagctgttagactcccataaagcgatggaagaatcagaaccctttgaggaattgaatggaccagcaacagaggtaatggtaatgagcgaagaagggtcaactcgagttcaacctgcacactcgagcaaatactcgatcttgtctgccaacgaatttggggagccgatcatcccaacttcagatgactggtctgaactgaaggcgccaaaggttgatctaaaaccacttcctaaaggtctaaggtacgcattccttggtccaaactctacttaccatgtgatcattaatcctgagttaaatgatgatgaagtgaacctgctattatttgagtttagaaagtataggagagcaattggttattcattatccgacattaagggaatttcacctagtttatgcaacgataggatccaccttgaaaac

SEQ ID NO: 158783 - DNA, 108 bp, Arabidopsis thaliana landsberg
atctgcttcacaactttcactttgaaagatccctcattatcaatctcgagaaccgcttgtgtgacttgcttatgaactgatgattgctctgagattgaatttggagag

SEQ ID NO: 158784 - DNA, 341 bp, Arabidopsis thaliana landsberg
cgttgtgaaatctaaccggattttgaatcccgccatttaaccgtggtcattagcgatttcacaaatttaatatgtttttcacatcttcatgtatatttagcatttattttttattttattttcttaaaaaaatttcaactcttttttttttataataactaaattaatatgatgttgtgaaatctaaccggatttttgatcccgccatttaaccgtggttattagcgattccacaaatccaacatgtttttcacatcttcatgtatatttagcatttatttttttatttatttttcttacaaagttttcaagccttttttctataaaaactaaattaatat

SEQ ID NO: 158785 - DNA, 517 bp, Arabidopsis thaliana landsberg
ggattcaacagtaagtaagtaaaagattcaaaacattatcgtaatgcaacataatttaatgaaaatggttttgcctattaaactactttctcttactgtttatttgtagctagctagcaaccattagagaggaacttggatcacttcatgggctctggtgatcatatgccgtttgcaaatccaggcgatggacccatcgtctctgtatctaactcgccagaggccaaatttttctgcaatatccctcccggttgagcaagtctgttccctcaagtaatcgatgagccactgttgagctgctctttgttcttgttcctgaatatctctatctctgcctcggttcctacccaatgcagcagcgacccctatggctcctgcagctccggccgctccagtcatgacagctgggttggctaggtgagcgatagtatggctcaagtcaggtatcatgtgtcccatcccagctgcccagtttgctcctatcctcaatgcaaaagtcaccagtttcatgaagttt

SEQ ID NO: 158786 - DNA, 174 bp, Arabidopsis thaliana landsberg
tttctttgttcattgcctttgtagatgctagatctgttgcttggtgtaatttggattcgcgggatgatatcgagtttccttgatatatttttcgtaatatgtgataagatatcaaatccgactgatggagttaattcacttgaagtctcaaactagattgagttttgtttgtcc

SEQ ID NO: 158787 - DNA, 2659 bp, Arabidopsis thaliana landsberg
atggttgacgaacaaaatcaacagaatggccctgcaaacattggtgctagagatgcaccacgggaccatcgtcaaaggaaaggaattgcacctcctgctttcctgaacaacaacttcgagattaagagtggtctcatctcgatgattcgggggaacaaattccatggtctgcaaatggaggatccactcgaccacttggatgaatttgataggctctgcaacctaacaaaaatcaatggtgtcagtgaagacggattcaagctccagttgtttccattctctttgggagacaaagcacacatctgggagaagaatctgctccatgactcaatcaccacctgggatgcattgcaagaaggcttttctagcaaatttcttctcctacgccagaactgcaagactgagaaatgagatctctggattttcacagaagactggtgaaagcttctttgaagcatgggagcgtttcaagagttataccaaccaatgccttcatcatggcttcacgaaagcctctctgctcagcactctatacagaggcgttttaccacacatcagaatgcttctagataccgccagcaatgagaatttccagaacaaagatgttgaagaaaggtgggaattggttgagaacctagctcaatcagatggtaattacaacgaggactgcgacaagaccatcaggggcacaactgactcggatgacaaacacaaaattcttcttagccagcagaaacgtgtgcacttccttgttgatgacaagcagtatcaagtccaagatgggaagggaaactagttagaagaagttagctacatcaacaatcaaggtggctacaaagcatacaacaacttcaagaccaacaatcccaacctctcttaccgcagcatcaacgttgctaatcctcaggatcaagtgtatcctccacagcaacaacaaggtctgaataatcaaggttttgttcccaagcaacaatttcaggggaactaccagcagcaaccaccacctgggtttgcacctcagcaacaccaaagtcctgcagctcctgacgctgatatgaaacaaatgctacaacagctgcttcaagggcaagcctctggctccatggagatggccaagaagatatctgagttacacaataagttggactgtagctagaatgatctaaatgtcaaagtgaaaacactaaataccaaagtccgttacttggagggacattctgcatttacttccgctcaaaaacagataagccaacttccaggaaaggtaattcaaaatccaaaagaatatgctcatgctatcactctacgcagtggaaaagcacttccaactagacaggaacctaagctagtcactgaggacagtgtagatcatgatggggaggatttcagtctcactaaagatcaagctgacaaacaactcgagcagccacttgacctgtcactggagcaaccactcgaccatttcactcgaccacccttcccaataacagcaccaactgctctgaaaccagttgttgtcaaaaacaaagaaaaggtctttgttcctcctcctcacaaaccacacccttcatttcctggccgtcacaagaaagcattggcacataagtatagagttatgtttgccaagaacatcaagaaggtagagttgcagatacctcttgttgacgctctagcactaatcatggattcccacaagtttctgaaagacttgatcgtggagagaattcaagaagtgcaaggcatggtagaattgagtcacgaatgcagtgctattatacaaaagaagatcattctaaagaagcttagtgatcctggttcattcactctaccatgctctttaggtccattggctttcaacagatgcctatgtgatttaagagcatcagtcagtctcatgccactctccgttgccaaaagattggggctcactcaatacaaatcttgcaacatatcccttatcctagctgacagatcagtaaggatccctcatggtttacttgaaaacataccaatcacgattggagctgtagagataccacagaatttgtagtcctagaaatggatgaagagcccaaagaccctttgattttgggaagatcattcttagcaactgcaggagctattattgatgtcaagaaagggaagatcgatctaaaccttggcaaagattttaggatgacctttgacgtcaaagatgcaatgaagaagcctactatagaagggcaactcttttggatcgaagagatggatcagttagctgaagagttactggaagagcttgtagaagaagatcaccttaatagtgctttgaccaagaatggtgaagatggatttctgcatttggagactttgggctaccagaagctgttagattcacataaagtgatggaagaatcagaaccctttgaagaattgaatggggcagcaacagaggtaatggttatgaatgaagaatagttaatgctaagttaaattgaatggggcagcaacagaggtaatggttatgaattgaatgatcgttaatgctgagttaaatgatgatgaagtgaacctgatgttgtctgaacttaaaaagtatagaagaacaattggttattcattatctgacattaagggaatttcagctagtttatgcaattataggatccatcttgaaaac

SEQ ID NO: 158788 - DNA, 353 bp, Arabidopsis thaliana landsberg
tgtttggcagagacctttaactttgtatgaagtatcaatcaaaccggctcaatctagaaaccaaaaccaaataaactactactactagaaaaatcatagagactcaatgttagctttgctcatgcatacccaatgcaaataccagagttagcaggaggtctaagattcttgaagagaaataacggtttcgaaagcaccaaccaaagccttaactttgcttttccgagcttcgacgagtttactcgctgtttcttcaatgacattgttgaacagtccctgtgcatctttctcctgaacatcttgatgcctcaacacaactttttcaccatcctcattgagttcttcttctctga

SEQ ID NO: 158789 - DNA, 428 bp, Arabidopsis thaliana landsberg
acctctaaaatcgggttctgaggcatctcatttcttctgttgatgtttccccttctctgacacgaatcacactttgaaatgaactcttgagtgtctttgaacatggttggccaccaaaatcctgcttgcaggattttagatactttcttgaacgttacgaaatggccgccgtagctggtaccatgacagtgctgcaagataccttctatttcatcttctaagacagacctcctatagattttatctttgcagagagtgtagaggcttctttcttttgaagaacttctttgaagcgatttatgtctttgaagaacttctttcttttgtaccctgacaaattcagaggctcttcaccacatgccaagtagttgacataatcagcgtaccacggaagtttctcctccattgcaagcatctcatcccaaaac

SEQ ID NO: 158790 - DNA, 272 bp, Arabidopsis thaliana landsberg
tgatcaatgatcggtcccaagagaaaggaaaagcatatcacgtaccttcaaactcaatggtgtgactccaaaagtctatctggagagtcacgttgggttctagagcccagggcaaggcaaagagtggggagagttaagattttagtgtgtgtggtttgtaaaagtattttgtgtagcagattacaaatgtgtgtatgacatgagtttggatcattcctcaatctaatctatgtggcttcacaacaaaggaagcagcagagccactgaaattg

SEQ ID NO: 158791 - DNA, 259 bp, Arabidopsis thaliana landsberg
taaagatattcagtaaaaatttccaggtttgctattctcattatggccttactcatactattttgttggagtatgattctagggttgaagaaattgcagatgcttgcaatagagacagctattactggcttattatattaataaaaggtggtgttttcaggaaaggaagagtatccggcctactttctcagctgagaagatttttggaggaaccttgttagcaatgtgttcgaatgatttcatctgcttctatgattgg

SEQ ID NO: 158792 - DNA, 508 bp, Arabidopsis thaliana landsberg
aaaaaacagatatgagttggattcaaattcagaggtactgtgcttgactagaagccgaattgctatagacaatattccggttctttttaccgtttttattgaaagctcaactgtttttaccttcactggacagttgtttggtcttggtgttgcaaatatattggggtcattattttctgcgtacccagctacaggtacgttaacttgagaatgataaaagctatcaataattgacgctatggatataatctgttatacatttcgtaaatatatttcaaagttaattaacataatctgtgaatgtcctgaatgcaaaatttaggatccttttctaggtcagctgtgaataatgaaagtgaagctaagactggcctatcagggcttataacaggaatcatcattggatgttctctactgttcttgacaccgatgttcaaatacataccacaggtctgtctgcccgtgaaaaatatatcagttaatagtatttgctactctttctaaactt

SEQ ID NO: 158793 - DNA, 625 bp, Arabidopsis thaliana landsberg; identical to SEQ ID NO: 42075

SEQ ID NO: 158794 - DNA, 319 bp, Arabidopsis thaliana landsberg
  unsure (1)..(319): unsure at all n locations
tgacatacttcaaaaccaagagtaaatgttatagaattgcataaacgaataaaaaaccttcctaaagctttttttacaccaactttactactaagtaaccagaagaaaagatttaaggccgaggtgatttaagcannnnnnnnnnnnnnnnnnnnnnnnnnttcctatcagtcagtccaaaggcaaaccaagctcacagattccgcagacggtgtttacatcctgaacgtcccattgtaaccagggatccaattagtcgaaccaacaagtctctcattttgaagtctgtttcgagtttggatctcgttactcatcaacc

SEQ ID NO: 158795 - DNA, 458 bp, Arabidopsis thaliana landsberg
tcacagtttggtggtttcttacacttatatacggcataagctggttgcttatacactggaatgctggtggcattcaacaatcttacttctcctggtccaaaatacaactccgagtgccttcgaaggtcgagtccttggataccagcttgtaacaccgataagttgtctgaatcaggcgaaacaatcacgattgtgtcttctgagtattgagtctcgagaatagacatgagttgcgtcacacgcacaaatacatctgatacactctcgttgggggtaccgtcgcttataggaggaggttttgtcttcatcgatattgagtctaatgcatacacctgcacagaagttgaaactttcatacttcaacccgagtttttgtttgtatgttttaatgtgaaaaatgctaaaatcttacttctgatatagattcaagcttcttgccttcgtaagctcctaaacca

SEQ ID NO: 158796 - DNA, 124 bp, Arabidopsis thaliana landsberg
ctctctcatcttcaaccttaactctcttttctctctactctttctttggacgaatctgtctattgtttgtaagttttcaaggaaggtaaagaaacagagagatctaacttcggtgagtgtacaa

SEQ ID NO: 158797 - DNA, 373 bp, Arabidopsis thaliana landsberg
  unsure (1)..(373): unsure at all n locations
ccaaaaggagaaaaacaaacaaaaaacaaaacaaaacaaaaaccaaaaaaacaaaaaaataaatggcaagaatttcactagggatatgtctgatgttagtagtagcatcaagtgnnnnnnnnnnnnnnnnnnnnnnnnncttactaaaccattacttgaagaagaattttccaaaaaaatgcaacgagtttacgccctacgctaacaagggtatgataacgttggtgaccgatctcgaaggtagcagtccggccactaccagagtttaagactttctttacacaattcaagtcttacatgtctntcatcgagacaacatcggcctcaacaaaaaatgttgatgccgagatgacagctaaatgtgacngtcttt

SEQ ID NO: 158798 - DNA, 291 bp, Arabidopsis thaliana landsberg
ggattcagccctccattaacaagtatgttggtcctttgaacttgcagataagaaacaggggaagtgactctaatcacaaaccaacaaggagaaaagagctccaagaaaaggccataaagcattcttttgttgttaattttgtaattgatttattcttaagttatactatgaaggtacactttttgagagcctattcacatatttgattcagaggtaataatgtatagagctcagttcctagaatatttatctgtaggcatatatttcgacagctttatgctttctttcgag

SEQ ID NO: 158799 - DNA, 400 bp, Arabidopsis thaliana landsberg
gatcaatccaaatttgattgaaccagtaactcgcgaatttgacaatcatgtcaattgtatagttctttctccaacacatgttaattcacacactcgaactctcgatgctgtataatcaaaaatatctatatattgttagaacgagaaaaatgaaactattctcattcgataccacaaacttcaatgatttaacaatatacgaatttgaatcaagaagctgttacaattgcattacttacacaaaccactatattaattgttttagtcggatgatcacatcttcatacaatgagaattcatcatcactaaacaagaacattaaaggctggtagatcaatcagttcccatcagttttgacaaaacagaaaagggtggagtgaaatattcttctttgttgtat

SEQ ID NO: 158800 - DNA, 156 bp, Arabidopsis thaliana landsberg
  unsure (1)..(156): unsure at all n locations
tttgtttctggttaatcaaaaattcaattaacatatataaaacatatgactacctgttgtatacacatacaagtcaagatagattgtctattgtctgaagataccgaccaaaacattgcataatgtaccacaaaagcntatgaaagggctctaaat

SEQ ID NO: 158801 - DNA, 199 bp, Arabidopsis thaliana landsberg
aaagacaaagcctttttctctatatatatatctctctatcttacgccattttggtttttgcttttctctgtgtgtgagtgattatgatgatgggattatctttctaaagcttgaagttgtcctgaaaaactggaaaagaaaacttttatggttttccaccatctattatgtgatggagttgtgagaccaaataaatgct

SEQ ID NO: 158802 - DNA, 110 bp, Arabidopsis thaliana landsberg
tggtacctgttgatatgctggaaaccatatccattgagggaaattatcaccacaaatttgcttcaaatcgtctctgctaagagagcctagtagtttcatatcaactgcct

SEQ ID NO: 158803 - DNA, 219 bp, Arabidopsis thaliana landsberg
tcaagaaattacgaaattttcatatatatatctatctatatttaaattgctgacaaataaaaaactaagaaaaaaaaggttccttatttgttacgaaaatttgatcatttatagactttaatagtgtttgttactctataaacggcccgtgttctccgactaaaccaactcaatgtctgatatctcctccggtttgagaaacaccaatttaattcttcg

SEQ ID NO: 158804 - DNA, 387 bp, Arabidopsis thaliana landsberg
taaacttcattaagcgttattatcagaccaacaacgagattatcagtgattatttaagcataacaccaattaaagacgaaacaaacactaatccaaaaccttttagaaccaataacaaggttcgtgtaagtgaagaagtcgaaaaaaacgtctccgacggtagtaaaaagccgatctgagtcgtgaccaaacgacgcgtttcaatttcggagctgatcttaatcttgtcaacacaactcgtttcactctcgtaacagatcttgaaactttctcagcgaaactctgttttcttgaaaactggtagcttctgagaaacaactgtctcttctccatatactctccatatggtgcaccgtagtagtcaccaccactagtgcttctgaacac

SEQ ID NO: 158805 - DNA, 122 bp, Arabidopsis thaliana landsberg
gggtgttcagcaaaaggagaagtggattaagaagtctaaagttcctgctttatgggataaagctcatgaacgtaatgctaagcaggttttgaatttgattgtggaattggaagggttatggg

SEQ ID NO: 158806 - DNA, 102 bp, Arabidopsis thaliana landsberg
tttttgcgatttagggtttcgcgattcggaaatggattcatggtgagtttcttgttattgttcgtaatttcagagaaaatttggtatctgtgattcatgact

SEQ ID NO: 158807 - DNA, 139 bp, Arabidopsis thaliana landsberg
tattttatagtttacaattgttattaagtaacgtcctgccaaacccgtcccgccaacccgtcctctaaaaaaaactcatttattttattaatgttgatcttatttatgatatgtttatgaattattgtctaaatatttt

SEQ ID NO: 158808 - DNA, 171 bp, Arabidopsis thaliana landsberg
agtatgcttgaactgaaattgtcttcatcgttctttcgctcctatctgtttgtgattgtcaacagatgtatatccagtgtccgtaactataaataagtgtcactgtctttgaactaatctccttagcttttggaaacaatggtttggtaatgactctatattacatactta

SEQ ID NO: 158809 - DNA, 467 bp, Arabidopsis thaliana landsberg
taggcatattgttaatagctgccaaaaaaagaagaaggtatatattaatatacatatctatcatccatatatatggaatcatatctcaacttgcgtttggtacgataaataaaagagaaagggacaacctaaccaacgcttataatttgacatgacaaacaaaaaaaattataattagaatctctcatctttgagccatcactagctgtacgtatggctctttctgtcttacccaccaatcttgtttgcttctcttctctactatttgttaataagatcatttgtttacttctctgcttcctctttgcacaaacagttttgttctttgaaatgatctattaatgatcttcaagtgagatcggagaagcactatcatctacagtagccactcggatcgggagcctccgcttcatcttcacagtcggaaatgacactatctcgtcttcctcagccgtccaactacatgt

SEQ ID NO: 158810 - DNA, 384 bp, Arabidopsis thaliana landsberg
cactttcaacaaaaaatgagttactctcatcaaagcatgggttctggtttgtttcttttccccttcttgattgttcatgttaatgttatttgtacttgttatgatcaaatttttttaccgtatgataatttagatagattccacggattaatttgggttttggcctgaagtttcttttgttatttgaaaaaataaagaaattctttttgcttgaaacttgtttatgacactgtatttggtacaatctttgaaggtagtagaaatgcaaggggatatgaatttggaaggacttatgttgtgaggcctaaaggaaagcatcaagccactctagtctggcttcatggtcttggtgacaatggctctaggttacactcttcccatggc

SEQ ID NO: 158811 - DNA, 589 bp, Arabidopsis thaliana landsberg
tgtagacggtacagagaacgaacccttgaaaacatggtagtaaatagctgtgacaagccaaggttgcgtgaaaaacacggcacccgctcaatccataactatgagctacatcaagaagccatggcatggtggagtcgtacacgatagccctaggtggatttcccgacagtttcatgtcttcaaccaacttcggtaaggtgtttttgatgctggtttctactctttccatgtaatcatctaggtcttgtaatggttcctcgccttcttggaagccgttggagatggggaagacagtgattgagtcgtgctctgttttgtatggaggagagggtttgtcggagacgaggaccagagtgagcttaagaccttttgaggctaagcgtttgcagaactgggacattggagttatgtgaccttgtcctgggaaaggcaagacgataagatgagatccttctctcattttcttctttttttaatcttgtgttgttactgactctagtttttgttgtgtgggtgttgttggtgtgtgttatggatatatatgattggattagagaacgacttcgattttactacggctttggtgggg

SEQ ID NO: 158812 - DNA, 124 bp, Arabidopsis thaliana landsberg
attttccatagatcattcatagacgtacgcatcatctaatcaattcatcgtcgtcttccacaattgtcatcaccgatcgattttccgactccgacgtacctcctcttccccgttaccttctcag

SEQ ID NO: 158813 - DNA, 139 bp, Arabidopsis thaliana landsberg
tgtgatgctaacaatcaagatgtgatcagaagtcactaagtcaagccaagcataacaggttttggtgtgttctagcagtcctaagtgaacatgcagaaaacagaaaatcaaacagaaacagtaaaacactcgaccaaca

SEQ ID NO: 158814 - DNA, 74 bp, Arabidopsis thaliana landsberg
actctgatgatgacgttcatacgaaggccgagatattggcctgtgccaagaaaatgctaaggaagaagcagaga

SEQ ID NO: 158815 - DNA, 342 bp, Arabidopsis thaliana landsberg
gtgacttaccggagataccagcggtacagtagactaaggcaaatatcataccaccgaaagcccaagcgattccttggattccgacggaagcacacatgttcggtgaccttttcactcccataacagtcaagacagtgatgtagagaaagagaaaagtagcgatgaactcagcgatcccagctctccaaaaagaccatgaagaaagctcaccaggttcgaaaaacggagctggtggtggttccttgtagtccttgtcactctgagctgatgttccgattggttgtctctccgggaacttgttagctccaactctaacgtcttcttccttgccttccatatctt

SEQ ID NO: 158816 - DNA, 203 bp, Arabidopsis thaliana landsberg
caaagaagcaaaagaatttcatttatatgaagtcaaaaaataactttgcgtattttggtttcactcttggttggaaaagttgacagaacatagcatagataagcctaacaataatgtagagcataagccaatttatgtggaacatatctagaataggagaagaagaaaacaaattaaacagcctcttataaataaaaacaacc

SEQ ID NO: 158817 - DNA, 211 bp, Arabidopsis thaliana landsberg
ataaaaacaaaagaaaaaaaaaaaaaaataaaaaagaaaaaaaaaaaaaaagaataaaaatacaacaaaaagaacaaaaacagagaaggaataggaagcaaagcaaagagaagaagaaaaaagacaaaaaaaaaaaaaaagaaaagaaataaaaagaaaaaaaaaaaaaaaaaaatatttaaaaataagaaaaaaaaaaaaaaaaaagaaa

SEQ ID NO: 158818 - DNA, 221 bp, Arabidopsis thaliana landsberg
taacccaatcctcagtaatgtgtgtatatgaataggtgtagctgaaggagatacatcgaatacagatgtagaaggagacagagatactacttctagtattagaacacagcctccccctcgtaaaggaagaaatcttagtagcagcagaatcaaattctacggtgttgaattatcaccagataatgttgctgtagcaatggtgtattttgttcaaggtgttt

SEQ ID NO: 158819 - DNA, 467 bp, Arabidopsis thaliana landsberg; identical to SEQ ID NO: 70258

SEQ ID NO: 158820 - DNA, 159 bp, Arabidopsis thaliana landsberg
aaaatggagatatggttacttatcttgggctctctctccctctctgtccttgtcaatatcctcttctttcgcctccgtgactcctcgtctcttccgttaccacatgccctaacttcttcccttccttggacccttcaatggctcggcaaggttaggtgg

SEQ ID NO: 158821 - DNA, 155 bp, Arabidopsis thaliana landsberg
gcatctcaacttcggcgagctcgagttcgagacgaccgaaatcggcttgagacatgtctttgaccttgtattcacggccacttgaggtcttctcgacgagcaacgccatggttgagctagatctgagatttgaatccgaaaggaggcagagagag

SEQ ID NO: 158822 - DNA, 97 bp, Arabidopsis thaliana landsberg
ttgtttttttttgtaattttttaattgtttttttccttgtttttatttttttttttttttttttttttttttttttttttttttgtttcttctatat

SEQ ID NO: 158823 - DNA, 107 bp, Arabidopsis thaliana landsberg
aatgcaccttcacattgttccttgcatctgcttcaatcttctcaacacgtgccacgtaaggagctttaccagcatctgatggacgcattaacacacaatctcccact

SEQ ID NO: 158824 - DNA, 238 bp, Arabidopsis thaliana landsberg
gtaatttatagaacatgatgtcaacaaagattcacacacttcgcaaagcaatgagcttttacattgctctataaataagtatactttttcatatacgtgagttggaaacataagctttttaagccacatgaaaatgctcaggaaaacacaaggtttacaatcagatgaggagataaaaagtcgtggcaacgcgcagaatcgggatggattccttaagagacagatgcacttaaatgca

SEQ ID NO: 158825 - DNA, 255 bp, Arabidopsis thaliana landsberg
actccttaaactcagacacttaacagttacatatcatcatcatttattctccttaaaacaataacacactagacagttcataaacgaaagaatatatgatgatgactcacagtgattcttccttcaatccttaaatccttcaagccaaatctggatcctagctttctgcatcaaaaacacaaaagacctataatcaaagcaacacaactaaagctaatagaataatcaaagcaacacaaagcaacataagcaaaa

SEQ ID NO: 158826 - DNA, 86 bp, Arabidopsis thaliana landsberg
aaaaaaaaaaaaaaaaaaaaaaagaaaaaaaaaaagaagaaaaaaataaaaaataaaaaaaaaaagaaaaaaaaaagagaaagaaa

SEQ ID NO: 158827 - DNA, 385 bp, Arabidopsis thaliana landsberg
  unsure (1)..(385): unsure at all n locations
tgcacgagcccaaataaacaaaaacccattttaatgcaaatttacacattccaaagaaacaaaatcagaggaagaaacaacggacaatgctcataataatacacaattaaggatctctagtaaccctattgaaagtttgaaacaaactaatcacagcttcttcaagtgttcttgtctttagtagcagcagcatgagatttgaaccatggaatccacaccgaagttgtcttcnnnnnnnnnnnnnnnnnntcagctctgtattgttgtttcaccatccgacgctcgacaaggatcgttacatagaccagacacagagtattgaccaatgcaccaatcaaagtccacccttgaccaaggttgcaagcaaatatgaccaatccccacc

SEQ ID NO: 158828 - DNA, 73 bp, Arabidopsis thaliana landsberg
gaaaaaaaaaacagaacaatttcttcttcctctgggatccataagttttgaggtatgttgttgctgattttgt

SEQ ID NO: 158829 - DNA, 82 bp, Arabidopsis thaliana landsberg
tttttttttttttttttgtttttttttttttttctttttcttttttgtttttttttttttttttttttttttttttgttttt

SEQ ID NO: 158830 - DNA, 475 bp, Arabidopsis thaliana landsberg
ccttctcgatttggggacttttcaatttccctatcaaagtgaatgactttcttctccaaaatcgatttctgaaacatcccatttcttgatttccctctttgtcgcaaacccaacaaagtagagcaaaaccctaaaacggaaaccttccatggcgattatctctgaggtagaagaagaaagcagtagcagccgacccatgatatttccctttagggcaacactcagtgctgcaaacccattagggtttttggagaaagctttcgactttctcggagaacagagcgattttctcatgaaaccctccgcggaggacaagatcgatgtcgcgggtcgggcggcgaaggacgagttgaacaaggctgtgaaaaagagagctgaaaaggccagtgtgatagcctgtcgagaatgaaagccggcgggccattgtaatgcttgtcgagacaaaaggtgtgaatgatagtggcttgccaactat

SEQ ID NO: 158831 - DNA, 365 bp, Arabidopsis thaliana landsberg
tgttaatgcacgaattaaacaagtacgcgtgagtctctggggaaggtgaagaatcaatctctaatccacgagctgaacttgaagctgggcaatcgacgggctgaaaggcttattgcgaactgagaacgtaattgagggcgctacgaggcgatgccgtttcgagctggtggttctggtgggctggctcttcttgctaagatggcttgtcttgacgagatgtcttctctcgacgagctgacttgtaccgatgagctggctcttctgggcgagctggctgatcttgacgagcagacttctcccgacgagctgacttgtgtcgatgagctggctcttctgggcgagctggctgatcttgacgagcagac

SEQ ID NO: 158832 - DNA, 345 bp, Arabidopsis thaliana landsberg
aattttcccgtcgtctctgaattttccctttttctcttcttcactccaccgccttccccgaatcacttcctctgcctgatctaattcaatctccttcctagctcaaagaagtcaatttacacgagcagatctctgcactcaaaactcctggatcttcatttctgggcttcaatttagagtttttttatattaaatgggttggagatacaaagctggtctgttcttgattggcactgttgttatcatatgggtcacctccgctgaagttactcaggtattcattcattgtctcttcaattttgtttaaagctttcatcttttgaggttatggatgtttcatttggg

SEQ ID NO: 158833 - DNA, 357 bp, Arabidopsis thaliana landsberg
gactaggttaacttgagggtctctgttacggtggcacttacatttggttaatgaacttgttgtcaagggataatttattgagcatgtcaatcagctgtaaactgaggaaacgaaactactcaattacccccatcctcgggaattctttatctgattgattttattgtttactctactgttgtttactatatcttgttacctgttgcttagtttttgcatttctctcctgttactcgacctgatactcgaccacccagttgtttggcaacagactgtgcaatcgagtatcctgttttgtttactgcctgttacttgaccaagtcactcgaccacacccagtgctctgcaacgagctgt

SEQ ID NO: 158834 - DNA, 138 bp, Arabidopsis thaliana landsberg
cagttaaattgtcttcttttgcccatagtgcagaagttgaccctccatggtctcgtgatcctcctttccatggtgttgctccagcatccaatagtcacacaagtaggcgcagctgctgaatcaacacatagtatcaac

SEQ ID NO: 158835 - DNA, 238 bp, Arabidopsis thaliana landsberg
tcatgaatgccaatacaacttcagaaatctttattgataactttttttcatgtatacatctagttctagtcttgttgagatatatacaggactaaatgagtgttctttttgcaactgatagataagataaaatgtgtattggaggaagcttttcttgttgtagcaggattcagatggaagagcttttccatctttattttagcaactaattggacttggcagcttgaagcatttccac

SEQ ID NO: 158836 - DNA, 382 bp, Arabidopsis thaliana landsberg
  unsure (1)..(382): unsure at all n locations
acatggagtctccaaaccaaatcaacgacaattgaatccacaccttcacgaaaccccccaaatccaaaaaaacaaagtttttgtctttttcggtttcggattacatcatctccaagacaagcaccagcatcagattttctgcatccttaaagatctcgttacggtttttgtcggaattgtttcgatttgttgtgtttctcaataagcnnnnnnnnnnnnnnnnnnnnnnnnnnnnnnnnnnnnaatagtcaccggagaccatttagcatcgtagagttcgccttttatggcgttcacgtggggatctgctctccggatttctgttctccttatccttgtagctgcaattgtcttagcttgttattttctccctgttgagaag

SEQ ID NO: 158837 - DNA, 77 bp, Arabidopsis thaliana landsberg
tttttcttcttttttttttttttttttgctttttttttttttttctttttttttgtgtttttcttttgttttttttt

SEQ ID NO: 158838 - DNA, 140 bp, Arabidopsis thaliana landsberg
tgtgatgctaacaatcaagatgtgatcagaagtcactaagtcaagccaagcaataacaggttttggtgtgttctagcagtcctaagtgaacatgcagaaaacagaaaatcaaacagaaacagtaaaacactcgaccaaca

SEQ ID NO: 158839 - DNA, 82 bp, Arabidopsis thaliana landsberg
tttttttattttttttttttcttttttttctttttttttttttttttttttttttgttttttttttttttttttattttttt

SEQ ID NO: 158840 - DNA, 506 bp, Arabidopsis thaliana landsberg
ggatcagttttgcttttgtttccttttctcgtctctgcagcttccttgttgtcaacttctggaagcctttgattgattgcaacttctatctccattctcctgctcatttaatattccaattaatagtcaatctcgtcgaatcttcaattttttaaagcttttggtcaaatcaaatgtaatgcaaagacagaccaaaacctcctcttcttcttcttatatacttcctctcctacaaaatctctatttacttccatcttctctgctaaagacctttcttcaccattcccaattttccggtaactctctctttctcatgtgtatgacaaaaagtttatagctttgatcgtaaaattcggtgcttcattgttctagctacagagattttttgtgggtctgctttgatttctcaataacgatgttccataataaagttatggttttttgtttgattcgagttattgttgtggcctgtggggattgtttggcacagcggtttatgtatatgt

SEQ ID NO: 158841 - DNA, 411 bp, Arabidopsis thaliana landsberg
agattattataacatataactggtgtttcccaatggaacacatatgcttagttctacttatacaactaacacacacatacacagttattgctctgttgagagtctctattggaaatttgagtttattatgcataagagagaaatcagaaatagatcataagactggcttttagtaattaatgtttctagggatgatgattcaaaatttattacaatattagctgaatacagaacaacaacacacctaagaacaagacattagacacacagaattaatcataagaaattaacaaaagtctgcataaccgtaaccataaagttcattctgcatcaactgattcaacccaaagttgttcacagattcttgtaccgccgagtatggtctgcgtttgagacccaaggatgttgaaa

SEQ ID NO: 158842 - DNA, 90 bp, Arabidopsis thaliana landsberg
cattgataagggcaactctagggttcatcaagtagctaacaggcgaaaggcaaataccctagacaatagattcaaaaccggatctatcca

SEQ ID NO: 158843 - DNA, 139 bp, Arabidopsis thaliana landsberg
tgtgatgcatatcaaatgaaatgttattagaagtcactaagtcaagccaagcaataacagttttgagatttctaacagtcctaagcgaacatgcagaaaacagaaattctaacggaattactaaaatcactcgaccgca

SEQ ID NO: 158844 - DNA, 172 bp, Arabidopsis thaliana landsberg
gggaagaattttcttcttccttatgtgttgcgttgtactgtgccttctagtgtttgagtttttcatagctagcttggttcggcatctgagcagtttcttcaagtgtaaggaaacatagtcaaagaaatgtacatttgtgttggaaacaaatcaaagatgcttaatgtgagag

SEQ ID NO: 158845 - DNA, 121 bp, Arabidopsis thaliana landsberg
aataaatgagcagagacagaaggagtagtgtttggatataaaggcaaacctggaccaaaccaatggggacacttaaaccctcaattcaccacatgcgcggtcggtaaattgcaatctccaa

SEQ ID NO: 158846 - DNA, 213 bp, Arabidopsis thaliana landsberg
ttcacttcttcttccactggtatctcagtcttgttctgcggcggaggaacatgtgattggtcgaagtatgatgttagagaaggagcgagcggtgaaaggagagggatcgccacgttccagttactaaaagacgttggtttgatcattaaagacggagctcgtctctgtagctggctaagttgcctctcgttagtggccgcggagctgcttgtt

SEQ ID NO: 158847 - DNA, 162 bp, Arabidopsis thaliana landsberg
ttacgtatattaacttcgttcataatacaagaatctctacgctaagaatttcattgaagagttaaacttataatccaaagccaaaagagtaagggtagatagaaaaaaagaacgcatttacattcttcttataacgttgtcgtcgaaacgttttaaccttac

SEQ ID NO: 158848 - DNA, 363 bp, Arabidopsis thaliana landsberg
taacgagcacaaaaaaacatacacaaacaaattaagagttacaaagtatcaagccgttcgcatagattctttacacagagcctttcataaattagaataattaatttccatttttaccccatgattttatcagttcttatataggcctagatacaaagagaaaaaatttagtagtgagttatatttttagcatgcttttccgacccggcaatccaatgctccggcgtatttggtaagcttagaaacggccataccatttttgggctttatcatctgttgcctagaatgcgaacacttgaaatgaggatttccagattgtctgaaatatgcattgttcatgaaaacatctttctcggatctcca

SEQ ID NO: 158849 - DNA, 86 bp, Arabidopsis thaliana landsberg
tttactggcaatacttcagtcttattctttttcttagagctgctaccagattgcaattggtcaacaacctgtgaattagaagaaac

SEQ ID NO: 158850 - DNA, 102 bp, Arabidopsis thaliana landsberg
tgagtaaaatacactgttatcaactcccccaagcttatttgttgcttgccctcaagcaaacaaaaaatcttaagttgaaggaaaagtttgaaggtgaggatt

SEQ ID NO: 158851 - DNA, 374 bp, Arabidopsis thaliana landsberg
gcccaaggagaatggaaacaaacggagcttgaatctgtcttcactgacaccattgatttttgttaggttgtagagcctatcaaatttattaaggtggtcgagtggatccttcattggcagaccatggaatttgttcccctgaatcatcgagatgagaccgctcttaatctcgaagttgttgttctggatagcaagaggtgcaattccttcccgctgacggtgatcacgtggtgcgtctccagcaccaatgttggcagggccattttgttgattctgttcgtcagccatttcgagtggttgttgtggtattaggttgactgtgtttctcctttctctgagttcgcgagttatgcggtcgatgttgtcattaaaaa

SEQ ID NO: 158852 - DNA, 553 bp, Arabidopsis thaliana landsberg
ctctctctcgccatgtccactgttcccattgagtctcttctccaccattcttatcttcgtcacaactcaaaagtcaatcgcggaaatagaagcttcatacctatctcgttgaatctccgttctcatttcacttctaacaaactactacactcaattggaaaaagtgtcggtgttagctcgaagaacaaaagtcccgtcgccattcgtgctacctcatcggatactgccgtcgtggaaaccgctcaatcggatgatgtcatcttcaaggaaattttccctgttcagcgaatcgaaaaggttttctcaatcgccgtacacagtcacatttagcggaaattgattgaatatagttcctatgttgttgttagttaaatctaataaacacattgattttgtgtatgtgttttgctgaatttaatggttttgatttcgatttttgggaatgataggcagaaggaaagatttatgttcgattaaaggaagtgaaggagaagaattgggagctgagtgttggatgtagtatacctggaaaatggattttgcattggggagt

SEQ ID NO: 158853 - DNA, 382 bp, Arabidopsis thaliana landsberg
cttttggaacaagtacatgaacaaaggctttttttacactttaaaacataaccaaaaaaaaaaaaactatttatgttgcaaaattatccattcaaatcaattactctccaaagtgtttttttgttttgtttacacatatgtaaagagacgaccgtagttatcaaaagcattttggtcacaacaaagtaagcttaacaatcaataagaaattgaattaaattgattaaaattgaataaagagacaaagagacctcgtttaaagacttgtgacgcaattattaaacagtagcagaaggaactttaacaaattcaaattctttaggaactgtaagcacatgaccaaaccattcaacttctccccaaatttcacaactttcttgtt

SEQ ID NO: 158854 - DNA, 204 bp, Arabidopsis thaliana landsberg
aatcacaaaaactttgcttatgacatggaagctttggttagaggttctttctttctacctatgaatttaacaagtaaaggtaaggacataaacagaaatctgcttctctactattacatggcatctcaaataaattctgtttatactatgtacgattctttaatcattgtacgaactcttcatcccacaaaacacccgctccaa

SEQ ID NO: 158855 - DNA, 168 bp, Arabidopsis thaliana landsberg
cttacttcttttgagagatgggcatagaacaaagcagagagcgaagtctgttcagctggcttgaccaccatggtacaaccagcagccatagccggagccacctttgtggcaaacataatgctagggaaattccaagggatgatattaccaaccactccaataggttct

SEQ ID NO: 158856 - DNA, 140 bp, Arabidopsis thaliana landsberg
gagttagtaacgagttgcgagtttgattaacgttttgccttgtatatgggcttggtcatgaggtttgatccctcccttatgtttgtgatgttgatgggttaaaagtttacgatatcaaatggatacaagttctatgttgg

SEQ ID NO: 158857 - DNA, 148 bp, Arabidopsis thaliana landsberg
gaatatgacagataggacttacccccgcccatgtaggattgtgagcatttccatgcttcaagttgataatattatatggtatacccgattgagtgtcccatgcaggcaataatctgtctgcaatatccatagccttttcaaggaaaat

SEQ ID NO: 158858 - DNA, 338 bp, Arabidopsis thaliana landsberg
aaaaagtggcataagtgataaaagttctcttctccgatcgatctccttcaaaatttcaacttcaaattccctctctgagatttcaaaatccgccatggacaaaacacaattgatcttgttaggactaccgattttcctgctttgttccgatctcttcaatctcttcacgcctccaccgccgaaatctcagcaccaatcaccaccgtctatctcagaaaccctagatttccccgcacaggtgaattcgaattcattcctacataacatctcgcacaccacttgtgttctaatcgtttgtctttttagcagaagtaactggtgttggatatggaaacacc

SEQ ID NO: 158859 - DNA, 437 bp, Arabidopsis thaliana landsberg
gaaacagcttataatatacacgagacgtgcatgtgtgtgatgatgatattatgacataaaaatctatatctagagagatgagaaaaaaatgacgagtgaattaattatttaacaaagccttggaaaactagaacttgaatgtgtatgtccatgtctcacagatcttgacattacttcactcttcttctccttactaactttttcagaattattccattgcttcctctccaaattcatcattagatcatcttcaaacttctccgacatatcaaaacctttcaaacacaccagtattggtttctcttctaagtacttacgtgaattccagatcttgtttactttgttcttgtcctctcttgagtgtggtcgagtctcgtttgataattgttgtgacttgagtgcttgaactgcaatatttggagggatcttgggatttt

SEQ ID NO: 158860 - DNA, 456 bp, Arabidopsis thaliana landsberg
attaattcaaaaatacacttaaccacatgtcaaatatcgccataaatatttcccaacagaattataaacaacaacacttaacagtaacacccttgtaaattggacttttgtccaaaaccataaaaccatttttgtttcacagataaatcaacctttggtgtagatggtgagatactaaaagtcattaatcattatagtgtacatgagaattcacaatcgaccacttcattctatgatcaatggttgatccatttgtttttcagccttcttcccaatcgacgtcgtcttcctcttcttcttcttcaccacccgaagcttctgcttccacattcaagtccaccttatagtttccattagctgcaagagtcgtaaaatgttaagttaccaaatcgagcatatcataatctttttacatcatataaccatgacagacctgtgtaatctaacttaattatg

SEQ ID NO: 158861 - DNA, 482 bp, Arabidopsis thaliana landsberg
ggatttaccaaatcggcttacaaagattgcaatgtatgtagctcgtttaccaaaaatttatcatctttgagactgagagtgttccaatattgttcttgtcttcctcaaaatttataggaagtctaagattcaactttggggggttgaatattctttacttaagagtttctaatctattcttgcacacatgtcattggaagatattaatttacctttcaatcttttttttatcttgatcatctttttctaatatgcacacgtatatttttggtttttaattactagtatcttagacataatgttgggataaaacttccaactgtgcaaacggataatgccatctataattttctaatcacaaaattttacatattcgaaaaacttatttggatttctattgattgtttcattctgaattcacatattatttatttggtaatattcaatagagaaattctgaagctttattcaaaacaaccact

SEQ ID NO: 158862 - DNA, 322 bp, Arabidopsis thaliana landsberg
agttttttaaatattaatcttaattttcatattatcttgagtggtgtataaaatagtatacagaatatatatatatatatatatatatatattttccttttattactagaatcggtcacaacttgtatatatatagataaaggaaattgtcaaaaaaattacttattcatatatataatagatgaaataagaaggattacaagttattacataacatgaagtttcttgacaagagattctctaccatgccatatatagagagaaatgctatagaggaggatatgggcaaccacattttgatttacataacgatgctttttta

SEQ ID NO: 158863 - DNA, 556 bp, Arabidopsis thaliana landsberg
  unsure (1)..(556): unsure at all n locations
atcggcttgattcagggcaatgggaacacattccagctaaattcccgagatctttgttggatggttacttagttgctggaactcagaagagatntgttctcgtgggaaggattggcctctacagtactctccaaagcatgagaatatgggggctggatcacacaaaggtctcttgggtagagataagtagaatgccaccaaagtacttccgagcacttctgagactttcggctgagaggttcgagtgttttggacaagataatttgatctgctttacgtcttggaatcaaggaaaaggtcttctatacaatgtggataagaaaatttggtcttggatttccggttgtgctcttcagtcatgcaacagccaagtgtgcttttatgagccaagatttgatgcatctgtcctctgaacaataagttatcgtctgtctcacatcattcttgaaaacttacaagttcgccagcaaaacatgtcagaaatatgaaatcaaagagggtttgatgtgtaccttcagtgttaatgaagacctggtcagcaatgatatgcttcacc

SEQ ID NO: 158864 - DNA, 229 bp, Arabidopsis thaliana landsberg
ctcatcttctcttccattcaaatctgacattccctcttcacaacaacagcttcgtattcgctcatcttcttcgctttctagcatcacatcttaatcaccatctatctcctttcaatcattctatgttcccagattttgcgtctaacaacgactttttattgttttatctccatatcttggaaatcgcaggcattgttcgtctactcgaggatttcaattttggtcatac

SEQ ID NO: 158865 - DNA, 295 bp, Arabidopsis thaliana landsberg
ggaaagcttagtttttgtcaatttttttataaatcattaattatcttaaaaattagacgatccaaagtaactcaaagattaaaagtaacttaagtttagaagtaatttttttatagataagaacgacttagaagaactcaaagttcgtatcatttgatttaatgcggagatgtcaaaacaaaatcttgcatgtgcgctataatatcttgaattgaaaataatggcatatagataccatgaaatgacacaacattttacataaggagtaaacttaatttacctcagcaaattaaat

SEQ ID NO: 158866 - DNA, 1088 bp, Arabidopsis thaliana landsberg; identical to SEQ ID NO: 25469

SEQ ID NO: 158867 - DNA, 164 bp, Arabidopsis thaliana landsberg
tgctaatcagagataggattaaatctgcccaaaactatcaaaagagttaggcagatcgttgaagacgtgatttggaatttcaggttggtggtaaagtgtttattaaagttcaacatatgaaggtaagttctgaactggatagtcaggaaagttaaagttgcgct

SEQ ID NO: 158868 - DNA, 490 bp, Arabidopsis thaliana landsberg
cattggtaagggcaactctagggttcatcagatggctaataggtgaaaggtagatacccttgacgatagattcaaaaaatgggtcaatttactctcatgacagagacccccataactctaccacttcctaatctcaactctcgttgatgaaacatagcagagcagggtttaagcaacaatctaccagagccagtatacagactagccaatctcttgggctatagtctataatctctagaattcgtagatcaggcatccatttgaatgttttttgtacgctggacgtctatggtcgaaattccatattagccagcgaaaaccgcataggggccaacgaatccagaagggatctaacctaatcttaaccacctgactaacctagagattgcccttatctaatccatcctcaagaaccctaatcactactcaagcaacataactaagaacacaaacccataaattactgaaatcataccaaaatgtagatcta

SEQ ID NO: 158869 - DNA, 138 bp, Arabidopsis thaliana landsberg
tgtgatgcaagcagatgagatgtgatcagaagtcattaagtcaagccaagcaaaaacagttttgtggtttctaacagtcctaagcaaacatgcagaagatataagcaataacagaattactaacatcactaaaccaca

SEQ ID NO: 158870 - DNA, 352 bp, Arabidopsis thaliana landsberg
cctaacttctttgaattccaaactctttactagactaacactttttttgtatccccctttagaactctaaactcttattctcttttttttttttcttatcattctcattctctttcccattcaatccatacacaatcccaatcccaaatacaagtctccacctagtcctagctaacccaaaaagcgtgggctaggtctacatgaaagactgctcttgtcggctcatacctaacacgttataccaagctcaatcgaaaaagacctcacaatcacacacaaatgatctttggtttgaaataaggctaggctaagggtatgggaaactgctctaaaaatgagagtcacctacttg

SEQ ID NO: 158871 - DNA, 523 bp, Arabidopsis thaliana landsberg
atatcggtggaaacaagctcacgggtcctttgccgctttccctaatgtgtttagagaaagtagagcagctcaactttgctgggaatctattgtttggtgccgtcccggaggcagtatgcatgctgctccgggacaatcttgtcaacttgtcgttgtcggataactatttcacgcacgtagggccttggtgtaggggtttacttgaaaaaggtgttcttgacgttggtaacaattgcatacctttcttcccaggacaaagatcgatgcaagaatgtgcggagttctttgtaaaacctaagaagtactactgtcctcacatgtggttccatagttttttctcttgtagatattctcacatatcttcttcctcttctagtgctttcatgcccatggtggctccctctccttaatgttcatcatcataaacgtgtttgatcacttttattgtaaggaaaaataatcggattatgtttcgaccaagaaaattatgctaacggaagggccataatggtgattgtgttgc

SEQ ID NO: 158872 - DNA, 110 bp, Arabidopsis thaliana landsberg
gtggcatttcaggcgcctagtactcgaggcccttatttacgacttgtttgaagaactcgagttcatcgagggcattgcggaggataactctaggaactaccaactgtggt

SEQ ID NO: 158873 - DNA, 191 bp, Arabidopsis thaliana landsberg
  unsure (1)..(191): unsure at all n locations
cttatttttctttcatcctcatgattttgcaggtagaataaggccaaggaagggatcagttttaagttttgtttcattctttttgtagtggagaaaaagagtntttgaaaatcaaaacaacaaaaaatgccgattaggcaaatgaaagatagctctgagactcacttangtatcaaaccccacctttaaag

SEQ ID NO: 158874 - DNA, 122 bp, Arabidopsis thaliana landsberg
attgaaagacttacggatggtgaagaagaagaaggaattagcttcctcaaagagagacctctcgacgacgcagcgaaaaagaagcagatctggctttggctaaggaagagaagacgacgctc

SEQ ID NO: 158875 - DNA, 373 bp, Arabidopsis thaliana landsberg
gatttcttccccaatcttcttcttcatatccttgaaggagagagtatagagaatccgatccaaaaaccctaaaccccatttcccgcggattttctcccaagctgatacggagatcaaatgggagatccgttggagaggttgggttctcaggcatcaatggctactgagtctgtcatgaaggaggacttgtgtttagagatcgatcctcccttaactgaatccgttgccaccgctgaagattggcgacgagctcacagataggttgatgccgccgtcgttgtactccgcaccacggcctgtagcgccctatagtacgcgtccgccggagctaaatatgttaccagtatatgctattcaattaaataatgtgtca

SEQ ID NO: 158876 - DNA, 596 bp, Arabidopsis thaliana landsberg
acgtaaacaagtttttagatcaacttgagacaagcctttctcgctttcttagcaatcttagctctttgcatctccatatgtaactctatctgcatcttctccatctctctttgagcttccaacattgcagctaactccgatgccgctgagccccttcctcctttattcccaccactctttgtgtttcccttgcacttcgcctcctctttttggctcttcttcttctgcttcttcttcctctaccgcgcaagaatgtaaatgcgtgccataatcacattccttgcaataatacgaccagagattatctggaacagtctcttggcaaacatcacagttaaagatcaaaccgttctggtaaggagaacggtagagcaatgtgagtggatgtgcgtgtccttcacgctccacggactcaggcatggacacacatccaacatgaacatcgtactggcagatagagcagttgtaagtgaatccggatccatactcaccgcacgcatcacacgtataagttgactcgtacggtggggaatacagcagtgtcaaagggtgatccgggtgagctttgtgacgagtctcacgtggaagctcaaaac

SEQ ID NO: 158877 - DNA, 374 bp, Arabidopsis thaliana landsberg
tcccaaagagaatggaaacaactggagcttgaatccgtcttcactgacaccattgatttttgttaggttgtagagcctatcgaattcatcaaggtggtcgagcgggtcctccacaggcagaccatgaaatttgttcccctgaatcatcgatatgagaccactcctaatctcaaagttgttgttctggatagcaggaggtgcaattcctttccgctgacgctgatcacgtggtgcatctccagcaccaatgttggcagggccattttgttgattctgttcgtgagccatttcgagtggttgctgaggtagaaggttgactgtgtttctcctttctctgagttcgcgagctatgcggtcgatgttgtcattgaaaa

SEQ ID NO: 158878 - DNA, 339 bp, Arabidopsis thaliana landsberg
taaaggtggaaagaagaacaagtcatcaggtaacgaaaactaaagttaagatatataaagatataactttgcatatgagatgagaatttttgattattgatttggtttaaaaccatcttggtgcaggagggaagaagagatgcccattcccttgtggtccctcttgcaaaaaatagaagatttgcacaccaagtcacatttttccatagaaatttttacttggctgtattggtgaatggttgagtgacttatgaggcttttggcatcttaaaatttttggattattataatatatgttatgttgttaatgggtttaaatgaaaaatgataattgctctt

SEQ ID NO: 158879 - DNA, 162 bp, Arabidopsis thaliana landsberg
taaaaccaaaataactctttgaacttgaagtatgtcctctgcaacaccaaaattaaagtgtgttctctaattctacaagttttgaaactgtgtttaactgttaaacagaaaacagcaccgtaccaacctttctcactttcattcactaactaacgctcttct

SEQ ID NO: 158880 - DNA, 400 bp, Arabidopsis thaliana landsberg
  unsure (1)..(400): unsure at all n locations
tgttcaaaaactagatacatcaaatatctttaatgtccatcatctatacatgcaatacacttgtctagaatcaagctttgtgctcttccttctctctgtacatgcagttcacttttgaagttgtgcttcaccctagcttttcggatagagttgccacgagatcttcccgagctttctctaaggcacttgagagattttcgggctttctttccaccacctcctccgccacacagcttagctatgggggcaatgaattttcctacttgaactcctagggagactattccaggactaaatgcagcaactaaactaaccttgtctttctctggagatgaacctagtaccacagagactggatctaccaatgtgctnatcaaatgctcaactgcactctttaatg

SEQ ID NO: 158881 - DNA, 138 bp, Arabidopsis thaliana landsberg
ccaacgatttatgtctttgaagaactcctttctgtcgtaccctgacagattcggaagctcttcaccacatgccaagtagttgacataatcagcataccacgaaagtttctcctctactcaagtatctcatcccaaaac

SEQ ID NO: 158882 - DNA, 245 bp, Arabidopsis thaliana landsberg
  unsure (1)..(245): unsure at all n locations
acaaggctaaccgagctcacacatttctcggggatccggctcaggaggacgagatattcccgaacatgttgctgtttgcagcagcttgcgggattccagcggcgagggtgacaaagaaagcagatctccgagaannnnnnnnnnnnnnnnnggatacaccaggaccttacctgttggatgtgatttgtccgcaccaagaacatgtgttgccgatgatcccgagtggtggcactttcaacgatgtc

SEQ ID NO: 158883 - DNA, 293 bp, Arabidopsis thaliana landsberg
agaagaaaaattataaaggagaaaactaaaatcatatacatttctctactcataacttctttatacattgttaactgcttaagttaaaagaaaaacaaaaaaaaagagcggattaaacttaatttccccttaattttccaaagatatgacaaggaaaaaaaaaaacgtaatcaaaggggaaagtaagtcaaaaagtgccctttcgctgctgcaaaatcataggaagcctaaaatcaccaacactgatccgtctcccatctccgggtcgtagcgtaaacccgccccgaccgacc

SEQ ID NO: 158884 - DNA, 309 bp, Arabidopsis thaliana landsberg
tgtccttcatgatcttgaaggaaactcttggtgacgaaacagagtccgtcgaaagggtcggttttgaatccggatccggatgcggatccggttcaagatcagggttattgggtatcttcgtgttgtcttgatccaacacggcttcccaagctatgggaacttgaagaatctttttagggaccactttggatcttggaggagactctgtcttggggagaggatctttagtagatgggcagaggaagttgtccatcaccatggctccatgatgatcctcgtcatgatcaagatcaagatccttgtagctgt

SEQ ID NO: 158885 - DNA, 211 bp, Arabidopsis thaliana landsberg
tccaacacatagtttatgtaacttttctcataacctttgaatcagtcaaaacctaaacacttactagtagaacagtaaaaatttacaatattaaatcaagctcttaatgttgtagtgaaaacaaggactgttaactatggaaactgcagaaaaagctttgtggaaacttaacagcctgagaacaagctaaacgttcatccttaggtcttat

SEQ ID NO: 158886 - DNA, 244 bp, Arabidopsis thaliana landsberg
aatttggataattgaatctttgcgtcttctctgattctctatggagaaaaaggtcacacttttaacaatctatgagaaggtgggtcactgattgatgaatgaatttgctcttcttcctcgctcaatcgtaagtttagtagaaattttcagagtcttcttctcgaatagaaacggatagttggggtagaatcgcttttacacttctgggatttgttggttctgctcttcttgtattcgcattttc

SEQ ID NO: 158887 - DNA, 207 bp, Arabidopsis thaliana landsberg
aaaatgaagagaagaaaagaaataattcccccttaaccactcgggcaaacctgcttattgaatatctgttaataaaccaagtacttgttattattctacaacccaaattcaagaaatttttgtccttcaccatcacttgattaagcttatttcaacagaaagtgaccgatcccagtgataaaccgagaagaaaatgatttaaaacaa

SEQ ID NO: 158888 - DNA, 415 bp, Arabidopsis thaliana landsberg
gaaaacaaactttaaacaatggctggagaggagttgttgaaactgttcgagcaaaactggtcagagaggccaatcttcaagaaagacaaagagaatctgaatggaaaaagtagagagaagcgtggagaaaaagagattctagaggaacgacgagaagaagaagcactgaagaattttccggtgagctttcttgtagagagggctatgagtgacgagacgatgatgacgacgagttccaagacaagtttgtttagttcttcatcagatgatttgttcttgtctcctagatcggtcttacccgttaaaccaacgccgatgaagcttcagacgatcctctccggaaaagaagtcaacgcgttcacgattgcggaaagagagagactactttcagagaaggaagagcagaggaagaaga

SEQ ID NO: 158889 - DNA, 246 bp, Arabidopsis thaliana landsberg
gcatcatgtatatccacattaagaccacaggtttctcatgtatatgtcatatttgcacctatgttgagtacgcacatgagattataataagtgatcagatctctctctggtgtatgctcacgtagggtctttgttgtaccacccgcaataatggtttcgctggctatgagttagctgctcaatgattgaacatggtctccagtgtggattgacttattctgtcttcagctattcccaggcgattcc

SEQ ID NO: 158890 - DNA, 591 bp, Arabidopsis thaliana landsberg
  unsure (1)..(591): unsure at all n locations
cttcaaaacagatcacatcatgttatacagttaaagccttcgccttttgcgtcatacatatctctaaacagttcaagaaggtcactgttatgcaaaagaagattggttgtatcttgtttggatacaaatgacaattctgtcacaactacatcnnnnnnnnnnnnnnnnnnnnnnnnnnnnnntaaaccagtaagtgaatcagtgaaatcaagcaatggcactgccaaaaaagcaccattgacagcacgagagagactaagagcggctcgtgttcttagccgatacactgaagcaacaccgaaaccgtcaaaacctaaaatggggagccaacttcttgatgtgctcaaggaaagtgataagaaatcaaagaggaaaccgggtctacccgaagcaccaactaacatgcttgatgatagcaggagagggatgccaaagagcggtcttacgtttgattttccggaaggctcggatattctcatcattgctttctcctttgtgttcataagcacagtcatgtttgctcctacttttcttgtttggaagactcggtgcgatacacttcaacgaatagtaaagttgagatttggagaa

SEQ ID NO: 158891 - DNA, 267 bp, Arabidopsis thaliana landsberg
acaagtcgttatctggttcatgctcctgaacacaatctaatttcacagacgctggttcaaaactgtctacaaaaggatcatacatatcaccaacaagaccacattccggaacaatcttgccttttccagagtaaggcgaagaagaagcttgtctagaaccatcatcaggaacctctgtctgaaaagtcatgcctttgcttgttacagactttggttttgagctaatagataagtcaattcgagaagttggagtacttgattcttaag

SEQ ID NO: 158892 - DNA, 386 bp, Arabidopsis thaliana landsberg
gagagaggagaagtacttttatctttaaagatagtgtgtagaagcactgtctgccagacatatattttcatcctcaatcgcgtattttgacataggctatccatatgtcataacatattttctggaataaatatatttattcataaaactttgacataggctatccatatgtcattattccagaattacaaaagcatctataatgcttgtcatgcatagcatgattatacatatggctataacatattacattgattttccattgtcatgatcaatcgagaaaatctgtcatatcaagatgattatcatcatcttggcctttaaaggaaagttccgcctcatcacagatgagattagtttcaacatccctttcttttgccttttgt

SEQ ID NO: 158893 - DNA, 202 bp, Arabidopsis thaliana landsberg
ttattctccaagtacgggaccataaaggatctacagattctaagaggtgctcaacaaacgagcaaaggttgaatctatctttgggtcgctattgtgatctttggtttcactagtatgctttacctagttttgaccttttgtttgttgacgatgattaagctgtgcttttcttaagtatgagacaaaagaaccggctgtttct

SEQ ID NO: 158894 - DNA, 150 bp, Arabidopsis thaliana landsberg; identical to SEQ ID NO: 4276

SEQ ID NO: 158895 - DNA, 228 bp, Arabidopsis thaliana landsberg
acaaaagactcagagcgacctattattattgttggctttggaggacctggttttggcgaactcaaccaggtctttgaaaagcaaatcctctggtttctcttctttctgcggttcactacttgtcaaagaaaggttccgggtctgtccctcgtaagaggaatctgagccgctactcgagtggtgatgctcaaagaactgttgcctctggttgtgccttgaaggcggagg

SEQ ID NO: 158896 - DNA, 140 bp, Arabidopsis thaliana landsberg
taaaatatttagacaatgattcataaacttatcataaataagatcaatattaataaaataaatgagtttttttaacggaacgggttggcgagacgggtttggcaggacgttacttaataacaattgtaaactataaaata

SEQ ID NO: 158897 - DNA, 315 bp, Arabidopsis thaliana landsberg
ctgtttttttattttctgggtttcatttactttcttaatctattttactttttttggtaactgatgtaagtgattttagtgatagttctcttctttgccactaacaccaaccactcgttttctgaaaagtgtagattgttctttttcttctgcagtttttcagttttttggataaataaaaactgttgagattcccactaaaacagattaaaagcaagcgaatctgatctttcaaattcaccactgtattatatcatagatgatctttgcaaaaatctagaatttgatatcgctagaactcacatcagttgtgac

SEQ ID NO: 158898 - DNA, 464 bp, Arabidopsis thaliana landsberg
tggatacaggcagattttgtagagcaactgtttcgtgggagactggtagatgaacaacttatgtcaacaatgataaattcacaccattggcaggttctattcttactcatctgaatgtgtatggttaaaacagaacattgaaaagtactactgaaagttactatatgaacatgtaaatatagtttttgaagtgtttgaaggatgtctcttatgatcaacgctggcccaaacttctttcagtgtcctgagactatataagaagagctagagtccttagatttccaagatctgtaaattttgttatatatactcttgatcctgcatcttactgtttctcttgatgataggcaatcacctctagtttgaatcgatgcagaaagactgatgtaaccagctgtgtctaccttttatagttaaggattttcgatgtcagttatgaagagcggcatgatgtttatggtgaa

SEQ ID NO: 158899 - DNA, 145 bp, Arabidopsis thaliana landsberg
atggggaactaatcatggtcattttgggaactgcaagttgagtgatggacaaggcgctccaggcactctgtctctaatggcgagagacacgctaggtcctcacaaacctctaggtggaaactacatcattgcgactaacagaacg

SEQ ID NO: 158900 - DNA, 377 bp, Arabidopsis thaliana landsberg
caatcaccgtctcctcaaaatcacaacaccaacaaaacaaaaaaaaggttttgatcaaagagatcactgttaaaccctcacaaaatttcctcaggactaataatctgcgatcgatcgtcgttatgataaggtacgtatcagcttattcgatcaactagcacaactgtttcctggtgaacagttactttatattgcttccctttacttgtcttttatattaagcttgctaatctctttgattcgtttttgtttgaattagctttactttgggtttctgggttttactgttgggaattaaacgcttcacatagtgatgattcacacttatctcgtgtgttactgtaaaagtaacaccttgttttcatccgactgatgtg

SEQ ID NO: 158901 - DNA, 510 bp, Arabidopsis thaliana landsberg; identical to SEQ ID NO: 807

SEQ ID NO: 158902 - DNA, 234 bp, Arabidopsis thaliana landsberg
ttttattacaagcggttacttatgaaaacaaaggatataatgttagtgaatgatccaacaagtaaagcaaccatagcttggggacacaatacaaaacacgtttcgaaagaaaatcaaatggatggattcagtaattcccacgaacaaattctgaagccgcgttgaagaaaaacctttcctcattttggtttactgagatggtttctcctcttctttcttggaggataaatacct

SEQ ID NO: 158903 - DNA, 135 bp, Arabidopsis thaliana landsberg
tgtgatgcaaacagatgagatgtgatcagaagtcactaagtcaagcaaagcaataacagttttggggtttctaacagtcctaagcgaacatgcaaaaaacagacacaataacagaattaccaaattaggaagaga

SEQ ID NO: 158904 - DNA, 108 bp, Arabidopsis thaliana landsberg
acaaaattgggccagagactcagaggacttagtcataaacagcagctgcttatacggacacaatagaaacccataggaactgtatgtgatatttatctctatcgcaac

SEQ ID NO: 158905 - DNA, 1593 bp, Arabidopsis thaliana landsberg
ggctacagatagaaattgagtagaaatgcgttactccatttgaagttagatgaagctgttgatttgtttggtgaaatggtcaaatctcgcccctttccttccattgttgagttcagtaaattgttgagtgctattgctaagatgaacaagttcgatcttgtcatctccttcggggagaagatggagattttaggagtttcacataatctctatacttacaatattatgattaactgtttatgccgccgctctcaactctcacttgctttagcaattcttggcaagatgatgaaacttggctatgggcccagcattgttaccctgaactcgcttctcaatggtttctgtcacgggaataggatatccgaggctgttgctttggtagatcagatggtggaaatgggatataaacctgataccgtcacatttacaactttggttcatgggctttttcaacacaacaaagcttccgaagctgtggctttagttgaacggatggttgtgaaaggttgtcaaccagatctggttacttatggtgcggtaattaatggattatgtaagagaggtgaacctgatttggctttaaatctgctcaacaagatggagaaagggaaaatagaggctgatgttgtgatctacaacacaatcattgatggtctttgcaaatacaaacatatggatgatgcattcgacctattcaacaaaatggaaactaaaggtattaaacctgatgtttttacctacaactccctcattagctgcctctgtaactacggaagatggagtgatgcttctcgactactcagtgatatgattgagaggaaaatcaatccaaacgtagtcactttcaactcattgatcgatgcgtttgcgaaggaggggaagcttatagaggctgagaaattgtttgatgagatgatccaaaggtctatagatcctaatattgtcacttacaattcattgatcaacgggttttgtatgcatgatcgtctagatgaggcccagcagatttttactttgatggttagcaaagattgtctgccagacgtagtaacttataatacacttataaatggattttgtaaggctaagaaagtggtggatggtatggaacttttccgggacatgtctcgaagaggattggttggcaacacagtcacttacaccactcttatccatggattttttcaagctagtgattgtgataatgcccaaatggttttcaaacagatggtttctgatggtgtgcatcccaatattatgacatacaacactctgttagatggactttgtaaaaatgggaagctagagaaagcaatggttgtattcgagtatctgcaaaagagtaaaatggaacctgatatttacacatataatattatgagtgaagggatgtgcaaggcagggaaggtggaagatgggtgggccctactctgtagcctcagccttaaaggagtgaaacctgatgtaatagcctacaatacaatgatctcaggattttgtaggaaaggtttaaaggaagaagcagatgccttgttcagaagaatcagagaagatgggcctcttccagatagcggtgcataaaatacgtta

SEQ ID NO: 158906 - DNA, 742 bp, Arabidopsis thaliana landsberg
  unsure (1)..(742): unsure at all n locations
acagacataaattcttttatcaagcttcaagagcaagttagtcagaaaacatcacagccaaaccaaccaggaaaacacataactttatcacataaaactaaatttaatgtaatctgacttaacataaaccatcctttgggacgaaaggaaactatataaacatgcagtctttctttccctcagctattctttcggatggattataatgaatctcaaaagtgaaatgtcttgattctcagctacattactcaaaggcgaagataaacttaccacatacaaggccacgcaagcaaccaagttccaatgggtttatccaatcgagcaagcttagcataacctctaacttcttctggtaaatacaaatctatccaagaagctttcttaacaacaacaccatcactcttctccttatcatctttcttcggctttccctccaaaaccgaagaagacgacgacattccacaaattaatctgtaattccaaccaacaccaaaaaacttctcctgatgcaattctcttcctttactccatacttggtaattatcattccatgaaggataacacttagtgaaaggatttgtgtaatgggtagtcacaggattggacaaggatttatgttgtgattgccaaagagcagaggaagaagatggagttacggagacggaagatnnnnnnnnnnnnnnnnnnnnnnnngagagcccaaaaaacgccatctttgagagaaattgttgcctggaagaaa

SEQ ID NO: 158907 - DNA, 380 bp, Arabidopsis thaliana landsberg
tatttatttatcattttatgttattttaaaattttaaaacgcattaccaatcaattagttgtgcaagcaaaactgttatatatcttacagagacaccataaagactgaacatttgtctaaaaaattacgtagaaactaatagtaatactagaactaatccaatctaaaataagttgttcttctacaaattatcacctagaataaatcactcctcgactaactaaaatcttctcttcaatgatcttttctttctcgtcgaatgattgagattgatgttattaaaaacttcaaacgcagccgtacatgaatcacaaaacgcgttgcatcacccaagacgcgacagccaaaacgccaatcgaaaacacggcagaaagagttgg

SEQ ID NO: 158908 - DNA, 631 bp, Arabidopsis thaliana landsberg
tttatttacagcaaaacaaagaccaacatatccacacaccaaactgtttgattcacatcacacccaaatacaaaaaaagagaattctttcaaaattgcaaggtaaaaaaaagaggtgcaaatgtatatattactaaactagagaagcctcctcctgaaggttctggtagttgattgataagtacgaacgagaagaccgacaccaatcccaagaccaacacagacaccaatctctttgtaattcgtgtactctgttgcttgcagacaaaaggaatgatacttactgaaaaaggaatgatgatttctaaatccatgtggggtgaggaaacaatggttgaacatctgaggaggaagacgaagccacaatactaggggctggagcagtaacataaatggtctgtgaatcatctatgtttatcatagtcattccttcttcctcatcatcagcaccatcgtcattttcaatatttaccaatgaatcctcttgagacgcaagtatcttttccaagtcggtaaacacttttctcatacatggccgcttctttcccttagaattcaaacatctccttgctagatttgccactgccattacttgttccggtttgcagccatctcttattcgagcatccatg

SEQ ID NO: 158909 - DNA, 1136 bp, Arabidopsis thaliana landsberg
ttaagaagttataattacttcgtcttacattacaaatcttatttacacatgtaagtttttccatctaagaaactaataataccacaaaccgtaatataacgtccatttggtcacattttacacatcacacattacataacagacatcatcagcagtccaatgcgacggtaaaagtaacggcggttacatatatattacagactttatttgattttttttacatattacattatcttctgtttttttttccttttactcatacgacgcaatgacatcatcaagcatccacatatccacatcgcaaacagactcatctagttgactcggttgctccgccgtggtaccgtcaagctcaaggaacgactccaagctcgatatctgctgtttcaaatcataatccggttcaaatccgtacatcaggttctgaaactcttccccctttccaaatccaacacactccaccgggaaactcggctgagctaactcgctctgagagacaacgcaaaccttcttcgccggtggctgatcggataatcttagtgaagtagacgatggcggaggagtagaaggatgatgatccagatctgggaagttgagcttggctttctcaccacggatctgcttcgccgctacatcataagccatggcagcttcctccgccgtgttgaacgtaccaagccaaactctgacaccttttcgtggatctcgaatctccgccgcccattttccccatggacgctgtctaacaccacggaacttctttctggttttggccggaaacaaagggcttttgaaccgtagaatcaacgttgattcttttccggtccttcgtcggagaagcagagacgtcgccggtggaagagctgctaggctcgactctgatctcgttaatcaatctcttgacacgtcttcgagggaacagaaactcttcctcgtcgcttgatgaatcagtggcgtcacgatccgtcattgagacccgaaccaacctggccaagtcacgaacactggtcttcctctccatagacgactttttagtgtactttctgataacagtcttgtgctctgtgtacttcactggtctaagatccataaactcatccatcatcatcacctattattttaaacagagagattct

SEQ ID NO: 158910 - DNA, 169 bp, Arabidopsis thaliana landsberg
cataactgaagactgagaaaacggcatcgtcctagcggatcccttgatagtaacaatagctacttttttttcaccttctttttctttaaactatcgtcagtcgtgcatttcaatgaaaatattcaagaacaaaagattttaacttccgattcacactcattcaccccaa

SEQ ID NO: 158911 - DNA, 448 bp, Arabidopsis thaliana landsberg; identical to SEQ ID NO: 64383

SEQ ID NO: 158912 - DNA, 903 bp, Arabidopsis thaliana landsberg
ggtatttattttgtgttgtccaggtgtggtatcatcttgtgtctcggaagctaatccgccaccccgtgagtctagtgtcccggcagttaatccaccacgtggtaacctaagtcctatgggaaagggtacgacaggctctactgcaaataacccatcaaaagtcccagccgttgttcagcctgatgcagccacttcgattcaaggtaggggacattctcctttttaatgacaatatatgcaacagaaatggtaattttccaatagtaaatcctgaactaaataaacaaaggtaaaaaatctctaataagtaggggatatgaatctttttaatgtctctaaaaaatggagataagatagattcttctgcaaagtttttacccttggttctgaactaaacattttgaaaacatcgttctgcaaatgggtcagagatcagtgcttctcaagatataaagcctatagacaccccttcgattcaaggtacatataagcaatgtcactcttagaaagtggaacccatgttcgtgtgttgtactttgagcttttgacgttgagagggaactttttaataaatagaaaacgtgataaccaatccttcttctcttatttagcttctgcgtctctcgtttgacttttaaaaactcgagcactattttcttaatatgatggcagttgcaaaatcaaacgatacaagcaaagttggcaaccatggagctgttgttgaagacggacaaaagtttctggctcctacggcggaggaacaaacacagcaaaagattgacaatgatgattctagtacagtagacgggaaccacacgtcagacaaaccacgtctctccccaattgaaccatctcatggaatgagtatattaaacacagtgactaacggacccgacggaatta

SEQ ID NO: 158913 - DNA, 85 bp, Arabidopsis thaliana landsberg
tttttttttttttttttttttttttttttttttatttttttttttttttatttttttttttttttttattttttttttttttttt

SEQ ID NO: 158914 - DNA, 87 bp, Arabidopsis thaliana landsberg
ttttatttttttttgtttttttttttttttttttttgttttttattttttttttgtgttttttttaaatttattttttttttttttt

SEQ ID NO: 158915 - DNA, 238 bp, Arabidopsis thaliana landsberg
ttactctctaactatcaattttaggaacttgagcatgaagtttataagttacaacaacaacttctcatggcagaggaagaactaaggtcttctttttataaccaaaaacacagtgaatgtgatacaatgtatgaaaatatatgtaactaatacttatatccaaattatatatataattaggaaatacgaaccagatccaatcaggtttacaacaatggaagagtacgaaacttgtgag

SEQ ID NO: 158916 - DNA, 256 bp, Arabidopsis thaliana landsberg
tgacacaaaaataatgacgtcgttttgagaaccgttgtaacatcgtcgtaacaacaatatagaaaagacacaagcataaaaaagaagcctacgcaacaattactacaacatcaatctccatattgaatggtcttctgatatacaataccattccatgccaagcagactgagactttataagtatgtgaagcatctcacgagagttctcagtcaaatgcaactcaacaaagaaatcataagaaagcattgagaagca

SEQ ID NO: 158917 - DNA, 233 bp, Arabidopsis thaliana landsberg
acctcaaagatcagatccagatagctggtaattcggtgatatttggagcagtcgtagcgaaagctattagctggatgcgttttacgggagagatagtgataatgtgaagcagatattcgatagagaagtaagccctttgattccttggatctttcatggtttcaacgctatcgtgcttgcttatggagccaccggaagcggatagacgtttacgatgcaggtccgttaaagct

SEQ ID NO: 158918 - DNA, 420 bp, Arabidopsis thaliana landsberg
gatgaactgaccaaaaaaatgttcactagaaaggttatcccacttagacaagacaactcaaggtccaataatacaaaggacctcacggtatctagtattgtactctaatatcacgttgaaagagaaacgatctgaaagacaaaggacaagagagagatggtctattttgcattctttcaacgagctcctgaagcgaaaacaataaagatatcataaacacaagactctcaacatgaaagcatacggtaacataccacttttaacaaaacaatatatataaacggaacctaagcttacatgtaaaagggactatacataaactaatgatgatgaagcaagctaaatctggattctgtgatctagttataaaaaaggcttatagtagtatgaatgtgaaaagaatgtatcatttataaacaa

SEQ ID NO: 158919 - DNA, 477 bp, Arabidopsis thaliana landsberg
caaagtggtatactttttttcgtatctataatcctcttttgattctatcataaatgacaactcattttctgtcggattcctctaatcaccattaccgtttagacttctagtatttcactaatttcgttagatggttcttccggtgaagtgatttggttctataagcaatgtgtcagtgatctcatatattttttttatttctcacagattaaagatagaaaaccaacaaaaagatgagttttgcatcttattttttgggaaaccactccaagttaaaaagagttcaaaaaaaaaaaaaagatagagaatcttgaacattcacatctgaaaatgtagcaacaatttttcatcactagcaagaagaaaaagattgaaaacagagcccccaccatcttcacagtccagagaatccctgtcaacatattttcagagtgtgaattaggactcagaagaatgaataaacaatcaaatcaggag

SEQ ID NO: 158920 - DNA, 176 bp, Arabidopsis thaliana landsberg
gccaatgtctatatgtaggtgttttttttatagaataattattggtcttcaaatgtacctataaaatggatgattctatacttgttcaaaggaaagaagaaatatattagaccatggggaagagttgacccatagcctttatgtacgcatatgatatggggaccgatcaataagtg

SEQ ID NO: 158921 - DNA, 69 bp, Arabidopsis thaliana landsberg
ggtgattgaaatctataataggagctgccattgtgtgttgattgggtatcaagtacttcttctaagtga

SEQ ID NO: 158922 - DNA, 365 bp, Arabidopsis thaliana landsberg
gattgcacaatgagtaatggctttgaaacaatgaatgttgccaccggttgttggatatagagtggttgctgggctaggggaagtcatatcaatatcctggaccaccttcacgggtcttcctattagtaaaagtgagcaacatatcactcattttgaaatgattcatataccgcagaagttatactagggcagtttactagtctcttttaaccttgagatggatcgtctagctcagattggtcgggctcagcccaatcagatgcactaacgtgcgttgacccataaacaagcttgctcagcactgtcatgcctggatcaacctccaccggtatgatagacccagttggcatgcaaaaaataacaat

SEQ ID NO: 158923 - DNA, 684 bp, Arabidopsis thaliana landsberg
ttttttgtctcagtgagacaatcgactttctaaaatcggtaaacgatttcatctcttaaagcttctcctccattcttcacacgagtcaatttaattgagggttttgtttgatcgattcttgaatcagatcaatttgatcttcaaaaactagggtttgctttatctcttttgtatctccttgcttctcataagttcaataaactcaaaattcgttgaaccttaacttatgatttttagggtttatgtatttgattttgtgaaatctttggtttaaattgtgccacttctatgtagatggcgactgagaaaccgattactacggagactgttgctctcactgagaagaaaatggacatgtctttaggtgtgtttatgtttaatttatttactcatataaagatgtatcctttgtttagtttatagcttcatgatcatttgtatgtgggtatagatgagattatcaagatggaaaagagcaataccaatgtgaataagggcacgaaacagagagtattggttagtaacttggtttgttaaagcttacatttttatgtctctctgtgattctttattgaacatttggcatattgcgttcgagcagaataaaaaggagaaatttagtggtgctgccaaaaatagtgcggtgaaagcccagcgttatatggactctcggtctgatgttag

SEQ ID NO: 158924 - DNA, 565 bp, Arabidopsis thaliana landsberg
ctgattagaaatgtctcattcttttagaccattatcactaagcagtaagcactataagtctataatcgcagaagatatataaaatggaagtagggttttctatgggtttgggaatcatgggaaagtccatgtcaatgaatatattgaagaacggattcaaagtcactgtatagaacagaacactctccaaggtataaaaccaaaattttctgcttttgattgtgttaatagattacgttttgtctgataaagttggacactttgagtaatactaattatcttcaaactctcttggaaaactattgttgttgttcttgttagatttcagttcacaaacaagctgtcggagatcagaagcttcttctttgagtttagagttctccttcaatacacaattttgagtctccgatacgcggttcagcttatcgataagacagttgttctcgttgcgaagccttattacctgagaccagagttcatcaagatgtctcagtttcaacatccttgacctccttgcagattctctgttcgaaagcatccttctctgtttcctctcgtcgagtac

SEQ ID NO: 158925 - DNA, 144 bp, Arabidopsis thaliana landsberg
tattatttgttatgaataaagatggatgcccattataatgtccatcatctaagcccatcatctagatgtttctagggttttaccctttccttgtactcctatataaagaaccctttatctcaatggaataacacactcatttct

SEQ ID NO: 158926 - DNA, 692 bp, Arabidopsis thaliana landsberg
cactcttaaccattaacaatgtcgtctccggcgactactatcaccttctttttcttcttcactctctcatccttcttctacatcacttcttcactccagaacaacaacaacaacaacaaacacacagcaaccgttaactccttaaatatcccctccgccgcggcggagattacgctagtaaacccaaagcttccgccgcggagtctctccctcacatcctccaaaaaattcgaaggatcttcaaatctagtccacctccgttaccacatgggaccagtcctctcatcttctccgatcaacatctacgttatctggtacggacaatggtcacgcccacacaaatccctaatcagagatttcctcaattctatctccgacgctaaagcaccttctccctccgtatccgaatggtggcgcaccgcttctctctacacagatcaaaccggatccaacgtctctagatccgttttaatcgccggagaatactccgattctaaatactcccacggccaacaccttactcgtctcacgattcaggaagtcatcgcctccgccgccagatccgcttcctttccggtggatcataaaaacggaatgtatctagttctgacgtcacacgacgtcacgatgcaagatttttgccgcgccgtttgtggatttcactatttcactttcccgtcgatggttggtta

SEQ ID NO: 158927 - DNA, 334 bp, Arabidopsis thaliana landsberg
ttctgtattacagaatcaaacaataaaattctacatcggagagtaaccaccggaaaagaaaaggagaatgaagataggcggttttgtttccgaaacaaatttccaagaatccagtaaaatttttggttcccgatgatacatcatactaatcacgataaaacaaaacgcacacagaagtaaaggaagtacctttgagcagtcttgtggtttagattctcattcagctctagactggccagctcgtgaggaaagaatgattcctacaataagcccgtaaagagcaagcgcttctgcgaaaataaggataagaatcatcccaacaaagagcttaggc

SEQ ID NO: 158928 - DNA, 88 bp, Arabidopsis thaliana landsberg
ttttttttttttttttttttttttttttttttttcttctttttttttttttttttcttttttccttttttttggttttttgggttttt

SEQ ID NO: 158929 - DNA, 83 bp, Arabidopsis thaliana landsberg
atcagagaatgatacaatttgcaaaacttttatatataatataattcttaaattttaaaaattactctttaaaaaaaaataac

SEQ ID NO: 158930 - DNA, 355 bp, Arabidopsis thaliana landsberg
gactaggttaacttgagggtctctgttgcggtggcacctagatttggttaatgaatttattgtctaggaataatttattgagcatgtcaatcacctgtaaactgaggaaacgaagctactcaattaccccatcctcgggaattctttatctgattgaattctttgttacactactgttgtttactgcatcttgttatgtatcgcttaatttctgcaattctttcttgttactcgacctcatactcgaccacccagttgtctggcaacagactgtgcagtcgagtatctgtgttgtaattcctgtctgtaactcgacctgtcactcgacctcacccagtgctctgcaaagagctat

SEQ ID NO: 158931 - DNA, 108 bp, Arabidopsis thaliana landsberg
tactctacaaactttggattcacatatatatatatatgtattgtaaggtaatgtataatatatttctgaatttctctttgtttaataaccattggcacatttatttat

SEQ ID NO: 158932 - DNA, 1371 bp, Arabidopsis thaliana landsberg
cctattgacgacaccatgcctgaggaacagcttatggccatccgggaagtgaacaaaaaattcaaaagcagccagttttgggatgagatgctcgcagtagaggagaaacttccgtggtacgctgattatgtcaactacttggcatgtggtgaagagcctccgaatctgtcagggtacgaaagaaagaagttcttcaaagacataaatcgcttctactgggatgagccatacctctacactctctgcaaagataaaatctataggaggtgtgtctcagaagatgaaatagacggtatcttgcagcactgtcatggttctagctatggcggccatttcgcaacgttcaagacagtatctaaaatcctacaagcaggattttggtggccaaccatgtttaaagacgctcgtcagagaaggggaaacattagcagaagaaatgagatgccccagaacccgattttagaggttgagattttcgacgtatggggaattgatttcatgggtccgtttccgtcctcgtatgggaataagtatatattggttgcagtagactatgtgtcaaaatggatggaagcaatagccaatcctacgaatgatgctaggatcgtcctgaagttattcaagagcatcatcttcccaagatttagagttcctagaatagtcattagtgatggaggcacgcactttgtcaacaaagttttcgagagtctattgagaaagaatggggttaaacacaaggtagcgactccttaccatccacagacaagtggccaggtagaaatctctaatagggagataaaatcaattctagagaaaactgtcgggatcaccaggagagattggtctgtaaagctcgacgatgcgttatgggcatacagaacagctttcaagacccccattggtacaaccccgttcaatcttctttatggtaaatcctgtcacttacctattgaactggagtacaaagctatatgggcagtgaaacttttaaatttcgacatcaagactgctgaagagaaaagattgatacagctgaacgaccttgatgagctccgtctaaaagcatatgagagctctaaaatttacaaggaaaggacaaagtcgtttcatgacaagaaaataacttcaaaagattttaaagttggtgatcaagtcttgctattcaattctcgcttgaagctttttccttgaaaactcaagtctaggtggtctggccccttcagtgtcactgaagtaagaccatatggagctatcacgttgtctggaaaaggtgacgacttcacggttaacggccaaagactaaagaaatatatggcagaccaaacaattctagaaggaacttctgttccactggaagagccgcccaacgcc

SEQ ID NO: 158933 - DNA, 88 bp, Arabidopsis thaliana landsberg
caagaagaaactttctctaattaaaatggctgttcccacgggaagcgccaatctctttctccggcctctcatcctcgccgttctctcc

SEQ ID NO: 158934 - DNA, 340 bp, Arabidopsis thaliana landsberg
tcagattatttccccatctagaagctctctctcgactctctcgtctgtttctatctttcgtggcacctcttctcttctctttccttttctgagtttctgttaattttactctctctttctttttcttctctgctgcttatataataagacttgtctttctgttccaaaaactcgctttctctaattcttctctgccattctaatcaaattccgtatagatcgctcgctcttcatcaaagaagaaatcaggtcaatcaactgaatcagccaccacggatctttttcgctcaggttttttttcccaattcaatcaattccgcctaggcgttatgaaattatc

SEQ ID NO: 158935 - DNA, 175 bp, Arabidopsis thaliana landsberg
  unsure (1)..(175): unsure at all n locations
nnccttcttgtgtacctaagttctgttacaaccttaagagctacacagctgcctctatcatcaatgcctttagtggcacaatgaatttcgggactcttattgctgcctttctttgcgacacttactttggtcgttacaagactcttagtgtcgctgtcatcgcttgtttactgag

SEQ ID NO: 158936 - DNA, 357 bp, Arabidopsis thaliana landsberg
gattgtggtttaacttgagggtctattttgcggtggcacttagatttggttatcgaacttattttctcgggataatttattgagcatgtcaatcacctgtaaactgagaaaacgaaactactcaattacaccatcctcgggaattcttatttgattgaattctttgtttactctactgttgtttactgcatcttgtcacctgtcacttagtttctgcaattctttactgttactcgacttgatactcgaccacccagttgtctggcaacagattgtgcagtcgagtatttttgtttcatttaatgtctgttactcgaccagtcactcgaccacacccagtgctctgcaccgagctgc

SEQ ID NO: 158937 - DNA, 91 bp, Arabidopsis thaliana landsberg
tttttttttttttttttttttttcttttttttttttttttctttttttttttttttcttttttctttttttttcttcgtttttttcttttt

SEQ ID NO: 158938 - DNA, 203 bp, Arabidopsis thaliana landsberg
actacacgttccccttcaacatggctgccttcaagaagaagagccaccacaacagcctcttctcctgtggtcaagcgccaccgacccttgatgacgacacttccgtctccagagccgttctagagctgctcaacagcggtggagatcatgatcagggaagtaacacgccggctttttccattgaggccttgacggcgttatct

SEQ ID NO: 158939 - DNA, 408 bp, Arabidopsis thaliana landsberg
ttggaaattttttgaatgtttttaaatcaattaaacgacgtcgttttaataaaagacaacgtgtcatgccaaatcagcattcgtcatgccttgtcagcggattttaacagttgactaacgtcaaagttagtcaatgcaggttttgacacttataataagagtttaagttcttaatttgaattttgttaagagttataattgaaataggcaccgttttattgtataggtagaaagaagtaccgtgcaaatagtcagagttgaaatatacataacaaaatgttaaattggcaactgataaatgtttacgatcaatggacaaaagccgattagcgtagtccaaatcctcaaatagatcacgtatgactactactagtacaattacacaattcttgaaaactaaaatatttg

SEQ ID NO: 158940 - DNA, 178 bp, Arabidopsis thaliana landsberg
agaagagagacggtgatcggagagaaagagaggatgggaacgagacaagtatacgaagagaagcttcggcgtgggattcttgattatgatccgactatgaatcctggtcttggttctgctcggtgtcctcgttgtctttctctcttaaaccctaattcagtgagttgccaaagtttca

SEQ ID NO: 158941 - DNA, 273 bp, Arabidopsis thaliana landsberg
  unsure (1)..(273): unsure at all n locations
aagtctgtgctagctgncgttgatggattagagnagacatgtaataaacagagcagctagagcactgcagcactccaagaagagatcaagttacagcagaagatgttggtattgttataccgaactgtttaagacacagactcagaaaagatccattggagtctatggattcgggaattctcgttaccgagaagttttacgaggttttcacttagagtaaagatagattcttgaaacacatttaaagaagattcgatttgtatcgcttattat

SEQ ID NO: 158942 - DNA, 776 bp, Arabidopsis thaliana landsberg
gagactggcagtggaaaacaacttcgctctctctcttcaaaaagaaaaacaaaaatacaaaagccaaggaaagccattattacaaaagcaataacacactgtaaaaaagccactcacgaacactcctcagtaaccagagagagaaaaagaagaacaacaagccatgtcttaactactttcttcttctccctcctcaaactaaccaaaaaccctaaaaatcataagtttcttcaccaatgatgcttcaaagaagctgcattgtacttttcttctctctttttctgttcgttccacaaaagggtttctccatactcaacacaactctacttctcgtaccacatcctgacccggaactagtcgcttatcaagttcagtggtacacttactacattgcctcttctggatctacatttactctctttttcaacttctttaatgtaatttttccatctggttataacatttaacaagctattatcatgtcttcgtgtgaatctgaggttgctctgtttttcccctgttttgttcggttctcttaaaccggacagattttaataatccggttcgtaactgttttgcaggaaagtaaatgcatctataacaagacgtcaagctctatacacgacggaccaggccggttcaaccccgtgtatcaccggtaacccaatcgatgactgttggaaatgcgacccaaactggcccaataaccgacaaggtctagcagattgtggtattgggttcggacagtacgcattgggaggcaaaggtggtcagtt

SEQ ID NO: 158943 - DNA, 255 bp, Arabidopsis thaliana landsberg
cagttttattgttgttgctgttctgttatgaatggagcacagaaaggggaaagaagggacatggagatcaaagagataagacatcttatatcggagaagcactgccttaccaatgagtcttgggataaacagaagttctgggacaattcagggttcaagattgttgtatcaatgtctatgttgatgttagtggtagtctccaagagatgatgaattttgtaatgtataaatttagttgcagatagttgatgagga

SEQ ID NO: 158944 - DNA, 106 bp, Arabidopsis thaliana landsberg
acctaaacccctagtcaactccttaccaatttgtaacctattgtctggaaaaaccggagatattctcattgcttggatatcggtattcacaatccaaaactccaca

SEQ ID NO: 158945 - DNA, 204 bp, Arabidopsis thaliana landsberg
actagatcataacctgtgctatacaacacgggcattaatattgtataaattaaattgtatattctgtttgaattacataagaaatagtataatataaaagtaatgtcataatatttttcaatgtttttactatttgcatataatgctgcattgaattgactttgtttaaaaatgttatgtttataataaatacaacatatgtag

SEQ ID NO: 158946 - DNA, 154 bp, Arabidopsis thaliana landsberg
aacacaagcgtagaaaacaaaactcaactaattgtgttatcacccaaaagagaagagcaaacacaatggctttcgctttgaggttcttcacatgctttgataaacggtaatatgttgcatcagtggatgcagcaataacatgggcacagggcaa

SEQ ID NO: 158947 - DNA, 140 bp, Arabidopsis thaliana landsberg
tgtggtgcaaacatatgagatgtgatcagaagtcactaagtcaagccaagcaataacatgtttgaggtttctaacagtcctaagtgaacatgcacaaaaaacagaatttctaacaaaattacacaaatcactcgaccacc

SEQ ID NO: 158948 - DNA, 268 bp, Arabidopsis thaliana landsberg
atttgattctgtattcatatgacttgcagggtgaaatcaattctctttaatgcaataagtgagcactttcttccacgttggctcgacttcattgtgtggggccatgagcatgaatgcctaatcgacccccaggtccatgaaaaatttgatttttggagttattgcatttaaataagagtgagccacaatgttacttgcctctttgagctaaaagctattaaacttttgaaggaggtatctggaatgggcttccacatcacacaaccag

SEQ ID NO: 158949 - DNA, 207 bp, Arabidopsis thaliana landsberg; identical to SEQ ID NO: 66745

SEQ ID NO: 158950 - DNA, 438 bp, Arabidopsis thaliana landsberg
cacaaaactgcgaataactcaaagattttgaatccaaatccacttttgtaaaatgaagaatgactgtaaaagacttgggaataactctaccaaattttgttacattagacacccatttgacatgtcaaaactgtttcctcccaaaccctaacgattttgttccttctccttctctctctttgtatcctttataaaacgaaaagtggctaactaaagccctaatttcgagtttccttcttttataggcacactctagggtttccaattaacccaaccaattaaatcggatgatttaaaaataaaccctaaccgattttccggttcacgggcgttacagttttctccatggtctcgtcgatccaaaacctcagttttctccatggtctttttctcttctgctaaaataaaaaaagaggcgagagggtaaaagaaaataga

SEQ ID NO: 158951 - DNA, 359 bp, Arabidopsis thaliana landsberg
cccagcaactgtgaaggcaggtgcacagagagcagttctgtggttagcgccgatctcttcacattgatcaactctcataagatcgattcctctgacggagcgctcatcacgaccagccaaaatagccagctccggcaccccccgctggagttgcttctgttgcttcaccatgagtagtgaagaatttggaagaattgtgagcagtacttgcagatccgctagtgaaatagaggccctaatctgaggttctttggggatgttggcgatgatgaatgatgatgatgatggagagaagtatgggttatgtgtttagaaaacgaagactagtgggaagaaaaaatcatatggacttttttttt

SEQ ID NO: 158952 - DNA, 490 bp, Arabidopsis thaliana landsberg
cattgataagggcaactctagggttcatcaggtggctaagaggtgaaaggtagataccctagacgatagattcaagaaccgggtcaatccactctcgtgatagagacccccataactctaccacttcctaatctcaactctcattgatgaaacttagaagagcagggtttaagcaacaatctaccaaagccaataaacaaactagccaatctcttggtctataccttacaaatttctggaattcgtagatcatgcatccatttgaacgtcttttagacgttggacgtctatagtcgaatttcacattagctagcaaaaatcgcataggggccaacgaatccagaagggatctaacctaatcttaacaacctgactaacgtaaagattaccctaatctgatccatcctcaagtaccctaatcactactcaagcaacataatgaagaacacaaacccagaaattactgaaatcataccaaaatgtagatgca

SEQ ID NO: 158953 - DNA, 129 bp, Arabidopsis thaliana landsberg
tcagtaacttcatctccttggaaccacgggggctcatcacactacttttgctttgaatatcgaaacttgaagccttttaccgtttctgcccgcggctaagatctttgatctcaatgtttttcttcataa

SEQ ID NO: 158954 - DNA, 411 bp, Arabidopsis thaliana landsberg
ggcactgatttttggtggtgaagatggtttgcctgcaattttagcgcgccaccagatcccaggccttgatgttgttgttgatccatgtgctgctattcttgtgtttgttgtaactggccttttgtgcatgggaataaaggaggtacaaactttatatgattttgatcccgacatcaggataaatttcaactcattgtattctcatatatggaaatatcttctatgcagagcacatttgctcagggaattgtaactgcagtcaatgtgtgtgtcctgttatttgtcatagtagctggcagttatctcggcttaagacaggttggcctggttatgaacttccacagggtaagatgagcattcactatgacttgagctatttgtagttaaagatacctaaatactaatcatttg

SEQ ID NO: 158955 - DNA, 322 bp, Arabidopsis thaliana landsberg
tggatggagaaacttttgatccattgtttcaaaagtgcaattacaaaatagcggccacaacagcatgtgaccatatagctaactattactactgcattctacgaaaaattgagtgaacaaaaaggaaaaaagaatcaagttacggagtaaattacaaattgtaggtattttgtataatacaaggaaacaaagcatcttcaaaaatcgggttgaaccattgcttctgctgactttttatatatatatatatatatatataatttatgtgatggatcaaagtatacagaagaacctggatcttataatttattctttgttttct

SEQ ID NO: 158956 - DNA, 140 bp, Arabidopsis thaliana landsberg
tgtgatgctaacaatcaagatgtgatcagaagtcactaagtcaagccaagcaataacaggttttggtgtgttctagcagtcctaagtgaacatgcagaaaacagaaattcaagcagaaacagtaaaacactcgaccaaca

SEQ ID NO: 158957 - DNA, 349 bp, Arabidopsis thaliana landsberg
aatcaaataccatggcattatcagtagagaggacctaaaagacattatatttggtataactatgttgagaaattaacattatagatgtggttctcaagaatgtgacttggaaaggtaaccgagaaaacaaaatagaagaagagatcgtgaaataagctggctcagctagaggagtggaatagattctcatttatctgtgcatgacttcattttacctcttctttctgagttcgagagagatgagcttcttcgatacgccgggttagcatagaaattccataatgtgaagcacttgaagatgcataatacgaggtaactgtcagctgagcaaactttggaagtgcataac

SEQ ID NO: 158958 - DNA, 349 bp, Arabidopsis thaliana landsberg
gcccgggtccttatcgttatcctcactaattggaaaaaacaggttcgttaagtgaaagtgatgtactttaatatgttgatttatgttatggtcaaataaattggctagtgggtttaggaaagtgaaagtgatgtgtattgaatgatattggcaggcgagaaaggctagagaaagagtgatgggtgatgagtatgaagagaaagaaagtgaagaagaacatgaatacatcagctaaatcaaacagtttccattccgtcaccattaatccgttaaatgttgtgtgtttttattaattcgatgtttggtattgttgtgtcgcagtctagtagcgagccctttgccggcgcac

SEQ ID NO: 158959 - DNA, 502 bp, Arabidopsis thaliana landsberg
agaacaagaatcacgaatcgaatgtagaatccaacaatatatattgcaacatagaaatttgaaacacgcaagaattcatcaaattcaagcaggtgtagaggtccagaaaatgtccttgagagctggtgtaagagcagtcctgcagaagttgttgtactcaagcgaatctccatgatctttcttcacttccacgacaacaaacgacggagcccccgcgaatatctccgcttccaccgccaatttccctttccgaccattctgtttaccttcaatccttactctactctcactcttcctcacatcaaacttattcccaactctcgccgcttcttccaaactcgaaatcacgctactcgctggccgagacgtcgcgaatctcatctctcttttctcctctttcttcttctcctcaaacaacggcgacaaatcaaacccttccgataacgcgattatatgaaacgcgtttaacgtctccgtctcttccttcgacttgtgcaccaag

SEQ ID NO: 158960 - DNA, 368 bp, Arabidopsis thaliana landsberg
gacttgtttaacttgagggtctctgttgcggtggcacttagatttggttatcgaacatgttgtctagggataatttattaagcatgtcaatcacctgtaaactgaggaaacgaaactactcaattaccccatcctcgggaattctttatctgattgaattctttgtttactctactgttgtttactggatcttgtcatctgtagcttagtttctataattctttcctgttactcgacctgatacttgaccactgagttgtctggcaacagactgtgtagtcgagtgtctttgttttgttttttgtcttttactcgacctgtcactcgacctgtcactcgacctcacccattgctctgcatcgagctgt

SEQ ID NO: 158961 - DNA, 303 bp, Arabidopsis thaliana landsberg
gtaagttaccgggttgggaaattcccgtttatggcgaatagcagagctaaggctattgataatgcagaaggattggttaagattctggctgataaggagactgataagatcttgggcgatcacaattatggcgccaaacgctggagagctgattcatgaggctgttcttgcgattaactacgatgcatcaagtgaagacattgctcgagtctgtcacgctcatcccaccatgagtgaggctatcaaggaagctgccatggctacctatgacaagcccattcacatgtagaagccctcaggtac

SEQ ID NO: 158962 - DNA, 242 bp, Arabidopsis thaliana landsberg
aagacgtttctctctgcttcaccaccagagagatacatccaaaaaaatcatatctttccttcatttttattggcgttttaagaaaacaaagcttccccaatcagggttttgtattacaagaatgggattgtggaatggaaaaggcaccggaggatttgtcctctaccttctcgtggctttctccgtcgccgtcttctctgtttcttacgtcggagacacaacagaccctaatcatcatcatc

SEQ ID NO: 158963 - DNA, 525 bp, Arabidopsis thaliana landsberg
ctttcgctttgtctctctcgtctctaagcagtagcagatctgagttttggagagttcaaaggaagaagataactccaataccagaggttcgtaacgatgtgagatttttctctgttgtttatgaagtcttagctcaatttgatcttccaatgaatttcgttaaaatttgctagacttctatcagcgcctgtagatcgatttaggttatgtactctcattcacatcggtgggaagcgatcaatcttagaatccacgttttataatttctcgttttgatcttgtttttttcacaacttgtaaacattgcgatgttgattgtgttgattaatcgcttaaaattgaggtctgagtttaaataatccttgtgcttaccatatggtcttggctgtgataatttgttaattgttctgcttaataatctaacactttgcttcggttaatgtctggatcaacatgctcatggttgtgttccctgttgatttgtattgtaacagtgaaagcattcaggaaacatgcctcctcaga

SEQ ID NO: 158964 - DNA, 354 bp, Arabidopsis thaliana landsberg
gattaggttaacttgagggtctctgttgcggtgacccttagatttggttaatgaacttgttgtctagggataattattgagcatgtcaatcacctgtaaattgaggaaacaaaactactcaattacccatcctcgggaattctttatctgattgaatttattgtttactctactattgttactgcatcttgtcatctgttgcttagtttctgcaattctttcttgttactcgacatgatactcgaccacccagttgtctggcaacaaactgtgcagtcgagtatccctgttttgtttactgcctgttactcgaccaagtcactcgaccacacccaatgttctgcaatgagctgt

SEQ ID NO: 158965 - DNA, 901 bp, Arabidopsis thaliana landsberg
tcgcttttctctttcagaaaaacaaacgtttttttctttcgtagtttcgttcgagatgaagcaaattagtagcggtgaagtttggagatggaacaaggaagtagagatgaattcgataagagattgtttgaaacattgtagttccatcgctatcgacacagagtttcccggctgcttaaaggagactccgatggacgcgagtgaggaaattcgttacagagacatgaagttcaatgtggacaacacccatctcatccagttaggtttcacgctattcgacagaagaggattcgctaaaacctgggaaataaacttgtcagatttcgacgaacataagtgcttcaaaaacgataagtccattgcgtttctgaaaagcaatggtctcaatctggacaagatcagagaggaaggtattggaatcgatgaattctttagagacttttctcagattctcaaggagaaggacggaaagataacttgggtgaattttcaaggctcttacgacaatgcttatctcgttaaaggcttaacgggagggaaaccgttaccggagactaaggaagagtttcacgagaccgtcgagcagcttttgggaaagtttgtttttgacgtaaagaaaatcgctgaatcatgcagcggactaagtagccgattcggactacagagaatagctgatgtgttgcagatgaaacgtgttggaaaagctcatcacgctggctcagacagtgaattgacggctcgtgtcttcactaagttgactttcgatttgcttaatagtagaaagcagagtgtaagacgagttgatcatcagcaatttcaactagagcagcaacagcatcagcagtttatgatgactagatgttacatcccgataccgatgccgataccgagaccggtgatg

SEQ ID NO: 158966 - DNA, 279 bp, Arabidopsis thaliana landsberg
ctctaatttaaaattcactacagaagaaagtgtaaagaaatttagacacaagtggactaacaaaaagctgagagttagaggaaagaaaaagaagataaaacgatgttacagttttacaaactaaacgaacccaccgaagactggttttatcttcacgaaggattaagccttaagataccgttgtttcctctagtttccaatatagccgagacggtgaaggaccattgctaaaacgagcattaatattgcaaagatcaatccgccttttccgaacaacca

SEQ ID NO: 158967 - DNA, 161 bp, Arabidopsis thaliana landsberg
actactaatctgatggcaatccaaccattcctaggcacggccattgtatttatatacggtggaccgtaatgattatatctcgacgacggatctctatcacttatgttatagttcccaaaccctactccaaccacatagaagctaaaaccatggagatgcat

SEQ ID NO: 158968 - DNA, 196 bp, Arabidopsis thaliana landsberg
aaaacagagaaattaatgttttggattggtcccaccagcacgaggaaaagctcatattccggtgaaggaggagatagtccctccaggatcgaaagcttttccagttgtttcctcttcacatacaaaccctctgagccagtgagaggagttggccacgaagcaatgtctcgtcctataaaacactccggtgtaccgg

SEQ ID NO: 158969 - DNA, 296 bp, Arabidopsis thaliana landsberg
ggctaggggtaatttattggggctggccaatcacttgtaaactgaggaatcgaacctactcaattaccccatcctcggaaattctttatcttattgaattctttgtttactctattgttgtttactgcatcttgccatctgttgtttagtttctgcatttctttactgttactcgacctcatactcgaccacccagttgtctggcaacagactgtgcagtcgagtatctgtgttttattttctgtctgttactcgacctgtcactcgatcacacccagtgctctgcaaagagctgt

SEQ ID NO: 158970 - DNA, 235 bp, Arabidopsis thaliana landsberg
tttctctcaagtaacacgatatagtaactcgatgatcaatttaccaaaatctaaaaatttattgcatatacaaaggattggagtagagggaaaccatcagttagctcaccaaagattgttgcaccggcatacgccatttttgagcaagtggtatatctttgcatctcgcttatatcatatctctgccagttatgaatatcgtcaacttcatcatatcatggcaatcgccaacaat

SEQ ID NO: 158971 - DNA, 83 bp, Arabidopsis thaliana landsberg
tctctctctctctctctctctctctctctctctctctctctctctctctctctctctctctctctctccctctctctctctct

SEQ ID NO: 158972 - DNA, 251 bp, Arabidopsis thaliana landsberg
caacttgaacgtcttttatcactttgtacgagaaatcgctccgatcatctccggtgagtcccgaaataaccgtcacgcggaggttagtgaacctgtaacgaaggttaaaagctcgagacactgcagctaaggttagtgggagccaaaggatggttagacctagaatgagattggctaatagatctccgtaatgagctccgccgtcgaagtagactgtttctttcttcgccggtttggaatcggaaggaacg

SEQ ID NO: 158973 - DNA, 163 bp, Arabidopsis thaliana landsberg
ctggttatgtgtctttaacttccaccaaagaagaaaatttaaaattcaccggaccaatcaccgaccgaaacaaaaaattaaagttcaaacagctacaataatatgcttttaaggcaggttatgtatatgattaaaaagcaaatgaacacaattccaattgtgt

SEQ ID NO: 158974 - DNA, 139 bp, Arabidopsis thaliana landsberg
ctgacatgaactagtcataggtttacttcttctactatctgtcattttttgatgtgtacacccaaaaattctcataagaaaaaaagagatacacattagactatccaaagaaaaagaaaacacacgacattgttctgtt

SEQ ID NO: 158975 - DNA, 356 bp, Arabidopsis thaliana landsberg
gactaggttaacttgagggtctctgttgcggtggtacttagatttggttaatgaacttgttgtgtagggttaatttattaagcatgtcaatcacctgtaaactaaggaatcgaaactactcaattaccccatcctcgggaattctttatctcattgaactctttgtttactctattattgtttactgcatcttgttatctgtcgcttagtttctacagttctttcttgttactcgacctcatactcgaccacccagttgtctggcaacagactgtgcagtcgagtatctgtgttatactttctgtctgttactcgacctgtcactcgacctcacccagtgctctgcaaagacctgt

SEQ ID NO: 158976 - DNA, 1788 bp, Arabidopsis thaliana landsberg
ataacccagaagtcaacaactttggagggaaagagcaagaatgtttatacctcttgaagagatgccacaacatagacgagttcaagcaagttcacgccagattcatcaagctaagtttgttctattcttcttcattctcagccagcagcgttcttgcaaaatgcgctcactcgggatttgtatacagtatgaattacgcagctttgatattcagaggcatcaatgatccttgtacctttgatttcaatacaatgattagagggtatgttaacgtaatgagtttcgaggaagcattgtgtttttacaatgagatgatgcagagagggaatgagccagataatttcacgtacccgtgtcttctcaaggcttgcactcgtttgaagtcaattcgagaagggaagcagattcatgggcaagtgtttaagctcggtcttgaagctgacgtgtttgttcagaatagtttgatcaatatgtatggaagatgtggagagatggaactttcttctgcggtttttgagaaactggaatctaaaacagctgcgtcgtggagctcgatggtctctgctcgtgcaggcatgggaatgtggagcgaatgcttgttgctattccgtgaaatgtgtagcgaaacgaatttgaaggccgaagaaagcggaatggttagtgctctcttagcttgtgccaacaccggtgcactcaatctaggaatgagcatccatggcttcatgttgagaaacataagcgaactcaacataatagtccaaacttcactagtagatatgtacgttaaatgcgggtgcttagacaaagcgttgcatatatttcagaagatggaaaagaggaataatttgacttacagtgcaatgatctcaggacttgcgttgcacggagaaggagaatcagctttaagaatgttctctaagatgatcaaagaaggtttagaaccagatcatgttgtgtatgtcagtgttctcaatgcatgtagtcactctggtcttgttaaagaaggtcgtcgagtcttcgcagaaatgttaaaggaaggtaaggtggagccaacggctgagcattacggctgtcttgtagatcttctgggaagagccggattgctcgaggaagcattggagactatccaaagcataccaattgagaaaaatgatgttatctggagaaccttcttaagtcaatgcagagttcgtcagaacattgagctaggccaaatagcagctcaagaactgcttaagctaagctcacacaacccaggtgactatttgctgatctctaacttgtattcacaaggtcaaatgtgggatgatgtagccagaactcgaacagaaatcgctatcaagggtttgaaacaaaccccaggttttagcatcgtcgagctaaaaggtaaaacccacaggttcgtttcacaagatcgatcgcacccaaaatgcaaagaaatctacaagatgctacaccagatggaatggcatctaaaattcgaagtatattcaccagtacttgacacagatattgctaaacgtagatgaacaagcaaagaaagagagattacaaggacacagccaaaaggtggctattgcctttgtcctattgtatacacatccagggtctatcattaaaatagctagaaacatgaggatgtgtagtgcctgtcacatcttagtacaaagaaaatctccatgatatacgaaagagatattgttgtaagagacagaaacaggtttcccctgtttaaaggtggaacttgttcatgtaaagataattggtagctttaaatccgccactctc

SEQ ID NO: 158977 - DNA, 546 bp, Arabidopsis thaliana landsberg; identical to SEQ ID NO: 2740
  unsure (1)..(546): unsure at all n locations

SEQ ID NO: 158978 - DNA, 424 bp, Arabidopsis thaliana landsberg
ccctccttaagttttcaaatctattcatcaaattttcttttgtctttcccttaagattcccgggaaagccaaggaaaaacgctagaagaaaattaacataataatgttaattgttgcttaaaccttccagctcaagtttggtagtaagtaagcagacatttaatcccccaagaagcaattgaagaagactttaattcttctgaattttctttccaaaaacccctttttagaaaattggttgcatcatagagattggttcatttattcccaccggagaagatcatcaaattcgtcttctcacccatatcgccgacgacattcttcacggttcgtttgatttctacctgttggttcttcgttttatctgaatacaatcggagatatatgtttttgagttcgaatttgataaaaaatcgaaacgttt

SEQ ID NO: 158979 - DNA, 282 bp, Arabidopsis thaliana landsberg
ctccttggtgacgcagacgcataacaataagccgtcgcagtgagagactttatatatctcgaattgatcttgatctagacaactaggatatttagggttgattagggtaaattcaactgtgacctttacatgtggaagtctatggagatcgacactcatcgagcgtaccctaagccctttagacatgtgaatcagaaactgctttgggcctttatccaagtgttttcttgtgaatctcctatccttgaataaacagttccatcctttgcaagtagaccctaa

SEQ ID NO: 158980 - DNA, 235 bp, Arabidopsis thaliana landsberg
cagattcaaatccaaactcaaaatcctcttactactaccgcatcgtttcaaaaccggcatggatggaatcatcggagagatgaacgatggctcgaccgtcatgcttgacctatgccgtctcatgtgaccacctaaagcctgtccggtcccaaaactctgactgcatatggaacacttgtggaaatgatttcctttataatcgttgctaagatgtttcacatctttctgctcaacg

SEQ ID NO: 158981 - DNA, 85 bp, Arabidopsis thaliana landsberg
  unsure (1)..(85): unsure at all n locations
ttttttttttttttctttttttttttttttttnttttnttttttttttttttttttttttttttttttttttttttttttttttt

SEQ ID NO: 158982 - DNA, 180 bp, Arabidopsis thaliana landsberg
ctcttttatagcttttcacaaacaaatcccaaatctgattctttcagctaaaaatcttccatcaatcaatcgaattgtcaaaaaacagatatcacaacccttcgtgtgttctcatttcttaatcttatacacttaaaatctccaagctaatctccaaaaaggtaccatttttatgacttt

SEQ ID NO: 158983 - DNA, 82 bp, Arabidopsis thaliana landsberg
  unsure (1)..(82): unsure at all n locations
tttttcttttntttttgtttttttttttttttttttttttttttcttttttttttgtttttttttttttttttttttttttt

SEQ ID NO: 158984 - DNA, 82 bp, Arabidopsis thaliana landsberg
tttttctattttttttttttatatttttttttcttcgtatttttttttttttttttttttattttttttttttttttttttt

SEQ ID NO: 158985 - DNA, 220 bp, Arabidopsis thaliana landsberg
aatcgaataatctagtctacttagtgagttttagctctggagctattctagagatgagtaatccggggaagcaaagtacgaaagagcagcctttgtatgagagaacaaagatgtgcagataaggaaaaaggaatgagggctcacttgtgacgcttgtatgactgttaagacggcgacagaaaagaagaggcagaattccactagcagaaaggataaagca

SEQ ID NO: 158986 - DNA, 419 bp, Arabidopsis thaliana landsberg
tgttatcaaagtaaaagcataaaactaaataagattacttgaaagtgtctgcagaagttatctaagatttaatcttactatctctaaaaggggaaatgaagatgcttaaaagttcctatagataagttacaacaaatcacaaattccttcattggccggcctcatatctctttggtttctatacaaagaccaacctaaatgagaaaaataagccctaaattctctttcactgtgttaagtcaaagtaccaatgcatttgttgtttggatattacaagccaccatagatatcactgttgttgaagaagccatcttctgagaaatcatggtccgtaaccgatatatcttctgaaaaaggaaggtagttgtttgaagatgctttaaaactattgatgcggcttggaactcggcctcctcctg

SEQ ID NO: 158987 - DNA, 89 bp, Arabidopsis thaliana landsberg
attgtcacacaacttgtatatcacatttgtacactattggaagatgatttgatctcttaaaaacccaataagggtcatagcttttcgac

SEQ ID NO: 158988 - DNA, 302 bp, Arabidopsis thaliana landsberg
ataattatgtctatggggaagaaacatcttaacatcaattctctgaatcaccaatccacaagggacgaagacaacaattgcaagaacagtctcttttttggattgtttgacgatcctgaatctacaaggttgagaagtgggagtatgaagagacaatacagcgacatgggagatagctaccacagagtttatgacgaacaaaatgatgatgttgaatatgatggtgatggtgatgatgatgagggatcaaggatggacatgagagtcttgatggttttggagtatatgagagagctttacgt

SEQ ID NO: 158989 - DNA, 128 bp, Arabidopsis thaliana landsberg
ttcgaggaacgccaaacgcaccaataacttacatgtgggctttggtggcccaaggagagaggttagggtcgatgcgctgcagagccaacaggattccacgtggtagagtgtggccacgtgtgcgggtc

SEQ ID NO: 158990 - DNA, 207 bp, Arabidopsis thaliana landsberg
acatgtgtttcgaatccagtatcagcaagatcagggtgtggaacgtcaatatccttgggcatattagagaaatggctatgggtacatgcgatccgcccagtcgcctcttgtgcattttcatcagtatgctgggcaaaagtgggatatgcacttgaaatggatgcccaagttaagatacatattatgagtcagacggatatggagcga

SEQ ID NO: 158991 - DNA, 342 bp, Arabidopsis thaliana landsberg
gggacctggaggtggagagtcaacgtctcctgctgctgcgccagcacctcaacaacctgagtatttaactttgttctttgtctctttcctttgtccggttttggggattgaagtttcgtagatttatgttgggattttgttgtgttttcagggtaaccaagaagaagtcgaagaagtgatttggtgttgaacttttttgcgattgaatctttgagtttacctgtagaagaagcgtctttttatcttttatatgattttgtcggagattcttttcttcaaaaatatttcttatgttatggatctcacattgcttattatgaatttatcagttttgtttctctt

SEQ ID NO: 158992 - DNA, 63 bp, Arabidopsis thaliana landsberg
ggatcggttgttttggcacaaatctttttggttcttaaaaagaaacagtttgagaaggttcaa

SEQ ID NO: 158993 - DNA, 227 bp, Arabidopsis thaliana landsberg
agttttgagcccattctcacaagacgagattatagagaaacccacacaaatccaaagtttttagaaacattcttcttagtattcctctccttcatcatcttcatcgtcaccaccttcagcaccgacctcttcataatccttctccaatgctgcaagatcctcacgtgcctctgagaattctccttcttccataccctcacccacataccagtgaacgaaagcacgtt

SEQ ID NO: 158994 - DNA, 411 bp, Arabidopsis thaliana landsberg
taagaaactgaggctctttctattgatacacacactcttgtcacaaaaaaatgaattggaaagtatccaaaactggattctataattacactatacaatttaactagaggaacaatagaatttgagaacaattcaaagtttgtaagaaaaaaatgtgcttacttattcatcttctgctataaagtttggctcttcccctcggcagaggtactcatcgcacgtagaggatgttccccaatctttccttagcctcaatatatcttctgtgaaagttgatcccgaggctccaatgaatacgctggacatggcgcatatcgttttatcaagcattgcatccacctacacattcaataatacagaatttagcccatgccatgtttgatacatcaggccatgccattaataataatt

SEQ ID NO: 158995 - DNA, 227 bp, Arabidopsis thaliana landsberg
tcgcccggaggaatatgagaaaccagaaaactataaataaagtagtatatctcattattaaaacatatgatacaaatttagggatcttacttgcaaaaacttgttgaaatcttattaaatatacttcacacaaactaaaaatagataacatgattttaccaaattagagagaaccctaaatatggaaaagaaatgtggtagcaaaaagtcaactagagagaaaatat

SEQ ID NO: 158996 - DNA, 174 bp, Arabidopsis thaliana landsberg
gaaaaatgttattacgataggatctgattccagtcaaattaatacacctaatccattacagattttactaccattttaaagtcacgtgacttttacataatctaaaatcaaaagagcgaaaaataaaacaagaggtcggtacggttcggtttagcattattagaaagtagaaac

SEQ ID NO: 158997 - DNA, 239 bp, Arabidopsis thaliana landsberg
tcctataaataaagtagaagaccttgtccatttgggttcttaaaccgggaatctaccggtcatctgtatatgctcaagtgtttttcgcaaaccgtacttgtgaacagctaacctcccagctctgaacccgtctccataaaccggagaagcatcagactcgatttggtgcttgaaaaactcaccaagctttctctcgtactgagatctcggtccctttttcagtccttgagaagaggagg

SEQ ID NO: 158998 - DNA, 374 bp, Arabidopsis thaliana landsberg
gcccaaggagaatggaaacaaccggagcttgaatccgtcttcactgacaccattgatttttgttaggttgcagagcctatcaaattcatccaagtggtcgagtggatcctcaattgggagaccatggaatttgttctcctgaatcatcgagatgacaccactcttaatctcgaagttgttgttctggatagcaggaggtgcaattcctttcctttgatgatgggcccgtggtgcatctccagcaccaatgtttgcagggccattttgtagattctgttcgtcagccatttcgagtggttgctgaggtacaaggttgactgtgtttctcctttctctgagttcgcgagctatgcggtcgatattgtcgttgaaaa

SEQ ID NO: 158999 - DNA, 2298 bp, Arabidopsis thaliana landsberg
caatcatgtcattgtagtattttaggttgtcaatccaaatgggtgtgatgctaacaatcaagatgtgatcagaagtcactaagtcaagccaagcaataacaggttttggtgtgttccagcagtcctaagtgaacatgcagaaaacagaaaatcaaacagaaacagtaaaacactcgaccacctagcaaaccagacagagaatgtaacaggagtactcgattgcacagtctgttgccagacaattgggtggtcaagtgtcagagtgataacaggcgaaaaatgcaaaaactaaacaagaggcaataaaaacaagtaaatgatagcaatttaagcaaagaaatcaaatggaatagaaattcaagagcatggggtaattgagtagctaagtttccttaatctacatgtgattgacatgcacaatacattgtctttacacaacaagttcaataaccaaatctaagtgccaccgcaacaaagatcctcaagttaaactagtcccagactcaatcgccattgacatgtgctaacctaacaggcattatgaatcaacaagttaaagcaaaaacgctccttgtgaccaataccttcgtacaaagccacgtatcactggaattagtggttcagacatttcgtcgaacactttttgggtggggaaatgtctgggcccaaattccagttgatcagaaagcaatttgcattaagaataactaatccagaagggatatataaatcaaactcaaccacctagcaaaccaaggattttaagctactctaatccatcctcagaaacatagtcactactcagacttcattacagataaaataaacgatgacatgtataaaaacatcatagcaacagagtaataacaagatgataacaggatgaacaacttagtaaacgaaatgaaaagcaaatattgaatagattaacagaaatctggattacaaaatgtcaagaacacaaactgtctgcagaataaaacttagtctcgagaataaaagatacatcctacatatagcaaaatattctaaaaccctaatattcaaaacggcacagtattgggatggattaagaacagtactcgaccctagtacttgagtgatgggtcgagtgatgagctggagccttcatctcttccttatgctcgaatgtctggtttagtgtggaatggagaagactctgaagctagctgtcgagtatgatgtcgagtggtggatgatggtggtactcgaccatgtaatcgagtggaggtgatcgagtgaacgtcgagtggtagagtttgtgatactcgaccagggggtcgagtggtggtgagaagtggtgatgccttctactcgaccagggggtcgagtggtgaacaagagtgttgcggtcgagtgactagctgcagaggtcctgacaaagtgcttcagaaagtccatcttccaattagctcgccaacgactccaaatcaccttaaaacaacgcaaatatggaacatggatgcacaactatcttaaccatgcaatgtgatgacaaatgatgagaaatggtataaaacagtggtgatatgatgctaaagtgaatacaaatggatgctcaaaacatgtaaaatgcacacttatcactactcttaacgagatttgtacatgaaaaatattcgaaaacaatgttctaacaagtaattttaggtccgtaatatagcatagataatggaaaggtccgaaaaaatacttaaaggtaaaaatttggagtcgacaaaaaatcaatggaagaattccattgtcctgcttctttcgtcggagggctatctttctgcttatgagaaggggcatgaccatgccaagagaggaaacactttcttttgggaacttctctcaagatccatagcagatcttgttgcacaggtactatagatagatacgtctgctgatttttgcaaaaaatatgaaacttaatttccattttacttgtagggagagactgaggaagagaagcttgattcttacgatatgcacttttacgctccgagtgctgatgagatagaaggtgaagtggacaaagaagggtcttttgaattagagaggttagagatgttagaagtgaagaaggacaaagggaataacgagggtgatataagttatggcaaggcggttgcgaagacggtgagagctggtcacgaatcactgcttgctcaacactttggggaaaagattcttgacaagctctttgatacatattggagaatggttgacgatgacttagctaaggaatacataagacccatcacatttgttgttgtactaagaaagaagctc

SEQ ID NO: 159000 - DNA, 3101 bp, Arabidopsis thaliana landsberg
atcacattgtgaatgagctctgacgttactagtctatttgtagagttgatgaagctagtctcattgcaaaggtggagggactcatgaaaaaccacccgaatcttcttcttggtttcagcgtctacctttcagctgggactaagctaaccatgcctcccgaggctgagcaacatactgcgccatctgataataacaaacgaaaacgtgctaagtgtgatgatccatcgatgatcaagattacgtctgaaaataacaaaagaaaacgtgcaacgtgtgatgatcgatcgatgatcacgattacgtctgataataacaaaagaaaacgtgctagtgtgatgatccagattatggtccggattatgtgaagaagcttgaggtatataaatgctcaaattataaactaatccaaagaaaataccattttggtcattcttgttttgataacttgttgtgagtctccatcgaagaagcgaaagaggaaagggaagaatgtgtctccacctaagaaaaaggtgaaacttagcaagcgcacaatacattgtaataaatgtggtcaagcagggcacaattctcgttcatgtagtaagagagctctttaggttagtctcttttcatcttgagttcagtaatgttacactgttgctgtggttgtgttttcttgatagtaaatggttgtgttttcagacttgtgttagtagtggatcgcaaaagaaagcaactcaatctcagcgaaatactcaacaagtagaagattagaagcaagtctgtggattgtttcctttggcttcttagtagggtttttgttgccttcttagtaatttttgtggctcatagtttagtggtgttttgcactaaagataggttaaggttttggtgagaagtatctgttagaagcagaactctcgcgtcgatctatgatacttataagttccaatgttgaattaacacattgtcttcctagtttttggattcattttacaacattcttaaagctttgattcaaatgatatcaagcaacctgagtgatcattgttatatctccatctcctcatgcaagcgcttatccagagttagcttagtcgtaacgtaaaatttcattcgcatgtagcatcaatgttggtttctaatcaataagttagctcatgcttgatcacccaaactcaaagtagttgtgtccatagttgtatatgttgtgtatcgaataagatggttttatacatcaccacggtctattatgatcatcattggaatctatacacagttcaatactaacaatcaacagaaaaatatttcttataacttttgcattgatcaaggaactcagttctagagcacactagatgtaaaaatctaccggagaagtcactacaaagtagttcaacatttcagaatagtttacagttccaggcgataaataaaccaagacctggtaaaaagtggacaagacaagacctcactgttcttgtcaataaccagggtgaaattagtccaaatttcaatccctgtaaggctgtaactcaagaaatctctaatctgcttttacaaggacaagcagattctaagtaaagacaacaacatgcgaaaagcaaacatatccgcttttcgctggtcgatcagatctatagacgcctttcgggttagtagcaacgaaccctttctcgctatttcactgaccgactcttttcactagcctcatgtgccaaagagttgcaaccttcgtctttccagctcaagctgccataaaagcaaaattgcattactatcacacccaaggcttgatcaacgttacacgattgaatgcaagtgactaatataacaccagaggcttaattggcattacacaatgaactgaaagtgacgcttaccactttcttgactcggttgttggcagcatcagttcctccaaagacacaatctgaaagatacgggctacgaacgcgtacctctttcatcaccagaatgtctgagttttcccattgcacaggaagcctaaaaggaaaataattcacatgtgattcattcgaaagagaaaaagcaaattcaaacaaagaaagtttaaggatttatgtagtctaaaactatgtatctagacagcttcttaactgtatcagtatcacaaagaagactaaagatacttgacactagagcgcacaacatatgtaatctacaacaaccacaaacatagaaactttacatatatatagttgcaaagctagcatcaccggaaaccaagagcaaaacaacactaaatcatgtccagatcctaacaatttatctttgggaataacacattagacgcacaaaacaaaatcctccaacccaagcaattgtttacaaagaactaatagttcaactaaacaacattagattacgatctcgtcccacctctctaccgtatactctaagctgtgtttccttcttagagattagcttatttttcgatccgaaaacgtataaaaagagaagatccttacgtcttagacaacgcgtcgaagatgctctgagcctcagcggtaacaccaactcccattctttcagcatctgcttccgcttgcctgtgctcaatacgttttcccaagtaagctcaaaacaagcaaatagcaataaaaattgcattttgaaaggattcaacaacaaaatatcttatcacctgatagcaagtgcctctttagctcggagaccattaagatcaacagaaaagttgtctgaatcaagtggatcttcagttttgcctaaatacgaaagccctgtaataaaactcgcattcaccatccgagtgttcttcaaatgcccaggtctaggttttgtaccctcttgtaataaccaataactcgtcaaggataacacaattcaggtcaagacattgaaaatacctaaatctcaaattttgatgaaacaaacaattaaagaaattaaggatatcaaaaaagacgaagttggggatggggtcgtaagccatgacgatccctctgaactcatctccggtgatcaccttcactgaataaatattccccaccgcgaatttctctccttctcctccgattgcgctggccaccgatgctcctgctggatccatggcggccgtcctcgctcctcctccg

SEQ ID NO: 159001 - DNA, 310 bp, Arabidopsis thaliana landsberg
ttgtctgataatatggactgaagatgatgccatgttgatgcaggtgagagtggtgataaagggaagagtacagggagtgtgctacagaaactggactgttgagaacgctgagcagctcgggttaaagggatgggttaggaaccataagaacggttcagtggaagcactcttttatggaccacctaaagctgttgatgagatgcatcagaggtgtcgccgtggtcctcctgcagccatggtaaccggtttggaggcttccccttccactgaagaacctggatcaagttttgaatacagatcaaccgtctga

SEQ ID NO: 159002 - DNA, 4440 bp, Arabidopsis thaliana landsberg
  unsure (1)..(4440): unsure at all n locations
tccgattgatcctctacacctgatacgctttctctcagaaccattatcttttttaacatatcatatcggtattcttttcttttattttctatcacactgatgaaaatatatatatttagagcctgactggtttaaacgcaacaggtgcggttgcggttgcgggagtttgcggaaacgggtggttgcggtttcaagcattatcaagcgttttgaacgactggttgagcgtttgataatgggtgcgtttacgggagttttatgactggtaaaccagcgggtgcgatagtaattaaataaaaaataacctatataaatataatatattactactaaaagaaaaatacaatatattattatgataaattgaaaatattagaaaaattaaacatgtttaataattaaaaccataaataaaatattaaattcaaaaataaataaatttggtaagaaaaagcttaatactttatgcatttggtacatcaccaaaaattgcatcaagtagtgtgataaactataaataacgttgaattcgcgggttttccggattgcctctatacatatgataaagttctaacaagaaacgggtcatctcgtctgaccaaatgattttctaatcgagaaagcaaatcaaaacatgtattcaatcaaaaaactcaaacaaaaatacaaaataaaaaaatgaacgatgccatgaaatactcagagaattacactagctaatgaatggatgaaaggatagatcatacttacgtttgattcttgattttgattttgattttcgttagtttgggtagatgccataattgagaaaatagggtttcaatatattgattaggattttctgataagaataagatatatagggtttgggtggaagacataattattttaattaattagaaaaaaaaattaacctaaccgctaccgcccgcaaccgcaaacgcttgcgggaaggagcttttgaaatctggcgatttcaagcggtatctagcggtttctatgattggtgtcaaacgctaacaaccgctaccacccgcaaacgcagcgtttgcgggtggcagagggagaaccaatcaaaacaaaatgcgactggtttcgtcgaaacccaaattgttggctatgtgtgaaattctgggacgcacatttgtgatattgttgtggcttgtgatagtagctaatcgaatacgtagataacatttggtcagggcatttggtactagtcgttcgaaacgataacatacttggtatgcactatttggctttcaaggatccaacgcaaaaagggttgacaagaagtcgacccatgcatttgtaaaaagaagcatcgagcacgtttgcttcaacaaatttgatgttctgactcagttgtcatattttaaaagctatatagttgcgacaagccgacaaggtacctcgcatcacagttcacaaccacgggcggacacacgttggtcttcggtggggcatgtgcccgatactcaattttataaatcttatataagtttgcattatgtaattaaaaatatatgtagtgtagtggttttttacttaatggtgccccacattaacccaagttcaagccttgctgatgtctttttattgattttttataactgtgccccatataaaattatttcctggatccgccactgctcagtttcccttctctggtgtaatagttgatcaggtttaccggtgaatagattgctgcttatacatattgcttgaattctctttctgcatagcggcaagaattggggagggaatattgttggatcatggaactggaatggtcattggtgagacctctgtgataggcaacagtgtctcgatattacatgtaagcgtctcttctccaaaccatttcctggaaattcaatacagagaccatatgattatttttcagtttttcaaagctatttgagttttcactgtcacagggtgtaacgttaggaggaaccggaaacgaaactggtgatcgtcaaccaaaaataggtgaaggtgcattgcttggagcttgtttgactatacttggcaacataagcattggtgctcattaccggactaagggtgcaattctcttcaaagcccaacaatatcaaaacaggtcaattctcagccttttaatattttcatttttaattcaagtaaatacaaatagggtttttattcacggatttgttaaaaactattacaacttttttactcgagtttttgtttcaattttgaaattatatattttaatatttaaactttcttcctcaattttttaaaaaatatattagatatactatttttttaagtgctccatttttaaattttgtgtaaactaattggatacatcatccaatcccctaagaggtgttctaggttcaatatatggtttacacatcatttaaatttttaacacttgttttttatatttattaaataaatgtttttaaacctaaatttttatactactattaaaattttgaagtttttttttattaagtgttgaatttttaaattttgtgtaaactaattggatacatcatccaaacccctaagaggtgttctaggttcaatatggtttacacattatttaaatttttaacacttgtttttcttatatcaaaaatatgttttaaacctttatttttatactactattaaagttttaagtttttttattaagtgttaaatatttaaatttgtgtaagctaattggatacatcatccaaacccctaaatagtgttctagtttcaatatggtttacacattatttaaagttttaacacttgttttccttatattaaaaaatgttttaaacctatatttttctattactattaagatcttaagtttttttttttaattttgtgtaaactaattggataaatcttaactcctaagaggttaggttcaatatggtttacacataatttaatttttcttatattaaaaaatgtttctatttttattttactattaagattttaatttttttttttgttaagtgtaaagaattaaaattttgtgtaaactaattgaatataacattcaaacctgtaagaggtgtttataggttcaatatgatttatatataatttaaatttttaatacttatcatcattttattataaaaagtttttaaaattatatttttatataactattaaaattataagggttttttggataaatattaaatttttaaatgttatgtaaactaattagacacaacatctaaaaccctaagaggtgtcctaaattcaatatggtttacacataattaaaaattttaacatttgtttttaatttattaaaaaatgtttttaaaattatatttttatattactattgaaactataagttcttttttggataaatgttaaatttttaaatattgtgttaaactaattagacacaacatccaaaccccttataagtgtcctaggttcaatatagtttacacataatttagatttttaacacttatttttattttattttaaaatgtttttaaaattatatttttaaaactataaggttgttttggataaagacaaaaacccaacctttgaatcatcgactttttgcgttggagtcaacgaccttaattcaattatttaattgcttgctcggcaagctaaacatcgtcgttgattggtacgcacatccagacttctcctttcttattttgattaagtcaatgacttgttaggattaaatattttggttgctacaagttcaaaacttcaacattattttcttcgtcttccttcatcacctagatttcaaagcgtcttaaggtaatctttgagtgtgtattttcaagtttaagttctaactattctttttgggtttcaattggaaaaagagagtaagtttatgataaaatttctgaatctgctttttaaaacatgtttttgtgaagtcctatcatcatgtctcgtttaattcaatctttcagagatataataagcttggatatggctttgggatctgctagttcaccaaatggtacacaaccaattctcttgagtgcttcacagcgtcccagaatatctaaactacaagaacgtatcttattgcttatggtggttacaacaattgtagcagttgtgacatttgttatgggtttcacatttacaaagatctacaccagttctgctccagatttaggcatcacaggtttggtcaagaaagcagtgttcatagtttttctggtttgcaatagcattccagtgctcttgtctgtcatagctacaatgaatcttatttggnnnnnnnnnnnnnnnnntattcctctgatacagcaagctatgaaacgagccatggtacttatcatgtttgctttttggtctatggctgttgcatttgcatttggagtttgtcttgtattgatgctccttccatggcattccttccatgtttttagctccaaagcacataag

SEQ ID NO: 159003 - DNA, 654 bp, Arabidopsis thaliana landsberg
caacaaaaaaaaagtaaattctttaaaatgtcgatgattccaagtttcttcaacaacaacagacgaagcaacatctttgatccattctctcttgacgtatgggatccattcaaggaactaacatcatcatcactttctcgtgagaactcagcgatcgtgaacgcacgtgtggactggagagagacgcctgaggcgcacgtgtttaaagctgacttgcctggattgaagaaggaggaagttaaagttgagattgaggaggatagtgttttgaagatcagtggagagagacacgtggagaaagaagataagaacgataagtggcaccgtgtggagagagctagtgggaagtttatgagaaggtttaggttaccggagaatgcaaagatggaagaagtgaaggccacaatggagaatggtgtgcttacggttgtggttccgaaagcgcctgagaagaagcctcaagtcaagtccatcgatatctccggggctaattgaatatgaagatgaagatgaaatatttggtgtgtcaaataaaaagcttgtgtgcttaagtttgtgtttttttcttggcttgttgtgttatccatttgtggctccttctaatattaaatgaaaataagatctcataataatgaataaacaaatgtttctata

SEQ ID NO: 159004 - DNA, 518 bp, Arabidopsis thaliana landsberg
agaaaattttattagtctctcaatctcattttccacaaaacaaatcatgtcatcatcatcatcatcgtcagccaccgatactaacacaaagccatcgtcttcgttgccggcggtggagtctgtcacgtgcgacacgtgcggtttcgctgaagagtgtacgccagcttacatcaaccgtgtcaaagaacggcataagggacactggctttgtgggctttgtgcggaagcggtaaaagacgaggtggttcgatcttccactcgtatctccgtcgaggaggctctccgccgtcacacgacgttttgccaccgtttccgttcttggagtcccgatgaagaggaagatccgatatccgtcattggtaggattctacggcggagtcttgatggctctccacggagaaccaccacgaggacaagctcgagtggagctttgccggggatcgacggcgtagagtcacgacggtcgcttctccgatctgggagttgtttcccgtctctctctgcttgattaataatct

SEQ ID NO: 159005 - DNA, 3132 bp, Arabidopsis thaliana landsberg
gctgtctttctctccttcttggcttcttcggtgctccaattctccaacatagactgccttgtgtcctcacttatccaatcacgtttgttcctagaagatttagctttagagatcatgtctctaaggcgggcatcaactacatgataccagaggtgatacacatcattcaaatggattggattccaataaaaagattgctcctaaagaaaaaccaaccattaaggttacaaattagaaagattaagtaagttttttgaaatatttggtaaaagatatcaaacttacaatgaagtctccccaccattgaagtatatcatgatggggaacaaatgatatgttgaaccatcgggtcacgaatcatgctcttccacaagatgtgcctcttcgcctcgcagatgggagccggactgttcggtaacacaaacctcgtacgaaaggctttcaagcgatctatggaccccccgctattgagcgccttgatcagctcgtcattggccctcgcctggggtaaataaatgaaccggtcgcttgctttctcgaggagtgacatcttctctttggcagttttaagccttgtggtgaagactgccgaagtttcctacctcgcagtctgcgtcacccgagccacctcactgtctcggactcctcttgcctcagcaagcatgcgtttgtagtggtcaatctcggagtttaacggttgttcattacacggttgttttgagctagtttgacagagttatctttattaacaatggctttttccttggccttctctttcgcaagcttcgcctcggcagccttggaaattgcctcttcccgagcgcgttcggcggcgactaatctctcctgggcctcggccagcttattgatgcccccatggtgccttaaaaggcggaatcataggattgcaccatcctattcatcgagttaaagacctgacaaaatagcgaaaacaaaagaatcgtacatataatttggctcgagagtaatgaaagttgaacataccctaaggaagtgtgacgccgtataagcgtatagctcaaactccagcaaagtatctggaggaggaagaagacggcttgcacaagcgccgatgagatttgccgaagcggctttatctgtaaaaatcggctcatccatcttccgactcgcctcttgatccgcctgcttcttcttcttctttttgttctttgccttgggttcggagatcctctaacgtttccttgaagccttggagcggtcacgagtcggcaacacaaagaagaagtgggccacaaagaaggagatcttcgggaatagtagcatcatcaagggccacaaagaagaagcagttagtgtacgactcattcttcctcgtgaatccccagataatcttcctgtctttcgcaggagaggtataatatctgtttaccgttgacttctggattcgacggatctccaagcagttcctaagatgcgtgagcatgagatcggtttctgtctcgtaacttcacaccaaaatctcaatgagatgcatcagggcacgcatagtaagctaggtgagtgtgatttgatacgatgtcacgtactctaaaatcaacctcaggatcgggaaccagaggaaacagaaatagaagaacccctcgtataaggttaagaagccctcgggaggattgtcggctcttttgcttggagttggaagacaaagagtgacgcctaaacggacatggtagctgcgctgatcgatgtgaacgagacattagatttgtccttattagatgttcacaggtgtaacagtgtcttgtcttgcctcttcatcttgtacttggactccatgtgctgagaaaagcctttgtcaacctcaaaaatttgtttagtgtcttgtgcttagtagacaacaacattggtcttttcctctaaatgttatcttatctcatttattatgtgaatatgatttatgcagggactatgtaatctaactctttttgtacttgagagaagaagctgaagtacatttgttcatcatttggttttatagtattaataactgccaaactccagagctttaagatgtatgactctcaagttttgaaatctaagtaaggcttaccatttcttcctctcttttcaacttctggattttgattcagcaactccttactagttgactgaattttgatcagatacaacccatttctcagacgttcgcattctggaaagaaatttcagggcacagttaccatgtcagaggtgtgaagatacattgtatttattttcatttcagaaactaactgttgaagtcctagaaaaaacattaagagcttgcttgcttaatttgtacagggcagagaaacttgcgaagaatctacgagtggtgaatcttttccatatagatttcaacttgaagaggatgtgagtttctgaactcaataagactagtaatgataacgtggaatgtgtatactgtatagttctgaaagaagtttttatgttacaggtaaaaagattgcaactgcaactccaacaagaaatagatttgcatacatttctagagagtgtcatggagaaagatccttgggagctatcttattcttctagtgttccacatcctgtatgttacctcaactcattcaattgtgataacactttaaaacttgccttttgttttcactgatgattctgaaaattgtgcaggctcaggaacttctctccaatatagtgacgctagagactgcagtcactaagctcgagcaagaaatgatgtcactgaatttccaacttagccaagagagaaacgagaggagactcgcggaataccagttgacacattcggcttctccactagtatgtaactccttaattcatcactgatttttgttttgtaatctgtgtcagttctccactagtatgtaactccttaattcatcactgatttttgttttgtaatctgtgtcagtttataactatgtcttagttatgcagaattcttcttcttccctaagatatttgaatcagtcagatgctgaattacatcaatcagcagaagacagtccatctcaagaccaaatagtccattaccaagaatcttcatctgaatcatctccagcagagtcaactgttgaggtattaactgatattcttctttattttgta

SEQ ID NO: 159006 - DNA, 3430 bp, Arabidopsis thaliana landsberg
catgtgtgcaggtcgactctagaggatcccctcgatggtgggtagcttctacggaatcctacttgcgactatcactacaagaaaataggcgattagcgagggaaatttgcggtggaacaaatccctcgcaatttgctacggatttgcgagacgtttgcgttggaagaaggaaacctcgctactccctcgcaaaatttgcgacgaactcaaccctcgcaaatttgcgagaagattgcgaggaatttgcgtggaaagcatcatttctcgcaaaaacgtcgcaaatttgcgagggatttacgggtaacatgtctccctcgcaaattgcgacgaatttgcaacgtctgtttattctgtcacaacttttgcgacggagtagcgagtcttggcgggttaggtgagcacgttttaaattatcttaccagtctggttggtaggtgggattccctcgcaaatttctagcaaaatcctagcaaatccctcgcaaatgccttgcaagtccctcgcaatgttttttgggacatctataaatagccaatgtaatgtctaagaaatcataactcaaatcacaacatttacttacaaaaaaaaaaataataataataaaaaaaaaaacttattacaaaaataagaatgtcttggggcggagagcatgagatttacacattacgaagttggaagtataatcatagagatcaagcgaccggggaggtgacgagagagtattacgacggactgcgcggtttcatgtatcaagcgacaaacgaacaatttgctcgtgagaacggtacaatattctgtccatgtcgtaagtgtctcaatgagaaatatttggaatttaatgtagtgaagaagcatctttataatagaggatttatgccaaactactatgtatggttacgtcatggagatgttgtagagatagcgcacgaactagtaatacaaattatggtgtcgagcaacctagtaattttaataatgatgcgaattatggtcagcaaatacctgatcaatttggttatgggcataaccaggaaaatagatttcatgatatggttacggatgcatttcatgaaactattgtttcatttcctgaaaatattagtgaagaacccaacctagatgctcaacatttttacgatatgttagatgctgcaaatcaaccactctacgagggatgtagagaaggacattctaagttatctttggcatctaggatgatgactattaaagctgataataacttaagtgaaaactgtatggattcatgggcagaattaattaaggaatctttgccaccggataatatatcggctgagagttattatgaaatacagaagttggtttcgagtcttggattaccatcagaaatgattgatgtatgcattgactattgcatgattttctggggagatgatgtaaatctgcaggaatgtcggttttgcgggaagccgagatatcagactactggcggaaggacgcgagtgccatataaacggatgtggtacttgccaataactgatagattgaaacgcttatatcaatcagaaagaactgcggcgaaaatgagatggcatgctcaacatacaactgcagaaggagaaataacgcacccatcagatgcaaaggcgtggaaacactttcaaacggtatatcctgattttcctaccgagtgtaggaatgtgtatcttggcttatgcacagatggatttagtccattcggtttgtctgggcgacaatattctctttggcatattatcttgaccccatacaatcttcctccagatatgtgtatgcaaagcgaatttttgttcttaagtattttagtacctgggccaaagcatccgaaacgagcgcttgatgtcttcttgcaaccgctgattcatgaactcaaaaagttgtggtatgaaggtgttcatacgtttgattactcgagcaaacaaaatttcaatatgcgggcagtgctaatgtggacgattagtgacttcccggcatatggaatgttatcggggtggacaacgcatggaagattatcttgtccctactgtatggatcgtacagatgcgtttcaactaaagaaaggcagaaaaccatgttggtttgattgtcaccgtcggtttcttcccctacatcatccgtatcggcgtaacaaaaaactttttaggaagaataaaatagttcgtcttcctccgccatcttatgtttctggaactgatttgtttaaacagatcgattattatggtgctcaggaaacctgcaaacgtgggggtaattggctcaccacggcgaatatgcctgacgaatatggaagcactcacaattggcacaaacaaagtatcttttggcaactcccatattggaaggatctattcttgcggcattgccttgacgtgatgcacatcgagaaaaactttttcgataatatcatgaatacgcttttgaatgtgcagggcaaaacaaaagatagtttgaaatcaagattggacttggcggaaatatgtagcagacctgagttgcatgttacacgagatgggaaattaccggtttcgaaattccgtttgtctaatgaagcaaagaaggcgttgttcgagtgggttgttgctgaagtgaagttcccagatggatatgtatcaaaattttcaagatgcgtagagcaaggccaaaagttttatggtatgaaaagtcatgattgccatgtattcatgcaacgattactgccatttgtattagtagagttgctaccggcaaatattcatgaggcaattgcaggtaataactatttatatatatacatactgtatgttttgttttactcaactattacttggtcattactaacttacattaattaaatacatgataggcatcggagtatttttcaaggacctatgtacaagaacactgacaacagataccatagaacaatttgacaagaatatcccagtgttgctctgtaacttggaaaaaatatttccccctgccttttttgacgtgatggaacatttgccaattcatctgccacacgaagctgctcttggtgggccagtacaattcagatggatgtatccttttgagcgattcatgaaatctcttaaaggaaaggcaaaaaatcttgctagagttgaggggtcgatagtcgcaggaagtttaaccgaggaaacgtctcacttcacgtcgtattactttagtccaagcgttagaacaaaaaagactcgtcctcgacgctatgacgatgacgtcgtattactttagtccaagcgttgcacatacatataacgttcctgatgttccagataccttttcccaaataggaagactggcagggaagttgaaagaagtttggtgggacgaccatgcgctttctcgagcagctcacaattacatactccgaaatgttgattacattcaaaaatttgagaggtataaagtcatt

SEQ ID NO: 159007 - DNA, 1828 bp, Arabidopsis thaliana landsberg
caagcaccagcagctcaagatcctgaaattaagtcttctcattcaacaaatcattcaaggacaagctggtggggctatggcttttgacaagaagtacctgagttacacaacaagatcgattgttcttaccacgatctaaatgtcaagttcaaagcttagaattccaaaatcaagtatgtggagagtcaatttgcatcaacctctgctttgaagcatcctcagcaacttccaggaaaagcagtccagaatcctaaggactatgttactgtaaattctatcacaatccaccaagaagatgagtctccaccaaatcaccagactcccaatactaaggacagtatgattcaagaagggggggattcaactcaaattgctgcacctgccactcagcagttcatctggactatagagcacacacctttgctgaatactcaccattctggaaaaaagttcaaaagtgaaaaactcaagaaggatcagaatcaagagatgatcagcaaggcctctactcaagaaacatacaagaagaaagtcatccaagaaaagcttgatgatcccggttcattcactcagccatgctctctaggaccattgacattcaataggtgcctttgtgatttgggagcatccgttagccttatgcctctctctacagctaaaaggctagggattatggaatacaagttctgcaacttatctttactcttagatgacggttctgttgcacatcctcatggtctaatagaaaatctgcctgtcaagattggaaatgttgagatacctacagactttgtggtattagacgtagatgaagaaggcaaggatcccctgatcctaggcagaccattcttagcttcagttggagcagtcatagatgtcaggaatggaaaaattaatctcaaccttgaaaaaggtatcaagataagatttgacatcagcaaagcttcggggaaatcaacaacaagaggtcagaattttgggattcaggacatggatgttgataaagaaacagaagctggaaccccaccaagagttaactatacttctcaacttagcaagctgaagagaacttttgaccacaagaagagagcaatagaagggttagctcagactgaagatcctacagaagatgactggtatgaaatgagaaaaaaaaataaatggcaaagaagagtcatagagggattatcttcaagggtgatgaagctgaaagatcaactttggatgtttgaaaaaagagttaaaaagttttcaaatgagtattgaccaagagaagatggaaactgcactagctatcaaggaggacgaaaatttcacaacagaacggtttgcaccagaagatcagaaaggagttcacttagaggaaagaagtgtagagagtaagttgttaagtgaggaggaaatccctattccgacttattctccagaagtgcctaaacagcccaccaacccctatgctgaagaagaacacttgattttttattctgttgctgaacaactcttggagctctggatagaatacaaagctcaagaggatatcattggggagctaacttacaaaatggaaggactgaacaacaccattctggaacttcaagaaatgtttaaaggctaccccagttttgaatttgaggattggtcaaaggagccgggttcagaagaagaagactactctactgatcagaaagaagcttactttgaagaaaaatcaaatgagtactcatcctaccatatctcaagagaggatgcggagtatgattcaagcactgaaaattcaaccactgaagatgaggacttctctgttcctctctttaacctttttcctgac

SEQ ID NO: 159008 - DNA, 1641 bp, Arabidopsis thaliana landsberg
  unsure (1)..(1641): unsure at all n locations
gcacaaacctgatgtattgcctgctgaggattatatcaggctcttcaaactaaatgagttctgtagcacaaggtatccatgctcgaccacacttgcacaacttggattgttagagggtgtttagcacatgtaccagagttgtcatctagacactctgatggcttatccgtatgtagcatatgaagaagagataattcaattcctctccacactacaagttgagctttaccaaggtatgacctctgatgagttggattgcggaggattgggattcttgagattctctgtgtatggtcatgagtatcggttatcaatcaagcgcttggaaggattgtttagtatccccagtggaacgggtactaagcccaagtataacaaagaagagttgaaagatttagggatcaccattggcaactctgtaccgctgaattcttccaggtcaaagagcaatcagatacgcagccctgtcatcaggtacttccagcgttctatagccaatgtcctctactcccgagagatcatagggattgttaccaattctgatatggagatgatcgatatggctctcaaaggcactctccgccaaaccaagaacaaaatgtctctccaaggtgaaatcaatgacacacctctctctatacttcttctgatccacatgtgtggatacaannnnnnnnnnnnnnnnnnnnnnnacaagagagcacgaggcgctctttgcataggcggtgttgtgacaccgattctgatcgcttgtggagtcccaatcacatctgatggactcgagccacgggtaatggatattaagcatctacatcacttcgaattcctagagttcgcaatgcttggcgaaatgcaccgtttcaagtttgagcactctacggataagagaggcatcatccttctccccagcccaaggttacacgcataatagagggagaaaacattaattttaggcctgagcttgggaacctatacaatgaggacgctccgccattgggtgaggatgatcttatagaagaagaagctgaggatgggatggatgaagacagagaagtggagcttgacactagcatatatcattgtagtgaatatgtacctccagcgagggagagcaagagcttgagtgtaacaacaacaagctacagaagtggtgcaagaaacaggacaagctactcgccaagtgcttcaaaactatcaagttcctaatagataagttgagctgctcctcttccactacagttatcccacagggacaccctcctctagacatgccattgaggagatttgatgagcgtgagccaagtcaacacaggcctgagcctagtgagcagagagtctcacatgtccctactagacatttatcattcgagtcccgggagcactaaaagaggaagaaggctacgctcgttcgctctagcagcagatcacgctttatccactcgaggagatcactcgaccgcggtgctaactgcagcagaaggagagaggtcgagtatcctcaaagtggtgctggccgccacaaagccgatgaggtcgagtacccacatgctggagctgatacagaacagggcgactcgtaaatggcttgggaccaatcataggcagccattgatgaccaactccgttcattcttcgactgag

SEQ ID NO: 159009 - DNA, 2517 bp, Arabidopsis thaliana landsberg
atggagcaagaacaagagacttacaaatcaagattgtttcatttcaagaacatgaacgaaaactcagcttcaagacatgttaaaagctggagctcagattgtgcaatgagaatggatggttctgacaatttggatgatgatgataatgacatgatgatgtttaggagtcaacccggaaaatgtggcagcgttgaccgaccttctttgcctataggcggagtaacgcctaatcgcaatgacaagcttccgagagtctcttcatcggattccatggaggcactaataatattgcaagcaggtaaaatctaatgaactggctcatatcttctaggtttcttggattgcaagttaggggcaaagtactaatcttggattgtaagttagggcaaaaactaaagtatatgttgttgttattacagcaatggagcaaatgaaagagaaattttcgaaattgcttcttggagaagatatgtcaggaggaggaaaaggtgtttcatcggctttggctttatctaacgccattaccaatctcgcaggtaagctcttttcccaaatctttcagttccatggaaattttcaattttatcaccaatttgatgttaagttctgtaatttttttgttgttgcagcgtctgcgtttggagaacaacggcgtttagagccaatggcggtggatagaaaaacgcgttggaggagagaaattggatggcttatctctgtggctgattatatagttgaattcgctccaacacaacaaacaaacaaagatggtacttcaatggaagtcatgtcaacaagacaaagaacagatcttctctgtaacatccctgcacttaagaaactcgatgctatgcttctcgtaagaagaacaaacaacaacagcacaaaatatactaatcaaaggctgttaaataattaatctcacatttataatcattctcttgcaggattgtcttgataaattcaaggatcaggatgagttttattatgttaaaaaagattctcctgattcttgcgagacaaggaacgatgagaaatggtggttaccggcagtaaaagtcccacctaacggcctctcagagatatcaagaaggtttctacagagccagaaggaatgtgtgaatcaagtccttaaagctgcaatggcgataaacgctcaagttctgtctgaaatggagattcctgaaagctaccttgagtcacttcctaaggttatttaataaacacataaaaacattcatcaagaatctgttattgatctagtccttatcgatgttttcgtgtgttgttgagaacagaatgggagagctagcttgggagatgtgatatacagaatgataacagtagagatgtttgatgcagatcaattcctaattgaaatggatttatcatctgagcacaagattcttgatctaaagaacagaatcgaagcatcaattgtgatatggaagaggaaaatggtgcagaaggacacaaagtctccttggggatcaacagtgagtattgagaaaagagaacagtttgaagaaagagctgaaaccatcttgctactattaaaacaagggtttcccggaatctcacagtcctcgctcgatatcagcaagattcaattcaacagagtaatttaaaactcttaacttccaaatacattttgattgtgttttctctatggtcatgagaaaatctcattattggataattgttgttgcaggatgtaggacttgcgatattggagagttactcaagagtgcttgagagtttagctcacaccgtgatgtcgagaatagaagacgtgctttacgctgatcagcttactcaagaacctacaaataatgcaccttctaagaacagatatagcttgaaggagaatgagaaactaagggaggaaagactaagtttcacagaggatatggcttcaggaacactttctgatgttatgcaatggggtaacaaaaacaatgaaatgaagaaagaaagctttttcggagatagagagaaaccgttgttgtcgaaagtcacaggtataatgacaaacaacaagaagagttcttatcttgataatcttggagctatgaggagtccaaccgcaagatactcctgagagaaaccggtttcttttttccgttcttgttaaattagggtttcctactgcattttcaatctgcttaaagattccacaaaatgcaccattgtgtgttgtagcagacttgaaatgcaatttcattgattcatcataactgattttcagaatcactagcttacaaagcaattaacacaacacagtacaatatacataaatagggttcatagaattggggagaaagtttctgactttttgaaagattttagaaagctaatttaaagcttgccgcgaggaccgagcttaggtggctcttgaggacctctcttaatcggaagaacatcgccggtagagttcgcactaacatatgtaagcaaagagcctcctccaagaatcaaaaatttgagaagcaaacctctctttgtgaaaggagcagc

SEQ ID NO: 159010 - DNA, 3880 bp, Arabidopsis thaliana landsberg; identical to SEQ ID NO: 2335
  unsure (1)..(3880): unsure at all n locations

SEQ ID NO: 159011 - DNA, 1182 bp, Arabidopsis thaliana landsberg
  unsure (1)..(1182): unsure at all n locations
gaacaagaagatttctatttccctgacaccgatcttgatctcagcttcacatccaccactaccgaccgtacattcgcctcctcgagcgctcgcacaagtctaacattaagcttcaacgacagactctctacttcctctgcagtcacaacctcatccacctcctcctcctccgtcaaccaccgtcgtcatgatcctcactggtcagcaatcaaatcagcagaacttctctcctccgacggaaacatccacctccgccacctgaaacttatacgccacctcggcaccggaaacctaggccgagtgttcctctgtaacctcggtgactcttccgaaagattcgttttaaannnnnnnnnnnnnnnnnnnnnnnnnnnngagaagaagctctctcaggtcgagacggaggcagagatcctctccttgctggaccacccttttcttcctacgctctatgctcgtatcgacgagtctcactacacgtgtctcctcattgattatgctcccaatggagacttacattccttgttacgcaagcaacctggtaaccgtttaccgattcagccggttagattctttgccgccgaagttctcgttgcattagagtaccttcacgcaatgggaatcgtataccgcgatcttaaacctgaaaacgttttgcttcgtgaagacggacacgtcatgttgtcggattttgatctttgtttcaaatccgacgttgtccctacttttaaatctcgtcgctaccggagatcttcttcatctccgtcgcttcgtcgtagaagaagcggttgcttctccgttgctgcggagaaaaagtacgagagagaggagattgtttcagagtttgcggcagagcctgtaacggcgttttcaagatcttgtgtcggaacacatgagtatcttgcgccggagctagtttccggcaacggacacggaagcggagtagactggtgggcgttcggaatattcctttacgagttattgtacggtacgacgccgtttaagggagagagtaaagagcaaacactgcggaatatagtatcgaccactaagaccgcgagtttccatttggacggtgatttagatgaagctagggacttgattgagaagcttttggttaaggacccaagggaaaaggctaggatgctcccagggggtgctgcaaggatatttaaaacgttt

SEQ ID NO: 159012 - DNA, 2892 bp, Arabidopsis thaliana landsberg
ttgtggtttgtacattttttcttgatgaaaaatatccaaagtttgtttactgctccttatgtttacctttttttcttggttctgtcattagacgaattgcagtgtgcctaatactttggtcatagccaattgcgaaactgttaataggcaggtaattagtttttctctaccaaagcttgtgcttttgtccttgtgttactctctgctgagaggaaattattaaaataccgtttctttctatgctttcagcttaatgaaaaggcacactctccatttgtgaagaagtacaagaccatcatccaccctggagaggtgtgatattcctgtattctcagtgttttttgttaggtggatttactgaatctgcatttcgtttaggacttgagtgctgaaaaaagattttgttatgtgtacccttcattaatcgcaggtcaacagaatcagggaactccctcaaaatagcaagatcgtagctactcacactgacagtcctgatgtaagttctgctttctcgggtcatcagcgtgacaaaaaaaatgctttcgttattcagtatccttgtttttgaatagttccagtttcagtcatgcaagtatgatatattggttttcagattctcatttggaacactgagactcaaccagaccggtatgctgtgcttggagctccagattctcgtccagatttggtatgctcttgtgagaattttcgttgtgttgtctcactgagttaaacaacctgcttgtgcatcatcttaacaatcgaaagagctactctttttgcatcatttgaacaacttttattttcagttactaattgggcaccaggataatgctgaatttgctcttgcaatgtgcccaaccgaaccttttgttctctctggaggtttgtatcacttctatctttgtgtcatatcttgtggttatgcaagatttctcatcaaagactcttccgtgcaggcaaggacaagtccgttattttgtggaatatccaagaccatatcacgatggctggttccgattccaaatcccctggatccatcttcaagcagactggtgaaggtagtgataaaactggtggtccttctgttggccctcgaggcatatataatggccacaaagatactgttgaagacgtggcattctgtccatctaggtaacttcttgggacagtctccttttttaataagctcttaagtttacacccaaatgcagaactactcagaattttctgatgcttttggtataaaaaaatgggtgatttttttgttttgtcctacagtgcacaagaattctgcagtgttggtgacgattcttgccttatgctatgggacgcaagaactggcactagtcctgccatgaaggtacctcttttttttagccatatcgacatttgaggtttaactttttggtcttgtttcagattccgtctgtttcttcttgtgcgctggcaggttgagaaggcacatgatgctgatcttcactgtgtcgattggaatcctcatgacaacaatctgatcctgactgggtactgatttcacaaacttaaatacttgtccgaaagtacagagatgctactcgtcctctcactctacgcttctacatcacttttccaggtcagcagataacactgtccgtgtgtttgaccgccgaaaccttacctcaaatggagttggttcacctgtttacaaatttgaaggccacagagctgctgttctttgtgttcaggtttcaacaacatgccaccacctctgtttttttttttgtttttttcttttcatattatttgtcctgtaaacctatccccaatgacattgcttcgttatcaattcagtggtctcctgataaatcatctgtttttgggagttctgcagaagatggtctcttgaacatatgggattgtgatagggttagtacaatttctcacattcacatttaaaactattctcttactttcaagctcatcatattagcatatatgtgtgcaccaggttggcaagaagtctgagcgtgcaaccaaaactcctgatggacttttcttccagcatgcgggtcacaggttctcgagacttaatcctaattcacttgtttgcctttcccttttactctcttcaatagaatctataatttcctcgtgaatctcttcttagggacaaagtggtcgacttccactggagcctattggacccttggactattgtcagtgtttctgataattgtgagagtagcggtggaggtggtacattgcaggtacttttaaatgtcttgctacatttactctggaacctacctatgattaactttctcggtaaaaatgaaaacttttgatttttaaattaatgcagatatggcggatgagtgacttgatttacagaccggaagatgaagttctgacagagctagagaaattcaagtcacatgttttcacatgtacctccaagtcttgaggaagcaatcccatcatgtctattagtattagtaagttgctgcggtttagtgtcagtttttgcgaggaaaattggtttacttatgcgatttaggtgttatttttgcggaatattacttggtttatgtaggccagtaattcaacatattggtagatttaggacttccggaatcttgtatggtacttgatcctgttacttcaggttaatcctaggcacataactggcttgtactatcgacttttttttttgtgaatccaaacttggttgagcaagaccaatcgaaaacaacagattgaatcagtcaaatccgaactcttcaagtacttgacatttgactcatgtgtccttgaaccgttcagttctacttccaacaacaaaagcagatagaaaatcgtcgctcttcacctctattcggtttcatttcaagcaagattggttctgcgtaa

SEQ ID NO: 159013 - DNA, 1604 bp, Arabidopsis thaliana landsberg
  unsure (1)..(1604): unsure at all n locations
taatggaaaaagttggatataatcgttagcatactcttatcggaagtaggattgttttctgattcgagccatagcacatggtttcatagagccggacgattctctcgatctaaatcaagccggttttacatgaagaagatttgactcggcatgtactattcgatacgggtaagagaaatgatattcttttcttaaacttataaaaatagagaaataaaaaccaagtcaaaatgatacggataaatcctttattcttgcgtcaaagatctttctatttccaaaagaactggagttacatctcttttccaattacattcaagagtttcttatgtgattccacactctttaagacctcgaaaatttgacaaattccctttttttaggaccacttgcaagataacaaaaaaaaaaggaatgattaccacacgattaactattttatttatgaatttcatagtagtagaaatacttgtcttagcaaaacaaaatttgtagtagacatagtagcagttttcggaaacggacctctcctgaaggtaattttaatgtggaacccgctgctctagctaattgtccaccttttccgagtgtgatttctattttatgtatggacgtgcctaaggacatattggtaactagattcttctttttgatcaatcaaaaccccttaataaccatcttcctctttgatgaagaagctttcaaagttgaatcatcaacatgtttattgctttcaaccatttttgtttcaagatcagcaacatcatgatcttctgaaacaacatgtgtgtctccgagattctcgatgaatccaccattatacttaacctcatacgttgatctattacgtatgtagattctgcatagaactttggcccgtaaaaacaagctccatatgcaattagtattatgtatattatcaccggattatgaactctactatatacaatacaacacttgtagctagcttgttctaagaaaggttactaacaaaattaactaataaaacacagcagaactattcagcctgagcttctcgtgctctttgtactttcaggtcatcaagataattctggtagatataaaacccgaaccccatgaaggcaatgagcatcgcgaccatcttaacnnnnnnnnnnnnnnnnnnnnnnnnnnnnnnnnnnnnnngaggcgtaacaatgagtgagagcgtactaatgacgtttgagaagagcgacgtcaccagaaatatcaaacccacgactccaacagaacacacttgccaagtaactgctgtccagaccaaggtcagtacataagaggcttgccctttatgataaccttccatttccccatgcagcgttctccattccccgctagcaaaaagccctataaccgaaacacaagtcgccactaaagaagtgtagatttgcatttcaagaaccacagaaaacgtctccctcttcagaatcttctcgaacgagaactgcataagagatagcaacagagaatagagagcagacgcagcaagtgtacacacaaacccaacaatatacttagacctggagacaccagaaggagtatccgcatcatcattgagagctatcaaagcagcggagaacgac

SEQ ID NO: 159014 - DNA, 2411 bp, Arabidopsis thaliana landsberg
gcatgggagcgcttcatgggatatcagacgcaatgtcctcatcatggtttctccaaggcatcacggctaagtactctctacagaggtgttctccctaagatcaggatgctccttgatacaacatgcaatcaaaatttcctgaacgaatatgttgaagaaggatgagagctggtagaaacttagcccaatctgatggcaaatataatgaagattatgacagagccattagagggaattttgatttagaagagaagcatcacaaggatataaaagctatgaatgacaagctagacaagctactccttgtgcaacataagcaagtccattttctcagtgaagatgaaacgttccaagtccaggatggagagagtctctaatccaagaagttagctatgtgcaaaaccagggaggttacaacaaatgtttcaacaacttcaagcagaacaatcccaatctgtttacataagtaccaatgttgtaaactcgcaagaccaagtctacccttcacatcagctgaatcaacccaaaccctttgttccatacaaccaaggtcaggggtatgtccctaagccgcagtaccagggcaactatcagcagcaacatcaaccagcttcaacaactctagattcagacttgaagaacatgttacagcagattctccaagggcaagcaacaagagcaatggatttatccaaaaggatggcagaaattcataacaaggttgactacagttactatgatatcaatatcaaggttgaagcactgacatcgaagatcagatacatagaaggccacactgggtcgacctcagcacccaaatttacaggaccttccggaaaatcaatgccaaattcaaaggagtatgctcatgctatcacacttagaagcggtaaagaattacccacaaaagagagtccgaaccagaagactgaggacagtgtggtgcgagatggggaggatttttgtcagaatgaagattccgctgaaaaagcaatagaagagcctatactcgaccaacctactcgactactagcttctgcatcatctccttttgttgaaaaaccaactaccgtcaaaaccaaagacaatgtcttcgtgccaccgccttacaagcccctacttccattctctggtcgatttaagaaagttctggttgcgaaatattgagccctattggaaaaacagataaaggatatgcctttagtggattgtctcgcgctaatacctgacgagcacaagtacgtgaaagacctaattatagaaaggatcaaagaagtccaaggaatggtggtattaagtcatgagtgcagtgaaagaagattgttcaagaaaagttggaagatccagggtcttttactctaccatgctccattaggcaattgcctttcagcaattatctttgtgatctaggagcctcagtcagcataatgccactctctgtggcaaggaagctgggtttcgttcactacaagccttgtgacctaaccttgattcttgctgataggagttcaagaagaccttttggcaagttagaggatgtgtcagtaatgattaatggagtagaggtccctactgattttgttgtgcttgagatggatgaagaatctaaggatcctctgatcttaggaagacctttcttggcttcagctggagcagtcatagatgttaagcaaggaaaaattaatcttaatatgggggaggatttcaaaatgaactatgaaatcagggacactataaagaagccaacaatagaaggacaaaccttcttagttgaagaaatgggtcagctagctaatgaactgctagaggagcttactaacaaagatcaccttcaaactcctgtgatcaaaagtagtgaagctggatttctctccagtgagaccttgagctatgagatgtcattagactcacacaacaaagtaccaggatcagagatctttaaaggtgtcattgcgttagaaagagaggatgttgcattgaacgaggaaggctcaattgatattcgactagagtgctcaaccaaacagctaaagtcaagcatgagggcatcaaatgattggctagaactcaaggagaggtctaaatggcacgacagagctataagagagctaacacacactgtgaaagagctgaaggatcaagtcaaggagctccatgggaaagccaaccaagcaccactcgacatcaaggacgtcccaaatgatgaagttattcctatggttagtaaagaaggatgtgaattcacattagaacagtctagagaagacgactatccaaatgatgaaaaaggagcttaccaagaaagggccattgagtactcaattacagacttatcacgagagcatgctgaatttgatgttgtatctactaaggaaggagaggagacgtcaattctactctatcaccctcct

SEQ ID NO: 159015 - DNA, 5158 bp, Arabidopsis thaliana landsberg
  unsure (1)..(5158): unsure at all n locations
ccgccagcaatggaaatttccagaacaaagatgttgaagaaggctgggaattggttgagaaccttgctcaatcagatggtaattacaacgaggactgcgataggaccgtcagaggcacatctgactctgatgacagttagccgataagttactggaagagctggcagaagaagatcatcttaacagtgctttaaccaaaagtggtaaagatgagtttctacatttggaaacattgggataccagaagctcttagactcccataaagcgatggaagaattagaaccctttgaggaattggatggaccggcaacggggaggtaatggttatgagcgaagaagggtcaatacgagttcaacatgcacactcgaggacacactcgaccagccactcgaacttgtctgccaacgaatctggggagccgatcattccaacttcagatgactggtctgaactcaaggcgccaaaggttgatctcaaaccacttcctaaaggtctaaggtacgcattccttggtccaaactctacttaccatgtgatcattaatgccgagttaaatgatgatgaagtgaacctgctattatctaagcttagaaagtataggagagcaattggttattcattatccgacattaagggaatttcacctagtttatgcaaccataggatccaccttgaaaacgaatcctattctatcattgaagcacagaggaggttaaatcccaatttgaaagaagtagagaaaaaagaaattttgaaacttcttgatgctggtgtcatctaccctatctctgatagtaccagggtggaatgactgttgtcaaaaatgaaaaggatgaactgatccctactagaactataactggacatagaatgtgcattgattataggaagttaaatgctgcatctaggaaagatcattttcttttaccattcattgaccaaatgcttgaacgtttagctaatcatccatactattgctttcttgatggatatagtggtttcttttaaataccaattgaccctaatgatcaagaaaaaaacactttcacatgtccttatggaacttttgcctataagagaatgtcatttggtttatgcaatgctcctgcaacatttcagaggtgtatgacctctatattttcagacttaatcgaggagatggtggaggttttcatggacgattttttggtctatggcccctcattctcctcatgtttgttgaatcttggcagggtattgaccaggtgcgaagagacaaatcttgttctcaattgggaaaagtgtcatttcatggtgaaggaaggcatagtgttgggtcacaagatatcagagaaaggtatagaggttgacaaagaaaaagttgaagtgatgatgtagttgcagccaccaaaaatggtgaaggacatcagaagcttccttggtcatgctcgattctatagaagatttattaaagacttctccaagatagccagaccgttaaccagactattgtgcaaggaaaccgaatttgaattcgatgatgactgcctcaaatactttcaaaccatcaaggatgctttggtatctgctccggttgttcgagcgcctaattgggactatccatttgaaatcatgtgtgttgcatcagattacgcagtaggagctgttttaggccagaaaatagacaagaagcttcatgtcatatattacgccagccgaacgttggatgacgctcagggaagatatgaaataactgagaaggagcttttagctgttgtattcgcatttgagaagttcagaagctatttggttggatcaaaggtaattgtctatacagaccatgcagctttgaggcatgtgtatgccaagaaggatactaaaccaagactgttgagatggatacttttattgcaaaagttctgaagctgttcaagaccataatctttccgagatttggagttcccaaggtagtaatcagtgatggtgggaagcatttcatcaacaaggtttttgagaacctcttgaataagcatggagtaaagcacaaggtcgccactccctatcatccacagacgagcgggcagattgagatctccaatagggagataaaaacaattctggaaaagactgttggaattacaaggaaagactggtctacaaagctagatgatgcattatgggcttacaggacagccttcaagacccccattggtacaactcctttcaatcttctctatggaaaatcatgtcacctacatgttgagctcgagtacaaagcaatgtgggcggtaaaacttatgaactttgacataaaaactgctgaggagaagcgattgatccaactcagtgacctcgatgagatccgtctagaagcttatgagagctctaaaatctacaaggagagaaccaagcttttccatgacaagaagataatcactaaggatttccaggttggtgatcaggtgctgctgttcaactctcgcttgaaaatctttccaggaaaacttaaatccagatggtctgatcccttctgtatcactaaagtccgtccttatggagcagtcactctaactggtaagagtggagatttcacagtaaatggtcaaaggcttaagaaatacttaccagatcaaatccttccgtaggtgacgtcggttcatctccacgaacttcttgatgattaaaggagtaaaggagtcaagctaatgactttaaaaaagctcacataggaagaagtcccatgactatccctgtaaataaatttttcctttcttgttattttttatttgtcttaattgtgtttttggttttcaggaggaaaggaacaacgtggagatagagtaaaaattcaaaacttttactctacagaaggcctggagatcgagtgtataccccggtggagttgaattcgagtacatcagtcgagtacatcagtcgagtacttcagtcgagtacatgtgatgtttaaacccaaaaaaaaaaaaaaagttttaaatcatgattatactcgaccaacaggagctacgaagacttgcagggattttgtcaggttacagaagatttcctgaagtttcaaagacaagtcaacagagtgtggaccacgcgctttctccctgaagataagatggagagagaatctcaaactcaatctccaccactcctttttgaaatcgcccacatctttttcactcgaccaatctgtcttcaaggctaccactcgaccgcggtgaagaaaatcacacaaccccttctcaccgtactcgaccgcttcgtcaccgtcaccaagttcactttcgtccctatactcgaccaattcacttcaccgttcatcgtctctttgttctcgccatactcgaccgtctttgcgccgccgcagtcgagtccccacctagtttgccgtcgaagtcccaagagctactcgattacatccacaagactcgaccatcgatttgtggcttcgtccttgccaattccggctcaccgacaaagcactcgaccgtctgaactcaccagctgtaccgacttcctcaacattactcgacctccaaaggtttactcgaccaccggtttctgttttgctcgattcactaaagcagaactcggagacagccctgtttactcgagtacaaggctatactcgaccaatgtggtccatttcattgccagttgataacgattatggtttcattgttatctttgagactaacctattaatatttgggttttgagttctaaatcttttgcaggagaatcatgagtaactacagtggcagttcttcaattgatcctgactataacatggatgagacagagtcgtcgtcttcaaggccaaaaagagaacagaaagaatatgataacttcaggagaaaagctgagatagctcaagggaagagagcaatgacagagaggtatgagcttatagatgaggatctggaagccgagtacatgcctgagcatactcgcagagccaccaaacttcttcacgaacctgatgtattgcctgctgaggagtatatcaggctcttaaaactgaatgagttatgtagcacaagatacccatgctcgaccacacttgcacaactcggactgttggaggatgttcaacacctgtaccagagttgccatctggacactctgatggcttatccgtatatagcatatgaagatgagacaattcaattcctctccacgctgcaagtggagctctaccaaagtatgacctctgatgagttgaattgtgaaggattgggattcttgagattctctgtgtatcgtcatgagtataggttatcaatcaagcgcttggaaggattgtttggtttccccagtggaatgggaactaagcccaagtatgacagagaagagttgaaagacttgtggatcaccattggcagctctgtaccgctgaattatgccaggtcaaagagcaatcagatacgtagccctctcatcaggtacttccagcattctatagccaatgtactctactcccgagagatcacagggacagttactaattctgatatggagatgatcgctatggctctcaagggaactcttggccaaactaagaacagcatgtctctccaaggtgaaatcaatgacacacnctctctctgtactttttctgatccatctgtgtggatacaagagctgggctgtcggcaataacaaaagagagcactaggcgctctgtgcataggtggtgttgtgacaccgattctgatcgcttgtggagtcacaatcacatctgatggactcaagccacgggcaatggatatcgagcatctacgccactgcaaattcctagagttcgcaatcgttggcgacttgcaccggttcaggtttgagcactctacagataagagagctaacatccttctccctagccctgaggttacacggataatagagggagataacattgattttcggcctgagattggacgcctctactatgagaacgctccgccattggatgaggatgatcttctaggagaggatgctgaggatgggatggatgaagacagagcagtggagttcgacactagcatgtatcactttggtgaacatgtacccccagcgagggagagcaagagcttgcgtgaagctcataaaaataacagtaaactttagaagtggtgcaagaagcaggacaagctgctggccaagtgttt

SEQ ID NO: 159016 - DNA, 4108 bp, Arabidopsis thaliana landsberg
atgaaagagaacgtgatcatatattttaaattccaaggtcgcatgtataatgtgatgatgaagacattaggggagaagattactctctcaatgttagaagataggataatgacgaagcttggattagatgcaaataaggtaaaattgcatattaggtacaatccacggttgttcggagtagaggaagaaatgaacgtttgtgatgatgaggatgtctttgtttatgtaacatccgcaaaaaataaccggagaagtgttttggttgtggaggagatctttaaaccgcccgagccggagcaattgcccgagcaattgtctagagttggtaaaagttctgttggtaagaactatacggagttgaattcagaggaagatgaaatgagagtagatgatggtgcacttatcgtcttattagaagaggaacaagggactcaacagcaacttgaggcaatagtggaagatcacgagactcaagaagatgaatcacacgatgaaaccgttgatgagtctatggataattttgatacgggggaacaatatgttgagccaccgcctactatagaacctggtcagtttaaaaaaggatgggaagacggaattggtttgaccttacgtcaagaatttttaaacaaggcgacattgcacgaggtggtggatagagctgcatttgttaatagttttggttatgtgattaagaagtcggataagaagcgttatgtcctaaagcgtgccaaagaaagctgttcttggttatctgaaattcgtaatacatatatcttctcgattagaaggtacaatagatgcatacttcaactcggctaagtagaagtagtagtaggatcaggaaaaggaaaggtaacccacaattagtggatgagaatgtaaaattttagtacctattcatagctttgggagctagcattgaaggctttaaagtgatgaggaaagttataattgtggatgcaacacatttgaagaacagatatggtggtgtgctagtatttgcctcgactcaagattctaattgttaccattatatcatagcggttggcgtactcgacggtgagaatgatgctagttgggattgttttttcgagaagctaaaaacagttgtacacgatacttctgaattggtattcatgagcgacagaaatgcacgcctcataaagggcatacggagcgtgtataccgcggctcatcacgagtattgtatttggcatttgtcccaaaatgtgaaacggccaaatgctgctaacgtcaacagagacgtactcacatggaggtttatcgagttaagtcgcatatacaatgtgagtgagttcaacaaggagtataatgtgtttaagttgagatatctttctgcgccaagtatttggaggatacaagagtgaatgaaaaatgggcaagatgttgtttctccggagaaagatacaacttagaaacaagcaattgtgtggaatctttgaatagtgtgtttctcaacgcaaggaagtactcgttattaccaatgcttgatgcgatcatcaaaaaaaattccgtttggtttaatgaacatcagatatagtgatgttaacttgggcattgaatacccatttattaaatgggtatgtgcaaaaaaaattaacccatttaaacccatttagagaataatattaaatggggttaaacgggttaccccaattaaacccatttaataaatgggtttacccacaaacaaatgggtacccattaaacccatttatgttttattttatattacttatttttattaaaatgtagataacttaattataactaaaataaagagcaaaatactaaatatatttaaaacaaaacgtaaaatcacgttttcccgctaaaacccataaaattacgttttcccatcaaaatcacgttttttaccaaaatcgaaaatcacattttcccaccaaaatcgtaaaccgacgtttttccgccaaaatcgtaaaatcacgttttcccgccaaaactgtaaaatgacgttttcccaccaaaattgaaaatcacgtattttcgctaaacccgtaaaatcacgttttcccgccaaaatcgtaaaatcacgttttctcgccagaatcgtaaaatcacgttttcccgccaaaaccgtaaaatcacgttttcccgccaaaatcacaaaaagtgttttccgccaaaaccgtaaaattacgtattcccgccaaaaccgtaaacgacattttcccgtaaaaccgtaaaatcaagttttcccgccaaaatcacaaaaaattattttttgccaaatttgaaaatattattattattatatgttattgaaatctatgtttagtaaattataaatatttcagatttagctaatgtttatgggctattgttatttatctatcaagtttatgaatgaattaataaaagacaatatctcacttaataggtttaaatgggttcatatgggtttactaaatttaaatgggtaaggttaaatggggttcaaatataaatgggtttatatgggtttgaagttaaatggggtgggtttaaatggggtgggtttaattggggtgggttagcccatattaacatgactaagtgggcctctcaatttgttgacttatattgctttgtgtgatgagttattcaaagatatgcgattgagtttatatagtggcaaggcaagagtctctatggattatgatttatgaagaccttttattcaaatatcatatatggttttggttatggttggcttgagctattgttagttcaactaattaatgtgtgtttaatagattattttgacaattcaaggatttttattaaagttagttcaacaataaaaaccatctaactctaatacgtacacatgttaagtactctataattttaacttttaaatatcaattctaagcttagaaatgcacaattacacataccaattaccaccgtaaagtataccaattacacataccataccaatttatagaaagatatgatatataaaataatctccaaaacatcaaataaaacaaaacgattttatgatcattattggaatttccggaaagacgaacaattaatggtttgacggatctgaccggtcgaaccggatagacaaacaattgaattttgaaaatctgtggtcatttcccaaaagtcaacctaaccagacagaattcaaaatttcgtctctttgatacagaatacgcttcgaaccttctcgagcccgtcggaactgtaactcagtattattctggcgccgatgactctccggtcagttcaatcccgcagtaagcggaaaccgattgatgtattcgattactctgacgaggatgaccgtgttgaagaaactccttcgcaaattcgattccccagttactaagaaaacctcctgcgccatcgataagtatgacttccttcgatgctgtgagtgtttcttctctgaatttctcattgaattttgtttttgggaaggaagatcttatttctcattgaatttccccaagtttaacatgataacacaagagaaggaagatgttatttctgtgttaatatctttctattgcagttgcgaaggatacccaaagggagagtaaagtattgcaacacatagttattgatgttgaaggtaatagtaggaatattatatcttggagaacagttctcaactacaaatgatgaaaattgtgtagaattccaaattttcagatgctagtgtgtgtggtagaatagaaataaccaattatggtttatgcagtcccagtaaaagaagaaccgtcaagatgtgaactcagcggagatggaaatgtgagcctttgtcatgatggagttattacaaggaataagaatggctagaaattttctaatttttgttgtacaatatattgcagagtgacctggttgatgttatctcccatggaaggattggtatcgattcatcaacgtcatcatctctgtcggaaaatgatgaaggtttttagcattttagtattctctatctttagtttcagtaattattttctgtttgttatctcaaaattgcttgctctaaagaaactgctgaattcttttagtttcaactggagaagccacaaatcctgcttctgatccacatgaagtt

SEQ ID NO: 159017 - DNA, 1492 bp, Arabidopsis thaliana landsberg
acaaaggccattagcgagcgagagtgataattgcgaaattgccaaaaaacgcaaagtctaccactagacaagaaaatcgaagcttttcactttctcttttttctgttctgttgtctttggttctactctccgcactgaatctttcgatcagcgataattgtttccttcttttgggattttctccttgggtacgaggttctttccttcttttatttgctctgtttttgagatttggaattgttatcaagtctgacaaaattggtcactaatctttctgggaaattgagcatgttcgtgttcttgcatccgtttgactctttttctatgcaaagtctcaacctttcaatagtggaatttattcttatccctaatttctctttaccagacctatttttagctaagtttggttgaatttagaaagtctttgattcatagttgaagagattctctccattaatctttctctgtaatgtgtcagatccactaaaagtaagtaagaaaaagattttgttgtaatgttattaaatgtgtctttgtagatggaaccagctcaattaatgagatgagatgagaatgttcagcttgcagaagatggctatggcttttactctcttgttttttgcctgtttatgctcatttgtgtctccagatgctcaaggtgatgccttttcttacttttcaactgctattttgttgctctcatttcttgtttcgtttctggtaatttctgagcttgttcaggttgaagatttaactctatgattctttgcttttccattttcaggggatgcactgtttgcgttgaggatctccttacgtgcattaccgaatcagctaagtgactggaatcagaaccaagttaatccttgcacttggtcccaagttatttgtgatgacaaaaactttgtcacttctctgtaagtttaatgacaactctgaattagtcaatgttgtttccatgtgagaacatttatattcatgtcatttgtgattgcagtacattgtcagatatgaacttctcgggaaccttgtcttcaagagtaggaatcctagaaaatctcaagactctgtaagtgctttagattgagtctctctttttgtctgaaatcctagaacatagatattaggttgtgagcatttcgctaccttctttttatatatagtactttaaagggaaatggaattacgggtgaaataccagaagactttggaaatctgactagcttgactagtttggatttggaggacaatcagctaactggtcgtataccatccactatcggtaatctcaagaaacttcagttcttgtaagtagttccgcctcacaatgctgttaaatcttgcacatgttttaaaacatttttaagacgtagaaaaggattactcatgtctttattcacttgtgtgttggctaaacaggaccttgagtaggacccaacttaatgggactattccggagtcactcactggtcttccagaacctgttaaacat

SEQ ID NO: 159018 - DNA, 1352 bp, Arabidopsis thaliana landsberg
ctatgcaggtagatggagactcactagacaggctaatggcttcacaacatggaaatgcttatatgtctgtactcttttatgcttcctggtgcccattctcacgtactgtgcgccctaagtttgatatgttgagttccatgtttcctcaaatacagcacctaactgtggagcattctcaagcactgccatcgtaagaagtctacttagtattgtttgtctaagactacgtagtctattattattccatactacttagtatattagcaaggaattcacatcaagaatttgggtactgatagtttagtttgagagtaaaaaaaaacttaaattgcatatcaattaatgaataacttgatccatataaggtggttcttcttttcattttagtagaaggtcatgtgtgtttgctgttacgttatcttacatttcattagcaaatattcatttgatctatcattaactagttagttcagcattaccttatctgccttgtgtatactaagttactagtaggttcctctcccaagtgcttttaggtttcttcatgtgtctggctgtttcttttgtcttactaactggtttcattaattgctttgttgcagtgtcttttctaggtatggtatccatagcttaccttcaatcctgatggtaaatcaaactttaaatgctcggtaccatggtcgaaaggatcttatatccctgattgagttttatgaagaggcaacaggtgatacaccaaaccacattgtctgcttataatttctttcagtctacctgagtagtctcttgttttatgtccaacctatgactagcacattttggatggatcgatttagatatacctggctgttcttctggctttccaggtctccaacctgtccagtatgtggctgaaggggaaccaataggcttagatgccggcgatggtaacttgatcacatggttgggcaacgggacatctattagagaaatattcaaacaagatccgttcttggtactatctctgctgtttatctgtttacaaatggcaatccttgtcttccccatagctgaatcgcgcatgagagcgttatgggcttcttacgttcccaatctgaacttgggaagatttggagagataagccaactgttcaaccgtggtattcacatggtcgatgtgaggaggttatggttgaaactaagtctcgtcaaaacaagaaacttccatgaaagggcaaagaacgcacaagcttgggcttcatcgctggcatctgtctctctaggccaaacttcatcagaccaatcctgatctcaagggtaagatcatgtcagtattgggaagagatgagcttaagtgtgtgctggaaatctga

SEQ ID NO: 159019 - DNA, 408 bp, Arabidopsis thaliana landsberg
aatatgcatggtacttgtgcatttcgcattcgtcgagtctctcacgccacttggctttcatgcatcaagtaaatcttttcgttattttcaatgataggagcgaccgtaaagcttgcatgcaacaacacaaagagaggtgtgacaatggagacaaaaacagacaaaaacggatacttcttcatgctagccccaaaaaaactcaccacctacgctttccacacgtgccgggcttggcctacgaatcctggacccacgactgcaacgatgacatgcaccgtgccgtcaaagctcaacaatggaataaccggtgctatgcttaagccttctaagacaatcaacatcggtgaacacgactacgttctcttctctgttggtcccttcgcgtttgagcctgcctgtgctctttga

SEQ ID NO: 159020 - DNA, 1771 bp, Arabidopsis thaliana landsberg
agtgatccgttcgttggatcagaatccgacagaacaagaacttcatgatatcatcactgagattgattctgatagcaacggcaccattgaatttgctgagtttctcaacctcatggccaaaaaacttcaggttccactctctcttgatctctcatgcttatttatttcacaactaattacatcaagttaacgtagccacgtacaaaccaaaaagttacatcaagtgaaatttttttgtctatatgatttcttatatattatgttataggtcccttattgtaactctttgatatgggatcctaacaggttctagtcaaaatggagctgtctcattcattatgcttctagtttattaaaaactcttaagaaatatattggaaatattcagcttttgtattacagcaaaatctgttttgctttcggtttttcactacgaataaatctgatttgtgaagaactagacacgtaaatgtgtataatgtaaacaaagacttttatgacaatagtttttttgtatgttaagttgttgtcatgatcatgtgatggtttaggaaagtgatgcggaggaagagctgaaagaagcatttaaagtgtttgacaaagaccaaaatggttacatctctgccagtgaggcaagcaaataatttactctttcttctcttaattctaattcatactaatactcctttaattaatgattggaagcataaaatggagtatgtatttacttatgtgctaactgattgtagtattactttgtctagtttcgttacatgaaccaatttttcaaaaaacaaattgttttaattttttattttacttgagttgagtagaacacaagctcggaatttagatttatgtattttcttatttttatcaacaattgtgcatttagttagaaaatgacaacaaattgatagctaaatcaaggttagaatcttttgaattaatgaaaacatcagatcacaagtctagacgatatttcgagttttacaagagatcctttatgtgtcttattcataacttggagcagaaaatgacaacaagatatggctaattatgtttttcttaattaattgaaaagtgtcttgtgtcgtaaaaagctaaattgtttgaggcttcgagctagctggcattatgactttttggagataacgaggtcaaaagaaatatttaaaaatattgataacatttagtaaaatgtgtttatgattctattggtttattgggcagagcatatgtctcacttaagcgtaaataatatgtttatactttcacacccagtttcttcttcttaatcatgcattttcgttcgaatatatagttcaacatttttgctcttggaatataagaactcaacaaagactagtattcatctattacatttatttttacaatttagttagagttgctcttttttccctatctttttgtttctgaatttcatagatttatttatctacaaaaactattcgacggacgatatcttatgcattggccatgatccatgcttaacaataaacatcattagtagatagtaattctataatctttgtaattttgatatataattacagttgaggcatgtgatgattaatcttggggagaagctaacagatgaagaggttgatcaaatgataaaagaggcagatttggatggtgatggccaagtcaattatgatgaatttgtcaggatgatgatgaccaatggttaaaaaatcctaatcatttttactcttcattgtattatcttttataaatttgtttaatc

SEQ ID NO: 159021 - DNA, 362 bp, Arabidopsis thaliana landsberg
  unsure (1)..(362): unsure at all n locations
tgtgtttatacaaatatatatctacaaactacaatgaataatttcattctcttatggcatatggtgctataaacaaacacacttaccacgcttgatcctacaacacatgaacnnnnnnnnnnnnnnnnnnnnnnnnnnnnnnnnnnnnnnnnnnnnnnnnnnnnnnnnnnnnnnnnnnnnnnnnnnnnnnnnnnnnnnnnnnnnnnnnnnnnnnnnnnnnnnnnnnnnnnnnnnnagttaccactactagcgagaaatacattgttcctacgccgataccaccgtttttacgaccctcattcccaccgnnnnnnnnnnnnnnnnnnnnnnnnnnngggaatatagcacaaccaccgttacct

SEQ ID NO: 159022 - DNA, 5135 bp, Arabidopsis thaliana landsberg
  unsure (1)..(5135): unsure at all n locations
gttttgagttacaatgtcgtcgaatacaacaattccaactacgaccatagtatcagcattgacaacgatgacaaacgtgccatcatccacatctatcatgacgcaaacgtcgatatttgaatgttacacatcagttgggattaaaattttggacaatatataaaaaatatagcgatttttaacttttgagctaatttttgggataagttagaacacattcctaataccaataatgtgcaaatgtcggtgtccgtacaagtaaacaagtaactgtatcatcctcaacattaacaacgaacgtgccaacgtcgacatcaacactgaggatcgtgacaacatcaacgtcgacaaggaatgtgtaatcgtcgatgtcgacacgaggggccttgccagtgtctacatcaacgaggaacgtaggtacgttgactaatgcatcgcttcaccatgcttacgaggtatgcggtatgctgaagattataggtctcaatcaagagctatagaataatcaacacattgcattgtttctatttggtagttaaatctcatacattttctcgttaagttcctacagtatttataagaaaatatcacatgatttgagtttatttagtccaacaaaaataagatagacataaatctcaaaatcaaatcctaaacataatttaataatatcacgtataaaccaaaacgataaaccataacttgttgagcggattatgagcccattaggaaacaaccggcgatattgcaacgtgtagcggtcgtggagaaaggagagtgcgtgatatgtttggaggaataccgcaaaagtgacatggagacggagctgccatgtaaacagaactatcactttgagtgtgtgcagaagtggttgaagattcacacctcgtgtcctcaatgtagatacaagctttgttatgtatataaaagctttttgatgttgtgatttgagagattacaaatttataattgcaaaagttttgtaattggaaatgttttgttgctttcaaggttacatcagaagaaagaggcttattgacttggttatcaaaatcacctaaaattactctactagtttgaattatccatccacttgtgttgattgatttgaatcttcctcattggttgtgttatccctctctgcttcattaaagacttgagtactatatgattccactatattcacctattcaataagcccctttatgatgtaacccaaatttttctttttgtctcaatatcgttactactatatgacttgagtactacttgtaaatttttcttttttggtaggccctggtaaagaatgtcactcacaatttattcataaactaaaagaaaaaatatcatatgtgaatgcttctcggtctcgtggacccacgcgtatcatttacaaagagcaaagtaacaatatctggaacataagtagaagaatgaaatcttggcgacaaactaaacgcataattagctaatccatatgctagatagttaattagcttttcgatatacgtgaaaaaatgaactatctagtctctcgaaagaaagtcatgacacaagcgtaccagaaaaaacattgaattatactcgcttattcctgtcttaattgttattttatcatattctttcaacagacataagacgaaattctaaaaaccaattgttaaattgaccaacacaaaagagctttagtaatagtagagacaaagtgaatatattagttttttgcatgaaaaaaaaaaagaaaaagaaaaagaaagttaaaaaaataaacattggggaaagaaaaatattcgtttaggttgaggcatggcgatatgaagacgatttgaccgggaggcttgtgattggtggatttttttcctactgtccgatatctttcttcctgtaggtatgtctatttcgtttaggttgaggcatggcgatatgaagacgatttgaccgggaggcttgtgattggtggatttttttcatactgtccgatttctttcttcctgtaggtatgtctatttcgtttaggttgaggcatggcgatatgaagacgatttgaccgggaggcttgtgattggtggatttttttcctactgtccgatttctttcttcctgtaggtatgtctatttcgttcgtgttggtccaccggattcccagaaacaggagtagctatcaaactgtcatgatgatgctaaatgtggggaaatacttccaatttagtggagcaaaagtcaatattaaaatgctaacaagagaaacagtgagaagcaagattttgattcacatgaggctaccaagagaccatggtacaaatagtcatagtcttggctgaaaaagtatctatatatacatttttaataaagtttttggttgaaaaatctctcaaatatttactattttcaatattaatcctaacaaaatctatctgacaaaatattgtctttaaaaaaatttacaaatcgactttatcaactaacaatttctaattaattatttgtcttaatcttgcacatattaattacgtattatttgagaaaatctaaacaattagaaaagatctatactaaccatatatatgttgttctttgatcacaatattcatttacttgattctaaagcaaattagttattgacttttccgattttgttgctaaattctcgattttatgatacaaatttatctaatcacaactaattaatactaaatattattgatttaatattaaccattcattttatttgtatgtaattaaaagctaatcaaaggcatattctctcttttattcaattatatcctatacgattttcatatatttcttaaacaaaatagcatattcgaatcattaaattattttcccaaaataagattatgttaatcatgcattaattttcggaattgagaaaattgcttgctcacaaagctatttttttattcgaaatcaaaactaaccctaattgtgtatgagctctatatatatcctcactagcaaacaaatatcacaccttcattgtgtcttatgataacctttataacctctcattagcaaagccaacaaaaacacaattgggtgatacattgctaagagagaaaccaaacctcatttaaagtcataagttataataatgcagatgaggacaaatatagattaggatatggtgttgctggtaaaggtgtgaagcgactttgcctccttggtaccttgagaaatgtaatgatgaagatgatagtgttcgtggtgaggatgatgatggtggatatagaggttatgaagctgagtgggaagaagagttattggcccataattctaaaaatatacgacagccattttgaatgatttcaactaaacatacggttagttccggtttatattcagtttcgtaaccaaagaaaaacgcaaatcccaaattttccggaaatggaggaatatttgaatcttatgttgaaagcgagagagattcttgttagtgaaagccatgaagaagtagcgatggtcatcgatcatctctttaagcgtcaagactccgaagagtataaaacatcgcgtgcgctgtacgacatctgcgtttaatgtaacccaggttgcttaaccctaaagcttcttaaactctatcaatattcttctaatgccgttctcagattacgatcaatctatcaactctccgaaactctcacagatttgagaaatcgcaacttcaaactatctctcgactctctctatgaaattaaaggggttttgatttcatgcttgacaatggaagaacccaaagaatctgaaatcnnnnnnnnnnnnnnnnnnnnnnnttgtgtagcttacaatgatgtggagttgcataaaggcaaatgggacgagcttggtgattgtatcttaacgctagtgaatagcaaagaacctgtcaaggcctttcacgtctttatcgatttgccaccagtctacaagagtttcatagacaagtttaagcacaaaatcttagatgaagctagtaatgtctttcttgatccttatagagttgaagattggagcttggctttacaagtttttgttaaaatgtggattcagcttgagaaaacaggggtgacagcagagttactaatggcgttgatggagatttggatttcctctgttgtgaattcagtaaagaagctagtggagatgaaaaaagaacagttttggtacgagggcttgaagatttcgagagtttcttctcaggagacatgaatctgtatcattacactaaagaccaattccattttgtgttggcttccatgaacgagatcgaaggagtagtcggaacagagacaaaggagattgtgaggaagatcaaaatgttggtgacagaaccatatgatgatcttaagaatcgtagagaagagtttgaacgtggctggtatgacattttgaaggatttatcatcactggaagtgttaaagattcttgcgtcctctgaactctgaagataggtccaaagagatagcaatcagacgactcaatgtcttactctctgatcacacttcaaagaaagtgcagatagacatttcagagatgagacaactccaaccattgctcatctcttgcttaaaggaagaaggactttcctttaacagtatgttcaaagtcctaggtgaggtggtgaaccatgttgcatatgagatgttgatctaccaagaggagacatggtacgagctacgagattatattgcatcgagtaaaacagagtttcatagagcggtttatatcttccagtgcttaacaatagcacttattgacgacgattttgtgattcctgtgatggagaatcttttcctagagataatcacaaggctagacccaccaagagagttgttggtagataacagtagctgggtcttggcgtttatgggtggcttttgtttagcaattcacttgatagagacgtcaagtaaagctgaatccgttaaggagattgcacataagatgatagattctataagagagctaatggaaagaggaatggaagttgggcttgtgaggagagctttcagagatgtggaaagcattgtgaagaaacaattgcgatggtatgatacaagcgagtacaaattcgttaagggtctgctttggagactctatgcaatcaaaggtatgaaatgggaaagtatgattgtttt

SEQ ID NO: 159023 - DNA, 1693 bp, Arabidopsis thaliana landsberg
ttttatttcaatgcaacttgatgaggatgatatgatcactaatatattctgggcagatgatcggtctatcagtgattacaatctttttggagatgtcatttgctttgacacaacttataagaccaatgaatatgatagaccctttgttccatttgtcggggtcaatcatcacaagcaaacagttgtgtttggtgttgctctcttatatgataaaaccaacgagtcatataagtggcttttcgagacttttcttggagtaatgtatggaaaacaaccaaaaaacaattcttacagaccaatgtgcagcaatggcgaatgcgatagtaaaggtattccctgatacaaatatagattatgtgtttggcatatttaccaaaatgctgcaaagaagttgagtcatgtatttcatggagcagaacaatttgccatggattttagtaagtgtgtatatgactatgaggaagaagaagattggttattagcatggagtaatatgctccagaagcataacttgatagaggataaatggttgaagaatttgtttgagctgagagaaaaatgggcaatggtatatgaacgtcattcttttacagcagatatggtgagcacacaacgtagtgaaagtatgaataatattttgaaaaatacttgaagcatagttataacttgttgtgcttctttgaacactacgagaaagtgttggaggatcgacgatctaaggaattagttgctgatttcaatatgatgcataccttgtcggtattatgtgctactgtaggatgttgcaatatgcagaggaagtgtatacactcaaaatttttagcttgttccagaaacaatacatagttattggtgattatgttgccaacaaggttagtaagtatgagatggtatatgaatataaattaccttatcgtggtgtagcacggaagcattttattaattatgatgttgcaaacgagacgatacgttgcagttgcatgaactttagttttggcgggattttatgtcgtcatgcattgaaagtgctggacaagaaaaatgttagaaaaatcccatctaactacattctaaatcgatggagtaaagaggcaaaagcacgaaaaacatttttttatcattcagagccacctaatgaaacagtcaaggaatcgattggaaagcgatatagccatatatgtcgtactttccgtgagattgcatctgttgctactgatcatatagaattgacgttgtgtgcaaatgaagaagccattaagttactcaaaaaattggaggaaagaaaaggagcttttaaaatctaatgcatggatgcttcaaacttcagatattgaatttgtggggtaaaaagaaaagctcctgttggacgaccaaaaaacaaaaaagtcggacaccatggacgttatatgagtgttcttgaaacaaaaaaattggcgtacctcaaaacaatcaagtaatgcaacaacaaagaaaaaattattatttcaggtatttgatataatatattcatattagttatgtccaattttcatcgaaatgtgacttaatctatttatactaactcttatttaaaattgctaaatacttcaggactctacccaattataagtcgttaccaccaacctaacctacaaatggatcatttttctacaagtgttcagaaatctaaatctacattatttgatattgtata

SEQ ID NO: 159024 - DNA, 2564 bp, Arabidopsis thaliana landsberg
gctttcttaagagaagcgaatgcagtcaatgggatttgattcagtttggataaattgggtaatgcagtgtgtggaatcagtcagcttctcagtcttagtgaatgcgtcccctagaggaatgataaaaccaaagagaggaatcagacaaggttacccactctcaccatacttatttatactgtggcagaagttctgagtaacctcctcaccaaggcagaagaatcgaacaagctgaaaggcatgaaaataagtactacaggtccctccatcagccacctattatttgctgatgatgcattattcttttgtcatgcacatcaaaagtcatgcaccactataatgagtatcctacgagagtatgagcaggtctcgggtcaggcggtgaatctcaacaaatcagcaatcacatttggagcacgagttaagcaacatgtgaaaacaagactccggcacatacttaatatccataatgatgggggaggtgggaagtatctcggattgcctgaacagattggaagcagaaaaaaggagattttcaattatgtggtggacaaggtgaagcagagaacacaaaattggtctcacaaatttttgtctaaaggcggcaaagaaatcttactcaagaccatagcaattgctttaccagtctatacaatgaacgtctttaaactaccaaaagggatatgcgacaaaatcaacagtactttggcacgctattggtggagtaaaagtcgagaaaggagaggaatgcattggatctcttggaagagaatgagtttaccaaaaaaggaaggagggcttggctttaaagatattgagaagtttaatcttgctctattggggaaacaattctggcggatacttcaatcaccgaatagctttctttcaagacttctcaaggcaaggtactttcccaacaacaatgtcttaaccgccgggacaggatacaagccatctttcatctggaagtcattactagaagggagagaactactgaaaacaggtatgagataccttattggcaatgggcacaatacaagtgcatggctagatccttggttaccattgcatccgccgagaccacccgaatgtatgatgggaacaatggacaatcattattcagtaagtgatctgatgaatgagcaaaagaacggttggaaccttgaacgtttgagaggcacggtgacacctgaagacatccaggtaattcttaacataagaataagccccactatagcaccggatttgttaagttggcactacaacgattccgggttatacacggtcaaatctggatattggctagccacgcacatgccaggaaacgagccgaatgtcaccccatccccaggtttgcatgcattcaagacatcaatatggcgaatgaaaacaacaccaaagattcagcatttcctgtggagaatcctatctaatgctttagcagcaggcactgtacttgtaagaaggaacatcaccaccaattcactatgtaaacgatgcaacagagcagaagaaacgatagaacacctgttttttgattgtgaatacgttcaagaaatctggcgacgaaccgcgggactacaacgaagcaactttgacgcctcaggaacgttcactgaaaaattcgagtccatcatcgattgttacaacaaccattatatcccatagatggaacgccaattacctctatggcttctatggagaatatggaagagcagaaacctcttagtttatcaacacaaagatagcaattggcaggaggatatcaccaaagcagagcaagaggcggaagaatgggtgaactgctggttagacaatccgagtaactagcattccgaccacgagaacacggccgttcttatcaagctggcaaaaactgaagagtggatatgtcaagtgcaactacgactgcaagttcaacgcaactgacgacccatctcaagcagcatggataatacgcgattccaacggtacctatctatcagcaggacacagtatcggacaaagatgctttacaactctggaggcggaacttcaagcactactgattacaatgcaacaagcatggcttaaagggtataggcacattatcttcgaaggagacaattacacagccactcaacttatcaacggagaaaagcgcaacttcaaagttgacaactgggttcgtgagatcaatatgtggaagaacaagttcataagtgcagaaatccgatggacaagaagatataacaacaaagcgtccgacagaatagcaaaagctacttttgataatcatgcgctctttgaatctttcttctatgtaccacaatacgttgtaaacatcctccatgaggatcactcttcttcttaatcaatgaaaccagacgttaaaaaaaaaaaaaagcttaccttcactgtttatgcacaacatgtaagtcacaatgtcaaaagtttggcttaaacaatagcaatcaatgttatgcgttaccttatgcctaagcgtcagattctctcccttcattctggatgcaatatgggaatagatggagatgttgccctcttctttggacttttaggtattg

SEQ ID NO: 159025 - DNA, 2478 bp, Arabidopsis thaliana landsberg
acggttgttttttggttttggataaaaatccctgtggttttggaggtagtgagtttgattgatgatccttgtgctttatttctgcagaaacttttcgtatccctggcggaggttgaacagtcacctcccgactcaatgcagaatgcactcactccattgatgaaaggattagtcggtggaaaactcttcaagcattcagatgtcgatgtcaaagttgctgtcgctgcctgcatcagtgagattacaagaataactgctcctgatgctccttatgatgatgaccagatgaaggtatgtagttgtttgttatttttttcttgagggagtggacattatgctggttggttactgactcttttcttctattcatgtgcaggaagtattcaagttgattgtatcatcatttgaagatctggttgacaaatctagtcgttcctatgctaaaaggatatctatccttgaaactgtggctaaggtcaggtcatgtgttgtgatgttgctcttgagtgtgatgcacttcttattgagatgctccagcatttcctcaaggctataaggtacactctaatatatccattatgctagaattaaactcattgtttttcatcttgtaatgtaatgtccaggaaatacacatacatggaattgtctacttgtttatttccctgttgttcctttatttccttgtgtcatgtttgattaatggatgttgttgttctcatttgatatcatttcattcatgtcgttctacctatccatggactatgctactttactttatgtactcgcaatatagttcacaactagtctattgcttgttgcttatgtttgcttgtacaacatccaataagtatgtttgtctgatgttgaacttgtttaccctttcagggaccatcattcagggaatatattttcatctatggagaacataatgacccttgttttagaagaaagcgaggatataccttcagagatgctttcaccaatcctacattctgttaaaaaggatgatgaggtaatacatggatggtctactgattttctatcaccaaccaatgctcttttgttaaatcttttaatttatcaacagatttcccaagtatcacggaggttggcagaacaagttctcagtaactgtgctagcaagctcaaaacttatctgactgaagcagtgaaatcgtcgggtgtccctctagataagtatagtaacatagtggcttcgatatgtgaagggacattcagtgctttgcagcaagaccaagttgttgcaaatgaaaaagaagtaagcctttatttctcaccttttttactgccgcactgcctcaacttttttagtgattatgcaggtcttcagttacattagctcttatactgttcttccatatttttcctctccaggatagtcaaggtcatataaaaagggaaacggaagtagaggtacgatagtcattgttgatttgtatgaaaaggatagatgcctttcttcttttagcttttgtagattgttaattgatttttatgttccaattaaaacatgataaacagaaggcagcagaaatttctacccctgagcgaactgatgcacctaaggatgaatctggtaagtctggagttagcaatggtgtcgcgcaacagaatgattcttcggttgatactgattccatgaagaagcaagacgatacgggtgccaaagatgagccgcagcaacttgataatcctagaaacactgacttgaataatattactgaagagaagcctgatgttgaacatcaaattgaggaaaaggaaaactaatctagttctgtcaaacaggcggatttatcaaaagattcagatatcaaagaagagactgaacctgcagaactcctggacagcaaggatgtgttaacttcgcctcctgttgattcatctgttaccgcagccacctcttctgagaatgaaaagaataaaagtgtgcagattttaccatctaagacatcaggagatgaaactgccaatgtcagttctccgtcaatggctgaggaacttcctgagcaaagcgtccctaagaagactgcaaaccagaagaaaaaggagagctcgacagaggaggtcaaaccttctgcttctattgctaccgaagaagtttctgaagaaccaaacacgtctgaacctcaggtgacaaaaaagtctggaaagaaggttgcttcgtcaagtaaaacaaagcctactgttcctccttcaaagaaaagcacctctgagacaaaagtagccaagcagtcagagaaaaaggtagttgggagtgataatgcacaagaatccacaaagccaaaagaggaaaagaaaaaaccaggacgtgggaaagccattgatgaggagtcattacacacttcatctggtgataatgaaaaagtgagtagttccctgacctgaattgattcgaatacatatctgacttccctgtccttgtcctcttgccgatatggtttaattttattt

SEQ ID NO: 159026 - DNA, 722 bp, Arabidopsis thaliana landsberg
agttcgagttattcgtatgatcaatataggtacagagatctcttactgtgtgcttaaggatggattttgtggacctaacaaaaactgtgttgaatcaggttttgttggagcaacttacatcatctccttggaacaattttcttttcatgtcttactatggtttagtagttgaaggtaacgaccatggtctagttctgaaatgaattgttttgttttctctttagtgatttgtgatttggagtttaagatctgacattgtcctgtaatgttttcacaggaaggccatggaagctagtgaagcacaaacttggaaaagattaccctactatccagttaaccgcatggaaggtaataaatgagactcactaccatttcattttgttacacttttggttggttttaatttctaaaactgtctatgtaaataacagttctggcctatcgtgggatgggttaattatcagtatgtgcctctccaattccgcgttttgttcagcagcttcgtcgcctcttgctggtaaaagcttttaccgtcctctctcattttgatatgaagagagttttctggtaacatctttgtcttttaatatatttaggagcatatttctgaacttgaaagcgcgatctccggtgatcaaaaacgcgtagagaactctatatggaggaaacaagaatggatctcttttgtttttcttgaaatgtacaaaagtttcaagaattga

SEQ ID NO: 159027 - DNA, 2429 bp, Arabidopsis thaliana landsberg
tgtttaagcaatgcagcctgaatattcacatgtttcgaccaatggaggggtataaggaagagaccatccagtttctttcatccgtggaattgttctcatatggagagtcacaagacgatggaatcaggccagacggaagtttgggatacttgtagttctgtgtgtatgacgtagaatatcggcttccaatcgagcatcttgagctgatgtatggatttcctagcggaaaagacacgagtcatcgttttgacaagagagagcttcagtcattctgggccacgcttagtaagtgctctatctgcgagagaacggaatggatctgttgtcaatggggcactacaattgatggagacagcgctgcaagagttgcttggttcagcatcgaatggtacggttctagttggagatcagacagacactttggtctcattctacctaatcgagcacctgctgagttgcagagaatgagctaagggacttaagaaaccaggaagaatggttctggaaggagttgtgacaccaattctgagagctagcaatgtacctctacattcaacgtcgattcctccaagatggattgatatgcaaccccttatcaattccaagagtttttggtcgcagtagaagaatggcctatataagtataggttcgattaccccacatcaggacaatccatttttctactcccaaaccccgcttccacttcaaccagagatggtggcaacattgagttttgcccaccaatggagaacctctatattttaagtgatgaagctgtgccgatggaaggagtgaatgatgatgagtctccaatccatcattacgctacacaacagttttacttcgaggagtactcaacaccaaggcaaagtaaagactcaaaagagattcacaagtgctttggtttcctccaaagcttgtgtaagttccaggacaaagctatcgcggcactcaacaagaagtttaacaatctccaactcaagatcagctgttcttcctcaagtacagcaaggcaatcatccttcgaacctagagaaaaggaaaagaggagcaagttgaaaaaccgaagaagaacaaggaaatcagacgctggagcaagcctctctactgcaccacttgaggagccactcgatcaacaacccgagcaaaaggtcgagcatccagctaatccaagttcagcacaacctgatccctggagttacacaaagtagagtatggacgacttcgtctcctcctacttaacctaaacgctgaggtaacaccacctcaaccattttacataccatagcatttttatttttctttgtgtgttttgtgttttggtcttgaattcattctcagatttttattacacaagagactgtgtaatttaagtttgggggagggttcaagacatgtttaacattgtgttctcttttcttatctcaaattttgcatcatctagggcatagaaaaaaccataaaaatttgaaattttttcagaaaatgatttcatcaaaaacagagtgtcatgtagattgcatatcattttaggattgtatatagtgtgcttgcatttaggattgctcatttgcatatgggataatgatgatttcaaaccgataagcatgttttgattatgaagtaagttcaatgcccaggttcttagttctttgttgcataaccgattgtatctctgaagtaagactgcaccctgctttgaatttgtaacttgactatacttctttaattcgaaactcgcttatctgatgccattccctatctattagaacatgaattgaatttgaaattatcaagtctatgcattgtttgtgaactcatggctaccatatacatacttggattatcttattcacttcaccaccctctgttaatccaagtagttgtttcacatttttagagcagtttcccatacccttagcctagccttatttcaagccaaagatcatttgtgtgtgattgtgaggcctttttcgattgaggttggtataacgcgttaggtatgaaccgacaagagcagtctttcatctagacctagcccacgctttttgggttagctaggactaggtggagacttgtatttgggattgggaatgtgtatggaatgaatgggaatgagagtgagaatgagaatgaaaagaaaaaaaaaaagaaaaaaaagagtaagactttagagttctaagggggatacaaaagtgttaagtctagtaaagggtttggaattcaaagaagttaggcattgtgattcaaagaaaagggtaaatcgccctatgtgctaagattagaataaaagccttaagtttgtcaaagtataaaaccaaacccgctagactcttaaatcgtttcaaagagaaccccttagaacttgaaccaaaaagagagaaagaatgagaaaaagggtagagttaggacatctatgggactggga

SEQ ID NO: 159028 - DNA, 900 bp, Arabidopsis thaliana landsberg
  unsure (1)..(900): unsure at all n locations
atgggtctttcaatctcattcctcagcatcatcatgatgatgtgtctactgtttccagatctcaatgtcgtagtaaaatctgctacaacggaatacacaaccttaatctacaaaggatgtgcaagacaacaattctcagatccatctggtttatactcacaagctctctctgctatgttcggctcattggtctctcagtctactaaaaccagattctacaagaccacaacaggaacaagcacaaccacaatcactggtctgttccagtgtagaggagatttaagtaaccatgactgttacaactgtgttagtcgtcttcctgttctctccgacaagctatgtggcaaaaccattgcttcaagagttcaactttccggctgttatcttctctatgaagtttctggcttttctcaaatttcaggtaaaccctttctttcttctcttccgtggcttcttcaatcgaaccggaaattcaattcctcgggttcctcgaaaccttaaccagatcacaatcaaagggttttctctggtttaattgaaccggtaatttgatttttggttttggtttagccgaaacccaaaaattcatatttttttctccagttttccggtttggtttgaattgaattggttcattcaacacctttggtcagaggtgaagtagggagctttcaatttaggtttaaaactattaaccgattttagaccggtttggttctcttacacctaaatttccggttaaattattacagggatggagaatgctgttcaagacttgtgnggaagaacaacatcgccggnaacagggttcgaagagagaagagaccnngcgtcggggggtgatgcaaaaccgcggtaatatcaggccatgggattctacgctacttacgtacgaaatct

SEQ ID NO: 159029 - DNA, 5661 bp, Arabidopsis thaliana landsberg
ttaatgatccatccatgcggtccgaacgatatccttatcacacccaagggtccgtggattcatccactggatcatcgtaggctagcccatgaaatctttcttccatcggccttaggtttgctcgcgggtccaacttccgttttgtccatcggttcccaccgtggactttcccgttggttatccgtcgagtcaccctttggtcttaccgatctctgatcggtttcaccatggctgaggagatagatacatgaaggcggccgcgatgttgatcctatatggtgaatcacgttccttacccattcttggtactttctccctttatcggtaagattgcatccatgggcgacccttgggtgtgttcggatgcacttatccttgtgcttcctagaacacttttctcgatccatcccatccgacgatcggtctgtccgacccgttccgtcagacgatcggcccgtcccatccgacccgtccgacgatcggtctgtctgatccgtctggccgatccgatccgtctgacgatcggtctggccgatctaatccaacgatcggtctaccagatccgattcgtctctaagatgaaccgtctaccctctccatcctctacactccatcgaaccgttggatcgggaggtagcatgcgcatcagttcggtcgagttatactcgccgagccgcaccccctttccgaccaacaactctaggatgtgttggaactcctttaagaatgttttatggtgttttgaatgttgtgagatgatttgagatgccttgggcgtcctcccttatataggaggcgaatggatgcttcccgaagcatcacatccggtccttgcacccttctgaaaggtcacatccgttctttgcatcctttcgaaaggtcacatctgttccttgcatcctttgggcgatgcaaccgttcgttggtacccgctcgaccttacaccttttggccgagacacctcttcacccgtgagctaccacagtccaccagctcgagtgtcagctgaccggaccacccagctgggtcagtacttgattagctcaccgagctcaatcgagctgtcggtcagctcacctagctgagctagctagtcttacagctggtttagctcacctagcttagctagctagttcatccagcttgtccagctcacctagctggttcaacttgaactttctcgttcttcctactaagtattttggtctgttcctcgaccatgatctagttttctcctaaaacaaaccggcctcttttatgaacgcgggacgcggtcgttacaaacttgtaacgcccgcgatcctcaataggatcgttggctaggacttggtgagaaggagctcgccataagctcggacaaaggggaaatcatgctggctaagctaggatcgtaaagaaatcacttgggtcagctcgcccaaagctcaagctcagctggaaggagtgacggtactcaggtcgagtgacagtccagctcgggcagctggatgagtgacggttgagctcgaggtagctggacgagtgacggacgagctcgaggtagctggacgagtgacagacgagctcgaggtaactggacgagtgacggactagctgggcggttatgggcgaagagatacaactcttcggaaatgtgcaactcttcggaagggcgcaactcttcggaaaggtgcaactcttcagaaaggtgcaaggaacggatgtgttgattcgggaagcatccattcgccccctatataagggagggcgcccaggaccattccactcaccacaacacaccgaaaacaaagaaactcaccattaaaactctctcccttttgggagaataaatagtcttaggattcggtagccgggctgtggccggcaataaagaaggagggtcggatcgacctaacctcgagaaggaaggtaagggatcctagactttgagtctaagggttctaggatgtgagttagtagtcggatccttgaaaggatcgactagagggctgggtagtatccgggtcatgtgcatcctacacaagactcggtccaggtagggatcggctgaggcggggacgcggctcggcggaggaccgacgggtcttaactgacctgccaagaatcggccggactgatgcgcgatcttcccctctctgaattctctccacgtatccgagtagtgtatggcatatagagcattgcatggacttgcatatgattaagtaaatgagattacttatggctctatgactttcaggaacaaatggtgatcgtgggaaggacttggcttaagcgcgagagactcaaggccgggctgatgggtggtgatagttcggatagtctagggatcgattatatgacttgtaatagcttatatgcaaactcataggttgtatcgaatcctttgcttaatcaataaagtatccgattgtttgtttactctattcgtctcatatattgaatcacggaatcatatggaacggattagactaggaaagaacctcataaacggttaaggccgagtcacttagtggcttgggtcgagagaactcgttcggactttaggcagtccggatcggagcctttcaagttggtatcagagcatgcttggttctaggactaggtgttgggttaaggggtatcaccactcgtcggcttgagaatctcgtagtagttgctctttactcttttgcgattttactaggagttatgtggaataactttggaggtttcgcagatgggtaagagcagcaaaacgggaaagaataaaaaggacaagggcattgtcgaggagactttggttgaggaggaaacgatgatcaacgagaaaaccagagtcgggacgatgctcgatgggacagactcggccggacctgaggccgggaagaagtccataaatgaggaagcaccggagagtagcggtgcaagggacagcacggataaccggaacaatactccaacggcccaagaacagtgggatttgatgaaaggaatgatgacgtaactagccacattaaccaaggccgttgtagcagatccggtggtccaaagagtgtataaccaaaaggacgatgactcggaagttgtggaagtgaatccgcaaccgaatcatgggcggaaaaggggagactatctgagtcttctagaacatgtctcaaggctggacacgagacacttcatgggcagtacggaccctattgtggtcgatgagtggaggagtagactcaagaggaacttcatgtctacccgctgccctgaggattaccaaagggacattgcggtccacttacttgaaggagacgcccatatctggtggttaaccgtcgagaaacgcagaggggacgaggtccggtcctttgcggatttcgaagacaagtttaacaagaagtactttccaccggaggcttgggataggcttgaatgtgcgtacctcgacctagttcaagggaaccgcacggtgcgtgaatatgatgaggaatttaaccgcctaaggcgttatgtgggacgtgaacttgaggaggaacaagctcaagtgcgccgatttatccgtggactaaggatagagatccgcaaccattgtttggtccggacattcaactcggtttccgaattggttgaaagggcagcaatgattgaggaagggatcgaggaggagaggtacttgaaccgggagaaagcaccgatccggaacaatcaatccaccaaacccgcggataagaaaaggaaatttgacaaggtggataacactaagtccgatgctaagaccggggaatgcgtgacctgtggtaagagccacagcggaacttgctggaaggccataggtgcatgtggccggtgtggaagcaaggaccatgcgatccaaagttgcccgagaatggaaccagggcagtccaaggttctcggtgaagagacaaggacttgtttctattgcggaaagactggacatctaaagcgagagtgccctaagttgactgcggagaagcaggccggacaaagggacaatcgcgggggaaatggactgccgcctcccccaaagcggcaagccgtggcaccgcgagtttatgagttgtcggaggaagctaacgatgccggaaacttcagggcgatcactggtacgttcttacaactccctattcattatttcaataactgcatttgcattgcatcatgcatacgggaaaggggaggtactcagcattctaagggaatgtgtagggaccttgagagtaggtgacgtagtaacgcacactctatttgattctggggctacacattgttttgttagtccggaattggttgaaacaggtgggttcaggaaagaaccaaacaccgattatggaatggtacgagcggccggcggacaggcaatgtatccgaccggacttgttcggggcatctcggttgtagtgaacggtgtcaatatgcccgcggacctaatcattgttccactaaagaaacatgatgttatcttagggatggactggttggggaagtacaaggctcacatagattgtcaccgaggacggatacaattcgagagggacgagggtatgttaaaattccaaggaataagaacaacctcgggaagcttggtaatctcggcaatccaggctgaaaggatgctcgggaaaggatgtgaggcatatttagccacgatcacaaccaaggaagtgggggcgagtgcggagttgaaagacattccgatcgtcaacgagttctcggacgtgtttgcggccgttagtggtgtaccaccggaccggtcagacccgttcacgatagaactcgagcccgggacaacccccatatctaaagctccgtaccggatggcaccggcggaaatggcggagctaaagaaacagttggaggagttgttggataaaggattcatcaggccgagtagctcaccatggggtgcgccggttctgtttgtgaaaaagaaagatggtagctttaggctatgcatcgattatcggggattgaataaagttacggtgaaaaacaaatatcctttaccccggatagatgagttgatggatcaacttggaggtgcacagtggttttcaaaaatcgacttggcctcaggatatcaccaaattcccatagagccaacggacgtgaggaaaacggctttccggacaaggtacggccactttgagtttgtggtcatgccattcggattgaccaatgcaccagcagccttcatgaaaatgatgaatggggtgttccgggatttcttagacgagtttgttatcatcttcattgacgatatccttgtttactcgaaatcttgggaagctcaccaagaacatctaagggcggtgctggaacggctaagggaacatgagctatttgcgaagctaagtaaatgctcattttgacaaagaagcgttggttttcttggtcatgttatctcggaccaaggagtatcggttgatccggagaaaatacggtcgataaaggagtggccacgaccaaggaatgccaccgagattaggagttttctcggactagcggggtattaccgaaggttcgtaaggagttttgcgagcatggcccaacccttgtctcgactgaccggaaaagacaccgcattcaactggtcggatgaatgcgagaaaagcttcctggagttaaaggccatgttgactaatgcaccagtattggtcttaccggaggaag

SEQ ID NO: 159030 - DNA, 1789 bp, Arabidopsis thaliana landsberg
  unsure (1)..(1789): unsure at all n locations
tgtgaatggcatatgtaccaattctgctagtgggatcgcgtagacatgcacatgcaaaggaggtttccaggggtatccatatcttcaaactggatgtcaaggaacttcacaacatgttttctttcaatcacttcagttaagtgttttcctcatacatatctggttggatcttgagtcttttatattaacgtgggccagacatcaatgagtgtactcctgataatcctatccataaacataactgctcgggtgacagcacctgtgaaaacaagttgggacacttccgttgtaattgtcgatctcgttacgaattaaataccaccactaatacctgcaaacctaaaggcaatcctgaatacgttgaatggactacaattgttcttggtaagcacctctctcactgattctctattctttcttttctgaaacaacttactctaatcattgtgatataaccaggaaccactatcggcttcttggtcattctgcttgccattagctgtatagaacataaaatgaagaacaccaaggacaccgagctccgacaacaattcttcgagcaaaatggtggcggcatgttgatgcagcgactctcaggagcagggccatcaaatgtggatgtcaaaatattaactgaagaaggcatgaaggaagcaactgatggttatgatgagacaagaatcttgggccagggaggacaaggaacagtctacaaagggatattgccagataactccacagttgctataaaaaaagctcggcttggagaccgtagccaagtagagcagttcatcaacgaagtgctagtgctttcacaaataaaccacaggaacgtggtcaaactcttgggctgttgtctagagactgaagttcccttgttggtctatgagttcatttccagtggcactctttttgatcacttgcacggttctatgtttgattcttcgctcacatgggaacaccgtctgaggatagccatagaagtcgctggaactcttgcatatcttcactcctctgcttctattccaatcatccaccgagatgtcaagactgctaacattctcctcgatgaaaacttaactgcaaaagtagctgactttggtgcatcaaggctgatacccatggaccaagagcagctcacaactatggttcaaggaactcttggctatttagacccagaatactacaacacagggcttctgaacgaaaagagcgatgtttatagctttggggtagtcctcatggannnnnnnnnnnnnnnnnnnnnnntatgctttgaacggccacaaagctcaaaacatctagtgagttactttgtttctgccatgaaagagaataggttgcatgagattattgacgattaagtgtttaacgaggacaatcagaaggaaatcgaggaagctgcaagaattgctgttgaatgtacaagactgatgggaaaagaaaggccaaggatgaaagaagtagctgtagagctagaaactttgagcgtcaaaacaaccaaacataattggtcggatcagtatcgagaggagaattcacacttgcttggtagcaacatcgtgtcttcccaaggcgataccaatagccgtggttatgacagcgtcaagaatgtagcaatattggacattgaagctggccgctgatattacaaattcacatgtatttcttttgtttgtaagaaaaaaaaaactacctctttgttgcttcattaataatgctttgcttcattaataatgatttgaaagaatttttataaatcatcaataaccatgtttgtaattcccat

SEQ ID NO: 159031 - DNA, 1708 bp, Arabidopsis thaliana landsberg
gacattatgagccgagaggataatcaggctggtgagtcggaggaagtgattaaagagttaagagatgttggacaacagttggctctggcgtttaatccggaggggtctgttcttgctgctggtgcggaggtaaaaaaaggatctttgatgcaatctctttttaataacagagacataaaacgtttagtggttcttatgcattttgttttgatgcagtataggatgggactttgagggtttttaaatggcctagcatgaatactttacttaatgagtcccaggctcattcttcagttaaatgccttactttcaggtttgctttctcttatcaaataagggaaatacttgctatccgaaaagtggttcattctcttggatgacaaaggaatcatctttgaacagtgattgtaaacagatatcctgataatgataattttcgtctgcagcgaaagtggtcaatttcttgtatctcttggcggtccagtttgtcgagtttgggacgtgaatgcttctgctgctgttgccagtctatcaaaagagaaggtcagttggaattggctcttagtgtcttttcaactttacatacacacttccaacattattgtattggatctgatgagtttgaatattgaatgaaggacgagatgtttgcctcctgtagattctctgtagacaattcaggcaatgaagttctttacattgttgtaaacactggtaactcatatttattctcgcgagtgcaagaacataagaaccctttttgtctcagccaacaattgagagatttgatttgttttgtgtagaacgtggtgggagtattataacatgggatacaacatcatggagaagaagaagttcaaagcttattaaaagaaacaactctatatctgcctttaatgtctcagctgatgggaagcttcttgcagtgtaagtttatctttcttctcacttatggggccaaacagaaatactatattttgttttcatgtttttttcttaatgcagaggaaccctcgaaggagatgttttaataattgattcgacaaagatgcaaactaaccaaatcgtcaagaaagctcatctcggtttggtcaccgcactgactttctcccctgattcaaggttttttctctactcctttaccgattcaatgatgccaaacaaacaaacagatacgaatctgaaggaagaaaagatgaaaccattcaaaagtgttactttgggtttggttttgcaggtgcttagtgtcagtatcttttgactcaagagcaaggctaaccgtgatcaaacaaaagggtgaaaaacgtatgtacatttacggtttctcctattatctttccattttaagaacagggtctccataacctaatactctggtttttctacgatgaaattgcagggcgagtatatctgtgggtggcggcattgttgtttgtgttggtatacgtggttttgtattatttgatggtggcaatggggatcatacattagacatacgtaaagaaagcctctaagtaaatccacacgacaatacatggaatggcttgaagaaaccaacatacagatttataccctcgttaagttttcttagactttgtgttttgagtaggtcgtagagattcttcacagaaactttcatgcttttattagtttacatcatatattcatattctcgtttctatcttttagtattaccacaatgaaagtt

SEQ ID NO: 159032 - DNA, 2006 bp, Arabidopsis thaliana landsberg
gacaggagcaagattttgctggagattaacaatgcggcgaatctcatgtggtttgatttggaaagtcagagtcttacaactgccggaatagagtgtgatagttcatttaccgcagacatcctcgtgagtagccttgttttgggatgtaaaggagatcctacccaagctcagcgcaggaaagatcaaatggtgcagaagggtaacaaaaggtgaaatgctcatctctagccggtgctgtcttactcgttatgtttccttagaattctagaaatggataataaggcaaatttaggtatctttattctttgagaagttgctaaatgtatcaacatgcttatgttacaatctcagggatggttttctgtccaagggattcaagctgaagctatgagcaaagcaagggaatcttctgagcccaaacattagattaaggtaagtgaaatggatctaaagatcttgagtatttccttaagttggcatcttcttttctttcgatgtgagatttccaatcttatcatagttacattattggatgtcttaggaagtggaaattgagtcacatcatagtttaacataaacaagcttaggagcttcatctaaaatctgactatttcaagtgtttttgagtttgaaacatgtagaagcaaatcttgatctgtgtttgatttcaggtacagtaacagtagcagtcgcagggggaaaggatatggcaaaatcctaaacccatatgagatcttagtactaataagcttaacctatgtacgtagtatgatgtcgtaaggaaataaaaagatagtgttcttctatatgtaatcgactgaaatttatatgtaaaactcttatcagtatggtcttttgcaatttgatatgacttgaaactattaatctcaatcaaaagtaaatctggttgcaaatattgttgatgaagaggatttactagagtctagagaacacaatgttatgacgtaaatcgtctatagctaaaagagatgtcaaatactccaaattggaccaacataaaccgaactaaaccgaaataattgaataagacagaaataaccgacaaccaagatcggtgtggacccaaattcaccaatccgaatcaaccgaaacccggaaacccgacccgagtcatgtttctatatatagataccttcttcttttttgggttaaggacagatttgtaaacattctcaaatccttcaaaaaccctaatttctttctgtgaggttattgagaacgaagaagatgacgggagaggtagtgaaccctaaggcgtatccgttagcagattctcagctttcgataacaataatggatcttgttcaacaagctactaactacaagcagcttaagaagggagctaatgaagctaccaaaacattgaaccgtggaatctctgagttcgttgttatggctgctgatgctgaaccacttgagattcttcttcatcttcctttgcttgccgaagataaggttaccatctctttctctctctcgatgatttggttgcaattttaattcaactcgtgtagattagagagctattaggttgcaatttttgaggctctgtatcgttaggttagtgtttctcagattttggtggttgttagaagcttaagaagccattcttagctttatgcaattttgtgttgaacatacttttctctgttgttttctttcaggaaactttctctgtttactctcttttggtcttcaattgaatcattgtatctatgtagttattggggtatgcttcaaatttactcttgaggaagacatgattcatcatagctatagtttctcctagtttatgtatgtttaaaaattgtagctttgagttcactcttgaggaagacatgattcatcatagctatagtttatcctatttgaacaagcttcattactatacaagcaattattacgtggtctgataatgaactaacgcttttttgtactctccatctaaatgcagaatgtgccatatgtgtttgtaccttcgaaac

SEQ ID NO: 159033 - DNA, 2155 bp, Arabidopsis thaliana landsberg
tttagttctatgctgtgaaagattttgtgatgggtctaattctagaaagttctgttgatattagtaatttgctcacttgaatctggtttttttaatcctgtaccaaaagcttggttttggtcgttgaaaagagaagactttgcagttgggtagaatgtagattgcttgtagtgagtgttacttctctgaacttttgtgatcggtctttcattgcagacaactgctttggttttttgttcaaatcctgcagctctacctgctaaaactaatggatatatacgcgttgattgctatggcggcctgaatcagatgagacgcgatgtaagttttaaacaaaagatcgaccatttcatgaatcagtgcacatgttattcatcaggacttcaacttgtattatatctgccttaggaagtaaatcatatgatgatgtgatgctgcttgcagttgtgtgatggagttgggattgcccgtttgttgaatgctacacttgttctgccaaagtttgaggtagctgcctattggaatgagtcaaggtactcctactttctcttgaaacttagataacacaattccaagcgtgtgcttcgttaaattaatcaaggaagagactaatcagtgatatttgttgatgcagtggatctgcagatgtgtttgatgtagactactttattcaaaagatgagtggttatatcgaagttgttaaagaattgccaaaagatattgcatcaaaagaaccattcaaagtagactgcagcaaaaggaagggtcaatttgattacattgaaagtgttcttccactgttgttggaacatcattacatttcttttacaccagcaatgagccaacgcagggacaggtgccattctaatagactataaaagcctttgtctgtagttgttatttctaaaatatttcaagtatcttactcttctacgttgataaaatacattttcaggtatcccgaatatgcaagagccactctgtgtcaagcctgttattcggctatacaccttactagttccttggagaagaaggccgtcgagctttttgatgctattcccaaacccttcttgtcgcttcacctcagatttgaacctgacatggtagcgcacagccaatgtgaatacccaaacctctctcctacatctatcgctgccattgaagctgctcgtgctgataggaagccatggactggagaactagctcagacatggagacagcgaggcaaatgccctctgactcctaatgaaacagtgttgatgcttcagtcacttaacatcccatcaagcacaaacatatacttagcagctggagacggtctaatggagatggaaggattcacatccgtttatacaaatgtgttcacaaagtctgttctacttaaccaagaggatttcaccagaatgcatggaaacacaaaagctgcattggattatcacgtgtccatcaatagtgacgcatatgtggctacgtactttggaaacatggataaaatagttgcagctatgcgaacatataaacagatgcataatacactgttcctgagcagaaaagcatttgcggagctcacttctcagggtcttgaaggtgcagagttgaagaaagctctctgggaagttcataaaagcgattttgccattggcagaggatttgctttgcccgactgcttctgtgaatttgagctgtaatgctgtttcttttcttaccacattcttgagctgacacaacttttgtaatgacaaaaatttgttcatgtactatggcattttgagagtcgatgagacgctcctgtctggaaatacaagaaactagtatacattctgaaatcagtttcttgtctttattcagcagcaaatcatctgtctttatcttacggagattctacagttctccggttctttggtgtcagctttttcaaccattgcatgcaaaatagttgaagcctcgcatatcactggttgaggtaagtgttgctctaaaacctgcgaatgcttagcagctacttcaagacccttctcacgcagatagcagaagtccatgttcctccattgctttgagttcccaaccacacaaaaaccatgtaaaatagcagcaaatgaaacaggatcaggaaagaagcctttcttcaccatcttatcctgaaacatgcatgcgg

SEQ ID NO: 159034 - DNA, 1226 bp, Arabidopsis thaliana landsberg
  unsure (1)..(1226): unsure at all n locations
tttaatcgagtaggtgggtttagattattcaaacttcaaaggcaaaaccaaatgagcttcgtgtggtccgctgcggtgtgggtcatagctgtagccgctgttgtgatnnnnnnnnnnnnnnnnnnnnnnnnnnnnnnnnnnnnnnnnnnnnagttaccaccgggatcaatgggtttaccgatcatcggagagacatgcgacttctttgagccccatggattatacgagatctcaccctttgtcaagaagaggatgttaaagtcagatatcaatctctttctttctttatcattctttatataacgaatggataccttgtataataaagtcaatatttcaggtacgggccattgtttcggacaaatattttcggatctaacaccgtggttttgacagaacctgatatcatcttcgaagtttttcggcaagagaacaagtcttttgtgtttagctatccagaagcttttgtcaagccatttggaaaagaaaacgtgttcctcaaacatggaaacatccacaagcacgtcaagcaaatcagtcttcaacatcttggctctgaggctttaaaaaaaaagatgataggagaaatagacagagttacctatgagcatcttagatcgaaggctaaccagggtagcttcgatgctaaggaggcagttgaaagtgtacttacataatttcttaatatcttttttgatattattggttgatactagttgctaattctcaatactcacaaccattaacgtttctgtgcaggttataatggcgcacttgaccccaaagataataagtaacctcaaaccagaaacacaagcaactcttgtggacaatataatggccctaggatctgaatggtttcagtcacccttgaagcttacgactttgatttctatctacaaagtctttattgtgagttctttaaatagtttctatgggtttatattatttagatttactgtatgctacacatgataatgttctctcaatggcttccatctaggcacgtagatacgccctccaggtgataaaggacgttttcacgaggaggaaagcgtccagagaaatgtgcggagacttcctcgacacaatggtagaagagggggagaaagaagacgtcatttttaatgaagaaagtgctataaatatcctactngctattttggtcgtcgctaaagaatctaccaatccgttctagctggccatcccctttcttgccgaaaccc

SEQ ID NO: 159035 - DNA, 1027 bp, Arabidopsis thaliana landsberg
acggtgatgaaagggtttggacaagcttttgtggtttcagaagatcagaaactcgactgggcagatttattcttccttataatgcaacctgttcaattacgcaagcctcacttgttccccaagctacctcttccctttaggttttgcatgcatcaaaaaaagtgttaacattctcaactaacaccacaaagtctctctatttacattttggttaatgtttttcagggatacgttagatatgtattccactcgagtaaagagtatagctaagatcttactagcgaaaatggcgaaagccttgcagatcaagccagaggaggtagaagaaatatttggtgatgatatgatgcagagtatgaggatgaactactatcccccgtgtccacaacctaatctggttacgggtctaattccgcattccgatgcagtcgggctcaccatactttcccacctgaatgaagttgacggtctccaaatcaaaaaaaatggcaagtggttttttgtcaaacctctccaaaatgctttcattgtcaatgttggggacgtgttagaggtaagccatactatatagatgttttgatgaatttggtcgggctaaaccctgatagactttatggcagctaatcgctagtcataaatattttgatgatgggtgttgggccgtttgtaatgcagatcataacgaacgggacataccgaagcatcgagcaccgggcaatggtgaacttggagaaagagaggctataaattgcgacatttcacaacacgggaatggataacagaaattggtccgtcgaaaagccttgttcaaagacaagaggctgcaaagtttataagcctgaaaactaaagactacttgaatggcttgttttcccgtgaactcaaaggaaaggcttatcttgactgctatgagaattcaaggtaagtgatatcttgtttcccaagagattctgttttctccaactggtcactgtcgtgttcatattctgtttttccttctctcttatgtctttggttcaaatctgtt

SEQ ID NO: 159036 - DNA, 2059 bp, Arabidopsis thaliana landsberg
  unsure (1)..(2059): unsure at all n locations
acttttggctatgcagatataaacacatcaagtcctttgtcaataggacaaactctgagttcccctgatggagtttatgagctaggcttcttcagtcctaataattctcggaaacagtatgttgggatctggttcaagaacatcgctcctcaagtggttgtctgggtggctaacagagataagccagtcacaaaaactgcggcgaatctaactattagcagcaatgggagtctgatcttgcttgatggtacgcaagatgttatttggtcaacaggagaggctttcacatccaacaagtgtcatgctgagcttttagacaccggaaatcttgttgtaattgatgatgtttccggaaaaactttatggaaaagcttcgagaatcttggtaatactatgctgcctcagtcttctgtgatgtatgatattccccgtggaaagaatcgtgtgttgactacatggaaaagtaacagcgatccttcgcctggggagttctcactggagattacaccacaaatccccacacaaggccttataagaagaggctcagtaccttactggagatgtggtccttgggcaaaaacaagattctctgggatatctggaattgatgcatcatatgtaagtccattcagcgttgtccaggatacagcagccggcacaggatctttctcttattccacattaagaaactataatctctcatatgttacgctaacaccagaagggaaaatgaagatcctctgggatgatggaaataattggaagcttcacttgtctctcccagagaacccatgtgatctatatggtagatgcgggccttatggtttgtgtgtgagatctgatcccccaaagtgtgaatgcttgaaagggtttgtaccaaagtctgatgaggagtggggaaaaggaaactggacaagtgggtgtgtgagacgtacaaaattatcttgccaagcaaaatcttgtatgaaaacacaaggcaaagacgcagacatcttctatcgtatggcagatgtaaagactccggatctgctccaatttgcaagctttctcaatgccgaacagtgctatcaaggttgtctaggcaactgttcttgcacagccttcgcctatattagtggaattggatgtttggtatggaatggggagctagcagacaccgttcaatttttgtctagcggagagtttctcttcattcgtcttgcaagttcagaactgggtagggctgaaagacattatcccataaagacacatcatttttgtttacgtatttatttcaactgcagtgtggtctcaacttgttgaaattttgttttgtggtaaatctctcagctggaaacaggaggaccaagattattgttggtagtatcagcctttccatttttgtgattttggcctttggctcatataagtactggagatacagagcaaaacaaaatggtgagacaccgaataacatagtagtgctctttcttttcttgtgatttgttgttatctctatatcgtgatcaaatctacacataaacctgcatctgctcataaagactatggttgcccttttcttttagcttatagaagtttctgtattgcatatatatatttaagagaagcttgtctatttgagcttaagcttgttatacttcttcaaatcatatactaattcacagacatttgtgacttgttgggccaacttgggcattcttcaacaattcacaagattcatggaaaaatggtttggaaccacaagnnnnnnnnnnnnnnnnnnnnnnnnnnnnnnnnnnnnnnnnnnnnnnnnnnaataacttcaatgtctcaaacaaactcggtcaaggtggatttggtccagtttataaggtaaaagagaatttggttttctttgcccttctctgtcattctttgtagtttgttctgtggatgactgtttgcaactctgcttctagggaacactgtcagacaagaaggatatagccgttaaacgcctttctagcagctctgggcagggtacagaagagttcatgaacgaaataaaactcatctcaaaatggcaacacggaaaaatggt

SEQ ID NO: 159037 - DNA, 552 bp, Arabidopsis thaliana landsberg
  unsure (1)..(552): unsure at all n locations
tattgttattaacgaatttatagaaaatattgattactggtataatcattatggtagcatattccaaatanaatccgattcaatatattttgctccatttagtaagtgtcaagtatattttacttaaccaccaaaagatttatgacctaatggatgacgcctatatataatctttaccattgcttctcatctcattgttaaacacactatagcaactaaaaactaaaactttccaaacgttgatttgtcttcaaatgtaagctatcaatacggtaaataaattggataggggtttaagctttttgacggaaaaatctcggatttacgtttttggcgaaaaataacggatttacgtttttggcgggaaaatctcggatttacgtttttggcgggaaaatcacgggtttacgtttttggcggaaaaatcacgggtttacgtttttgacgaaaaaatcatgggtttatgttttgggcgaaaccataacggatttacgtttttggcgggaaaattaaaggtttacatttttggcgggaaaatcacgggtttacgtt

SEQ ID NO: 159038 - DNA, 1460 bp, Arabidopsis thaliana landsberg
  unsure (1)..(1460): unsure at all n locations
gataggcataaaggatatagacgtgatgtgtttgtggatgttgcaggtctgtaatataccctacagggaaacctttctttcgtatttcgtatttcggtatgttatgatgtattgatatgcagatttgtggaactttactatttttcaggtgaagtggacaggagaattgcatttggacagttgaaaaggtttgcatggagagagctccagttagcgacagataacttcagcgaaaagaatgtacttggtcaaggaggctttgggaaagtttacaaaggagtgctttcggataacaccaaagttgctgtgaagagannnnnnnnnnnnnnnnnnnnnnnnnnnnnnnnnnctttccaaagggaagtagagatgataagtgtagctgttcataggaatctactccgtcttatcgggttctgcaccacacaaacagaacgccttttggtttatcccttcatgcagaatctaagtcttgcacatcgtctgagagagatcaaagcaggcgacccggttctagattgggagacgaggaaacggattgccttaggagcagcgcgtggttttgagtatcttcatgaacattgcaatccgaagatcatacatcgtgatgtgaaagcagctaatgtgttactagatgaagattttgaagcagtggttggtgattttggtttagccaagctagtagatgttagaaggactaatgtgactactcaagttcgaggaacaatgggtcacattgcaccagaatatttatcaacagggaaatcatcagagagaaccgatgttttcgggtatggaattatgcttcttgagcttgttacaggacaacgcgcaatagacttttcacgtttggaggaagaagatgatgtcttgttacttgaccacgtatgtataatcaaataatcctacctcaaagtagcttctctcaagctttattgaccataatcttttggatcttttttttgttttggacaggtgaagaaactggaaagagagaagagattaggagcaatcgtagataagaatttggatggagagtatataaaagaagaagtagagatgatgatacaagtggctttgctttgtacacaaggttcaccagaagaccgaccagtgatgtctgaagttgtgaggatgttagaaggagaagggcttgcggagagatgggaagagtggcaaaacgtggaagtcacgagacgtcatgagtttgaacggttgcagaggagatttgattggggtgaagattctatgcataaccaagatgccattgaattatctggtggaagatgaccaaaaacatcaaaccttgagtttactgtaaagttgccaacttcacttttttgttttgttcttcggtgaagaagtaaaatcagttgtataaatcttgtttttgtttcatgatgtatcttttgactttaataaattctgtgaatgaaaagaactatgatgttttgttgact

SEQ ID NO: 159039 - DNA, 1290 bp, Arabidopsis thaliana landsberg; identical to SEQ ID NO: 17971
  unsure (1)..(1290): unsure at all n locations

SEQ ID NO: 159040 - DNA, 924 bp, Arabidopsis thaliana landsberg
ttcttatcagttcatgatttgcctgtaagttcacattggttaaactaaaagattgataatgtttttagccattcatcatcaaaaagtctcattttttcgcttcttgatttgtgattcttcttgtagagtggcaaaggttggatattgcagttgttggctgtggcttgtttatcattggcagccaaaattgaagaaactgaagttccaatgttgatagatcttcaggttctcctctaaactcgttaaattgtcgagatgttctattcgacccgacaatgtcttgaatcgattgcggtttgatcacatttcggaacaggttggagatcctcagtttgtgtttgaggctaaatcagtccaaagaatggagcttttggtgttgaacagattgaaatggagattgagagcaataactccatgctcatacataagatatttcttgagaaagatgagtaaatgtgatcaagaaccatccaacacattgatatctagatcattacaagtgatagccagcacaaccaaaggtgaaaaaaaaagtctttcctttatgttttattttcttgaccacttttgtttttgtgcttttttgggttttgttgtttttttcacttttgctttttatgattttggattaaaatggtggttgtgtcgagtgagcaggtattgactttttggagtttagaccttctgaagttgctgctgctgtggcactttctgtttctggagaattgcagagagtacactttgacaactcttccttctctcctcttttctcactacttcaaaaggtaaaaaacaatccaccaaacatctcaaactcataaatctattgttttttaataccaaacacacacacacatataaagcagcctttggtggttcaatttcaaggaaatgccagttgtggagaagtttgaactcattaaa

SEQ ID NO: 159041 - DNA, 2230 bp, Arabidopsis thaliana landsberg
  unsure (1)..(2230): unsure at all n locations
gatgaatggcaaaagcttcctctattcgccaattcgtcacatcccacatcatcgtccccggaacgggtctgcttaagggtttcaaacttgtcgaagattccaactctattacacaccttcttccaagtccacgcgaagctaatcacctccggtaacttctgggattcatcttgggctatcagattgttgaagtcttcttcgcgttttggtgattctagctacaccgtttcgatataccgcagcattggcaagctttactgcgcaaatcccgtctttaaggcttatttggtctcgtcttctccgaaacaagcgttggggttttacttcgatatactaagatttggttttgttcctgattcatacaccttcgtttcgttgattagttgtattgagaagacttgttgcgttgattctggtaaaatgtgtcatgggcaagccattaagcatggatgcgatcaagttttgcctgttcaaaattcgttaatgcatatgtatacttgttgtggtgctttggatcttgcaaagaagctgtttgttgaaattcctaagagagatattgtgtcctggaactctataatagctgggatggnnnnnnnnnnnnnnnnnnnnnnnnnnnacaagttgttcgatgaaatgcctgacaaaaacattatttcttggaatatcatgattagtgcttatttgggtgcgaataatcctggagtttccattagtttgttccgtgagatggtcagagcagggttccaaggaaatgagagtacgttggttttgttgttgaatgcttgtggtagatcagctagattgaaggaaggtaggtcggttcatgcttctttgataagaacctttctgaattcgagtgtagttattgatacagctcttattgacatgtatggaaagtgcaaggaagtaggtttagcacgtaggatattcgatagtctatctattagaaacaaagttacttggaatgtgatgattttggcacattgtcttcacgggcgtcctgaaggtgggctcgagttatttgaagccatgatcaatggtatgcttagacccgatgaagtgacatttgttggtgttctctgcagttgtgctagagctgggcttgtttctcaaggacaaagttactattctctgatggttgatgagttccagatcaaacccaactttggacaccaatggtgcatggctaatctttactccagcgccgggttccctgaagaagcagaggaagctctgaagaatctgccagacgaagatgtgacaccagaatctacaaagtgggcaaacttgctcagctcgtcgcgttttacaggaaacccgactctaggggagagcattgccaagtccctgatagagacagatcctttgaactacaagtattaccatttgctgatgaatatttacagtgttacgggacggtgggaggatgttaatagagtgagagagatggtgaaggagaggaaaataggacgaatacccgggtgtggccttgtggacttgaaggagatagtccatggccttagactaggatgcaaagaagcagaaaaggtgttcactgagactagtttagaaaaatgctacagtgattcaccgtcataataaagttaaatccccaagttaaaagcatacggttgctcttttaccagatccagggtatggaaagtcataaatggaagctgtgtccatgagtttggtctgtttttgcagacaaagagtagtaaaatccttgtttagaatggaaagaagagaagttaatagtctctcaaaatgtacttgatcctgtttcatttttgttctttttggggtcagatttgtcaattctttaatttgagaaaggcttttacacaatcaatgtgaggaaaaagggtaaatcaaattctaaatcatgtgatgtatttacgaaatttaaattaccagcttactcaaaagtcaaaattgaagttgtgagagataagactaatgtagcctaatgagttatgtcaccatgtaatttaaagttaaagctgataatgaagaaagaacaaatttaaatgaggagagtttcaatacgcgaagatctcagaaaattcggtcaaaattgagacttctctctgtagagtaaagtagtgaggaacatagaatgatcgccgacgacgatgagaagtggcccgcccccgcaatcgccgccgttaagcaaaataactttaaatatgcagcgcgctatcgtaccactccttcccctctccggtct

SEQ ID NO: 159042 - DNA, 3138 bp, Arabidopsis thaliana landsberg
ttacctgtatacgaccaccctcctctaccacaaggtcgagtacattcatcaccttcactcgttcactttaccaccaagccgagtaccatcatctgtattgggagacttcatatttgactgcaagcttcagagtcttcttcattccgcactcaaccagacactcgagcacaagaaagaaaagaagactccagcttatcactcgacctctcactcgaccacctgggtcgagtacagttcttaatccgccccaatactgcgtcgttttgagtattaaggttttggaatattttgctataagtagcatgtactttacattttcgagaacaagtttttatctaagttttattccgcagacactgtgttcttgaccttttataattcggatttctctttatctattcagtattcagtattcagtatttgttcttgaattcgtttactgttgttcatcctgttaccatcctgctattactctgttgatatcatgttttcatcctgctatgacgtctgagtagtgactaggtttctgaggatgggtgttggagctggattcccctccaggaatccacctgcaaaaataccaagccagcccacaaagcccaccaagcccaccaagtagaggacctacgcagctgatgagcccacatacgcgaatgggtacttgggccagataagcccggtcacttgatgaagggagataagcgaataacaacctaggaactgatgaggagatattcgcggagcggacctgatatctcggaactgacctgccgaatattcaggagaatctccgcagatcccggacggagctaccacgtgcgtagacctatataagggagcaaggacgacttggaagagacattcaatccagctttacattcacgcacatacttttacacttgtaatctcctttcacattgtaaaagctttgtcacaatcaatacaaaaagtccattcgttcttaacagtataactctcaaggtttccgtgaagatctagccctcatttctcataatctcaattacaaatctgtagtgtggatttcagaacccacaagcctctccaagcttcggtctacacaatgacctttaaaactatatatatgacctaaaacacgtgatgggccttctttagaaataagggaaagttctgggccgaatttgaaaattttcaatacatcaataagttgcgtcttcgtattggagtcactcgacaccagcggtggtgtcgttcgacaccgatgcggtttttagtctctagatttcttgagctgcataaattctctgttttcctccagaatgctccattatctccaaatgaatctcaaacatgtaataaccttaaaaagactagaaaggactctagaaataacaaatagactctaaaacatatacctaaaacatagttaaaaccggtaaaaatagggatatatcaactcccccagacttagcttttggttgccatcaagcaaaacacaaaagccaaacccgtggaagaggttttgaaaacaaaggaactcccaacattctctagtctattgcaatgatcatcctaaccaaatccatatgcctagcaagtctaattaaatcctaaccaacatgtacttctctacaatcttacacaacatcctagattcaatacctatattccacaactatatccaccaggctttcatcgctgggtctcatcaaacaagctatcattcaatatccttctagactcattcctgtactataccataataaattgaccatttttttatatatatttttttctttggtgttctttctcttcccagatttattctttttagagagtaaataaaggggaactcgcatactggatcgacaccctcagcatttttccaacctttgtaattgatcattccaaataatgtgtgaataagtgacccaaatgcaaattatccttaagtataggaagcctctgttcaagaaagaaggtcttcggttttgggttagtcaaagcttaacacgtgagggcacacatgtgaacgactaaagagattggctagactgcttattggctttggtagattgttacttaaaccctgctctgctatgtttcatgaacgagagttgagattaggaagtgttagagttatgggggtctctttcacgagagtggattgacccgatttttgaatctatcgtctaaggtatctgtcttttgcctgttatccaccttatgaactttagagttgcccttatcaatgaatccatccttaggacttctattcttcttagatttatttgtattcaccccctgattgcacttttatttacttgttatttgagccacctgttagttttattttagttcttaaaattgttacctgttggttctactcgacccaatgatcgagtagggctcttaagttctcatttttgttgtttgaatcctgacctaggattgttactagaaaccagccatcattataatctagcttgacttagttgcttctatacacatcttgattggtagcaataacagtggacaggattaacacaccctatagctggactgaacctcacttcagcacataagtaggcttaaaaaacctacttatcaatactttccatgataacaactatggaattttattttgatctctcaacggatttgttcttgaaatcttggttaaacgttttcttactgttgttttgtctttcaaatacagtgaattacgttgaattcaatcctataaataagaacttcttaagtggatctatcgatggaaaagcttgaatatgggatttggcagaagaaagagtcgtcgcttggaccgatgttcatgattacatttctgcaatgtaaatttgacattatgtctcttttactaaaatgatcattatggtctctgtctctcagatgtcttaagaactcaactttgctttgtttttgcttatgggtttgttgttggtggcatcactgggaattgtaggttctaccaaatttctggtaacgatgtggtaatggatgaacaaattcttatccggggacggcatagaatcaccgctgtggagttttgtcatggaagctcggataaaattttagtatcttttgatgattccaaacctcgtgtatttgataaaacacaaataattcaaaaattcaaag

SEQ ID NO: 159043 - DNA, 1285 bp, Arabidopsis thaliana landsberg
aacgtataacaaaaatagaacatcatggttatgtacaaagaggtatgtcttaatctttctcttttttcaattacgagttagctcttttgtcatgcaaagctctttgctttgtatctaaaaacgaagattcatgatacaattattgttttaagcttatataaaaatttggggtttcgtttgtcgttgtttaggattatgtttcgaactcacgagggatacaacttttcacgtgttcatggaaacaagaggagcagcaagaaccaaaggctttaatctttctctgtcatggctacgccatggaatcaagcatcaccatgagcagttccgtcttttaaaatcatgattatgatataatcgtcaatatatatacattcatgattacattttaattgatattaaaacatattcatcaggcgcagccacgaggttagccaatgccggttttgccgtatatggaatggactatgaaggacatggaaaatctgagggtctaaatggttacatcagtaactttgatgatctcgttgatgatgtctctaatcattattctacaatttgtggtaattctcttagaaaccccttaatttgatatgtgtttagattttcattaatatactaaaagaaatggtacaaataatttgtagagagggaagagaacaaggggaagatgaggttcctacttggagaatccatgggaggagcagttgtgttgctcttagccagaaagaagcctgatttttgggacggtgccgttttggtcgcacccatgtgtaaggttagtaatctcttttttcagttaaaaagtctcaatcaaaaacgaaaatatattcttaaagtgggactaatccatatttttcaataatgttctctacgtattggattagtaataattgcctttagataatacagaaaaatggttcaatcactcttcattagtcatttgtctcatagtttctatatatacacaactacttgttacagccaaataccagtatatatactactaattaaacaagtaattaaaactgaattatcgaaatgattatatcaactaccgaaagtccaacagagataatcaaaatgtattgtttatcaactataatacaatgaatgttgttatggacagttagcagacgagataaagccacatccagtagtgatctcaatccttatcaagctagccaagtttattccgacgtggaaaatagttccaggaaatgatattattgacattgcaattaaagaacctcacatcagaaatcaggtgagtgattatgatctaaga

SEQ ID NO: 159044 - DNA, 2022 bp, Arabidopsis thaliana landsberg
atccaaaagttatgtttgtgatgttgtatgtacttccagtaattctgttcattaaaaccccaaaagtgtattaattttcattcaatgtattaagaagattttcttgttacttgtcttcttaacagtcatcgtcacgttcttttatttctcttttctttcttcttaaaacttgagtaataatattattgttcttgggaaggatcttgatgctcgagaagtgaatatttttattttgtaacaggaaactatattagactgtgaccatactagaatgtttgtgcctgtatgctccgtttttatgacagtttatatatgagtttcatgagacatggttaaattagaataccttaggaatggtttattactgtacttcacatccaaacaataatatgcttgtctatatttgtgagcttgtgtggaggttgtcgtaaacatcattttagcgtttctcctaagtgttgaattgtaatttcatttttgttgtgtctgcagaacactgcactgctggctagacgactgctcaatggcgagttagagcctgcaaagattttgaacaatatcctccttctctgtgcaaataaatctagggatcctaataatcacattttgattctgttcttgcatctagctggagtgtgttgactgtggctattcctggtatgcttcaagggatgaggcatcaactctgacaataagcacagaaaacctgcccaaggcacagagaaggaggatattgagaagaatttgaccagttctggtgaaaccgagaaacctcaagacgaagccttgaagaccaatgactcaaatgcctccaagaatgggcgaagacatggggagtctcctaactcgggtactcatctggttcaacggatcgataaacaagtaaggaacagaatctcagtaatcaacgcaagtggagactgccggtatgacaaggccctccaatattggtttcaatctagaatgggaactaactagcaaatagataaaatctctttttaaactctttcggcaaaagtcgctcgatgtacaaacgctatttttcttttgagtttaatttaacattacattcaaaaaaaaaaaaaatattgacttttgtagagaaccattgaggcttagtttttgattttgccaaagtttgtgtgtgtgtgagctttcgctattgttcaggattcctatgttctctacaagatagttgataagcgtagtaagaaggcagacattacaaatggtaatactaataactcaagtgatccaagtcaatctttggtctctgattccaatactatcaaagtgactagcataccaaccgaggtgagtccaaatttctgaaatgtttcagtactcattagtatcgagcggtttctttactttgcttctttaaattcaggttaagcagacaggtccagatttacatttttttcagcgaatacaacaacaacaacccgaatgtgcagctacaaactccttacttaggggcagctcaacatttgcttttcgatcaagaaatgcaagagaagtacaggtcgtcaaacgattctatcaaagctattaacacagctcctggggtgtgtctagtttctgacatgtttcattaatctcaagtacatgattctttttactcacactcacttttgcattttcaggttgagcagccaggtaaagaaagtgtatatgggttgactacgaatgatttgagtgttccaataaacgaacaagacgatctcttaccccggaatgtgatttgatcctaacactttgctcagcgactacaacgatgatgatttctggagtggattgccagattttaacggaggggattttgaagatgtgttttctgatcaagaattcataatgcttgaaccgcaacgattacaagccaaagaaatctttgtcagggatcattgttaattatagcagtgatagtgagatagcgatgctaaatcaatatgtgcaatggtaaagcacatcactcattttctttgtcagtactttccatggagtattaacctgtattctcag

SEQ ID NO: 159045 - DNA, 1930 bp, Arabidopsis thaliana landsberg
  unsure (1)..(1930): unsure at all n locations
atggctgagacacttttgtcatttggagtcgaaaagctttgggacctccttgtccgagaatctgatcgatttcaaggagttaaaaagcaatttaatgaattgagaagtgatttaaataagttaaggtgctttttagaagatgcagatgccaagaaacatcaaagtgcaatggtgagtaacttcttggaagatgtcaaagaccttgtttatgacacagaagatatcattgaatcctatgttctgaacaaacttagaggagaaggaaaaggggtcaagaagcatgtgagacgacttgctcgcttcttaacggatcgccacaaagttgcttcagatatcgagggtatcactaagaggatctctgaagtgattggtgagatgcagagttttgggatacaacaaatcattgatggtggtcgttcgctgtctcttcaggaaagacaaagggtgcagagggagatccgacaaacgnnnnnnnnnnnnnnnnnnnnnnnncttgtcggggtggagcagagtgttgaagaattggttggtcatttggtggagaatgatatctatcaagtggtttctatatctgggatgggcggtattggtaaaaccactctggctagacaagtctttcatcatgatttagtccggcgtcactttgatggattcgcatgggtctgtgtttcgcaacaatttacacagaaacatgtttggcagaggatcttgcaagaacttcagccacatgatgggaatattttacagatggacgaatctgcacttcagcctaaactctttcaattgttagagaccggtagatatttacttgtcctcgatgatgtatggaaaaaagaagactgggatcgaataaaagcaatgtttccacggaaaagaggtacatacatgcagcactttttcttcttaattcataaaagtgattgttaaaaaagaaatatatagaataattgccttttttattccctagcatgagaaacacaaatatttttgcaggttggaagatgctgcttacttctcgaaatgaaggtgttgggatacatgctgatccaacatgtttaacttttagagcaagcatccttaaccctgaaaaaagatagaagctctgtgagaggatagtattccttagaagagatgaaactggtgcactatcacatttaaaattaaaaccaagaatctcataaatttatttttagcacacattttgaaatgtattaccttgtgatattgtgcagaattaaggcttaatgaagaaatggaggctatgggcaaggaaatggtcacatattgtggaggactaccattagctgttaaggtgttgggaggcttgttatctaataaacatacagatcgtgagtggaaaagagtttatgacaacactggagctcagatcgttggaaaatcgtgcttagatgacaacagtctcaattcggtttaccgagtattgtctctgagctatgaagatttgccaacgcgtttaaagcattgcttcctttacctagcccattttcctgaagattacaagatacatacacggacattgttcaattactgggctgcagaaggaatttacgatggatcaaccatccgagatagtggagaagactacctagaagagctagtgaggagaaatctggttattgctgataaaaactatttgaggtcgagatttgaattttttcaaatgcatgacatgatgagagaagtatgtttatctaaagccaaagaagagaacttcctccaaattatcaaagtccctacttccacctcgactaccatcaatgctcaatctcctagtagatctcgcagactcaccgtacatagtggtaatgccctttatatattgggacacaaaaaccaataagaagtcagatctcttttacttgtangactcgaaaaagattggaacagtcagctcaggctttcaaagtta

SEQ ID NO: 159046 - DNA, 292 bp, Arabidopsis thaliana landsberg
  unsure (1)..(292): unsure at all n locations
agaagaaagaagatagaatcagagatttgtagattttatcgatcgaagatgaatactgacatcactgccttggagaagccacaatacccagtggttgatcggaatcctgcttttactannnnnnnnnnnnnnnnnnnnnctctcgattacctccgtttctctactatcaccggcatctccgtcaccgtcggctatctctctggttcatccacacacctctctcttgaaatttctgattctgtaggttgaaaatgtgctgatttggtgtttttggaaatggcgattttgtagg

SEQ ID NO: 159047 - DNA, 534 bp, Arabidopsis thaliana landsberg; identical to SEQ ID NO: 53086

SEQ ID NO: 159048 - DNA, 626 bp, Arabidopsis thaliana landsberg
tagttgtgctggttgtggaacgcctctttataaatcgaccactaagtttgaccccggttccggttggcctgcttttttagacgccatccccggtgctattaaacaaactgtaattcgttgactctttctctatagcaaataacatatttcgagcatccatattcgtgaaactcattgactataacattgactattttagccaaaccggcaaacccatttaaggattgtaattacaataactaatttgatgtttttaaatgtatatagccagaagcaggtggaagaagaatggagataacatgtgcagtgtgtgatggacatttaggccatgttttcaaaggcgaaggttactctactccaaccgatcaacgtcactgcgttaacagtgtctctctcaaattctcttctgctggttcctcccaataatcatatcattgatcggaccactttatctcatgaaatcaagaatcttttctatgatctgtgtgagcttgctaggtttctttcccatactcatgtaatattatgattcctatgtgtgtgtttttctctactttccaataaatgatattgattccacttcgttcgatgtactctctgtaatatatattttaataaactttgga

SEQ ID NO: 159049 - DNA, 902 bp, Arabidopsis thaliana landsberg
tacactaatagtctaaaacattggatttgaatatgatatatattttttccctaccaagacgagtgcttttatgcttaaccggtcaatatcgaaccctttactcttgtctctctgagctgcgagcaatacatccacaatatcagccttgtcgccgtctccatctttatgatcctgcacaattctctccaatagcttatcaaaaccattagcggtcttttccagtcgagcctccaaaccggtgacccaatcagtccacgcaagccacggtacataactcccgatagtaaacgtaccaagttgcctcatgagcctgtctattaactctttaaaatctgttccaacaccatatttccgtcccaaagctactctacatataacatcgttagttaaactcgacaagatcttgctaagatttaccggtttagaactcgatttacggatcttttccatcatcagagtgatctcttcttgtctcacgtcttgaaaggatcgtaccattttgttgctgaggagatggagaacactaacactcttcatttgtctccaatactctccataaggagctgaggccatattacggctcttgtaaaggagcttttcgaagatttttgaccgtggacggctagcaaaaacgcgatcatgcgtctttaaaacgtctcgagctgcttctgctgtagaggctacaataacggggacacttccgaagtgaaggagcatgagtggaccgtaacggtgactgagatagcatagtgatcggtgagcatgttgaccaagctgatgaaggtttccgatcatcggaagtctcggtggggatggacagttgatgcttatgctccctgtcttatgtttcttgaagccgagaatggtatgatgaccaatattaagcctaagaaaagtatcat

SEQ ID NO: 159050 - DNA, 550 bp, Arabidopsis thaliana landsberg
  unsure (1)..(550): unsure at all n locations
gaggttcccaggcgaaaagaccaaaaaaggttggaattgtcggcaaaaccgggagagtgcctgactcatctcttattgaatccctagggatgttaatgccatcgaaaaaagggaagggtctgcaaaattgcggagtcttgtagctcattttaatggaggaaattaacaaggatcgttcatttttgattacatggtggcaatatggaatggatctgtctaccctgggttcataatgccattcgttcttcattttggggtctaagttggttattatatgtattgtgagttctcttcctaacgtatgtatggttatgtgattcaggaacacgttatggtgcgagtatcaggaagcagattaagaagatggaggtcagccagcacagcaagtgcttctgtgngttctgtggcggggtatgngagngnttnncnttcngttgctgttttcgtttctaaatctcttttggttttggattnttgtggtnnctgtggtttggtcaaaaagattcagtcnggagtgaaaagaaagactgtaggtatctggggttgcaag

SEQ ID NO: 159051 - DNA, 2918 bp, Arabidopsis thaliana landsberg; identical to SEQ ID NO: 7239

SEQ ID NO: 159052 - DNA, 1361 bp, Arabidopsis thaliana landsberg
gaattttgtggaaatgtaggatcaaagtcttcgtgaaagtgataatcgagcgtattggcttggttggaatcatcgaatcattgattggttattatatgagagatcttcaatcatatgtttacaggtgttcgacgaaattcctctatgaagacttttctggtttatgtgttctgatttttgatgttttgataggagttttgggtaggcaatgaagagcttgttaatttatatgagaagagacttggagacgctggttatctaagttacaagcttggtcgtactaataatcgtggtgatggtatatataaacatttctgtgaatcttcttcttttttggctttttgatgtttgctttgttcattcttttaaccattcattgtgttttaataggtttgcttacggctgttcataaggattattttagagttgtgaactcgagggatttgctttttaatgattgtggtgatagagttgctcagttgctacatgtagaattagttcctccttactctcagtatgatgctcatcaagaagttttgattgtcaatactcatttgttgtttcctcatgattcaacattgtccatagtaagattgcagcaggtagagttctgtcttaaatcttagactaacttcactattattgtgatgattttgcatatttctaaacaaagattttgttttgataggtatataagattcttcagtatgtagaatcttaccagaaggaagttaatctcagtcccatgcctattattctttgcgggaaactatcttgtttggattttacttttccatggattagatgtgatgattacagtactataagctcctatgtttgtgtctgtggcagagattggaacggaagtaagcgaggacatgtctacaagtttctcaggtcacagggttttgtgtcgtcttacgatactgctcatcggtacacagactcagatgctcacaaggtcactgtctttcttcatatggcgaatacttttgggtatgctgtagatttttttgatgttttgaataggcgatcgggattctgaaactgttgttgttatctttggtttaacagtgggtaagccaccggaatcatcggggtaacatatgcgctgtcgatttcatatggcttttaaatccaaatcggtatagaaagctgctaaaaacaagttggagcgaggcagtctttggcatgttcagggtgagactctcctcaattgtgtcttatgacaagttttcatctgtgaatgaatttgactgtctttttgatccaaaagtgatttacttggagatctttgaactggtacagcattaacttaatggtataccaaggaaaatatctctttctttacaatacttgtc

SEQ ID NO: 159053 - DNA, 1801 bp, Arabidopsis thaliana landsberg
ttattttgcacacttaggcatttaggatcatcttgcatacatattgcatgttttggtatgttttcaggtgcagaaggagcttaaaaggattctactcgaccctctactctatccaaccaagagggaagcatcagagcattctactcgatccattcactcgatctaggcaggtacagaggaggcagcaattcactcgatccacttactagatcaaggcagcctcagaagaagcagcagatcgatttactctcccctcctacctgatcctctactcgacccatttactcgaccaagggtgaccaactctaccagacttgttgatctcgtcttcggatcctcctcattccccactcaaccagacatctgagcatacggataggagaggaaaaagcatctactcgaccaattgatcactcggagcatacacacaaaggcgcagactttgcagcactctctttactcaatccccaagatcaagcactcgcccaaaccgcctcaagtcccttgtcttatagtgaatctagaattttcaacattttactataaatagatcacttcgggatttgtccaaaggatctagcttttatcctttagtttttctttctgttcttgaatcttcaaaacttaattactcttaatttattttgttttcccttttagttctttaagtaaagttttttagcttgtttagatctacattttgctatgatttcagtaatttctgggtttgtgttcttagttatgttgcttgagtagtgattagtgttcttgatgatggattagattagggtaatctctaggatagtcaggtagttaagatttggttagatcccttctggattcgttggcccctatgcggatttcgctggctcatgtggagaattaatcatagacgtccaacgtctaaaagacgttcaaatggatgtctgatctacgaattcgagagatttgtagacttgatcaagagattggctagtatgcttattggctttggtagattattgcttaaaccctgctctgctatgtttcaacaacgagagttgtgattaggaagtggtagagttatgggggtctctgtcacgagagtggattgaccctgtttttgaatctatcgtctagggtatctatctttcacctgttagcctctttatgaaccctacagttgcccttatcaatgaattcatccttaggacctctattgttcttagatttattggtattcaccccctgattgaacttttatttacctgttatttgtatcccctcttgattgtattttagttcttaatattgtcaccttttggttctactcgacccaatgatcgagtagggcttttaagttcttatttttgttgtttgaatcctgacctatgattgttactagaaaccaaccatttctataatgcggcttgacttaggcgcttgtatacacatctcgattgctagcaataacagtagactggattgacaccccctatagctacattgacgcgttagtgtttaagggaaattgaactgaacacaccacacttcagcacataagtaggcctgaaaaacctacttattaaaccaaaaaggcatataacgggagtatccctaccaaacgctacaccgtcgtgtagacaactcggccacggtagctaaccccgtctctccgatcccttcgcactaagtggcgatcaagtaacaacgttaacaaaaccccacaacaacacaattcactatgaaggtcagacataccacgatcttgatacgcttatggtctctgcctcctaccacgagcaccacgcatctagaccca

SEQ ID NO: 159054 - DNA, 2686 bp, Arabidopsis thaliana landsberg
agagtatgtaatcttagttaaaccccgaacggtatactggttatactggaccttcagctagaaggatttgggactccatatattcagagaactgtccaaaatgtaagtttttccttcagtaccatattgtgaacaaagacttgtattatgttgtatgttgaaatgtaagtggtttttgtagattcatctggggagacttgtccagagaaaaaagttttgtacaaattgatatccggtcttcattcttcaatctcgatgcacatagctgctgattatcttcttgatgagtctagaaaccaggtttgtgtttctgagcaaaagattgacaagtctctctacatgaatgtattatggtcttggttgacatgtaatttcttttgaaatacagtggggacagaacattgagctgatgtacgatcgtattcttagacatccagatcgtgtcagaaatatgtacttcacgtatctctttgtgctacgtgctgttactaaagtgagcaacttcttagtctattagtctttaggactgacatgtgtctctgaataatcaatctattagtctttaggactgacttcttacaatgttttattcaggcaacagcatacttggagcaggcagagtatgacacaggaaaccatgctgaagatctgaaaacacaatccttgatcaaacagttgttgtatagtccgaaactccaaacagcttgtcctgttccgtttgatgaagctaaactgtggcaaggtcaaagtggaccagaactgaaacagcagattcagaaacaattcagaaatataaggttcacctcatttttttctcgaaaatttgaatatgttcttttggcaaatgtagagagagcggtagtagtaatacatcttagtaatgtatgtgttacagtgcactaatggattgcgtaggttgtgaaaaatgccgactttgggggaaacttcaggttcagggtcttgggacagcattgaaaattctcttctctgttggaaatcaagacattggtgaccaaacagtgagtttctcaaacatctatctgcgtagttttgtatggaggtgtcactgacctgagattattttcatgtttttcagctgcaactgcaacggaatgaggtgattgcactggtgaatttgctcaaccgtctctccgagtcggttaaaatggtccacgatatgagtcctgacgtggagcggctaatggaggatcagatagccaaagtatcagctaaacctgcaagattaagaagaatatgggatttagctgtctcattctggtgagttacacaacgaactatccagcttttaggcattcatggtcaatctatacaagcctaggatggatagtcattgttgtaacgaattaaggaaaaaaaaatcattatagagaaaagattttttgtaaaacagataaaagaaatagagattcttgaggtaactaatctatactgacacagaagaaaaaattcatacaatcataccatttcattgatgccttgatattcatgaaacaaagcttttgatgatccctgaccatgtctgttgtctgttgagcccaacgcctcttccgtatcgccgtgaaagattaaaactttgctgttgattcttcaaactttgcttgactgaactaatagtatgtttagtgtaaaaacttgtttgaagaatcaacatatagtggcataccttggacaaaagtttcttgactgcataaatcttttgattttgaaaaatcatcaactgaaaatgcataatgaagaagaaactagtagcaagcaaacataaaagaagctctctctctgcattggggacataccactaaaccactaaacataaaaaattccgatttggatcgaatcccaaaagcccacttaactaaattggtcagaaagagagtgcactcttaactaaattggtccgtccatctttaattatactttagcccgaaaccttttaagcaaaaccgtttcttagcccaaaatccactcctttgctttaattagggttttaacggacttggcccggccctaaatcttcagcccattttaacatcctttgaaataacccaaaattctaaaattccgatttggatcgaaccaaaccgaacaacccaaatgcactattaacgaaattggtcagtccatcttttgtctaaaactgctgcctttccaaactaattgatctcagtctcactaatcgcagaaagctatggtagccggaaaacgaaaattcgacagaaaacccaacaaatgtatccgacaaacttggtctaaaagacccattactgcgccgtctctcttccgctgccgccgtaacaaactcttttctccaagccaacgatctcttcctctcaccatcacagaccctccgccttgaatccctaatctcatctctcccaatctcaccttccccttcttcctcctcctccgccatcaccaccaccacgtggttcaaccgcttcttaacctccgccacagaagacgaagatgatcctcgctggtgtctttatttccgaatgtcaaaatccaccttcttcagtctctactctatcctctcccattcttcgcttccttccttcgctgccacaatcttccgtctcgctcacggtgcttcttacgagtgtctcgttcacagattcgggtttgattccacttcccaagcttcacgctctttcttcactgtctgcaa

SEQ ID NO: 159055 - DNA, 828 bp, Arabidopsis thaliana landsberg
aaagccatgagctttaattatttagacaaggattctgaaatctacgagtttagctctgactcatggagggttattgatgatattatcaagccaccccactacatggactactttagagagtgtttctctttgaagggaaacacttactggttgggtatagatagaagacgaaggccaccggaccttcgcataaccttgatcaaatttgattttggaacagagaaatttggttatgtttctctgcctcccccctgtcaagtgcatggttttgaggcttctaatctttccgttgtcggagacaagaagctttcggtgttagtacagggcggttctacatccaagacggaggtatgggtgacaagtaagattggtgaggtcaatgtggtgtcgtggagcaaggtgttatcattgtatccgaagcctgacgttggtttttggcatggcctaagtttcttgctagacgaggataagaaagtcgtcatgttctgtgagaaattgattgatgagaacaaggtcaaagacatggtctacattgttggggaggataatgttgtcacagaagtgggatttggagtagatgaaatggatggatgtcgggcagttattcttaattatgttccaagtttggttcaaatcgagcgagctggaggcaacaggaaaagagggcactaaacactgtctacatgtaatctcttttctttctgtgcgtgtgtttctcttaattttatctttgtcatgttctttcagtatcaatcaagcttttctaattcaatgaaaaaagtgattcagaaaacatgtaagaagctttcaccctatctcttctctgag

SEQ ID NO: 159056 - DNA, 1347 bp, Arabidopsis thaliana landsberg
aacgaactacctttcgtccattcaatagaatgactaatagattgaaaaagagtgtggatgataaaaaggtcaaaatacagattcatagcagcaaaaaccgagatcccaaacaaatttgcatttttaaaataaaaatatttcattgaaatctaagccaaagtttaatattatttcatttacggggtttgggaagattcgtcgaaggaggacatgcaggcacaaatcacaaatatcactcaccgcctttgtttgaccctttcccccacaaatcatcaaaatttactgttttacattctctctctatcactctgcatttagccatgggagacgcagagagcactaaggatcgcttgctgctgccggtagagagagtcgagaacgtgacatggagcgatctgcgagatggttcattcaccgtagaactcaaaaggcttatcttcttcgccgctcctatggctgctgttgttatcgctcagttcatgttacaaatcgtttcaatgatgatggttggtcacctcggcaatctctccctcgctagcgcctctctcgcctcctccttctgcaacgtcactggcttcagcttcatcgtctgttttctcttccttctttcccctaaattgatacacttatctctgttattttgatgattgttactttttgcctgtggtgttagataggattgtcatgtgccttagatactttgagtggtcaagcttatggagctaagctataccggaaactaggagttcagacttacactgctatgttctgtcttgcattagtgtgtctccctctttctctcatttggttcaacatggaaaagcttcttttgatccttggccaagacccttctattgctcacgaagccggaaaatatgccacctggcttatcccaggactgtttgcttacgctgttctacagccgctcactcgctactttcaaaaccagaacttgatcacacctctcctcatcacctcctatgttgtgttttgtatccacgttcctctctgctggcttttggtttataagtcagggcttggtcatattggaggagctttggctctcagcttgtcaaactggctctatgccattttccttggatctttcatgtactactcctctgcctgttatgagacacgcgcgccgcttaccatggagatattcgacggcgttaaagagtttatcaaatatgctcttccttctgcggctatgctttggtacatcacttttctctgttcctttttcacttctcattgcctccacattttttgttaaaaactaaattatatatgggttgcagcctggagtggtggtcatatgaactcataatatactattctggtctg

SEQ ID NO: 159057 - DNA, 3313 bp, Arabidopsis thaliana landsberg
  unsure (1)..(3313): unsure at all n locations
taggtaggtagatttaagtgagggtgttgaggcttagaataagctagaagatgagtttcatgcaaagctagccgatgcagaaacacccctataccctagttttgcaatccacaacgagctatcatcaatagttttacccttcaggataaagacacaaagtggttggtctgacaaaagcttcggtctgctgcttcaaactttttcatagatgcgataatgtattgcacacatcgttatacgaggtgaagaggtttttgagatattttgagatgggttatgagaagatacacgcttgtgtggatgactgttgtttatccagaaagcagtttgagaagctcaacaattgtccgaaatgcaatgcttcacggtggaagattaacacccgcattagtgaagttaagaaaggtattccacagaaagtacgtaggtattttccgataattccacgtctcaagaggatgttcaggtcattagacatggagaagaacttaaggtggcactttagtaataagagcactgacgaaaacttctgtgacgtgggatcaaatgaatgataaatacccgtcttttgcctctgaagagaggaacattaggttgggactctcgtcagatgagtttaatccgtttaacatgaagaatgttcattatagtgcttggcctgttttgctagtcaactacaacatgtcacctgacaagtgtatgaaggaagagaacatcatgttgtcattgctgattcttggtccaaccaacctgaaaacaatatagatgtgtatctagaaccgctaatagatgatctcaaccatctctgggaaaagggagagttaactatggttaaaatctagcattcagtgacacaacattcacgttaaaagcaatgcttctctagaccatacaggattttcctacatatggaaatctagcaggctgcaaagtcaaaggcaaaatgggttgtccagtatgcgggaagcaaacagatagtttgtggttgagtaactgcagaaagcacgtgtatatgtctcatcggaagtctctgtcacccacacatgtttataggcgaaagaaagcgtggtttgatagtaaagctgagcatggaagaagaggtaggattctgactggtcataacatatatcaactgataataggtttttagtcaattatcctaaaacaccaatcatatcgttgtagtattttaggttgtcaatccaaatgggtgtgatgctaacaatcaagatgtgatcagaagtcactaagtcaagccaagcaataacaggttttggttagttctagcagtcctaagtgaacatgcaaaaaacagaaaatcaaacagaaacagtaaaacactcgaccaacacagccctttgcagagcactgggtgaggtcgagtgacaggtcgagtaacagacataaaatgaaacacagatactcgactgcacagtctgttgctagacaactaggtggtcgagtacaagaaagaactgcagaaatgaagcgacagataacaagatgcagtaaataacagtagagtaaacaaagaattcaatcagacaaagaattccaaaggatggggtaattgagtagtttcgttttctcagttaacaggtgattgacatgctcaataaattaaccctagacaacaagtacattaaccaaatctaagtgccaccgcaacagagaccctcaagttaacctagtcgcagactcaatcaccattgacgagagctaacctaacaggcattacgaatcaacaagtttaagccaaaacgctccctgcaaccaataccttggtacagggtcatgaatctctgaaattagtggttcaaacatttcatcgaacatcttttgggcgcgaaaatgtctgggctcaaattctagttgatcagaagcaattttatttagaacaactaatccagaagggatctatcaatcaatactcaatcacctagcatactgagaattctacactactctaacccatcctcagaaacctattcactactcagacatcatagcagaaagcataaacgttgaacaagttgaaaacatgataacaacagtgtaacagcaggatgataacagaatgaacaacaataaaagaaatcaagaacaaatactgaatactgaatagataaagagaaattcggattacaaaaggtctagaacacagtgtctgcggaaataaaacctagataaaaacttgtcctcgaaaatgtaaagtgcatgctacttatagcaaaatattcagaaaccctaatacttaaaacgacgcagtattgagacggattaagaacagtactcgaccaaggtggtcgagtgagaggtcgagtgaatagctggagtcttcttttcttccttgtgctcgagggtatagttgagtgcggaatgaagaaggctctggagcttaccatccagtatgtagtcgagtggtggtgatggagatacacgacttctaggtggagtgatgtggtcgagtgatggtcaggtaatggaggtgaagacactcgacctcggggtcgagtgatgtgatcgagtgatggtcaggtggtggggatgtagacactcgacctcggggtcgagtgatgtgatcgagtgatggtcaggtgatggggatgaagacactcgacctcgcggtcgagtggtgaggtgaagtggtgatgtcctctagtcgaccagggggtcgagtggtctgctgagnnnnnnnnnnnnnnnnnnnnnnnnnnngtcgagtggttttgcatgatcaggtccgcttcttccaattagctcgtcaacagctccgaatcacctcaaaacaacacaaatatgcaacatgcatgcaaaactatcctaaacatggaaagtgatgacaaatgatgagaaatggtataaaacagtgatgatatgatgctaaaatgatgacaaatggatgctcaaaacatgcaaaatacacacttatcaactcccccaaacttagtctttgcttgccctcaagcaaacaatcaagaacaagctggaggtgaggtttgaaagcggggactcagagccaaagcaccagatagaccagatgaaatcaatgtccaagttgaaagttctaagctgcaatatgattatattctacttaaaaacgttagccatgcctcattatcaatcaatccgacccatatgctcgacctacacaagttttcaaatctaccaatcccttggacattccttagttctggaacgggaatcaagcaatgcatcatcaatgaactcatttggctaaggtaaaaggtcaagagacaaagatggtcccttacagaataggcttcagtaacaggggatctctcaaaaaatg

SEQ ID NO: 159058 - DNA, 2111 bp, Arabidopsis thaliana landsberg
agaatggattctaaatctccttcaaccccgagcgcctctctcttcgaattcagtgattcaaaccatccagacgaccctccccctatctacaaacggagggcggtttgaacgtcaacggaggaagacgccgtgtcttcttcaagcgcccccgagcagacgacctctttcactgtttcgggtatacactactgccgatattgctggggaactggatttgcctgatgaccccgagccgcctctcgtctggaggactcttgccccggtggttgatgaagccgggacatccaactggcaaggcgcgcccgagctcttaatcccgcagataaagatcaaagactttctttatttcggcccgaacgagacggaggatattctgcgtctcaacgagcagagggctttcgagaaagccgagaagaagaggaacaagaaaggcaacagggcgatagtgccggatccccctggcttgaatttgtgcaccgagcggtcgctttcggatccgagggcccgattcaatcttggtgaggtcactctgcgtgtgccgatccccgatgagggagctgacaatccccttgcgggtttctacactctgtatgagggatttttctattattgcttcctgtggcttccggtcccgaggctggttttggagtacgtgacatcgtaccagatcgccctctcccagattacgacgcgatccttgagacatttgctcgggattttggtgcgaagttatgaatttgagaccgacatcacgctcgctcatctgagaaatctacttgagatccggcgggttcccaagtacaaagtggatcaatattatatctctcctgccaaaggtaggaaggttatggacgggttcccaagcaaggacgagccgtataccgatcaattcttcattgtggcccttgaagatgctgttaacgacgacctcctcaggacggttctgacgagatggggaactttgggtagttgtagctaacattctgtttgtgtccgacgcgatcttatgattttttctaactgttcttttccttggttgctaaacgcactctcaaattcctcgagccgattccagacgatttcctttcgacttttcatgcattatcggctatgaaatgcgattggttgaaccatttctctcgagatcaaatcgagcgagcgcttcatctacttcacggtgtttcttgcccttccagccagagtccttggatcattgacccagttcttcgtagacatgcagttcttcgtagggtttcttcaaagaacggatctctgtgagattctcaaagaacaacagaattgttgattaccacggacggtgttcttgattttattattgagataaagatgatttgatcgtacaagtgtttagaaatatagaaaataagtgttttgttttcaaagtcagagcgtttttgatagcctgaggttgagagcgtttttttgtgtgtcccccttgtttgtcctttgcggcgctttatataggggtttggcaaaccgcctctcgcgatattctcggaagatttcaagatctttttcaattttcttttcagttacaaactgtgtgtttttcttgttgtcttcttgatccaggtacacctctgctgtatgggaactcgatcaacaggcaatcagaacctccttttgaatgacaacatcgaccgcatagctcgcgaactgagagaaaggagaaacacagtcaaccttgtacctcaacaaacactcgatatgactgacgaaccaaatcaacagaatggacccgcaaacattggtgctggagatgcaccacgggatcaccatcagaggaaaggaattgcacctcctgctatccagaacaacatcttcgagattaagagtggtctcatctcgatgattctggggaacaagttccatggtctgcctatggaagatccactcgaccacttggatgaatttgataggctctgcaacctaacaaaaatcaatggtgtcagtgaagacggattcaagctccggttgtttccattttccttgggcgacaaagcacacatctgggaaaagaatatgccccatgactcaatcaccacatgggttgacttcaagtaggcttttactagcgcagtttttcttca

SEQ ID NO: 159059 - DNA, 4975 bp, Arabidopsis thaliana landsberg
atattcgactaaaccctcgggaagtcattttccgccgcttgcaagaagaatcaaaggtagctctcgttctctcctttgcgacttattttgtactctcgattcttaatcgatttttccggcaatgggtaaggttgttcttgtttctccgtcttcttcctctgagagcgaaatgccattagttcgccgaacttctcggctaaccgggaatccgaacgacgaagctcagtctagtcgatcgaaccggatcgagattccgacgttgcttgatgagccagatcgggaaggttccggtggacatctcgctgctcctgaagatccggtggatttcttatctcagttcgacccactcatcgacctagaggatgcttataacacgcagccgcagtatacagaggctgaggttaatgcgagattacttcatgaggattatgtcgaatttgacctcgacccagttgttcattggaacaccgagatcaccgcgaaaaagaccctttcaacaaccgagtcagtcgcggaagtatttaccttgtgcggctccggagatcgcccactcacttacatgattcccggagaagatgagcgtccttggaatccccctcgaggatatgtctgtatgtatgaagactacttcagacattgtcatctttggtttcccattccgtctctgatcatctcctttctaaatcgccgtcgtatggcgttctccggcggcgatatgcaatttcgttgttgctctgaccttcgcgctgaagaagtttatctggtaaacgttcgttgtttcgaggaaatgacaacgttgaaagctataaggtcgtctggctattgggtggtgaataaccgcccaaagtataactttcttccctgtcccaaagtcagtaatttcaagaactggaaagaatattacttctacgtcagggtcgacctcgagtcgtatgagcgtccgttctcgtggaggaagaggatgtggacggagtttcctggtagacttcttttaaatagatagggtaaagacatgtcgatcccgattagattctcatagccttttcttttgttgcagatcggtacaggcctagcccggagtttcccatagagttcgaaggagttttagaggcaatcttccgagctcaacgtcgtgcatggaaagacatcacgaggtcgcgcgtcaacaggataatggggaaggtcaggaagtcctttattagctttgctgccgggcttttgaatatgccacctcccccagctcccatcgaagaggagactcatcctctggacggagaggcagctgcgttgaatcttcccgttagtgctggcccttccggtgttgatcaggtctcccatgagacggtcaatccagattctcaagataggacgcgtcttgaaggggccaacgtcgttccagctcaagagatcgccgagtgcgatcaaagtcaatccgttcaggtcgtcgagcctgaaattcaaaatgttaccagcgaccgctccatcgccgtttatgccgccgcgccagcaggcgaagaggtcaacacgggcctagttatcgttgatcaagacaaggatgaaaccgttgcggagctcgggacttccaggaggtcccgtgaagagaaagggaaaggagtggctaaccaatccaagaagaggtcggcctctgaagccggtttagatgaagttgctgctccgaagacgtttcgcctgtcgcgaggtgaaactcttaattctgaccagttttcgtttaagtattctggtgagaaattccttgtgagagatcaggaggccgccagtcatctttggcgtaacttgatgctccttgggacgaaggatttccctaatcccgatgacctggttctgaaagagggatatcaaaagtttgccagatcatcacttgaggtacgtgctagttacatgtcttcctgtggcttaatatctttgtattttggctttaaccgtaactctttttccagaccgccgccctggccaatgatctgatcgcgacatacgatcgcaagttgaagctgaagctcgccgacagagaggctttcgataacctgaagaaatgcggcagaccaggccaaatcaatctacgccaaagacatgaaggaaatggctatattgaaagatgctgccgagattcataaggcggagatgagctcagttgaacgacgaggtcaagaggctcaatggtcgagaagctgatcttcagaaagagatcagcgatcttcaagtcgcgttggttgctgcgaaggagcacggggagcgggagtgcaacagactgcggaatgatcgagctgctaaggtcgcccgtactacaaagaaagcccaagctcgtcttgatagagtaaaggcttatctcaaggagcaagaggacctcgtcgggccaaaggtggatgctgagaatcaggccaaaggtgctgaggagatagtaggtattctgatgcagagaggcgcgaagattgcggcatccgaactcagcagccttaaggagttaaccaaaagggcgtccgacgaagtcaatgctttgaacgtcatcgagcttggggatgaagacctgaacatgtctccagatcagcttggtttttcgaggcaaacctctcaagttgctccagtggcggaccagcacggctcgaatgtcgaccttgtttgcggaagtgatattcgacacgtaagcgttgaagaggcgagccagacgatctgaataggtcgtctttgtaatttattttggtacatcgatcgtggacccaactttcggggcgttctcaaaactcatttaaccgtggacccactttcggggcggtgttttaattttaacttctattttcgatgattttccatcttgcctgtttccgaggcagaatagtattttctctatgttttccatttatgagctttgtcatttttttggaaaaggaaattgtgggaagtcaacccgtaatcaagtaaattcccattttcccagttttggagaaaatgcaaatattagtgtttctcggaaaaggaaaatgagaatttccagatcgcatctgcagacgagcagttagctaggcgaagtgcatacgagctgggagctaggaaagctacagacgaactgggagctaggaaggtcggttgacttatgtcgaccactcttatctttcagacttttatatttgaataaaatgtttgtccttaagaacaagttcatgttttttttttttttgtgaacctccgtcggttgattacgtattaaccatatcggattcccaaacttgaaattaggtttttagatcgactaaattataagccatctgcaagctttgagctcggctttcgggcggactggttttcacctgacgtcacagccgattttttgtgtctaagttcgggttagatgttaagtgcgagactgagctcggctttataaataaaagtattcggcgtgtactgggcgcgagacgtctctcggcttatgcccagtaggcctatgtataatttaaagagggagttctgggctctgtataaaaaataaggcggactcagcatattagttggggagcgagatgctgggctaggcttactccccgtatagcatctgttcggcagatcggaaaatacagggttcggcttatatttctgtccgaacatgagcttaagtgcgagaaaactggtctcggctttccctattagaaaaattttctaatagggcgtggattatttcaccactgcatccatgtgagacgcgcatcgaacacctggccagggcgccgagagtttgacatagatcttaaagcgaactccgtattgagaatgcaaactttaattttatttaagtattatagctgcatccttgaggactgcctacgtacccaatgaagggatcaagccattcgtagttctcactaggtataaagctatgtgttgttctgagtatccaaagatcccctttggtgaagtccctagtacactttatatagggtcgttaacccgcctctctagcgatattcttcggaagattcttatttatccttaggtcggttctagaggataatcgtcctaaggatattctccttattcttcggaggttttggggagatttcctgatttcgacattatcttcaaagattctcctttatcatttccgaaagtcccataaaagatcctattttaccggaaatgatccttggagaatgaacggtttttacaagtctttgcctcgcgtgttcttcacggctcggtggtcgtttgagaggtggcttcggggcaaacggtatgtaccggctcggggcgcgcttgatgactccgttaagctcagttggctgtctcccgagccgacatagatgtttcccgcagcgttctcatgattggctcgggctgtgttcatatgattaacacccgagccattttgcaaactctcttcgggacggtcgatcgaataaggtcccgaggtgctttgttcttagctaggggccaatcatatgtttaatcatgaggtgattgttattcttagactgtttggctcggtcttgcttgtgggggaatccgaccccaacagttagccccccagctcgttggttaagagttaatgcgacgagcttcatgaatggtgtgaccgagccagctgcttccgcatctaaactgactgatccgtatcttttgagagtaaggcttgttttttcttggtgctacgagattctgttcttgacgggtgttgctatctcgaactcaaaatgttagctgttgacaagttgtgagctaggaaagctgctaggagacttgttgaagaactccaagctgttgacgagctgttaggcgggcaatagcaagctaggaaggctgccgacgagctgttagctgggcgaactacgagtcagaaaaactgcagacggactgtggtggttggctcgggtacaaattgcctgagtcaaagctgggttcagtatacttcgttccgagctgatcgtctcggtaccaggttgttcgggataactggatttctaagcattga

SEQ ID NO: 159060 - DNA, 483 bp, Arabidopsis thaliana landsberg
agttaaaagcgaaaatcttcgacaaagatgtcggtacagaggatgatgcggttggtgaagcaacgtaagttcctcaaacaacatcgttttagattcccaattgatacctttagaacctaattgaggagttatgttatgaaacaatgcagtattccgttggagccggttttcgtggaaggaagtattccaccaactgcatacaatgtggtgaaagatgaagagtacaaaggagagatttgggtggctctctccttcaagccctcggtataaaacatcttgcattgttcttgatttttggtcttacaaatgtttaagtagaatctaaagaacaatatgtttattgtggtggtgtttgttaggaaaaccgaagcaggggtatggacgaggagtcctatgggggctggaaaaactctgaagcatcatactaagagaagaaaccattgtgtgtcactgtttgatttgagtcttgggaaccaaacgttg

SEQ ID NO: 159061 - DNA, 9560 bp, Arabidopsis thaliana landsberg
  unsure (1)..(9560): unsure at all n locations
tcttttggtatggatcaagtaattctcatgtgtggtaaatgggtctatgagaaaacaagatggctttttgtcgttgatagtataaaaggttgtcgtgtacttgaaggtaatagtcaaaccagttatgatgatctcatccaaatggtgtatgaggattacaatgtcaagaagagtgtatttgaagttattttgagttacaagatctcgaaatgaaagcaattaccagcagatactccacctgtactcattggtaataatagacagtttcagtcttatttgaggcaaacgaaaaatgctattgtttgactttgtgttgaattaaaagagaaagttctatatgaatcagaagaggaaatcattgatgatttaggtagcagcgacttgccgaagacaaaagcagttgatgtatacggtattgtcgaagagaacattgaaaacgttgacgtatacacccctactgataacgttgttgaaggacaaaaatctgaagcagttgaagatggtgaagatgacgagagtagatttgattactgtgatgattccgacggaacagattctgatgatgagaactttagcctctatgggattccaccagaagaagaagataaaacgaaagtaccaagcaagaagaggagtttaagtgtatatgtagaagaagataaaggagatgctacatacgagaccttagaactatcgtcattgggattggccattggtcaatgttttgaaacgaaaggtggcaggttctgaattttacttacaccgaagtcgatacctccgttgttgtggccggagaagcttcttttgataaggagtaaatcagaaagggaaaaacccacgaccctaatgctgcaacaaatctacagatctgcaacaaaaaatattaatcgccatcacaatcaaacaaaattctatcgataaaagggacttattcaaaagcggtggtggcgggtcaatagtttacctacaccaccgaagaagtgaatctgggccaccgcgactcttccctgctgtttgtgtagccggaacctacggcggctacaaaagcttgtaccaaagaagaattctcacgccgttttgtgtgagaagaagcagcgaccaccggagaagagatgtcgccaagtcaagcagcgaccactggagagagaagtcgcctagtcgagaagccaccaccggagaagagaagtcggcgtatcgagaagccaccaccggagatttgctagggtttcaatttgaaatcaaagaagaagaagagacatgcaaaagcggaaaagagagaatcgagaaaagcccaaatcgatttgagttttattcctttgggttttttacatgtgttttatttattcctttctttttattaatcattttatttttttttttaatcaaagtatggtttttagtatcaaattatggttttagtactgattaaggttaaaaagtcttttcattaaaaatgttagtcattctagttagccatcaattatgagagtcatttaagttattaatcctaagttatgagtcaatctgagcaaaattcagttatgaacaattgacgtcaaaatttaggtaacaaatacggttgattttattctataaatgacagagaaagagagaaatttggttgacaccataagacaaacttggattatcaaatatggccaaaaaagtgagaaaaagttatgacatgacatttttatgatcatgtttagttcatatatatgtagctcaacgtgatgatgaggtgtctgatattagtgtcatgaggttgaattgtgggatatagatttaaaaaaccttttttttttagatttaagatttaaacaacttcttcaacaggtttgagaatattttaaagtttcagatttgaccaaatatgtggagacaacaaataagcatccaatgtactcagagtaaattgaaatttggtagattattcgggagatgggaactaaggagtcgaatttcaaattcagagggtgaaatgaactaagtcgttttagtagttaattcataggcttattgaactatgtttggtttaggttagtaagtttaaatttattgctctgttttaacccacataattgcgaatattttacatagattaacatggagaggatgaggaagaaagtaagaaagagaacgaggaaaataaagatgaagactataacgaagaagcgaacggtgaaaataatgatgacaacgaccaaaagaaaattgataattaagattaaatgaaggaatatgaaaagtaagaaacaatgaatctacttaacatttttgaagtacaaaataaggattttattgggtcgttttttttttgggttttacccagtttttaacccagttttttgggcccaaaacgattgatgctctctctttcggccctaacctcactttcgattccttcaaatattgccgctcctgcaaacgagcgcacaaatctcggtttgatcattcagataatcaatgtacttaacataaaagagattcaattacccgatttgattgaagaatatatactaaatcagttttaatcacatcaagaatatatagtaaatccgacagttaatattataacctcccaaactacagctacacgaatcattctgcaatcttttcacaatccttcaacctcgctatattgaattcttgaaatcaatgtggttaccaaaacaatctagaacatatttttttagttcaacagatatgtcaatatctacatatcagattcaatcatctttaacacgaagatatttttcaaaccggatttccagtttcatatcctagcagagaatattcacagtatgattctcaaagattacgcctactccataatctaaatctaaaaccgtatacaatctcaaaaccactataaatatactctagattacatatcatttctacacattgcagtctatcaaatatcacaccatttttaatatcagaaactttgcttaccattcaaatggctgcctctttgctttcctgagggatgtccgaccttacaagacctcatggcgtgtccaagtgaaggtgcttcactcttggcgtcaatacactagcatgactggtgaaacactcgagttagtcttggtaaactcacatgtaagttcacaaaacatattgtattgacatgtgattttcgaatgccattctaattatatggtttctgttgttaatagggagtcaagattcatgcattagttaagaaggacttggtgagcgattttgtgaacatcgtgcctttgaatgagtgaaggctgatagaaaccttagctcttatccatgcatcaggtcgtttccgacctattggtcatttataccagaaggcttttggcactgggaccccgggccatccggggggattttgttattaattccagctacctttcattagctactttcgctaatatccaagctagtgactcaaatccggctattttagttggtaagcctatgaccagtagttaaatttcatcacgctaaaatttcatctcattaacagaatgtgtattcaactagatgttgatatatcctggtttttactgatttctaacatagtttcagaatgatttttagagtctttctagtctttttcgtatgttttgagtcatttcaggtacacttacacatctgggaactatggagcacaataaggaattttggaagcttttcagcaatgaagttcttgaaggacgtttttcagaagctggtgtcgatcgacactcttattgctgccaagggaattctcgttttctaccaagcctttgaaaagccctgaagttttccttatttacaaaatagtccctacacgtttttagtcatgaatatacctaattgtttggtcattgttagacctaagttttgctttagagattgttacacattttgagagaagaatccaatccttttagagaggattctgaactcccttactttcattcttaaatcatcaatgcaaactattcagattatgatttgtgtttctggtatcatgtctgggtaatcaccttgttgggtttagggagtctaaatacggatttagatggattagtagatggaaaaccccttaggattattcttagagttcttcatattgattattcttcttgctagttttagattgatcacctagaacttgatattagataataggtatgcccgccataggtacttgttattagaactatcatagatgagcctaggcatttaagaaaaaacaggtaggctcatagaagggctctggtttagatactaggtgaacttatcaagcttattagcaatgcatgttttagcatatgatttctcgacttctctggttatctagctttaagtatagagagtttcgcggtacgccactggctactctagaatcatagtttgagttcgagaacggtgcgttaacaatcctaataatagctagatctatgatttatctatctcccaacgctttaatcacttgaatctacaactcgtttacttgcttatttgtcttttacattcaattacttcatctagcttattaaacaacatcataagtctattgtgtgaacatcgagagctcagtggaattcgacccttaagtgctaacgacgatctcttatttgagggagtaagcttaaggcaatttgagctatatcaaatttggcgtcgttgccgaagttctcttttagttcaccattagactaggtgtccttttaagtctagatacttcttttttaccacatattcacatgtttctttgtcttttggtctcttgtgtttcaggtaccttcagattgagaatcacgttcccatggcagactttcacggctgtgtcgacagacaatatcagggtgtcgaccgacaccctctgtagaaccagacggctacaataggcgattttaacagaaatgatctcttctacacaaaccgatcagcattcaagctacctccttttgaaagagatgactttgctatacaccctgcctattatgatcttgtatctaaaggaaagtttagaggagctcccgatgaatcaccattggatcatttggaagtcttcgaagacatcgtttcctctattaaagcagaaggtataccggctgattaccttctttgcaaactcttcccccactctcttgcgaccagatgaacatcatggttgcgtcaactagaaccaggttccttaaccagttggactgatacaaagaaagcattcatgattcacttcttcgatgaatccgtgatagaggcaattcgtttgcaaatttcttcgttcactcaggctccaacagaatcccttagagcatcttggctccgattcaggtcttatcagcgtgaatgtccccaacatggtttccaagagagccaactcatcaacatattctacaaaggaatagactagccataccagattcaacttgatgcagcaagctcctgtaacttcatgacaagaaccactagtgaagcattactcttcattaccaatgctttaactagtctttcgacacatgaatttgacaaagaacgaagaatttcagctgagaaagccaccaatagcaaagagactcttttttcagcaatttctgctccttcccaagccccccccccctcgtccctcatcagagaccagaatggagtctatgttctctctccacagatctccataccaaatatgattttctctccacagatctccatagcaaatatgattctctctccatagatctcattagcaagattgacactctacgctctcaattctccaatctctcacctacatcagcttctatcaatgcagtcacactacgcagcggaaagcagctcaacccaatacttcagcgtgaacaatcggctcagcattcatcttctccaattgcagaaaatgaaacagtgttgatcgatacaccagggtgtcgatcgacaccaattactcttgacgactctgtattttcctttgtcgagtggaatcgacaattttaaggaggaggaggaaactattcccgatggtgttgatcgacacccagctcctgtcgatcaacacccagctcgttcagacaatgtgcaaattccagctgcaaccaagtcagcaaatcgacgaattcctttctccaagagtcctaaaaagtcaagacaagccttagatgatgtcagatgcaaggctatgattgacaagctgattgttgagatgcctctagttgaagatattcatctatctcctataataagaaggtatgttaagacaatggttactaagaatttgacaaaagaatgaagtgttatgatgattttagagcaaggcagcgacattatttaggaacgaatcccgaggaagatacctgatcctggaacttttgtacttagtgtcaccattaatcatgattccttcccaaaagctttacgtgatctcggttctagtgtgaatctgatgcctcgttcagttgctatgcgtcttgggtattccaatcttgagcctacctttatcactcttgtgttggcagatcgttctacccgaattaaagatggaattcttattgatgctcctgtgatgattagaaagagcatgattcctacagactttgtagtcttgcctaatgagaaggaacctaaggatccattaatccttgggagatccttcttgcacacagctggagcaatcatagatgttcgagaagggaggatagggctgaatgttggcgatcttactatgcagttcgatatgaacactttggttaagaaaccgatcatagaaggtaaaaccttcttgatagattctttcacttcatcagctttatatagtatttcagagatgaaattagaagacccactagagcgagttttggtctcttccatagaggatagtgcagatttggactgcgaaacttcaacatatactaacctgctagatgagaccgaacatgtgatgcaacttacagttgaagaagctcttccatctgtgactccaacaccgactcttacttctgattgggatccagctaaggctcctaaaatcgatttgaaaccacttccagcagggctgaggtacgcttttcttggtgaaaattctacttatcctgttatggtgaatgcttctcttaatcccgcagaactcaccttattgctgagcaagctgcacaagtatcgtanagctcttggctattctcttgatgatattccaggtatctctccggacttgtgtatgcataggattcacctcaaggatgagccaaagccctcagttgagcatcaaaagagactaaaccagaatctaaaggttgttctttagaaggaaatcatgaaactgttggaagctgagattatctttccaatttcatatagtgattgggttagtcaagtgcatgtggtttacaatggttaagaatgacaagaataagttgattcctacacagatgataagtaaggttttagggtttttaggcctacttatgtgctgaagtgttgtgtattcagttcaattccccttaaacacaaacatgtcgatgcaactatagggggtgtcaatccagtccactgttattgctagcaatcaagatgtgtatagaagcgactaagtcaagccagattataatgatggttggtttctagtaacaatcctaggtcaggatggaaacaactaaaaatgagaacttaagggccctactcgatcattgggtcgagtagaaccaacaagtgacaaatttaagaactaaaatgcagtcaacaggggatgcaaataacaggtaaataaaagtgcaatcaaggagtgaatacaaataaatctaagaataatagaagttctagggatggattcattgataagggcaactctagggttcatcaggtggctaacaggcgaaaggcagataccctagacgatagattcaaaaaccaggtcaatccactcttgtgacagagacccccacaactctaccacttcttaatctcaactctcgttgatgaaacatagctgaacaaggtttaagcaacaatctaccaaagtcaataagcagtcaagccaatctcttggtctatagcctacaaatctccggaattcgtagatcaggcatccatttgaacgtcttttggacgctggatacctatggtcgaatctccacattagccaccgaaaaccgcataggggccaagcgaatccacaagggctctaacctaatcttaaccacctgactaacctacagattaccctaatctaatccatcctcaagaaccctaatcactactcaagcaacataactaagaacacaaaccctgtaactacggaaatcataccaaaatgtagatctaaacaagctaaacaactttacttaaagaactaaatacaaaaacgaaatagattaagagtagttaagttttgaagattcaagaacaaaaagaaaaactaaaggataaaagctagatcctttggacaaatcccaaagtgatctattgatagtaaaatgttgaaaaccctagattcactagaatacaagagacttgaggcggtttgggcgagtgcttgatcatggagattgagtaaagacggcgctgcaaagtctgcgcctttgtgtctatgctccgagtgatcaattggtcgagtagatgcttcttcctctcctatccgtatgcttagatttctggttgagaggggaatgaggaggatccgaagacgctttgatagctcaacaagtcttgtagtttggtcacccttggtcgagtaaacgggtcgagtagaggatcgagtaggaggggcgagtatatcaatctgctgcttcatctaaggctgccttgatcgagtaagagggtcaagtaaactgcatcctcctctttagctgcctcgatcgagtagagaggtcgagtaaactgatgcctcttctctagctgcctggatcgagtgaatggatcgagtagagtcctttttagccccttctgcacctgaaaacacaccaaaacatgcaatgcgtatgcgagatgatcctagatgcctaagtatgcataataagctaaaatgatgcaaaatgatatgatacaatgagcaaatgcacagttaaatgatgataaacatacacctaaaatgagtaaaatacagtgttaacaactctcccaaacttatatcttgcttgccctcaagcaaacaaaaaatcttaagttgaaagagaggtttgaaggtggggattcaaaaatcgaagcatgcatatagaacaggtaagctcaatgtccaggtagctaattctaggttgcaaagtgatagacccttacttaaaaccgttagccatactcgtcacaatgcaacctaacaacctgccttaatctattcaaacattcacatcaaccagttccctttaacattcattaagcacgaatagtggatcaagcaatgcaatggttatgaactcactttgtttcgggcttaggctaagagacaaaaatggtccctctagaggtttggtcgagtaacaggggactctcagagaaaagattgagcttcagcagaatgctaaaggtaaaagccaatggacccatacaagaacagactcccatctacccaatgatatagtatgatagctcagaagatgatcccagtc

SEQ ID NO: 159062 - DNA, 516 bp, Arabidopsis thaliana landsberg
cattcttgtctgttctgtgtatgagtcttctggctagatcgaaatggtcctacttcaatgcaggtattgggaggccaagaagcaaaagaagaatcaaggaaagactggagataccctccgtgaaaacttccccagagatgaacagattagattcggtgatgtggtgcaagctccaccaaagttggctcttgttccaaaggtatagtctcgctattgtttctaactgtaagaaaaactcggctgtgctattggttcaaatgattatatgtatgttaatttggcaggcaagaaagtatactctaagtgctccgcaggcgaggctacaattagaggccatcgatgcttacagatctcgcaagggatgcaagaccaggtgttcccattcctgccatggtcacgcaataagatggaccacgagtgaactcttttttgttatctgctgtttttttgtactaggtggctgtaaaattatacaatattgtgtcttgttcatcagatataatatatgatagctga

SEQ ID NO: 159063 - DNA, 691 bp, Arabidopsis thaliana landsberg
taatctctagttttcgccaccgctgatctcttgttcttctcttactgagttttgataattcgtcgacgatcaaatttctcaagatctgataaacgattttctctgaatcttcgataaggtaatcatatgattagttcagaatttttatatgttctttgatataattctccctttatttttctgctattttttctatggaacttttggttttgggtctgtttatatgatcacacggaaaattagggtttgcgttatatttcttgcggagtaattttctgtttcgaacgatctgaatttcttgttttaagatggttttcatcgatttggtattcaaagatgttaacttttcgtgtggaaatttcttaatctctttagggttcttctttgtctggttagctacttagcttatatcaaatcgtttttagggttttcttagatttgtgctgatctctctgtttctcataaaagttgttgcaattgctaacaggtaccgtttttgaatcaggacatggcaacactggcaccagttcatgctttttctgttatgcattctcagaagaggggaggttgcaacggtgagctcacttttcacttttttttttaccatttgatattatcctttaggttccttctgtttcaagatttgagtttttaatcaggaaatatttgtgtcgtttgcaggagttcgttt

SEQ ID NO: 159064 - DNA, 291 bp, Arabidopsis thaliana landsberg
cacatcataacacacttgaaaaaaaaacatcttaattagaaaacaaaaaggagagacataaagatgaatgctattaagtttgttgtgcttctcttgattgaagttgtatgtgtcaatgttggtgcaattaggcaactcaagaaaagatccaaatagtcagatttaagcgtctctcttcccaaagcgagccaaaggccgttggaactggatctcccccacctgtttacactcagtctataggtgatggaaaaggctttaatgatgctaaaataaagggtagcaaaggttcca

SEQ ID NO: 159065 - DNA, 611 bp, Arabidopsis thaliana landsberg
agggattagggttattttgacatctagagatgagaaacaagggcttgaagctgttgagacattgaagaaagagctcgagatttctgatcaaagcattgtctttcatcagcttgatgtctctgatccttctagtgtcacttctcttgctaagtttgtgaaaacccatttcggaaaactcgatatcttggtactattagttacctctgttaccggtcttaaaagcaagagtcttttgtgtaatgctgagtgatcttttgattgtttttacagatcaataatgcaggggttggtggtgtaatcactgatgttgatgctcttagagctgggacagggaaagtaagtatcttgtgatataattttcgataaatctttgtcaagtttaatgctttcttgttattttatacatggtaggaaggtttcaagtgggaggaaactatcactgagacttatgagttagctgaagaatgcataaagattaactattatggaccaaagagaatgtgtgaggcttttattcatcttctgcagttatctaattctccaagaatcgttaatgtatcatccttcatgggtcaagtaaaggtaagaatgcttgcaagatgttggcgggg

SEQ ID NO: 159066 - DNA, 774 bp, Arabidopsis thaliana landsberg
ctgctgtgaaaaaactcttcttatatacatgcttttctttctatagatgcatgaaaatggcgattgttcatgatattgcagaaggttagttctttcacttttagagattgttaatcatcgattttcttaatcacgagttgttgttgagcagccattgtaggagacattacaccttcttgtgggatatctaaagaagagaaaaaccgaagagaaagcgaagcacttgagcacatgtgcaaactcttgggtggaggcgaaagaggtctgtttctcttctattgttgaaataccttatgtatcttcgttcgaccttcttatgctcatttgtataacacttatcatcacttctaaaaatgtatatatcgtaattgcagcaaaagaaatcgctgagctttggagagaatacgaagagaactcttcacctgaagccaaagttgttaaagatttcgataaagttgagctgatactacaagctttggaatatgaacaaggtaatgaatgaccaataaaagaaactctctttcgataagagatttagcagaaactaatactcatattgttttttgtttgctatttaacgcagatcaagggaaagatctagaagagtttttccaatcaacagcaggtaatttttgttgtatgtcattatactctaaatagataatctgaatatggttgaaggctttaagcttgttactgtttgattcagggaagttccagactaatataggcaaggcttgggcgtcggagattgtttcaagaagacgaaagcac

SEQ ID NO: 159067 - DNA, 389 bp, Arabidopsis thaliana landsberg
gatattcgccgcttccccttggccggctataaatcagataacctcaccgataaatcctctattcatcatccacaacaaacctcttcttcagtcttttagagatctcacgtttcaaacagcaagaatggcgttccctaaggtatacataacacgagaaatcgacggccagcccgcgggaaggatcgtgatggagctgtacaccgataagactcccaggactgccgagaatttcagagctctctgcaccggagagaaaggtgttggcggtaccggaaaaccccttcacttcaagggatctaagtatcaccgtgtgatccctaacttcatgtgccagggaggacatttcaccgccgggaacggaacaggcggtgagtcgatctacgcgagca

SEQ ID NO: 159068 - DNA, 819 bp, Arabidopsis thaliana landsberg
cctcaatatataaacactacaatctatctggccgactcttactgacctcagagctcagcaaaaatggttcaacgtcttgtttaccgatcacgtcactcttacgccaccaagtccaaccaacaccgcatcgtcaaaactcctggtaatgtactaaaagctctctaatgtctctttgtagtgactcttgaaagatcattgaaattttgggatctaagtttttgttgaaaatttggggttatttggcttaaaggtggaaaattgacttaccagacgacgaacaagagagctagtggacctaagtgccctgttactggcaagagaatccaaggggtaatcttttcttttccattttcattctcttatctgtttcaagaaattttgtgaattttggtgttagggttcgtgttctgaatttagttagattcccctgttgcaagaaagtttttgcattttggtgttaagagtttgtgtttgagtttagttggattctcagtttcaagtttggttcatgtttcttgatgtgtatttgtgtgttagctgttttgtctagtaatttggaaaaaagtttgtgaatttttgtataagggttcgtgtttatgtgtagtggtgagcaacaatgtgtctgatttttttgctatctaagttctgattcatttagcattgagacaaaatctggaactagacttggaatctagacattgtagagattaaagtgtttgtcttagcttggtaaaatagcgaaaaggtccatactttagatattaggattgatatgacttgtcgtaatagatttatacttcatgtccatttcagccagtt

SEQ ID NO: 159069 - DNA, 506 bp, Arabidopsis thaliana landsberg
atgtctctgcttctcaaccagccctcgaagctatgctttcggagacctgtgttggcgagatcctctcctcttcactctaatggcttctcttcttcctcgttgcaaacccctcctagtatgatggcgctcaaacgtacctattttgctgattacgctcatcattttgaaaaaaaggtgcctcccgagttggtgtataatgatattaaagatgatgatgacattggaacgatcgggtcttcgcatggttgggtagttactttaaaagacgacggaattctacgtctccaagacgatctaaacccggttgcatcagagacagatcccaaacgcatctcgctgccccctcttgtgactctgcctcattgccgaacccaaattgtcaccaacgtggccatgtcctcctcttctcctgaggatgacgaatgtgttgtggctgtcaagttcttggggcctcaactcagcttttgcagacccgctcttaaaaacccagagtggaccaacatcag

SEQ ID NO: 159070 - DNA, 1851 bp, Arabidopsis thaliana landsberg
catcaaccagaacttttattcaaagagatctatacaaacagaactcaccaatcttatctctttccttctccaccttgctttccaatctcaagctttaactctccctgaaaatgatgatgaacacaaagaagctcatgaagttggccaagaaatggcaacaaagagcagccctccacaggaaaagaatttcatttcaaagatcaagtattactactagcagctcaaccgctgcagagaagggttgttttgtggtttacacgacagacagcacacgctttgcttttccgataagctacctaagcaactctgtatttcaagagattttggagatatctgaagaagagtttggcctcccaaccggtggaccaatcacattaccattcgattcggtttttttggagtatctcatcaaattgatcaaaagacgaatggatggagatacagaaaaggctttgttaatgtcaatctctagtgctagatgttctttgcaaaaacaagaacagagtactcaacaattgcttgtattttagagaattagtgtgtagcagtttttgtgtttgtaaagattctactgtattagattaggcagattatttcagaaatacaaagtaaagtattatttgtgtctgtcttttagactgccttcatcaaaaccaactttcatgtaaacaaagaaaaatgagataacttttacttcacttgatgaatctttcattcatcacaatttcatcaattgtccttatgaatcttttggaagtgtaatacaagactgagaaagaactaatacgaacacggtatcttttctgatccaagcttaatctcaaggaaatgtgaatagttgattcactagctatttttgtttcctggccagacactctttagaaactactgctacatgctcttcatctttgcttcaccagcacatgcctttctttgtatctctctattggatcattcatttcaaccagatttgttttccgattgtcccctgaataagtgaaacaaatctattatttgatttacctgatggactactaaccaacctgggaatcttatccttcacaaaaaaaaaaaaagttgtacatattcatgattttggtatttttggcttctcttgtattatatgatataatgtagcaactgcctcttgcattcttcatcaatgtattagtacctaactcttgtcatataaatgtccatataaaattttgatacccacatgagcatgtccttctaagttctcaaacgaagttgtatagtccacaagttcatttgcagacatgattgattaccaacttaggacccctatgagttctgatcacacagagtagaaacataaggatgtgttgactcgtgcttaatagtcaacaagttcaaaagtctgtctaaatctattaagatcttcttctatataatacaacaaagcttgtaacattcttcatcaatcacagctcgcactaatacaaagatttctgcaacacaactttcaagtaatatttttttttgctttcctagagaataatgatgaacacaaagatgctaatcaagatgttcaggaaatggcaacagagagcagctcttcacaggaaaagaatctcattccaaagatcaagtactactcctgtagagaagggttgttttgtggtttacacggcggataacacacgctttgttttgcaacaagctacctgagcaaagagctcttgaagatagctgaagaagactttcgcctcccaaccggtggaccaattacattaccgtttgatttagctttcttagagtacctaatcaaattggtacaaagacgaatggatgaagatactgagaaggctctgttattttcaatctcaa

SEQ ID NO: 159071 - DNA, 296 bp, Arabidopsis thaliana landsberg; identical to SEQ ID NO: 59718

SEQ ID NO: 159072 - DNA, 579 bp, Arabidopsis thaliana landsberg; identical to SEQ ID NO: 48972

SEQ ID NO: 159073 - DNA, 2329 bp, Arabidopsis thaliana landsberg
aagtaggatgcgcgcattgagtgctttcttaataattaagatttataatggaatgtattgctgctgtgttaagctagaaatgtggtgtgtctgtagcttatttccacggctgcactataacgtcgtgaaattttgtagtgaacagatttctgctttctatagtttatgacatttgggaatagtttgtggaattacttcattgattttatattttgtaatggtagggagttcggaacgtacctgtggaaccctaaatagtcctgtgtgtgatattccctttcttattaaatgagcaatcactgtatagtagggcttttcatatgtttgggttgcataaataccatttttgtgttttagaaagtggtaatatcaaattatcataaagtccaactatacgtcaaatgacttacacattgcaagtatatatcattccttgaaataaaaaattaaaatcctttgcaggttcttggatcctttgttttttggagactaccctgcaagtatgcgccagaaacttggagacaatcttcctagatttactccggaagaaaaggagtttatgcttcaaaactcatgggacttccttggcctgaaccactatacgtcgaggttaatttctcatgtctcaaacaaagaagctgagagtaacttttaccaagcacaagaattggagaggattggtaacaaactctgaaatttcttatcccaatagcatcttcttacttgtttcctagtgtattcaccctctattctctccgtacacagttgagctggaaaatggagagctgataggcgaaagggtaagaattatcttcttagtctacgctcaatctaatgattttattgacatttttgcacatctgctaaaagcaagaatgcgcaagctagtaatcaactaaataatctgtgccaattacaggctgcttcggattggctttatgttgtgccttggggaatccgaaagactttgaattacatgagcaaaagatataaccaccctccgatctttatcactgaaaatggtatttactatcattgtaactctatggtacagcttaatatagtacaatgcatagcgtgttaagaagagcagtagttttgttatccaaataaagttggaagcaacgaattgttttggtcatatcgaacttctattatatatatcctgaggttaagatctcttggtccaacacgacaggtatggatgatgaagatgatggatctgcctctatccatgatatgcttgacgataagcgtagagttgactatttcaagagttaccttgccaacgtctcccaggctattgagtaagtcaacatttttcccttcattcacttgttttacaagcgacaaaaacttaggaaacaaagaatttttatcaagtaaattagtgagagtgttatgttaatggcgcaaattgaaacagagacggagtggacataaagggatactttgcgtggtcgctgctggacaacttcgagtgggcgcaagggtacaccaagagattcggtttggtatatgtagactacaagaacggtttaacccgtcacccaaaatcatctgcttattggttcatgaaatttctgaaaggtgatgaagaaaacaaaggtaagaaggaatgaaaaaggatcaaagaaaactaaagctactacagcattttacatgaaatgtgttgtgatgttataatttttgtaccaaatagatcaattagttgatgatgatggtatagagccataacaaaccaaatcacttggggtgctctttggttttaaactcatattttgactaagtgtttcgtattacatcgattttcttcttcttacctatcgaaagagttacttaagagttcaatagtgaatattgaaagagttactttagagtgtcttaaacgatgtattagagttagactggtttaacaatgtttgatagtgaatatcgaatttagccaagaagaaggaatcgaagtccatgtgtggaggttcttggatagttagagatcacacatgttcgactttgtatcacgctagagatgttcgactctccagttctaaaatcgaattgtagccaatttctctggtcgtcacaaagccttagtgacttgtgtgtgattcgattgatcatataattcaacggcctcgttattggacgtagttggaaaagattcaaccaaactttttttgttttctctattttgattgttcaattgttatcatctcggttatacatgtgaacattaattacttacaactcttttgtctacttggataacagaataagcatgacgataagactgatgaagccattgttcaaccagattctgtcacattct

SEQ ID NO: 159074 - DNA, 1939 bp, Arabidopsis thaliana landsberg
  unsure (1)..(1939): unsure at all n locations
ttattttacacacttaagcatgtaggatcatcttgcatacatattgcatgttttagtgttttcaggtgtagaaggagcttacaaggattctactcgacactctactttatccaaccaacaaggaagcagtagagaattctactcgaccagttcagtcgatcaggcagccacaaaggaggcagcaattcactcgaccaacttactggatcaaggcagccttagaagcagcaacatatcgatctactcgcccctcctactcgatcctatactcgacccatttactcgaccaagggtgaccaactctacaagacttgttgagctatcaaagcgtcttcggatcctcctcattccccactcaaccagacatttgagcatacagataggagaggaagaagcatctactcgaccaattgatcactcggagcatagacacaaaggcgcagactttgcagcaccctctttactcgatccctaannnnnnnnnnnnnnnnnnnnnncctcaattctcttgtcttctagtgaatctagggtttcaacattttactagaaatagatcactttgggatttgtccaaaggatccatcttttatcctttagtttttctttgtgtttatgaatcttcaatacttaattactcttaatctatttcgtttttgcatttagttgtttaagtaaagttgtttagctttgtttagatctacattttggtatgatttcagtaatttctgggtttgtgttcttgagaatgttgcttgagtagtgattagggttcttgaggatggattagattagggtaatctctaggttagttaggtggttaagattaggttagaacccttctagattcgcttggcccctatgcagttttcgttggctaatgtggagattcgatgatagacatccagcgtccaaaagacgttcaaatggatgtctgatctacgaattccagagatttgtaaactcgaccaagacattggcttgtctgcttattggctttggtagattgtttcttaaactctgctctgctatgtttcatcacccatagttgagattaggaagtggtagagttatggaggtctctgtcacgacagtggattgacccggtttttgaatctatcgtcaagggtatctacctttcacctgttagccacctgttgagttgcccttatcaatgaatccatcctcagaacttctattagatttatttctatcccctattgattgcacttttatttacctgttatttgtatcccctgttgattgcattttagttacttaaattcgttacatgttggttctactcgacccaatgattgagtagggctcttaagctctcatttttacttgtttgaatcctgacctaggattgttactggaaacccaccaccattataatctggcttgacttagttgctactgtacacatcttgattgctagcaataactgtggactggattgacaccccctatagctgcatcggcatttttgtgttttaggagaattgaactcaacctcacacattcagcacataagtaggcctaaaaaacctacttatcaatttggcgcgattgcgaattcattgttgcattgtttcattcaagatatcagaaaaagttaaaatcaagttcttttacaattataaagttactaactcatatttttgtctgcttgtttttgtggtataggtactaatctttgtgcatgcaaactcgattccaaaggttctgcacacctactaccattcacagacagaatcgatagaatacctcgtgagttacaagaaaccaaagcaaaggcagcctgtgatcagcaaagaccagctgctatggatcaatagaacaaaccagttgatgttcaagacccacctaatgttgatcaaccaagaaacattggcgcaggtgatgccccaaggaatcatcaccaaagacaagggatagt

SEQ ID NO: 159075 - DNA, 591 bp, Arabidopsis thaliana landsberg
atgatttattggttagtataaaagatttacaaagtggggttcttttggtattaggcaaagaagattgattcaaaggaaagtgcaagacctgtttatccgtttgctgctatagttggacaagatgagatgaagctatgccttttgttaaatgtgattgacccgaagataggtggtgtgatgataatgggagatagaggaactggtaaatcaacaactgttagatctttagttgatttgcttcctgagatcactgttgttgctggtgatccgtataactcagaccctagagatcctgagtgtatgggaaaggaagtaagagagaaagttcaaaagggagaacaattgtctgttattgaaaccaaaatcaatatggttgatcttcctttaggtgctactgaagatagagtttgcggtactattgatatcgaaaaggctttaaccgaaggtgttaaggcgtttgagcctggactactagctaaagccaatagagggattctttatgttgatgaagttaatcttttggatgatcatttagttgatgttcttaatgattcagctgcatcgggttggaacactgttaaagagaaggga

SEQ ID NO: 159076 - DNA, 791 bp, Arabidopsis thaliana landsberg
gggtaaacatatcttctttctctttgaaatctcagtctttggaaccacctcaagtttctaatggtgatcttctttaacttcaggtagctgacttgggcctctccagagaagaaatggtagacaacgatgcagctaacatcagaggaacatttggctacgtcgatcccgaatacatttcaacaagaacattcaccaataaaagcgatgtctatggcttcggagttttgcttttcgagcttatagcaggaaggaatcctcttcaaggtctaatggaattggttgagctggtaacataaaactaaaaagtcctcgaaatctccaattgttttgtttggagaattgcatgtaaagactgaacgttttgttgttgttgatgaacagccggctatgaatgcagaggaaaaagggggatgggaagagatagtagattcaagattagatgggagatatgatttacaagaagtgaatgaagtagcagcttttgcttacaaatgcatctctcgtgcacctagaaaacgtcctaacatgagggacattgttcaggttttgactcgtgttattaaagtgagacattgcagaaagcggcagaagaattctccgtcgccgtctccacggcttcctcctcctcctccgatagtggaggagtcagaaggtgagttaactgcaaacggatcattacgatcagaaattcatcggagggataattccttggacagtagtatagctgaagacgtgattttgtaaacaaaatgaaaaaaaagtctcaatttttttaattattattaactttt

SEQ ID NO: 159077 - DNA, 1106 bp, Arabidopsis thaliana landsberg
  unsure (1)..(1106): unsure at all n locations
gaggtagtttattgaacctctccaagcaacctgggagcacggttcagatactcggagccgaaaaagctctttttatagctcttaagacaaaacacgccacacccaagtacggtttgatttttcacgcatctctggttggtcaagcagcaccaaagcacaagggaaagatctcgcggtctttagctgctaaaactgttcttgctattagggttgatgctcttggtgatagccaagataacactatgggccttgaaaaccgagctaaggtaacaaaattcttcaatagctttcctcttgttggtatctctctgaacaatctttggcctccttaactgatgatgtttctgatatgtgttaaaaactcacagcttgaagcgcggttgagaaatcttgaaggaaaagatttaggtcgtctgtctggttcatctaaaggcaaacctaagattgaagtctataacaaggataaaaagatgggatcaggcggtcttatcactcctgctaaggtcacgatcattctctctgtttttgattcatcatcttttcttctaattttggatgtgtgtacatattgtctttgttcttgggattatgatgaagtgatcttgactgttttttgttatgtgcagacttacaacactgctgcagattctcttcttcaaactcccacagtggattcagagancggtgtgaaagagaagaaagccaaaaagaagaagaagaaggctgatgatgaggaagaagccaaaactgaggagccttcaaagaagaaatcgaagaagacagaagcagaacctgaaaccgccgaagagcctgcaaagaaggagaagaagaagaagagaaaacacgaggaagaggaaactgaaatgcctcctaagaagaaggaaaagagtgagaagaagaagaagaagaaaactgaggtctgaggagagtttcaaaattttgcgtgttctagtttacgttgttatcagaagcaaagaaaatcttttgtggcgttaggtgttaagtaaggtttcttgttttgtttgaaacttaaaaaaggaactactcttcgttttgtaaggttctaatatgtttggtttagtccttatcccagagacttacatttt

SEQ ID NO: 159078 - DNA, 271 bp, Arabidopsis thaliana landsberg
cgatctatagactggtgcagggagagctcatggaagcacaatcccgatcaggtatatacttctacaccccggagcaagagcaactagcacgggagtctctaaggaaagagcagaataacctggagtatacgattgtgactgagatctgaccggcaaagaagttctacgaacgctgaagaatcccatcagcagtcccttgtcaaaggtgggatagcatggaaacgctcaatcacctgcgtagatctgcaaggaccctggccgctgctatggc

SEQ ID NO: 159079 - DNA, 595 bp, Arabidopsis thaliana landsberg; identical to SEQ ID NO: 45699

SEQ ID NO: 159080 - DNA, 630 bp, Arabidopsis thaliana landsberg
ccatgtcgaattcatcatgacttatatgtagttgtttgattgatgcttttattttttcaaattgttattagtattctgggggaagggttggattaaaactctcggtttcttgatttcaatcaggcaacaacagagtgatgagaccccaatggtgtgggagatacttctatacatgtacatcctttactcaccagattggcattaccgaagtacaatgcccacttttctcttcctctacggtgctgcctttgccatagtccatgcttacctcaggtttggaattggtttcaaggtccactacgtgatactttgccttctatgcatccctcggatgtacaagtactacattcacacagaggacacagcagccaaaaggattgcgaaatggtatgttgctaccatcttagtgggaagcatatgctggttctgtgaccgtgtcttctgcaagacgatatctcagtggcctgtgaatcctcatggacatgctctgtggcatgtgttcatgagtttcaactcttactgcgcaaacacattcttgatgttctgcagagctcagcaacgtggatggaacccaaggtaaataccttctgggagttctccctatgcaagatcgagaagccaaacacaatg

SEQ ID NO: 159081 - DNA, 612 bp, Arabidopsis thaliana landsberg
tataatgttttagggaacgaggcgcatcactcgatcataagacaaggacagtatgtgcatatggacgacttatgcaacggtcatatcttattatacgatcaagcagccgccaaggaacgttatatctgttcctctcatgatgcagccattcttactatctccaaatttctcaggccaatataccccgaatataacgtgccttcaacgtaagatatacccgttagcctgatctttttgttcaacataaatgttttggcccataatcactttgtcctaaacaaaactctatataacaggtttgaaggcgttgatgagaatctaaagagcattgagttcagttccaagaagagcacgtatatggggtttatcttcaagtatagtctcgagataatgttcattgaatctattgatacatgtcgtcagaagggttttctaccggtttcattatcgtaaccattcatatcctagatcagagttcctactaagaatgcaagtattaagatcaagtccggacatggtttaacccatggtagcaagccatgtgacaagacagatactgcggtccccggatagagcacggatgtttgcatggtagcccaccagatgtgtgcc

SEQ ID NO: 159082 - DNA, 1977 bp, Arabidopsis thaliana landsberg; identical to SEQ ID NO: 28490
  unsure (1)..(1977): unsure at all n locations

SEQ ID NO: 159083 - DNA, 3396 bp, Arabidopsis thaliana landsberg
ataatgccgcctctaaaaaagaggaagagaggactaacaaaaccaattgatggaagaacaaaagaaacgacggaggagccagcagcgaagccaatcaatgctgtcacaaaggcaacgacgaagaagccgacaacgatggaggagccatcatcgacggagcaaaatccggcaattgagggaggaggagttgaagaagaaccagtcccaacctaaagtccgattttagaggcaatggaagaagagaagtctgacaagaatgaggaggaaaagtctgagaaaaatgagaaagaagagagtgatgaagaagagaaagaagaagaagagaaagaagaagaggagaaagaagaagaggggaatggcgctggaggagagtcctccgatgatagtagtagaaccttgggcgaagaaacctcgtccgatgagaatagggatgatgagactacagtggaaaatcaagtagaaattccggcagcaatgataagtatttctcaagtatttgaatggtatgaaactagtagaacaggataatactatgatttctggagaatactgtcattactaggatataactatgtgtatgaattttgggtaacattggtagtactaagatagaactatgtatatgatttgtaggtaatactttcattactaggatataactatttgtatgaattatgggtaacattggtagtactaagatagaactatgtgtatgatttctgggtaatactgtcattactaggatataactatgtgtttctggttaatattatcattactaggatacaagtacgtttatgatttctggataatactgtcataactaggatataactatgtgtatgattctaggtatacttggtagtaatatgaatgaatgtctattgctggagatcgacaaagaaacagaagcaataccaccgctgagtatgtaccgccgtcagaatatgcgaagaaaatcaagctttcaactcggtgctatattcatgaagtgttgactacattcgataagttgcagcttgcgatgagcaagtccgagagggcatggtttgagaatcatccaagtttccaatacatcttcgcacgacgcgcattgaaaggaagaaagaagcgtggttcatcgtcaatggcgttccaatttgatatggtatatcggaacacgcattgatatcgggcttcaattgcaagaactatacacttgggtataaaaatcagggaaatttggatttcaagaagaagcatttcaaaaatactgttgtgaaacgcgaagacatgagagagaagctcataggaatatgatataaccctatttttactgcttttagctatgatttaggtatagtttttagagtctatttgttattctagagtcttttatagtccttttcaggtctttacatgtttgggattcatttggagacaatggagcattctggaggaaaatagagaatttatgctgctgaagaaattcagagactaaaaaccgcgtaggtgtcgaacaacaccactcctggtgtcgagcgacatcaatacctgacgacaattcgaagacgtaacttattgacgttttgaagatctctaaattcggcccaaaactttcgcctatgtttaatgaaggcccaacacgtttttaagacatatatattttttaggtcaatgttgagaccctaagcttggagaggctattctcctcatctcttttgtactttgggagcaaaaccctatggagactctctttggaaaagatcttctttactctttctcttgctattattgatttcttattcagactatgatttgtgttctattatcatatatgagaaatcaagttggttggtgaagggagtctcaatagggatttagattgattagtagatcgaaaaccccttaggattattcttagagttcttcatcttgattgctcttattgctagttttagattgatcacctagaacttgatattagataataggtatacccaccataggtacttgttatttgaactatcatagatgagcctatgcatttaagaaagaacatataggctcaaagaagggctctggtttagatactaggtgaactaataaaacttgataataatgcatgatttagtataggatttctcggcttctccggttatcttagctctaagtatagagagttttgcagaatgccactggttactctaaaatcatagtttgagtttgagaacggtgcgataacaatcctgatactagctagatctacaatttatctatctccctagataattccttagacccgactctttaatcacttgaatctacaactcatttacttgctttattgtctttacattaatatactttgtctagcttaattaaaatcatcacaagtttattgtgtgaacatcgagagctcagtggaatttgacccttaagtgctaacgacgatctcttatttgagggagtaagcttaaggcaatttgagctatatcaccactcacacgacgcatcgttcttagtgtcaacaatagcaaaagctaaaggaaatatattgaaattttcatcttgggttgttgctaataatagcgtacccaagtatttccctttcaaaaatatcgcgtccaccacaattacttttctaataaatgggaatccatcaatgcttgcaccaaatgcaatgaaaacatacttgaatctatctaacacatctatttcaagccttcttaaatgcaatgcttttcttatcatatataagtaagatggtagttggtcatattcagattcatcacttcccctaactaaatgcctcgcaaacttaagtgtacgatgtgacatccaataattaacctatatatataaaaataataaggcatgagacataagagaattctatataagtgccagtatgtaatactatatacctatttagctttactttaatgccataacataggtttagagcatctgcaacatgaacaggttgaacaccagctcgaacaccaccaacagattccttgtaaatctgtcctaatatagcatgagtagcttgacgcgctcgattagaacgcgctgtcacagagcatgtatggtctgatatatagacccgaatttcaaaacatgaaccaacccctgtgggtgccgctcgaactctccatttacaaccgggcacccatcatttgatagtatacaactccagggttgatcgaccaacattgaagtcaaacttctgaaatcatcttttgaatcaaatatttgaccaacttctaaatctactacagaaccaaaatcaaggttcacaaactcattttttctactataaacttgttgtcctcctgatgaactttcccatagttcaaacaaattgtcaccatttccattatcaaatccacactggttttgatcttcaaatac

SEQ ID NO: 159084 - DNA, 586 bp, Arabidopsis thaliana landsberg
cttctttttctcaatctcgattgttttcttcctaattcatgtcgatgatggcgggcatacaaggccagattctcgaggtcactggttcgtacctttctcacatccccaattctattatgttcttcaaccttatctatgatccgttgaaatgttaacttttaaaatttctgggattcttttgatttgtcagttgttgggtgccagaaattgaaagacacggaatggttttcaagacaagatccatacgtcgtccttgagtatggtggcagaagtcaccgtaccagaacctgcacaggttattattattaccacctcttttattcattatttgttcagatccagaaaaaattgaacaaagttaagatctttcaatgaatttgattgatgggtttgttttttcagatggtggaaagaacgctgttttccaagagaagtttatcttcactttgattgaagggcttagggatcttaaggttgctgtctggaatagcaacactctctccactgatgacttcattggcaatgcaacgtatgtgtcacttcttatcattgccttgttatgcttttaaatacccgctttggattt

SEQ ID NO: 159085 - DNA, 1221 bp, Arabidopsis thaliana landsberg
atatccctctccagttacctataaatcccttttgccagttttttcttcgcgctcttttttcggtattcattatacagtgccactctaacaaaggatctcacgtctttttcatagatttgtggatattttgaggtcttgtgttatcttctgtttctattttgcaatttgtcgatttggttctacttcaatgtcaataacatgaggaaatatatataaaaaataaaaaactcttatggattaaaaccattagctagggcatactgtgatagcagaatgtgcgaatactgatttgtgattctctgcagttacacaggatccgatcctgtgaaaattgctgttgagggagttgataggttcaagaaagaaaattgtgatcttattattgttgacaccagtggtcgccataaacaacaagcttctctctttgaagaaatgcgtcaaatttctgaagcaacggttttactctcttatcttaaagtcctctgtttttgttccttaattatgttggaggcgctaattgctgccttttcactttacagaaaccagatcttgttatatttgttatggatagcagtattggtcaaactgcatttgaacaagctcgagcatttaaacaaactgtttctgtgggagctgtaattattactaagatggatggtcatgccaagggtggtgggactcttagcgcgtaagtatcttgtagctgctgagttgtcatgtactcgaaatgggcaagtggatcttatctattttccatcttgttagtgttacagcgacaaaaagtcctgtcatattcattggaacaggagagcatatggatgagtttgaagtttttgatgctaaaccgtttgtcagccgtctcttaggtaaatatcatggcattgactgattgtgaggagttgactcagaatcttgataatgtatatgtacaataggaaatggtgatatgtctggattcgtgaataaactacaagaggtggtacctaaagatcaacagcctgaacttctggaaatgctctctcatggtaaatttacattgagaattatgtacgaccagttccagaacatgctgaacatgggcccacttaaggaggtcagaatctctggtcaaatataagtaagctaaagagcacaacgtgatgctgataaaacgaaatacggtgttggtttgtaggttttctccatgctacctcgaatgcgtgctgaaataatgccagaggg

SEQ ID NO: 159086 - DNA, 630 bp, Arabidopsis thaliana landsberg
gtttgttccagtaattgctggattagtgaatgttaatatgtgttagtcggcttaatctttgttcttgtttttgtagcaataatgcggggattatggcatgtcccttcttgctttctagcgacaacattgaattacagtttgcaaccaatcatttgggtatgtttagtttagaagaacttatgatctcctccctttttgcttctttgtttgaacttttgcttcatcgtttgaagtatgatgaggaacattttctatgttataaggtttatgttttgtacaatgcttcaggtcattttctgttgacaaaccttcttttggagaggatgaagaaaacagctagtgaaagcaatagagaaggaagaattgttattgtctcatcagaaggtcatcgatttgcttaccgggaaggtgttcagtttgacaaaataaatgatgaagcaaggtgattgttatgtgatagtattgtttattacttttgagttctagtgtagtaaactaataacatactgctattgctctcactgtttctctacagttacaatactttgcaagcatatggtcagtcaaagctcggtaacatcttgcacgctactgagctcgctaggctattcaaggtaagatagtatttcg

SEQ ID NO: 159087 - DNA, 480 bp, Arabidopsis thaliana landsberg
cattagatcatctggatatgtatgccaagaagttctctgcgttgaaagttgaattaagcagaactgagagacatgtactgaaagagatgggttttgtttgtcatgttgaacatcctcataagtttacatcaaactacctcgccacactaaaaacacctccagaattgaggcaagaagcttggaatttggctaatgatagtctccgtacaaaccctttgtgtaaggttcacaagtgaggttgtggcttgtggggtcgtgtatgctgctgcacgtaggtttcaagtacctctcccagagaatccaccctggtggaaagcatttgatgcagataaatctagtattgaccaagtgtgtagagttctagctcatcaatacactcttacaaaggcttagtatatctcctctgttcgcgagaattaaggtgaccagtcagataaaacaagacatcactcttttgcaaatatccttttcgtttccaaa

SEQ ID NO: 159088 - DNA, 1052 bp, Arabidopsis thaliana landsberg; identical to SEQ ID NO: 27202
  unsure (1)..(1052): unsure at all n locations

SEQ ID NO: 159089 - DNA, 1367 bp, Arabidopsis thaliana landsberg
gttgcactggagactgagttctttacagaatacggtgaagctagccgataccaaatccaagaagttatagggaaaggaagttacggtgttgtggcatctgcaatcgacacacattcaggcgaaaaggttgccattaagaaaatcaatgatgtgtttgagcacgtctctgatgcaacgcggattctaagagagatcaagcttctcaggttgctccgccatcctgatatagtggagataaagcatgtaatgcttcctccttcacgccgtgagttcagagacatttatgttgttttcgagttgatggaatcagatcttcaccaagttatcaaggcgaacgatgatcttacacctgagcactaccagtttttcctctaccagcttcttcgtggtctgaagttcatacacacaggcgagtgccttggcttgagaaattcgtgtttccttttgtccattactgcttttcaaactcaatctgatggaaaacttttttatttgatacagctaatgtgtttcatcgtgatttgaagcctaaaaatattctagccaactctgattgcaagttgaagatttgcgactttgggcttgctcgagtgtcctttaatgatgcccctaccgctattttttggactgtgagtcatttatcaccaagactgtgaaagcttaagttgcattagggtaacattctgtttaagtgcttgtggactcactcttactaactctgttttaataggattatgttgctactcggtggtaccgtgcccctgaactctgtggatcatttttctcaaaagtaagcttataactctcagaagattggacttctattactgtttaatttcttttagtctcatttttcttccaatcctttgatatctcttagaatatgatgtatgcctttcgagtccacttttgtataaaggcctgctctagttagctatctacatctgtgcaggataaggtttgattacagatctcatgctaactctacttttgcgcaatacagtatacccctgcgattgatatttggagcgttggttgcatatttgctgaaatgcttttagggaagccgctatttcctggcaaaaatgtggttcaccaattggatattatgaccgattttcttggcactccaccacctgaagccatatcaaaggtcagttatactattccagatgcttgttttagttttttcacagtttaaaactttgaattatagctctctttcttctgtggaagaagaaaaaaaaagattattcattagttgaaaaatattggatcaagcaactttgagttgcattgtaaatgaatatgctatcttcaaattgacagatcagaaatgataaggcgaggagatatcttggcaacat

SEQ ID NO: 159090 - DNA, 1882 bp, Arabidopsis thaliana landsberg
atctgagctggtcatgtttgtactgcccacataattattcttcttagcccttggatgaccaggaggataaccatgtactttataacatttgtccatattatgaccaacacgaaagcaatgagacacttaggtttctgtgaattcccttgtgccatcagaatattgttttgttcagtgagaattgcctgagcttgaaagggtgaaggagtagacaccaccggtcttgaatatccaacaattctttgactctcatcttgatctagcatattatagatctcattcaatccaggtcttggtttcatattcaatatctaaccacgaatgttattgaaattatcattcaatcccatcaaaaactgaatcacacgacttgtctctgcttcctcaagaagttctttaacctgatcataatcacatttcttcacagtacgaatccttgtgtttgacaattgttcccacaatgttttcttcttaatgaagtatgctgacagatctagatctccctgcttgagggtcataacagcctgttcaagttgatacttccttggcagattagtaaccttgaacctagtgaatagatcatcccacatttccatagcatcctgataatacaatatgctatcatagatctccttgttcacgacattaagaatccatgatttcaccatactattgcatctactccatatgcggaaactcaaatcatcctcaaaaggtctcaacaacgatccatcaactaagcctagcttgttctttgcatctaagctaattttcatcacaatcgaccaactgttgtaattagttccatcaagaatatgagatacaatcgttaaacctggatgatcttatgaatggagaaccaattgattgtcgaaagagtcagtgttcttcaacatcgatccacggacctcagaagtttcgaatcttcgattgagttgttgttgcgctcttgcaacttcaggatcttcagcaatcatcaagttacgagtagatcgagcaacataaccaccatcgtcaggagtatcactgagattcttcattttcccacctttgttcactattttcacaaaatcgatcgcgcggaagaacaatcgatgtaaagagaagtgaataatcgaagaaactgagtaagaattgaagattgaagatgaaatcaactggaaaaacgcaaaaaatgctctgataccatgatagagaacatgaatcaaagagatttgtgaatcgttttctatctttctcaaataacagaatgtacatgtatgaagtttatatactctactctaaaccgaataaaccaattacatagtaagttaaccggctaaaccggactatctatatacacactctattagttatcattaaccatctcactaattaaaccttaatgtttacgtttgtacacgaagtgaccatttaatgattttttttgtttcataggacaaatcttaaagatgtgatactagaaggaagagatgcattcaactctgcccacggcatgaaaatcttcgaatacataaattcggatcaaccatttgctgagttgtttaatcgtgcaatgtcggaaccttccaccatgatcatgaagaaggttctagacgtatatagaggatttgaagatgttaacactttggtggatgttggaggaggaaatggcactgttttaggtttagtcacttctaagtatcctcatatcaaaggtgttaatttcgacttagctcaagttttaacccaagctcctttttatccaggtatacaatactaattaatatatttgataaatattgaagtactgctagtttcatagctaccacttaaacctactttttgttgtacctattaaatcaaaggagtcgagcatgtatctggagacatgtttgtagaa

SEQ ID NO: 159091 - DNA, 2614 bp, Arabidopsis thaliana landsberg
agtctaatttgggtataaaagtcttttccgaataatagaaaatgaccaaaacacctttttcttcacaaattggtagcaatttatctaaacttggaagggtttttacgtaaataaacaagaataaaaagttcaaatgaccttaaagtttctaaaaattacagtaaaaccagagaaccatataaaccgtgaggtgtctccccagaaacgaagacgaagacagattccagtcaaagaggcagttgggcatcgacgtgagctttgacggtaccctatctcctccgtttcctctctctgtttctccgaactccggtgagtttccgacgctctctctgtctctctctcgcactctctgtgccattctcttactcttcagtgcggttctgttttctgaaatcgattagtctttggttttgtcaaaagcccataattttaccttcatttctgagaaattcgacgctgtttctcatgtcttacttgaatgtatgtctttgttgaaaacatgtttggttctttcgttttcttttgcttttgacagtgctgaattcgaatttttacatgtagggttttagcaagagaatagcttgaaaatttgggattttttttttttggtatgagcaacaaagatgtctgaattgcatgtcatcgttggaaaacttgtttggttctttggtttttgcatttattttaacagtgttgaatttcgaatttctctgtgcagggtttagcaagagacgagattgaagaaatctgggatatttttaaagtatgagcaacaaagatgaggctctacgagccaaagatttagcagaagattggatgagcaagtcagatttcacaactgctcgtagaattgcgataaaggctcagaaaatggatgcaactctggagagtgttgttgctcgcatgattatggtgtgtgatgtgcattgtgcagcattggagaaatctggtgatgagactgattggtacaagattcttcaagtggagcaaactgcagatgaaaataccattaagaaacagtataagaagcttgctcttcatcttcatccggacaaaaacaaactccctggtgctgaatctgctttcaaaactattggtgaagctcagagggttcttttggacaaggataaaaggaggtttcatgacatgagacgaaaacctgtctttagaaggcctgcaccagcaccagcaccagcaccatcatttcaaccaccccaacaagccccgaccacaccttttttcactcagcgtggtttccagacaaatgttaatgtggcaaggaagagacctgaaaaccagaagaaacctcaagctcaaccaactgggtttgatggtctcgccagctttacgacctcatgcgcattttgtcacaggaagtatgaatatcaaaggaaattaatcaacacactgatgacttgtttgaattgcggtaagcaatacgttgcttttcaagaaactttccaaccaccagttcagccgactttctccttcttccaacagagcaaggttcctacacaagaggcaggcaaggcagtggagaagcagccagaaagttgtgctaaaagtttttttagtaaagagggttctagagcaaaaagctctggtgtttctgctgagaacatcaatggaaagagaaagaggaagaaggtcgttgaatccagtgacagctcttgcagcgagagcagtattgactgcaatgaagttccagctggtggacaagattcggggtccagcggtgcacagcattctcggaggtctgtccgtagcaagcagcaggtttcatataaagaggataaagaagaggatgcagaaagtgctgaggagtctgatttcagaaagaagtcacatgaggatcaaccgtttacagaaaccttgccaaatggtttaaacaggacaaagaagagtaaagcagcaaaaaattcaagttcagggagtgcgtcagatgcagaaattcagtgtactgatcctgatttcagtaactttgagaagtcgagggaagtgacctgtttcaaagctggtcagacatgggcaatctatgatgacatgggtggaatgcctcgatactatgccatcatcagaaaagtcataaggaaacctaggttcatgctcaaaatacaatggctagaggctgaaccagatgatgagaaagcaaacctgtgggttcgtaaaaacttgcccatctctattggcaagttcaaacttggtggaaatgagaacatagagaaaactccatgtttctctcatatgatctactttaaggtaggaagcatgaaggatactgtcagagtatacccaagaataggagaaacatgggctctcttcaagaactgggacatcaattggtcctctggtcgtcggcgttcttcccatgagcatgagtatgagtatgaatttgttgagatcctgtcagaatatgttgaaggggttgcaatacaggttgcgttcttgcgtaaaataaaaggctttacaagtgtattctgtcgaattgcaccaggtggtggatcagacacaattcagattccgcctcatgagttgcttagattctcccacagcatcccctcaaccaaattgacaggaaaagaaggaaatggcgttcccattgttcctatgagtt

SEQ ID NO: 159092 - DNA, 3079 bp, Arabidopsis thaliana landsberg
aatttaaagggtcgccttatctctaaactcaaattcatcatgaatcacgaagcgacctcgttgactggagtctctggtgctggtcagccgtccgctgcgactccttctgaccctccaccgccttcgtctgttctgatgttcattcccaagactgaaccaggcatctacatgtccaagaaaaccaagtccaaggtctctgcaccgtctcagagcaagagacagtgtactgctgctacttcaaagacaagatgctaaagcgcctgctctccgacggttgtctagcaggaagcccacccgatctgcatctgctgctggacagactgaagaacatgtctttgagtcttcagatctgcaagatggtgatgttacccagattgctccgcctctctttctgtccgggtatcaagagaactgactgcttctttctgctcgagaccgccagtgctctgagctaaagttttctcagagactccttacaataactgctttcttactggagaaggacttgggcgctacaaggtcatcgggggtcgatgattcaacgacatgcgttttcttcctcttgatggaaacaacattgcgagtactctacaactcctctccactgttggtctgctccctactgttacagagatcaactcttatgtgcaagaggttgtcatggagttctatgcaaacctccccggtggtgaagaaggtgatcaacttgcttactccgtgttcgttagaggcaacatgtatgagttctccctggctattaccaatcaaatgtttcattttcctaatctatcatatctagtgaacatgtctgagattcaagttcctgagtccatggatgaaattgttgttactctgtcaaactgcaaagccaactcttagaagatgctcacatcttggctgttttctcttgagatcactcagctcaacaagatctgttgtcacaactggatgcccaaagtgaatcgatttattctgaaaccggagagggtcactcttctttacatggtggccaaagctctacctttcaactttggcaaactcatctttgatgagatctggcgtgttcgaatgctgttgcgaacgcctcctctactctccgattagtgcttccgaacctgattgatcaaatgttgcgctttcagcgcattgtccgctctaatgaaggagacaccacatcgtctgccgataacactgtaaattactcattttaggcatgtatttatcatcatttagcttagtgatcactcattgttttatatcattttgcatcacatttagcttctttgcacagttaggcatttaggatcatcttgcatatatattgcatgtttcggtgtgttttcaggtgcaaaaggagctcacaaggattctagtcgaccctctactatatccaaccagcacggaagcagcagagcattctactcgaccagttcactcgatctaggtagccacagaggaggcaacaattcactcgacccacttactcgatcaaggcagccttagaagaagaagcatatcgatctactcgcccttcctactcgatcctctactcgacccatttactcgaccaagggcgaccaactctacaagacttgttgatctatcaaagcatcttcggatcctcctcattccccactcaaccagacatctgagcatatagataagagaggaagaagcatctactcgaccaattgatcactcggagtgataataggtttttagtcaattaaacctaaagcactatcatatcgttgtagtattttagtttttcaatcagaatgggtgtgatgctaacaatcaagatgtgatcaaaagacactaagtcaagccaagcaataacaggttttggtgtgttctagcagttctaagtgaacatgcagaaaacagaaattcaagtagaaacaataaaacactcaaccaacacagctctttgcagagcactgggtgaggtcgagtgacaggtcgagtaacagatagaaagtataacagggatactcgactgcacagtctcttgccagacaactaagtggtcgagtaacagtaaagaattgtagaaactaagcaacagatgacaagatgcagtaaacaacagtagagtaaacaaataattcaatcagataaagaattcccgaggatggggtaattgagtagtttcgtttcctcagtttacacgtggttgacatgctcaataaattaaccctagacaacaagtttattaaccaaatctaagtgccaccgcaacagagactctcaagttaacctagtcccacactcaatcaccattgatgagagctaacctaacaggcattacgaatcaacaagttaaagccaaaacgctccctgcaaccaataccttggtacagggtcacaaatctttggaattagtggttcagacatttcatcgaacacctcttgggcgccaaaatgtctaggctcaaattccagttgatcagaaagcaatagacattaagaataactaatctagaagggatctatcaatcaaactcaactacccagcatactgagaattctaaactactctaacccatcctcagaaatctattcactactcagacatcattgaagaaaacataaacgttgaatggaatgaaaacatgataacaacagagtaatagcaagatggtaacaggatgaacaacagtaaacgaaatcaagaacaaatactgaatactgaatagataaagagaaatccggattacaaaaggtcaagaacacaatgtctcagaataaaacttagataaaaaacttgtctcgaaaatgtaaagtacatgctacttatagcaaaatattccgaaaccctaatactcaaagcgacggagtattgggacggattaaaaactgtactcgacccagatggtcgagtgagaggtcgagtgataagctggagtcttcttttcttccttgtactcgagtgtctggttgagtgcggaatgaagaagactctgaagctcgccatcgagtatgtagtcgagtgctggtgatggtgatactagactaccatgtagagtggtgtgatcgagtgatggtcaggtggtggagctgaagacactcaacctgg

SEQ ID NO: 159093 - DNA, 827 bp, Arabidopsis thaliana landsberg; identical to SEQ ID NO: 55777
  unsure (1)..(827): unsure at all n locations

SEQ ID NO: 159094 - DNA, 359 bp, Arabidopsis thaliana landsberg
attattaaaattcaaactaaagtatattaatttaacgaccgtaggagctgtcggagaaccaccggagcgacgccgtggattcgatggtgtacgaggccaacgcgaggatacaagatcctgtgtatggatgtgtagggacaatttcgtcgttacacagacaactggaaactctccaaactcagctcgcttttgctcaagccgagttgattcatataaggacgctccaccgtattcataccaaacccccgccgtacacggcaagtaccgttactttcccctcgaacaaagacttctacagtgacatcgacatggctgttgcgtatacggatgatgccggagacttcctttggtcgtgctag

SEQ ID NO: 159095 - DNA, 3225 bp, Arabidopsis thaliana landsberg
atggagattaggagacattttggagcaaaaactaaggaaaaggaagctaaggacgatttaggattccgggttcagagggaagtgtcgatcgacaccaggagtgtaggattttgatatatctctatttttactgaatttatctatgttttaggtatatgattttgagtctttatgttatttcttgagtctttttagtgtcttttcaggtattctatgcagtgagacaagaacggatgataaggagacattttggagcaagagctagaggaaaggaagctaaagatgatttcggattccaaattcagaggtgtcgatcgacaccagattcggcctagcaaattccataaccctttcaggtttacagaagtgtaaatttgcctagaagacttttctatttgcattactagtccctggacgttttatagggtttatatatagttttacaggtaattgtttagacctataaatttcttatcaagcttttcatccctattttcaaaaacataagctattcatccattattttcaaagattcattcagttctcaatacagtgaagagatcccttcttactcttattttatttgctgtgtttatgcttttttactcaattatgttgcttgtttcattcaatatgtctgagtagtcttcttgttagggatagggtttctcattaggaattcttatggtttagtagatcgcccccctgctaagttatctgaagaattcttcatctttgattacacttaatgctatatctagagttattaactagatcttgaatccaaacaatagatatgcccaccataggtatctgtagttggatctattatttgataatgctggtttataggtgtgtaatatgaatcagcctatctactaaggtgaacaatcaatatcgtttagaatgcatgtttaggttaaagatcactcagtttctccggttattcttagctataggcatagggagttttgcggaacaccatggttatttcataattagagttttagtttaataatggttcgataataacttagcttacattagatctactaaccaatagtttcctgagaataccatgttcctacctctttatttaatcgtttcacaaccaatcaacctgctgtttacttactatgtttacttttattttctcataatctcttctagcttaatctcaacatttaattcattgtgtgaaaaagatctttgtataaatcgatccttaagtactgcaattgatctcttatttgagagcgaagttcttagcgtaatttgaaccttatcaaatttggcgctgttgccaaagttcttgggaatcaccattgagtttagtttagagatttcgtctagtttttaattttattttgttacttacgcgtttcttgctttcttcttttttgtgtttcaggtgtatgcctaggcaaacaaggagcacacaacagaatgagctgatcaacttgtctttctggacttggggaaaacttgaacgcaccaaccgaaaaactcagagattattaatggctgacagagtcttcagagctgatgtagaaggagatttaagagatgaggatgggcaagcctacaatgaggctggtcagagattggatgatcatggactcatcctacctgaggacgccaatgaggatcaggcgcgcctcaatgcgcaattagctgctagagacgcagcagggctcagtgtcgagtgacacccaattggtgtcgatcaacaccttcaggagcagaatgcaaacgcgattggtgttgagcgacacaacataggtgtcgatcgacaccaacaccagattcctgcagctattcctccagctacggagccacgtcgtactcttggggatttcaacaggcctgacttgttctatgctactcgatttcaaggtccagccctccagtcccttatccgaggaagcgtcattctaagcaggagattcatgattctaagtggacagccataatggagaagatcctccatactcttcctaaggatgcttctaggacatcttgtgcttcactcaacaggtatgtcaagcgacttgttgataatggaattagctcagatgaagctaagctgcttaccagggacatcagtgcaatcatgctgcctgaggccaagtaagtgtaggcgcacaaagtagacatagctgagtacttccgcaccattactcctggtcagactactgggaagattccagatccaggtagctttgttcttgattgctctatctttacaagcagattcagccgctctttgtgtgatctaggataaagcatcaacctcatgcctaagtctgttactgagagactaggcatgactcattacaggccgactcacatcacttttctcttcgcggatcgttccaagcgaatccctgaaagaatccttgaagatgttcctgttaaggttggtaactctgttaaccctgctgattttgtggacctggattatgagaaggaacccaaggatcctcttatccttgggagagcattcctagctacagctggtggtaggtttgatgtgaagagagggagaatctactctcaaggtttgtgatttggagatggagtttggcatggatggttcagagtttactaagcctatcagttgcattgcttccagccaaaacacacctcctcaaactgatcagaatcccaccacagagccacacacaacgctcccatccgctcagctcgcaaatgagagtggtagggcaacagtgtcgatcgacactactacctctgttgatcgacagccacgggtttcacagacagatgattctgcacattctcttcagcccacaccacttgaggacctatgtgataagatctcttctctctcttctcctgttttatctttgattaattctttggattattcgaagactgcttcacaagataacaagcctagagttcctcgaaagcttgtctctcctgttgttcttacaggtgacgagaagagtgtcgatcaacacacacctgagtgtcactggggacaatgtcgtttaagtctgggggaggctcttactaatgatgcttttattgttgtttcttattttgtagttcatttggttatttcttttcattccaaaaaaaagaaaaaaaaaaaatgttttctttagtttagttaggaatcatgatatatatttctcttgtttattgcctgattgatgagtgctgcaggttcgagtcaatccgactatggaaaatcag

SEQ ID NO: 159096 - DNA, 925 bp, Arabidopsis thaliana landsberg
atgtataagaatcagttgcaagagcttgcacagaggagttgtttcagtctcccatcatatacatgcacaagagaaggaccagatcatgctccaagattcaaagctagtgtaaacttcaatggtgagatatttgaaagcccaacttactgttctactctcagacaagctgagcattcagctgctgaagttgctcttagtgctctctcttccaaaggtccttcaaagtctctaactgctagagttctagtaagtcttaatctcctctaaagcatgcaaagttctttctcatgtttgaatcattttttttgcgaagtctaataatgtttggttgtttctctgaggatgagactgggatctacaagaatctgcttcaagagacagcacacagagctggtcttgatctaccggtttacacaagtgtgagatcaggacctggtcacatcccaacattctcttgtactgtggagcttgctggaatgagttttaatggagaatcagcaaagactaagaaacaagctgagaagaatgcagccattgcagcttggttctccttgagaaaaagtacctccaaactccaaactttttactcaaatcttattggtttgttatctctctcattcaccctttgctacatacacagtgccaagattggacccattgagaggtgaagagaaggaacaagagatagttgcaagagtcctctcaagatttagacccaaagaagtgaaaagaagagaaccaaaccagtcaagaagaagaacagtcatcagaacaattcgccaaaacacaacaacaacaacaacaaccacaagagacttgttgtgtgagaaactcagatccatgaatctatataccaatgaaacttcatcgtcatcaccaccaccacagagattctggccttcaagaacatatctcacacaagaac

SEQ ID NO: 159097 - DNA, 747 bp, Arabidopsis thaliana landsberg; identical to SEQ ID NO: 4165

SEQ ID NO: 159098 - DNA, 1869 bp, Arabidopsis thaliana landsberg
gatatgtgtctccaccaacctccttaatgattactcacaagagctttataataagtatcgtggagtgattgatcattacaataaagaaactgtgagtaccacctacatatttgtttctttgacttgagcaaagggtctaactaatatttttacatatttggttaggttttgccgtctatgagggagaggcatggtgaatatatgctgagagagcttgttaagagatgggctaaccataaaattctggttagatggttatctcgcttctgcttttatcttgaccgtttctatgttgctcggagaggtcttccaacactgaatgatgttggcttcacatcctttcacgacctagtttatcaagagatacagtccgaggccaaagatgtgctactagcacttgtaagtgtatatgttattaatctctaattgagtagcgatctctggtttagttgttctcaccctattttgtaaatgcaaaattcataaagaacgtgaaggcgaacagatagatagggcactagtgaagaacgtattagatatctatgtggagaatgggatgggaaccttggaaaaatatgaagaggattttgaaagcttcatgcttcaagatactgcttcttactattctcgcaaggcgtcaaggtggaccgaggaggattcttgtcctgattacatgataaaggcatgtctaccactactatgctattattcgatttcagaaaaagtttatgtatatgtattaacgtcagtaatttatattgcaggttgaggagtgtctaaagatggagagggagagagtcactctctatctccattcaattgccgaacccaaactagttgaggttggtcatttctgactgtattttgagctgtttacaaacagtgatagttattgaacttggttgtttatttctgattgcagaaaatacaaaacgaattgttggttatggttacaaaaaaccgcctagaaaatgagcactcagggtttagtgtattgctaagagatgacaaggtaaagaggacttttgtggttataattcgcaaacaaattatcatttaaaattaataatatatattgatggagcattgctatatatatatatatatatatatatatatatatatactcacagaagaatgatctctctaggatatacagtctttatcttccaatccctaagaggttgggacgtgttgcagacttattcaagaaggtttatttcattttatttttaaacttactgtctgtttgattccaaatcaatttcttttttttaactcacattgattctcatatgtgtgtataaaaacagcatattactgaagagggaaatgcccttatcaaacacgctgacgacacaactactaatcaactactaattgagctacacaataagttcattgtctatgtcatcgagtgttttcaaaacccaccaccctcttctataaggttagagttttgttcatgtgtgtctctcttttccaacaatattatatcgaatgaccatagtttctttgaatgcattgaaggcattggaagaggcatttgaaaccttaagaagtcaaggaggaagtgagtagctttttcagtgatgaagtaagaaagatacgcttaattgatgaaagcatatttgttttttttcgtattgtcaaagatttgggtgaattataatgaatgattttcctatttttgctacaactttgcatatcataatttagttaatgatttttagtacttattaactatgatatgcaattaaattattcaacattaaaactacttacagttgttgttttttgctatattttctaaaagataactttatctactatttattaaaatttaaaatttatgaaaaatgtaagagt

SEQ ID NO: 159099 - DNA, 1185 bp, Arabidopsis thaliana landsberg
atgggtgtttatctctgcaggaccttttcccataatatcttatctaccccgtaaagaattagaatttgttcaaaagggccttaaggtatgatgatataaatttctctatatttgaaaggcgtctttaagctacatcctcctatgtcatttcccctttgatatgttattaacttattattgaagtttatcttcagttttttgctattcattgcttaattcagtaagaaaggtttgtgcagttagcgtttgaggcacatcatggtcaaaagagacgtagtggggaaccattcattatacatcccgttgcagttgctcgtatccttggggaacttgtgagttgcgtgatacgttgtgaatatggattcacatgaggattagttggaaagcttaataattacttttgtacttgtataggaattggattgggagtctattgttgctggattactacatgacacagtcgaggatacaaatttcattacttttgaaaagatagaagaagagtttggtgcaactgtgcgtcacatcgtagaaagggagaccaaggtctgcctatctgtgtttgctacaatatttttcctatcctattatagggaaagaactccacgcttcctgtgcgatgaagttcattatttataaaagtttttttccctattaggtgtcaaaactgggaaagttaaagtgtaaaacggaaagtgaaacaatacaagatgtaaaagcagatgatttgcggcagatgtttctggcgatgacagacgaggtttcagtcttttaagattttgtattagctggtgtggttatatatttatcagcatgtctaactgcttcaatccaggtccgcgtcattattgtcaaactagctgaccggttgcataatatgcgaactctctgccacatgcctccccataagcaggtgattctttcaagtagttgagatttgttgcccatagctccagctctatgtttcatttgggataactaatgaatttgtgagtttcgtccagtccagcattgcaggggagactttgcaggtctttgctcctttagcaaaattattgggaatgtattcaataaaggtataaccctttaagtattatttttgcttgctataattcttatggaaatattaactaggtggccattatttccggttacatcagtcgaaatgtatgttagtgtgcatcg

SEQ ID NO: 159100 - DNA, 241 bp, Arabidopsis thaliana landsberg
aaatttggtcctctaccgtaaaaaagtcttcataagtttaggatcttatgagctgaacaaaagacagagcgattcatcggtcttccgaataggtatgcagatgtgttggaaagacaattatctcgcttggaaacatatctaggcgggattaaatatatgacgggactgcctgatattgtaatcatcctcgatcagcaaaaagaatatgcggctattagagaatgtatcactttgggaattc

SEQ ID NO: 159101 - DNA, 983 bp, Arabidopsis thaliana landsberg
agaacctattggagtggttggtaatatcatcccttggaatttccctagcattatgtttgccacaaaggtggctccggctatggctgctggttgtaccatggtggtcaagccagctgaacagacttcgctctctgctttgttctatgcccatctctcaaaagaagtaagtcgatatagattagaagtttttgattaaggcctataaatttttaaaaacaaatgatgtgtttgtgttaacttaaaacggtaagaattttgctttacttaaaacactaaaaatttaggttgtgtttataaggacaacacactattttaacatgtaataaagcaaacgtatacgtaacaaacgatagaaaccttacaagctaaacattattgcgagaaaacaggcgggaattcctgatggtgtgctcaacattgtaactggttttggatcaactgctggagctgccattgcctcccatatggacgtagacaaagtaaggatctattttctttatgagtcacagtgactagtgttgttggttgtatatgaaatcttgaatttttctgtgtgtgttgtgatcaggttagtttcactggatcaacagatgttggaaggaagataatgcaagccgcagccgcaagtaatctcaaaaaagtttcccttgaattgggcgggaaatcgcctcttctcatattcaacgacgctgatattgacaaagccgccgatcttgcgcttctcggttgcttctacaacaaggtattcataatgttcattccaatttccgtcaatgtataataatgtgaagatactgatatattaaacatcataaatttgatgtatcaatagggtgaaatttgcgtggcgagctctcgtgtgtttgttcaagaaggtatatacgataaggttgtggagaagttagtagagaaagctaaagattggaccgttggtgatccttttgattccactgctcgacaaggacctcaagtaaaaataggac

SEQ ID NO: 159102 - DNA, 996 bp, Arabidopsis thaliana landsberg
aatttatttgttaattaaattacttaattcggacagattccttaaacgggatcgaaaagcttgaagaccttcttcttgttggtatacataatgaccagactgtcaggttaaaaaagctcaattttggcaatttgctttattgatttctttccagtttattggttatatttccctttcatgccctggcaagtattatggggtttgatcaatatgattggtggtgttagttttaggctaaaatataggtcttggtgtctaatcttaattcttagctgtatgaaaaaatttaaatgtgcataaattcatctctgcttaaatttgtctgaccaaattgtacttggtatacgttgctgtgcagtgctaaacgaggagcgcatcgccctattatgaatctccatgaaaggagcttaagcgttctggcgtgccgctacgtggatgaggtgataattggtgctccatgggaagtgtcgagagatacggtgagcttctctgcactttgcttaataacaatacccaaacggctttcatgaaatgctatttttgacattgatttgaacattgcagatcacgacatttgacatctcgttggtggtacatgggacagtagccgagagcgatgattttcgaaaggtaaaacaacattcaagtgtgtatatattaggtaaaagacaaagagctatggtttctcagaatgtggttgttgatttgacaggaggaagataatccgtattctgtaccaattagcatgggcatattccaagttctagatagccctcttgatatcacaacgtccaccataatcaggaggattgtagcaaaccatgaagcttatcaggcaagtttcttttctttgctcattcttaattttcttcttcttggtttacttgaacgttgtctcactcaaaattgttctgtaatctatagaaacgtaatgcgaagaaggaagctagcgagaaaaagtattacgagcagaagtcgtttgtgtccggagactga

SEQ ID NO: 159103 - DNA, 1357 bp, Arabidopsis thaliana landsberg
attgtttgctatcttcaggttcatgtttatttcaatctaatttattgctgaaaatcgttgcaagtcaaggttcttttcttgtccttgggcaagagaattctcttgtttgtgtaacacagtttaatgttattgtgactgcgtttgttgtggacaagttggatgtctgtcttagtggtggcaaagactctgtacttaagttgtcaatagttactggacctttgcaactgtatttaataagagtctctattgcatattttgtttgcagagctgggtgactcatgacacactctctgtcgaggatataaaagatgacttgaataagcagagtctgatgttacttctgaaatgtctaaaaatcatggagaatgctacattcctcagcacagaaaaccaggtaacttttatttattttggattcccagcctcatgatagcttgtattgaatagctctgcagtttgcacctaaaaaataactgtacataatatatctttcagattcatttgctcagacttaataaaagcatgggttctcatgaatcccgactgtctttcacagagctcatgataagtgtcatcaaaatactttcaggtacccattcctatatttggattttaccaccatgacttgcttcgtatgttatcatctcttatgctgatggctggttggaatgattacaccaggtcttcagttacgtgctcacaggaacgaaaagcatcctcaccctcagccacatctagcttctgctgttaagaagggctttgtgacaattattagttcagatacttgctctaccactggctttagctccataaaaagtttgagcgtatccaagagaaatcagtctgcattcctggtaggttgctcaacgacaccaaagccgggtctcaatcaagtgtaatgtcgacaattgatcactgcacgctgacgactacagctggttccaacactgggtcgtttgcaggcagattagcctcattgggtagtggcatttccacaagtaaaacaaggactagccaaactagagaatccagttgtaaaaaagttgaaaactttgcatccttcgaggatagtcaagatcctttttcatttgatttagaagattcaggaccttccagatgggcagtaggaaagcaaaagaaatctaaaggtcaaaagaggaagggaagctacagagataagaaagatgaacgctcgcttcagctcttctcgagccaggaggaatcaaaccatggtttaaattctcaggaggaatcaagtgatagagatcaccatgtaacagagcaaccttctttaacatatgacattgataaaggatgtctctgtcttttatctgattgccttttaacagccgtgaag

SEQ ID NO: 159104 - DNA, 613 bp, Arabidopsis thaliana landsberg; identical to SEQ ID NO: 39959

SEQ ID NO: 159105 - DNA, 1041 bp, Arabidopsis thaliana landsberg
  unsure (1)..(1041): unsure at all n locations
gtatttcaccaggatgttgccattgcctatggttcaaataacattccaacaagaaagcctgctcgaataaaaccactgacttgaatgagctcactgatcttctaagaatagaggtatttgcacttccatttaactgttgcatcagctcacagagatctgtgtctgtgtttcttgttaaattacttttaagcatttgtttctcagggaaattatctattttatattttgaatttagattgcgatgtgtgtgtacacggaggtggtaacgtggctactatgctcacataaggaaaactttgcgatgctaaatagagaggatgttaattcagccgtcatagttgggaacccgcggtctgctgattttgaggttcctttcaaataatttggtcatctctttgtaaacttttccaatggtaatgctttgctaattgtttcattatatgttgaaataggccatgaggagggctctcatgcccggattattgaagacagttggtcacaacaataaataccctaaaccaattaaggtaaacccatatctctggtgccgttagctagatttgagattttagtgtcccgtgaatgataaatctttttctttctgttaaagatttttgaaatcagtgatgtggtcatgttggatgagagcaaagacgttggtgcatccaatcgtcgccatctcgctgcactatactgtggtgctacttctggatttgaggtatggatttcatttgctaactatgatatcgtcgttatgtaacttattttctcaagtttgcgcaacttcatcaattgatatgctttctctgtataattcttgattcagcttatccatggcctggtcgataggatcatggaannnnnnnnnnnnnnnnnnnnnnnaatccatgaaaataacgtaccaatcaatgaaaaagacggatactatgtaaagctctcccaagtaagctctcctttcgatctgcaagcatcttaagatttttcattaacgactaactcaagatcctaatctatctctcttttgcgttctgcaaaaggaac

SEQ ID NO: 159106 - DNA, 1113 bp, Arabidopsis thaliana landsberg; identical to SEQ ID NO: 3618

SEQ ID NO: 159107 - DNA, 2565 bp, Arabidopsis thaliana landsberg
tacatttttgaatctatttcatcttgtagatgtgcccactttctttaccttttggttagcaaatgatttcttacaccagattcttgtttgctcttcagcggttatttgttgcccagacagacaacatagacacgtctgcctgtatttcaaatcctccagaagtcaggtatgcgaattgtttttgctatttttcctcaccgacacgaaatgtgatccaatttaaccttcctggctttcatatgaaaattgcagcttcttgctaaatggaaagggggttgagaagagagtcaatatcgcaatggtttgggcaagttgacttttaattggattttgtttctctgcactggttatgtgcatgtttatgtcaatttttttctttccaggatacagggcctcaactccctacaaatgttactgcacagctgaaatatggaactaatcttctccaagtgatggggaattttaaaggtttctattcaattatatatatcttttttgttgtccatgtctatttaattaatatcttattaagatgcttgattgttcaaaggaaattacatcatcataattgcttttacgggactggtagtgccacctgaaaaaccggttcttaaagattaccttcagtccggagtcattgaagcaagtccaggtaattaaagagcataagataggagagaggaacatttttcttgaatgctctatactattccagtttgaatcattcaatgattgcaagcacatacctgtaagattttttttccaatctaatcgctctgtacttttttttacctgtctatagattcagacatcattgaggggccatcacgagtatctctcagttgccctataaggtaccaattctacttttttacgtactactgtgttatcttatggttgtttttttggtcagtgatttagtctttaataaaacagtcgcaagcggatcaagctaccagtcaagggccagttatgtaaacatcttcaggtgatgcaatcaaatatcaagcgatattctctttttttccatccttttaaattggcatacagtgttttaatgtgggtgttaccttatttttctcgtaatatttgttagtgatgtgatactttctgctgcagtgttttgatttctcaaactacgttcacataaatatgaggaacccaacctggcgctgcccgcattgcaatcaacctgtttgctaccctgacattcgtttagatcaaaacatggccaaggcaattagctatctatgttgtaatttgatttctgctacatttttgcgttgcagcttaatactgataactcgtctcatatcatatccttagatattaaaagatgtggaacacaatgctgctgatgtaatcatcgatgctggtggtacatggaaggttacaaaaaatactggcgagaccccggaacctgtgcgtgagatcattcatgatctagaagacccgatgagcttattaaactctggtcctgttgttttcgatcttacgggggatgatgatgctgaactggaagtttttggtgacaacaaggttgaggaccggaagccctgtatgtctgatgctcagggtcaatctaataataacaacacaaataaacatccttcaaacgatgattactcttcgatatttgatatctctgatgtgatcgcacttgacccggagattttatctgctttgggaaacactgcgccacaaccgcatcaagcttcgaatactggaactggtcaacaatattcaaacttatcccaaataccaatgtccatagatccaatgccggtacctgtaccattctcgcagacaccatctccaagagatagaccagcaactacttccactgtcttcaccataccgaatccctctccacaatactctcaggttcatgcttcacctgttacacccaccggaacatatcttggtagaaccactagtccgagatggaaccagacttatcaatctcaagcgccaccaatgacaactccatatacggtttgtgatttcgtttgagagacttgtttctttcttcagtattcgtatgttgacaatatgtgttccttgcagagccggaaggtctcagttccagtaacgagccagtcgccagcgaatgtatcctcttttgtcaagtctcagcatgtccctagagtactcagccagcctaataattatggcgtcagaggtttaaccagtagccatgcaagcacttcaaggcagcattcaagtggtcccactgttcaatctgtttctcgattaagtgacctagtggatgtagacttgacggttcctgatacatccaactggcgcccgaggatgcgaggaagtcttgtgcccggttctcattccactgctcttgaccacatgatcatccgacctagccaacagtctcaaacttcgactaggctgaatagttcacagccggttcagacaccatcggttcaaacgtctcaagctcagtcaccttttacaacggctgcctatagaaccgagacagttttaggaaaccgaaaccatccggtgcccgctcctcctggcattgttaggcctactggaccgacatcttga

SEQ ID NO: 159108 - DNA, 1305 bp, Arabidopsis thaliana landsberg
cgactctgtattatcttctaggtaaatttgcaccagaagatgtcaaggttttgcctttagatttagctagcggcgaagagtcactcaaacatgttgtagagcaagcagtgtcgcttttccctggagctggtgttgattatttggttcacaatgctgcctttgagcgtccggtaagtaatttccttgctaaagttttgtatctactcaatagagagtcttaggctttagatatgtttactcaagcgggtgtcatcatcatactcttttccttgcagaaatccaaggcatcggatgcaagtgaggaaactctcaaggtactaaaattaattgcgtaaaattcgtaggcaagattattaattcttgaggaaactctcaaggtattttttgtttctattgccatagttagcctgtaacaattaggacatgggtgattttgatatttctttctgacatatggttaatctatgattttgtgtgcagactacattcgatgttaatgtctttgggacgatatctctgacaaagttggtagctcctcatatgctaaaacaaggagggggtcattttgttgtggtacgtggagactactgggggatagtttttgttaattttgtggaattatatttaaggattgagcttcatatcatagtttatgaatgtggataacattgcgttttatatgttagttaattgttgtaatcacagtattgtatcttgactatatatgttaaatctgaggatactagggtatatagacaatttaaggtttcgttcaggttagtatttaccatagcttgaatgttatggaactcaggttatgatcatgcactaattgtccattttattgggttaaatgtcatgagtaataattcacgtcaattatgctcagataagcagtgctgcaggaaaggtaccatcacctggacaggctatatattctgcttcaaaacatgctcttcatggctacttccacagcttgcgttctgaggtatgttagaagtaaagaaactgttgtgcttgctaattagttggcagaaattgacttattgaaatcacaagtgaaaatttacagctactcctgagttttaataagcttcatatgttgattcgctatgttttttcatttacattttattgttgaaaatagcacaatcaattacaaaaactaacagttagtttacaatcatctgtgcatggtttcagttctgtcagaagggaatcaaggttaccgtcgtttgtcctggtccaatagaaacctggaatggtacaggaacatcaacttcggaagacagcaagtctcctgag

SEQ ID NO: 159109 - DNA, 2972 bp, Arabidopsis thaliana landsberg
  unsure (1)..(2972): unsure at all n locations
atgaatagggatcccttacctggcctgaacataagcctttctcagcagctagagttggctcctcctatccttcaatgccggtctctgcaaacagctcctgagcacaatttgatcgttggtatggaattttctgatgtccttgcgtgtaggagagcactcagagatgcagcaattgccttacgctttgagatgcagactgttaaatctgacacaactcgcttcactgctaagtgcaatagtgagggttgcccttggagaattcactgtgcccagcttcctggtctaccaacctttacaataaggactattcatgggagtcacacatgtggtggtatttcacaccttggtcaccatcaagcttcagttcagtgggttgctgatgctgtgacagaaaggctgaaagtaaatcctcattgcacacccatggagatactggagcaaattcatcaagatcatggaatgacactaacatacaaccaagcatggaggggaaaagaacgtataatggctgctgttcgcgggtcatatgaagaagattatcgccttcttcctcgatattgtgatcaaattaggagaacaaatcctgggagcgttgctgtggttcatggaagcccagttgatgggagcttccaacaattcttcatttcttttcaagcatcaatctgtggttttctaaatgcttgtcgacctcttattggattggacaggactgttttgaagagcaaatatgtagggacattgctgcttgccactgggtttgatggagaaggtgcagtgtttcctttggctttcgctattattagtgaagaaaatgatagtagctggcagtggttcctctcagaattgcgtcagctgcttgaagttaattccgaaaacatgccaaagctgacaattttatctagtagagatcaatccattgtcgatggagtagatactaattttccaacggcgtttcatggcttgtgtgtccattgtctcacagaaagcgtccgtactcagttcaacaactccattcttgtgaaccttgtttgggaagcagcaaaatgtctgaccgactttgaatttgaaggaaaaatgggagagatagcccagatatccccagaagctgcctcgtggattcgtaacatccagcacagtcaatnnnnnnnnnnnnnnnnngaaggaacaaggtttggacatctgactgcaaatgtttccgagtcacttaatagttgggttcaagatgcgtcaggtcttcctataatccaaatgttggagagtattcgtcgccaactaatgactctgttcaatgaacgccgtgaaacaagcatgcaatggtctggtatgctagttccatctgctgagagacatgtccttgaggctatagaagaatgtcgtttgtacccagttcacaaagcaaacgaagcacaattcgaggtcatgaccagtgaaggaaaatggatagttgatattagatgccgtacgtgttactgccgtggatgggagttatacggtttgccttgtagccacgcagttgcagccctcctcgcttgtagacagaacgtatacaggttcacagagagttacttcactgtagcaaattaccggcgaacttacgcagaaaccatacatccagttccagacaaaactgagtggaaaacaacagaacctgccagagaaagtggtgaggatggtgaagagattgttataagaccacctagggatttaagacaaccaccacggccaaagaagaggagaagtcaaggagaggaccgtggacgtcaaaagcgggttgttcgatgtagccggtgtaatcaggctggccattttagaacaacttgcacagctcctatatgaaaaacatatgacatctctctttagattctttacttcttctctgatctgaatttattatttcttatacttaggtttagaatattattttcaaagcctttctctgtaactcatttttccaatagatatccaatgacagattcttcttatgttatagccttaacgaatagattttataaaaccattgccaaaacactagtatatcatacattgggaatgagagtttggttattaaaacaaaatggtgagtcaaatcacacaaaaagcaaactaagaaacttccggagtaataggactcaaagctattttagtacaaacacacgtggagaaagcagatacattgtctcgtaacagaaaacaaactcaagaatggacccaatcttagagttctaacaatcttaatctcatgtctcttgatgatccccaaagcaaatccagatcaatgtgtgttccagagtttaacagcaacaacaacacgacgaccttcgcacagattttagtaatctcatccattggcttactcttagcccttgcactgcacttccgtctaaggaagctacgtcactccaagaacatccctcgtctcagatcgtctcaaaaacacaaaggccatgagaagcttgagagattctctcactatgttggtaaaatcaatctacatagcttccttgaaatcttcctgatcttagattatgatgcatattaaggaaatgttgtttgtgtcttttgtagtgcggcagatgggattcaaggacaggagagaatgtcctcatctctgcaaattagctaatgagtacataagaaaatcaggcagctgtgaggaagacatatacagcttcttctctgaagagcctggtgctgattctctcttcattaagctcgttgaagagtttgagagatgtattcttagttactttgcttaccactggagccatgcggatctcatgatcagtcaggttactaataaactttcattatccctcttttgtcatattactaatagaccaaaaacatttcagatactcagtgccgatgtagagcctaagaagaagctaaagcacattgtcatggcggctacaaggtgagtctaaaaaacaagtgttctctttaatgattcttcccaaatgattgtttgttcc

SEQ ID NO: 159110 - DNA, 714 bp, Arabidopsis thaliana landsberg
  unsure (1)..(714): unsure at all n locations
tcagagaaaggagaaacacagtcaaccttgtaccccagcaaccactcgaaatggctgacgaacaaaatcaagagaatggccctgctatccaaaacaacaacttcgagatttagagtggtcnnnnnnnnnnnnnnnnnnnnnnnnnnnnnnnnnnnnnnnnnnnnnnnctgccaatggaggatccactcgatcacttggatgaatttgatagactctgcaacctaacaaaaatcaatggtgtcagtgaagacgcattcaagctccggttgtttccattctccttaggcgacaaagcacacatttgggaaaagaatctgccccatgactcaatcaccacttgggacgattgcaagaaggcctttttggcaaagttcttctagataccgccagcaatgggaatttccagaacaaagatgttgaagaaggctgggaactggttgagaacctagctcagtcagatggaaattacaacgaggactgcgataggaccaccaaaggaccaactgactcggatgacaaacacaagaaagagatcaaagcgctgaatgacaagctggacaaaattcttcttagccagcagaagcatgtgcatttccttgttgatgacgagcagtatcaagtccaagatggggaggggaaccagtaaaaagaagttagctacatcaacaaccaaggtggctagaaagggtataacaacttcaagacgaacaaccc

SEQ ID NO: 159111 - DNA, 2317 bp, Arabidopsis thaliana landsberg
  unsure (1)..(2317): unsure at all n locations
gtacagcagaaatggttgaatagaactacaagtgtattacgtttaaagaagaagacagtaaacactgccacgtaagctagcccaaaaggggatatattttttagcacaggcccaaaataatattgagccggcctgatttagaggcatatatagtgtttaagaaacgagtggttgatcagactctggcatgtcatcaatgttgtccccgccggtaaagaagaggaagatagtggcgccgcaatcgcagtcggcatcggcctcgtttcagtcgcttcccgatgatttgatattgagcatcgtcgctcgcgtcccgagattgtaccatcggacagtctcgctcgtctgcaagagctttcgatctcttctagtttcaccggagctttacaaggcccgatcagtctcaggccacaccgagagctgtctctatctgtccatagcgtgttatcctgattatcgcatgttcaccctctgccggaaacctgatcaaaccctaaccaatgatgaggttgagtggaaagttgtgaaattagggggaaagttgagtggtttgatcatgtgcttacagtccctagacattgtaattttgtgaatgctcttgctgctactgtttgatttaagtgtgagtcacaaaaaggctcgaacgtgtatgttttccttggagatggaacactcaatgtggaatgcaacagttaatcaggcggaataaggcgactcaagtgattattctttatacattcatattttttgagtatacaattattcaaaactaaacttgtaaccttaccttttcttcaaccgtgttatcactaactggatgtgcacttcaaaactcttctgctgaccgccaaaccaatattacacagtctctttggacactcactctcagggttttaatcttaagattgatccaaactcacttgcagctaactgtgaccttactctgcaaaaccttgtattatctatacacacatacacaagacaggacaaacacgtgtgctccaccgcgacttacagagacataaaaaccacaactcagtagccatctaagagtctttgcgattggttctgctcctgtagtgagaacacgaggcctaaatccaagcaatgcatacagaccttggatgattgtctcttgatctcacataaggtacattattgttttattctatctctatttcaaagctttagcgctgtatgatgatatcaacctcctctacatatcaaagcaccaaattaataattacgaaattacttgatatccaccaagaaagtattaatctttcagtatttcattgagagtgggaatgagattactacttacttgctctgcaaactcgggacttgtcagatttacagacaggttttgcatcagtaaaagaacctgatgtatcaaaaagaaacaatatcaaagaagcttctttattatcatcaggattgaatttttcaacaaaggctcagagtagggactgagtctgattaaacgtgtctcataccgtttccatatttattggatccatctgctttaatctctggaggtggcctgatgtgttgggatcgaagacacttccaatgaagctgtaaacttcagcaaaattcggcatcactgcattaaaacagctccattgtcagcgtaaatctcaaagatgtctactagaaaaacacataatgtaacaagataacaagtcttacctctatgtggcttttcacaactttcttcgttatttggctttgtcactgctcgtaccctctctgtatcttcctgtctgcagcgattatttgggagaggagccgtggccgagactcccggttcctctactatcacaaattcattacaccccattgttaacacgattcacaaatacaactaactcaaaatctcatcaactgaaagcataaccactagtaaaacctaccttcannnnnnnnnnnnnnnnnnnnnnnngattcatgattccacgaagaagaggtagatgcacaaacagcctggtttcccatcaatgacttcgaatcagagctatacaaataaccaggctcaagcaacggtaatgtactcgaagacgggagagaggtataagcaactgcagcagcatagcaaatcattagaaaatgattaaagcaaagaagaaaacagagtaagaagatgatcaaaagtcaccatttttaggagcctttataggataaggatgactcgctttcctcttaggtcgaggaggtggaagatgttcgttagcaccactcttctgaactttgagaaagtatttctgagcgtggaatcgtatctgccattattactcttaaacatcatcaacacacaatc

SEQ ID NO: 159112 - DNA, 1016 bp, Arabidopsis thaliana landsberg
acaaaaaatagaatggagaaagcatctttcaaagaaaagagtagtgtagccaaaatggttgggacaatagtttcactagttggcgcacttgtggtagttctctaccatggtccacgagtcttcaccccatcttctccaccatttccacaactccgtcagcttcttttgcctttatcatcctcaaactccgattggatcatcggtggttgtcttttagccatcaaagacaccctcgttcctgttgcttttattctccaagtaatactatataattctctaacttgatgcatcatacatgcatgtacataaactaaattttcctcatagtagattaatattgaattggtcaggcacacatatgaagatatatccagcaccattcacggtctctttcttctattttctgattgcttcaatcttgacatcattgatcggaatcgtagcagaaaagaacaatccgagcatatggatcattcattttgacattacattagtttgcatagttgttggggtacgtaaatttgaatattttagaaaacttaattatatcttaaacttcttttcaatactatagctatttttcgcagggaatatttaatccaggatattacgcgattcatctgtgggcagtacgtaataaaggacctgtttacttagctatattcagacctttatcgattttaatagcagtgattatgggagcgatttttcttggagattctttttacctaggaaggtatatgtatatatgaatcaataatcttcagacacacttgtttgtgaaacaagaaaaaccacacatctaatctaatggtttcttgttatgtggttaatgttgcagtttggtcggagggattttgatatcgttagggttttacactgtgatgtggggaaaagcaaaagaagggaagactcagttcttgtcgctgtcagaggaaactcctcttctagacgaaaacatagacgaccgaatatagaattacaagaatattggaaatgatttccaaattatgctg

SEQ ID NO: 159113 - DNA, 439 bp, Arabidopsis thaliana landsberg
catgttttatgaggcgatattgtttcaggtccagcaaccaagtatgcaatcgcagattcaacaaccccaagctgttctgcagcagccttcttcttgtgtggaattgcgcccacttgataggacagtatcctcaaacagcaccaacaatagcaacagtaataatgcagcagcagcagctaagggacgtatgcgttggacgcctgaacttcatgaggtttttgttgacgctgttaaccagctcggtggcagtaatggtgagaatctctgtccccctctctctctgtttcttgattttaagatccttgtctttgaatagagttaacgatgatgaagctcttgctttgtgccttattttaatgtagaagcaactcctaaaggtgtcctgaagcatatgaaagtcgaaggtttgactatttttcatgtcaaaagtcatttgcag

SEQ ID NO: 159114 - DNA, 2841 bp, Arabidopsis thaliana landsberg
agcaaatcactcctcacaccacagaaaaacaaataattgaagaaatgaagtcaatagtcttcttcttcctcctcctgctctttgccgtagcaacctccgataacgtgataaatggttggtataatctcacagccgtccatgacgatgaagtgatttggagttcttttgcggcgccaatgatgaaaggtggttcgtcgtacataacctatccggtcttgcgacctcagcaggcatgtaatccttgtagtggaaccgttaaatatgccaataagaagaattgtcttgtctacaccagatgcaaacgcggtcttaagggcatgtaacatactccttatatattctctatgtttcagtttgtgtcgttctaagcgtttgggaaataacttgcttgtaacaaaatgtacggtgtcttttgttgccaaattatcgagtgttgtttcttaataattttccttaaagtcagcgaagtaattattctataaaaactaagagttgctctatctagatatatatacaattgtggactacttctttaaaaattaaataaattggtaaagtttaaaggtacgtctcccaagcagaaactgaactaaagaattcaggaccaaactcctttgaagggaaacactcaaaaaacaaaaacaaaaaaaagattcatttggtaaacataataatagtgaagaaaatataatatgccaaaagtgggttttgaactcatgtccttatggaagtgcaagtttacgtattaatgtattattcaagtgtactaatcgcaagtaagaaaggacgagaagttcagaagctgtgttcgggatttgttgcttttccttcagtgtctctagtctgttttagttctcggatttttattggtttatgtctaagtgttgtacgtagtctacttattctaattttagatcgtgttgttttagtgtttcttgctagtctccgaagtttctttattcggctttttctcctgagataccaaagtatattttaatatgtatatgttggctttgttttattcgtgttcttcggtcctttgatgtatgttctcagcctttcgacaacaaatccaatatataacttagatgacaaagaaaagaaataaaaaaccccatatccttatatactatctgaaactagccatttaaacaaccttcgctatttattttacttaagcgatgaatggtaattgatgtacaaaatcagacaagtagtaaacttaggggtttttagtaagcttagttcgtatcgagaatcaatggacgtaactttgaggtttaactctcctccttaacactttttatgatatatcaaatcaaatatatttttttactaagattggtgttcttcaattaatgtttcatctcttttaggttctttgcacaataagtttttcatgagctatctaagttcttagcttattgttacaaacataattttcctctttcaatcattgttataaacataattttcctcttttaaaataaacgtatatgtaaataagtaatatattcacaaataaatataaaacttttaaactaagatactgaaaaatatttttgatagttttataattaaaaatcaatctctttttatatctcaattgtaaaaaacactgcaaaacaaacctcaatataaacaatattagttattttccacaaccaaattttacattacaaatttacaattatatcttctaggcttgctaagtctaactaactgaagctcatagcatgtggtttgattttaacctatttactggaaccctctaaaatgaacccaaagctctaaaagagtcgagcttttttgggtttgagtctgaggcgtagactaaaacaacaaatgagtcaatttgcgtcatcttttaattcttggaccttaggcaaattgaccccacggaagaaaaacttcatcgataccttcttgttttgcttgacctgaaaagtcaatggttgaccaagtgagtcactcaccacccattagtctcttatcttctcaaaattcttcaattctcttctcgttttttttttttatcaattccaatgatctgtcacgttttagtaattttcactattctcgtttccgccgtcgtcgacgcaacggcgtcgtatgagcccactgatgtctttctcatcaattgcggcgatacctccaacaacgtggactacagtggccggaactggacggcggagaatcggaaatttatgtcatcgaatgcagttgacgacgcgtcgttcacttcatctgcgtcataccaagaatcagggattcctcaagtgccgtacttgaaagctaggattttccgatatgatttcacttacagttttccagtctctcccggctggaaattcctccggttatacttttatccgacccgttacggatccgatttcgacgccgttaaatccttcttctccgtcaacgtcaaccgtttcactctcttgcataacttcagtgtaaaagcttccataccggagtcaagttctctaatcaaagagtttatcgttccggttaaccaaactcttgatctcacgttcacgccctctccgaattcattagctttcgttaacggaatcgagattatctccatgcctgaccggttttactcaaagggaggatttgacgacgttgtaagaaacgttggtagggacgttgacttcgagatagacaactccacggctttcgagaccgtttatcgggtaaacgtaggtggaaaagtggtgggcgacgtcggagattcgggaatgttccggcgttggctttccgatgaaggtttcttactcggtattaactcgggagccattccgaatataacaggtgtaaagataaactaaacgg

SEQ ID NO: 159115 - DNA, 350 bp, Arabidopsis thaliana landsberg
tttgtctcactctctctctttctctttcttgtaccaaaagctttttgaatctccaagattatagcaaaaccaaagataaaatactaacttaaaagatttctgaaaataatgagttgcaatggttgtcgagttctacgaaaaggttgcagtgagaattgcatcctccgtccatgtattcaatggatcgaatcacctgaagctcaaggccacgccaccgtcttcgtcgctaagttcttcggccgtgccggtttaatgtctttcatctccgccgtaccggaatctcaatgccctggtacttaaaaacaaaaacctctcggtcctttagatcttcgtctaaacgttgtcgtttt

SEQ ID NO: 159116 - DNA, 788 bp, Arabidopsis thaliana landsberg
ctcgttaacgtcgggacggttataatgaccgttttgaccctggctagtttggtcggaggcttcggtgtgaattggggcaatatcgcatcacatccgttgaatcccaacattgttgttcagatgcttaaggacaataagatcaataaagtgaagctttttgacgctgattcatggacgatgaatgctttggctggtacgggcatggaggttatggttggaatccctaataaccttcttgagtatctcgcagatgattacgataatgctaaagattgggttaaagaaaacgtgacccagtatattcgtaagggtggcgtcgacatcaagtaaccttcaaaactttttcatttttttgtaatcatgtttttaccataattctatctgatcgactacatgataaaccgatttgataaatagatcgattttggttggctatttatttccaatttgaacaaaatcgcaccaatgagatgatttcatttattcagacaatttttttcctgttaatttttaatattcttagtttcttgttaaaatttaataataataataaatttgacattatattcatctaaatacctacaaaccggtaaaagtcgctgttttgggtgtatatttgaccgagaattcattcactaggtacgtagccgtggggaacgagccgtttttgtctgcatacaacggatcgttcttgaagacaacatttccagcgttaaagaacattcacaaggcgttaaaagaaaaatggacacaccaatataatgaaagccacgatcccacaaaacgcg

SEQ ID NO: 159117 - DNA, 223 bp, Arabidopsis thaliana landsberg; identical to SEQ ID NO: 64541

SEQ ID NO: 159118 - DNA, 1523 bp, Arabidopsis thaliana landsberg; identical to SEQ ID NO: 34325

SEQ ID NO: 159119 - DNA, 642 bp, Arabidopsis thaliana landsberg
agtcgtgaagatgagaggcgtaacaccaaactattaccgttcttacactttcttcttcttcgtcgctgtcttattagctctgtttctttatgtgttctcgaacaatactcacggtcggccctaaaattttaagggcttatcaattctctaaaggaatcaaacgggggcatttatgtatagataatattctcaaaattttggggaccacaatcacttgttaggggcgacaatcaattgtatctcctcgctctgttcagttacggccatgtcaatactttgtcatgtacagaaactctgacaatctcaagcaaccgaactattgtgtctcacggtaacgtcttcgagctaggtttcttcaaaaccacagcgaagctctcgaaatggatatggttggtatcatgggatttggtacaagtcaatctctgagagaacttatgtatgggttgccaatagatacaatcctctttccaaatccattggaacattaaagatctcttacgctggccttgtccttcttgatcattatggtactctagttcggtcaaagaatctgacgaggacagtgaaatctccagcgatatcaggtttcaaaagcagcctgatgcgtccgagaatgtggaacgacacgcaattatattataa

SEQ ID NO: 159120 - DNA, 523 bp, Arabidopsis thaliana landsberg
cacaattagaaatccgaacccaaactcatcaattttacaaattctctcttatctctatggatcgtacccaccaacccgaatctccgacggcccgacccggaaacaccgtggtcctctccatcgattgtctaaaaggaagctccaaaagcgaagaatggagcggcgatatgcttcaaaccggagacatagtagaagagatccggatcgggtcaggacccggttcagctgttttcaaagctccgtttaaaggaggtaaagcttggcttcagaaagttttacacaattcttttaggaataaagaaacttcaatcgtcgtcagagttcgacgtggctccgatgatttctccgatctgtctgcttgtattgttcctaatgaatccgccgggaagagacagtatatgcttagatccattgatgacccgaattatactgttggattctcggatcgaactgagtcggattgtctcggtttgcaaggtgagttaactcggtcggtttaaatatcttcttgtctttttttgta

SEQ ID NO: 159121 - DNA, 1342 bp, Arabidopsis thaliana landsberg
cttgctcgagtgttcaccatggagtctgcgacaaatacttttgtttgttgaagaattttgtggaaatcctcatgtcgacatcctagagaggggtctctttctctctctctcttcctctcgttagactttactttgcttcttctccatgtattttaagctctctctctgtgtggtgattgattcttcatatacacgtcaaatgactatgcacagctcatctcttgaagacacaacgagggtggagtatctaacctcatacattgaagcagtgcttcattcaatcaggtaatagtaaaaagttttacagttttcattaacgaatgtgtcagattctaagtataaagatgtcatagcaggaaaggatcgaatgtaaaagggtattttcagaggtcgttgatggatttgtttgagatatttggtgggtacgacaaagagaagcaacaaaaaacgccaggaagcaggaaccataccaagcttcttctacaagaaggtatgtcccttacatttgtattttactcaatataaaatgcttgcctttgcatttatcagtcatctcattgaacgatcatagtcttcattgtagcacccatcagattgtgctagattttcgaccaactcccacccttctactacattcttgttcaggaatttccattggacgcaatgtcaagtagcattctgatctttggtaaagctcctctgtagagtgtgctcaataatgaagccttcttgaaaccgtgatgggggcactgagtggtgcagcttttaaacctctcccaagcttcctagaaagtttccttgtttttcttgttaaaacgtgagatcttgttcctcaatctagcgatgcgagcattagagaagaacttggcaagaaaagctttcttacaatcatcccatgaggtgatggagtctgggggcagagtcttctcccagatgtgtgttttgtcgcccaaggagaagggaaatagtgtaagcttgaatccgtcttcagggacaccattgatcttagtaaggctacatagcctatcaaagctatcaagatggtcgagtgatcctccattggcagaccatggaatttgtttccctaaatcatcgagatgagaccactcttaatctcgaagttgttgttctgaatagcaggaggtgcaattcctttcctctgacggtgatcacgtggtgcatctccagcaccaatgttggcacggccattttattgattctgttcgtcagccatatcgagtggttgctggggtacaaggttgactgtgtttctcctttctatgagttcacgagctatgcggtcaatgttgtcgttgaaaaggaggttctaattgtctgttga

SEQ ID NO: 159122 - DNA, 649 bp, Arabidopsis thaliana landsberg; identical to SEQ ID NO: 21869

SEQ ID NO: 159123 - DNA, 1375 bp, Arabidopsis thaliana landsberg
cagatttattagaatacatgctaaagaggtttcaatttttttttggtatgtgaagcctctaatttttgggtgtcctagagtagatttttcgaaaagattcattcttgcatgtgcgtagatcagccttgtatagaactgagattttggtgaagctttggattggtttctttgttctctctgttcttgtcaagggaacaacacaaagacggtggctttggtgagtttttcagattgtggaaactttgagatgtctttgtgtttgtatggatagtgatgaatatttctttgtgtgtggtttttttgtagctcggtaaatagattatggaacatggtttaccgtctattaaatcatggaagtcacttgtcaagagaagaaacaatgctcaagaaggggtaagtcaagcgtttttcctctgtatctcaccgtgattttccgggttatgctgttgattttgatgtggggaatgctgaaaatctgcagggtaaatcgtcatggaaaatgaaaccagttgtggtgctaatgtgtacagtacttttgatcttttggtataagactacaaatattcagtatgaacagacagaggtattgtggaaatgacagagctattatgtttagatataacgatgagattattgatatgtgactctctgttgtttggtatatgcattactcagatagaagaaacagattatccatttgagatggcaaaggtaacatattgattctcttttgtttctaatgttgatgcattactggtctgaagttgatgtgtgtggatcttgttcaggaatctgaaccggtcagtgaaaagttgaaaggtttgccttttggtatcatgcaacctagatcagatttggagttaaagccactttggtcaagtagtagtttgaggtcaaaggttagatttatctgtaagctttacatagagtaatcagatacatttgttgctacaagaattttctgatgtctgttgttgtcttacaacagagtggcgaattgaccaaccgaaacttgttggcaatgccggtaggacttaagcaaaaggataatgttgatgctgttgtaaagaaggtaagtatgcttttgtctagatcagtgaattactgaaaagtttctgtttctaatgttagttagtttgttgtattcagtttcttcctgcgaatttcactgtcattctatttcattatgatggaaacatggatcaatggtgggatctagagtggagctcaaaagccatacacattgttgcacataaccaaacaaaatggtatagtgatctttccaatataaaatctgtgaagatcaactataaatatggcttgtaacaatgatatttactcaggtggttcgcgaaaacgtttctccatcctgata

SEQ ID NO: 159124 - DNA, 497 bp, Arabidopsis thaliana landsberg; identical to SEQ ID NO: 75171

SEQ ID NO: 159125 - DNA, 774 bp, Arabidopsis thaliana landsberg
gtcgaaaaagcctacacagtggtgttacaagaatttcctcaactaccaatccatggtgcgtataataacagaacaggcaagtagtccttatcttcccttctccaatttaatttgtttttgtttctttcgcagaaaaaagtagttgaaatcagagatcaactcaaacggattgctcggagattaggcatcaccttgaaatcatgtgacggagacatggaggtaagaaactgtagcactttgcttcatttgaaaaaaggttgcatgtttctaacgttacactgtttcaggctgtgagaaaagctgtgactgcaggtttttttgccaatgcatgccgtttagaagtaagtgacccatttcagttctctgtttctgcacatcctttcagccctataaagaaatctgattttcatcatcttaattctttttgatgttttagccacacagcaatggagtatacaagaccattagaggctctgaagaagtttatattcatccgtcatctgtattattcaggttagtagtatatcttgttgctatggatttagcaaaaacctcaataacatctaaaagttgaagattttttcttttgaaagcttatttggtatatatactctttatacaatcttcagggtgaatccaaaatgggtggtttaccaatccattgtctcaactgagcgtcaatacatgcggaatgtcgtcaccattaatccttcttggctgacagaagttgctccacacttttaccagaaccggcaaaacgctatgtccttctaa

SEQ ID NO: 159126 - DNA, 951 bp, Arabidopsis thaliana landsberg
ctgtccgagaaggagtttctcttactcttgagattatcgagaattacaacagtatgatggtttctgcttcaggagagaaaccggcttttgatcccgtcctctctgcactgcttgacccaattattaaggtacatgaaagttcaaacttatgaaatatcgtgttcatcgaaaaccatgattgtgcattgaagcagatttctcgactttctcaaatccgcagatgtgcgagcaagcagcagaggcacataaatcaaagaagagcggccaattacccagaagaagcagaacaagtactgactcaagccagttaacctcagtcgatgctctactctctagcagcccatccccaccacaggtatcatttacctatataaaaccagtacagtttatacgtcaacgttcatagcccaaaaaatgatcctaactttcatttcttcttatgatctttttgcagaacaacgaaacaccctcaaaaatattcctcatcaactgtttatgcgcgatccaacaaccattgctaagacacgatgttgcgtcccaatacgtaaccaacatcggattaatgatcgagaaccacataaacctcctcgtccagaatgaagttgacacactactccaaaaatgcggtctttcagacaaaatgcaaatcttccgctcttccacatccgaacttcccttgtctgaacgacaagacacttcacccgcgatgctatccaaatcctcaaggcattcttcggcctcgttttgggaagcgaaggctctcttcctgagtttgagcagatacaggtccctaaactcaggtttgattcttgcgtcagggtcgctaaaactttagctgaagcttacgaagttatataccaagctgtaacagatcaacaaaatggatatccagatccgaagtctctcgcccgacatccaccagatcagatccgaacgattcttggtatatga

SEQ ID NO: 159127 - DNA, 474 bp, Arabidopsis thaliana landsberg; identical to SEQ ID NO: 19675
  unsure (1)..(474): unsure at all n locations

SEQ ID NO: 159128 - DNA, 1530 bp, Arabidopsis thaliana landsberg
tgtatgtaatccttctagcaattgagtggttgatctagaccagaaaattaaaatggtgaaagaactcgatggacatgtgatgcgatgcgtacgtgatcagaatgggaaccatgtggttcaaaagtgtattgaatgtgtgcctgaagaaaacatcgaatttattatttccaccttctttggcaatgttggaccctctccactcacccatatgggtgccgagttattcaggttcttgctcttagtaataaagaaagattacacagttcttgatcttatgcttctaagtaaaacacttctcgtcttatgttgcagagggtattggagcactgccatgaccctgatactcagagtaaggttatggatgaaatcatgtcaactattagtatgctggcccaagatcagtatggaaactatgttattcaggtttgttaaaaaagagttatactacaactggttattttgtataggttgcttaaaaactaatacacgttttgttgacagcatgtattggaacacggaaagcctgatgagcgtactgtgattatcaaggaattagcggggaagattgttcagatgagccaacagaagtttgcttcaaacgttgttgagaaatgtttgacttttggagggccagaggaacgggaatttctggtaaatgagatgctgggcacaactgatgaaaacgagcctcttcaggtttgtcaaacacatactttcagatgattgttggagaaaataaagaaactattagctcataagcttcttcatcttttgtatttaggcgatgatgaaggatcagtttgccaactatgtagtgcaaaaagttttagagacatgtgatgaccaacagcgtgagctgatccttggtcgtattaaagtgcatctcaatgctttaaagaaatacacttatggaaagcatatcgttgctcgtgttgaaaaactcgttgctgctggaggtatgtttaatatgttctttggctccaaagtttcgacctttacctgctataaacctttcaaattgtcttcacttcgttttatttgtatcatcttacttgattgaagagacttctataaggattggagaaagaaagacaatatattgcgtgtcaatgtctctaagtgggttttttctcatatacagagaggaggatggctttgcagtccctaacccagcctcagatggcgtaaggccgcaagtgttgtacagcttaactagggtggatggctctgccatagcgttttgagaattaggtaaaatctaaaccggaaataatctgcgggaaaattgtgaaggagagctttgttttctctgcaaatctgtaaaattgtgtagttgcttacggtttttctatacatagaaccaaacatcccactttaggctgatgagtaagagaggaaatatgcagagaatggtgtaaagaaaaatggtgaggattttagagtttttcctttcacatgtacaaaaagaatggctcttacgccaatgtgtagaatgctttttagaacaatcccagtttatttcacgataaa

SEQ ID NO: 159129 - DNA, 694 bp, Arabidopsis thaliana landsberg
  unsure (1)..(694): unsure at all n locations
tcttaagagaacacaaaattagaaaaaacacaacacaaaaataaaaaaaaacttaagaacattgtttcgagagatttggtttggagtgaaaatggcactagcaatcaacgtttcttcatcttcttcttctgcgatctcaagctctagcttcccttcttcagatctcaaaggtaatttatttcattttcaataccaaattcgtggagaatcttagaaatgccttgattggtcattgtgttttggttttaaattcgttcaaattcgatcaatgtcgaatcttattcaatttgtttgtttgattcttcaatacagtaacaaaaatcggatcattgaggttnnnnnnnnnnnnnnnnnnnnnnnnnnnnnctctgagtttgtccgggaagagatcctccgtgaaagctcttaatgtgcaatcaattacaaaggaatccattgttgcttctggtaagttctggtttgatttttcaattgatcattggttaatttgattaaggtttatgctaatgatcttgtgcttcattacaaaacagaggttacagagaagctagatgtggtggaagttgaagactttgaggaactagcaaagagattagagaatgcttctcctcttgagatcatggataaagctcttgagaagtttgggattgacattgttattgcctttaggtaatgaattgaatcattgagatac

SEQ ID NO: 159130 - DNA, 652 bp, Arabidopsis thaliana landsberg
atgttggccacaaattcatggagacattattcagtcactgagaagccgcgcttgcagaagatagcatttttgtcctgcaggtaacacctgcatgtatacccaatctcaagtttgcaaaacaactgatccttgctaatgcttgacaataattacatgtcacagctataccggaggagcttcacgacgagagcagactaacttcaggtttcataacgggaatacatattccctggtggatgtcttccttctttggccagagttacttcagccatggcctcttcctctaggctatggtaaagtcttttctttatcaattcctctgttttctcttcctccaatctatctatctaacaccggagaaatacagcattgaaaacgttgagaacattgggattcattactatcctacgttgagatactggaggaagaacttattggagagacaaaagtaagatgtcataataaaaacttttcctctgttgtgcttttcaggatttagtatgtttgttcatacgtccaacaaaactaactattatctgcgcagacaaatcattgatcttggattcgacgagaaattcttaaggacatgggaatattatttcgactactgtgcagctgggttcaagactcttacccttagcaactaccaggt

SEQ ID NO: 159131 - DNA, 581 bp, Arabidopsis thaliana landsberg
atgtgtaaagactatcttcaagaaaggaaagaacttgtggaagctctgcataagggtagaagattcgccaatcttccaaagataacacaggtgatctctctctcagttcatacaaatctatataaatttaaagattatcattgtttgaatcctggtaacattgatatgcagccgacattgatgatatggggagaggaagatcaagtatttccagttgaattagctcatcgattgaaaaggtcctataatttaattatcatatttttccaaaatcatcatcatttttttctaaatgaattgtcttgtgttgttgcttcagatatttaggggaagacagagcacaattggcgctactgaagaagacaggacatgcgattaatgaagagaaaccaaaagagatgtacaaacacatgaaatcttttctttgcactgacgcaatgattcctccaaatcaccagatcaatgctaagagactcatgttagcaaacttgatatccccagatcagcagatcaacaagtgatgttactgcagaaaaaaaaaagtgctgttagaagacataatagttaatcatgttttagct

SEQ ID NO: 159132 - DNA, 302 bp, Arabidopsis thaliana landsberg
tgatttatcttttgctacaatctttttctattacagaaacttacgtaacatcacaaagcctggacagaacataccagccttaacagttcagctaaggagagttggccatgatacggtaagaattattcaattttttccccatatatatattatacataatataataagaattttgttggttttaaggtggtagttgataatggtattgtccaagttactttctcgaacccagaaggcttaataactgggataaaataccatggtatcgataatgtgttggacgacaaaattgatgatcgcgg

SEQ ID NO: 159133 - DNA, 612 bp, Arabidopsis thaliana landsberg
tgtcattggctctcaatcgaagaaaacttttagctgacaaaatctgctttgggttgtattgatttatcaattcgtatggaaaatcctccattagaatctgagatcaaagaggtgagtttttcgatgtttaattcgtgtctcaatcgattaattactgtttttcttgtttgaacatggttaattactgaagattatgtaaccttgaatcaaaaacagtattgatgtttggtttttattcatcatagatttgtatagagtcttttgttttccggatctcgtttgtttacttgatttggcaaattacctaatcactgatcatagatcctcttcgtctttgaattatagactagttttgttgtttatgcttgatctttgtaacgctgattatagtttctaggtctgtttaatcaaacacatattcatatatttgttgttcttctctaaaaataaatttatgtgtgtttttaatatacaggatatgtctttgaagaatcatcctccagacaaggataaggacaaagacactatcatggaacaacctagtagtccacgtcatcggaaggtaatatgatgtaatctgatgcagaatccaaaacttatataaatcttgaa

SEQ ID NO: 159134 - DNA, 196 bp, Arabidopsis thaliana landsberg
ctctctctgtccctctctgtctcggtaatcggaaaaatcagaaaaatgggagccctaggacgagcgattcacactgtgggtaatcggattcgtggaactgcccaagcccaagctcgcgttggttctcttcttcaaggaagccaccacatcgagaaacatcgtaagcttccacttgcttcgctctattgaaccctag

SEQ ID NO: 159135 - DNA, 2264 bp, Arabidopsis thaliana landsberg
acttgagaatcaagattcagcaagagagacaaagaaggcaaggaagtggttattttttatacctgagaaaaccacctttgctggaggaaccaactactaaaacctcaatggccgcttggtttacgtattcgaccaaagctttggcaacatcggactcctcaagcaacacatcttggcattgaatctggacagttttcattgcacattaacgacataagtatatatacaaaagaggaaaacaaaaaaataatttaaaccaagaaactcacgtctttgcgtgtgcagaagcaacggaaaggaaggaatatttccttggacatgccttctggatctctgcatactaatgaagaatcttggctcagctctgaaacaaaatcacaaaccattagaaccgagaatacaaaagaaaacagagaaaatacagaaaatgatagaagaagaagataaggtttgtttacttgcagaggaagcatgaagagaagcactattattcaatggagaaggtcgaagcttgacatggacgagaatgacggattggcctcgctgcaacaaattatcaacagcccatttaagagcgtgttggctgcttttgtctttgtctattgcaacagctacaactccgctagaccctccttccttgactcccacgttattgtttttgggcatccacatcttcgtctctctttcgctttctctctttcgctttctctccttcaggattcaagattcagagcaataaagaaacttgagaagatgaaatcgaaagagagagagagacgtgtttcgaggtaggttcaaagatggtttctctatttttcattttttgttaagaaagcgaaacaagaggatgaagagaaaagagagtttctataaaaatatgttgtctcttgtttcgtctctatctctctatgaacgcttctccttcttctccgcctctccttcctcttgatttctctttcctattaactgaaagtttcttcgacgatttgcaataccaatttgtgtatagattaatttccacgcaagtaacatacaaggtgtgtccaaacttccaaaagaagtaaattatataaaatgaaaaagaacacagaaggagaaaccagaaattccaaaacacgtgactggtttcttatggaacaatcaaaacatggttatatactgttaatacataccatttgcatgaaagactctgtggcccaatggataaggcgctggtctacgaaaccagagattctgggtttgatccccagcagagtcgatttctttttgctaattttttattgcgaattagttgaaggctcgaagcttaaaaaggcccaaagaatctcatgaagattctgtttttggtctctctcactcacaagtctcacataatcgaaagctcgcagaagtcaagaggaagaagatgagtggtacagtgacaatgcacagtgtcttcgtctacggcagtctcatggcggacgacgtcgttcgtctcctcctcaaccgtatccctcaaaccgcttccgcaaccctccctgatttgtacgattccatctctgcaaaatcgattttctttgttgaaattgaaaaaaattgattggtgattttgagatttttgcagccatagattcagcatcaaaggtcgtgtttatccggcgattataccagctaagtctgataaagtctctggaaaggtcaggatccgaatcagattcttactcatgccttaaggattgggaaattttgatattgttgttgtgcaggtgttatttggaatcacagatgatgaacttaatgttttagatgagtttgaggatgttgagtatgaaagagagaatgttcaagttttgttaacagtgagtcattctcagattcattctccatccatttctatagagagaaaaaaatgtgttgttgtttttgcaaagattcaaagatgcaagaacaagaacaattcatttgttctctatatttgatttgaatgcagagatattgatatatatgtttacaggatagttcagacgagaaactgcaaacaaaaacctacgtttgggccaagaaagatgatcctgacctatacgggacatgggatttcgaggttagctatcttaacttgttcatagattaggctctctggatcattacttgtttgaattgtgtatgtatatatatgctttccattgaactttccacaggaatggaagcaacttcacatggaaggtttcttgaagatgactaaagaatttgctgaagagttgaatttaccgaaatccgagatatga

SEQ ID NO: 159136 - DNA, 1542 bp, Arabidopsis thaliana landsberg
gtgaggtgccaggtggaccttttgtaagtctccctagggaagtacaagaagtggctctctgtttcctttactacttcatcatagacaatttcagctcccctatgctgaaagcaatagtttcatgctgtttatgtgagtatctcacatttcttgatgactcaactttataaaagttgatgacagaatgatgaccaaataccgtataatgcagatgaacaacttgaaccagctgtgttgtatcggatagtggaaattcttcaaactgcctatagagctggatatattcagattacagatcattttagcttcttcattaccttgatttcacgtttcaaagttgtcccaggtcttgtctggaatctgcaagttttctattgaacttttggttatgagcttatttgagagatgatcatgcttttaggctttgtgatagcttaccttatgcctataaattcatgcagagaaactgaactcgtcgattgagtgtgatgagaggaaggcaaattgtggcacatttaaaacacttacaaaccttgtgtgctcatatttgtcagaaatgggtgatagctctcttgtcctccatattctagagaaagtttttgtcgaacaaatagtaagtttgtgaagacatattaacattcttatataataggatggtaaatacttaatgagatgtttcctcttggttgcagattttgaagcctgcgttggacaatgggtgtgctatactcaggatgatctgcgcgttagactctaaacctacaagactttctgaaatcagtgtaaccactctaagtgaattcttaccgggatatttgatcgatatagtcaatgtgagcacttgcctgttaaatactttaccgggatatttgatccatataatcaatgtgatcgattgacacaatctgtttccgctcttcttcttgcagtgtataccagaagataaagagagatcttacctttatatgcaaacatgtctctactatttattaccttgctacttcctgttcgaccggagctccaaactcacagaacaggttctgaaaagaatgcgatctatggttagtgaaaatgtaaaagcattggaatcggttcaagacagggagagtggtcgagactcattgaatttgatacaatgcattgtctctgtgatcctgctgatgcacaacgatgtcaaagttaggaagataatatcatcatccaagtcagagattgatttgattctgcagaacgtttacacattgcaggtatcattttctactctcttaacgttatcgcaaactgcaaaaccacgagctgatgagttttacctcgtaaatgtgcagtcctcacgaagcacgagcttgactgtagaaggaaagcatatgatgaaaattgcagcagagcgacttagcattgcatccaatagcttactcgcataataagttacacaactgtgacatagaatgatttgtgcactctttaacaaggatgctaagaagatatgacttttctttgcttgtttgggaaagcaacaattttgatggaaaattttgtagactt

SEQ ID NO: 159137 - DNA, 1626 bp, Arabidopsis thaliana landsberg
atacagactgatgttgggggagttcctgcagaagtaatacttgaaaaatcatccatggaagtacaaaaggtaaacctgagtactgttcttgatgatgagatcacaagtggcgccgatcgtggaaacaatattattacgggagaagcagatgttgcagaggttgtaaatggttcaggtaatggagcaagaaactgccacacattcaaaatgtttcagattctttaaaagcatggaaatttgtactcaatactgttttatacgatcaggggataaagaaaccgaagaattaaaacgcgaaaatggagaagcgacaaagactatctcggttctagatggcagtaagatcgttaaagatgatcaagaatctattgtcgttcgtgaacctcaaagcctcaacgaaaaaaaagaagatgagaagataatcttaagtgatgtgactttagagaataagaaagaagaggatactaccggaaagccagaagaggtatttgtttaagttccttgaagtttaagcaatagagatgtactgagatagagagtataatttaatgacttttttggtttacgcaggttagtgtcgaaaagccggtaatagaagaagatcaaacagaagcaaaacactcactagaacaagaagaggatattggtaacatctctaaggtattgactgataccacacctgttaaagtcgatgaatacgatatagagaagagcttgaactcggtatgtttttcaatttatgttgctcctattaaatgaactaagaaatggtactctattgcaggtatgtgaagagataccgataaagactgatgaagtaagagaagaaacagattcaagaactgttgagacctctgtaaatggaacagaggctgagcacaatgcaacggtttcagtagaagaaatctcgaggaacggtgacaacactgtgaatgaaacagtttcagaagatcaaaccgcgacagatggtgaaccactacatgatgttgaaactataaaaagagaagcagaaccgttttataagacagttgttgaagatgcttaagatcgtgaatactgaagaaactacagctcatgaatctaaaatctttgaggaagataatcatcaagaggagtatgcagaatcggtagaagcaaccaaaaactcagacgcagcagagcaaagctcacgtgaagtgactgtagacaaagaaaaggaagaggacataatccaaaacatagaagaggtcttgtcttagtttctcgaagctaaagattatatttgagcaaaacatgtttcagactaccttgttgacacaatttgattctttactttgcaggtgcaagaaagtcctagtgtaatggaatcaccgacaatacaaggagaggacattgaatcaaaggcttcattagaccatgaggaagagatggataaaatcacaaaggatactgaggaacaagaacatgtgttagtgagagacgtaccagtaccacaaagtgagacacttgtaacggaagctaagactgcagagactttttcagtccaagaagctgagatcttgaagaccaatattaatgaatcagaggcacatagtgccataggtggagaagaagacggtcaagagacaaaggaaaacacagaaccga

SEQ ID NO: 159138 - DNA, 2227 bp, Arabidopsis thaliana landsberg
ctgagtttagtaaaatttcaagcattgtctcttttactcggtaagttttcttgtttgatacacatattcgcttctcacatcagaaattgatatcaaagtaagttccttttttcttattattctctcgagattgacgaaattgaactctgtttctcgatttctaggaacttatcttgagcactctgttccactctgatttgacctttgaaagagctcttatatagattcttagtatagggattgtgtttggaaattttggatataagtttatgttttgtctagctgttaatgagcacaaagtttcatgctttttagcttgttttctctaataataggtttttgaacttcataggattgtttggagaaatttttggaggtgatggacaacgggaatgatcaacaaatcgatgttggctcggtagttgaagcagtttcggctggtcattcctttggtgctcctctctatgtagttgagagtatgtgtatgcgctgcggtgaaaatgtatgtctctttatctctctcacacacttacatttggttaggtgtctcggtttttaggtaaggtctatgtgtatattccaattgattttacaattggaatttttctgtgtaagcttatctttttgtggatggagaaattggttgaacgcgtagcttgcagtgactgtatttgttttctcattgctttgtaaatttactagaagtgaaaccatctcaatgcctttgaaatcttgccagtttggagcatcttcatcaaatttgagatgggagaaggttggaaatagagaaacttaagtatttgtaagatttagaggaactttaccaagttttattgagattcctgatgttgttatgtagtccttatcctttgtcataggaggaaaggttatacaggtctaggaaacaggctagcgtcgctttagtctttgctttttactttgagcttgttcccaaattgtacatgtttgctttaataacattagttcgttctacagtccaatggttcttgagattgtaatgaagtgtattatagcggggatgaaacagaccttattggctaagtcttggtgatggaatgaaatatattaacatatgtggttctgtggaaatcaattgggaagctttatattgtgaactttcagctactagtttatttttggctgaaatctttttcagttgtaaagagtccaacgtatgagattttcttggtctttctcttgatccttcttctgtgcataaagtagcttcttatttcttttccagggaacaactagatttctattgaccttaatacctcacttcagaaaggtatgttttaaagagtacccaattttgttcattttctagattcagatttttaatattctagctaatgtgagtagacgacattttagaaaactaacaatccactaagttttgttggttcgacgttttatttagaattttctctaccttgtgttagcttagaagcttcctgctaacatatttctggttacaggtcttaatatctgcatttgaatgtccgcattgcggagaaaggtacaacgtcttatgattttgagatgcttttaagtatttgatttgagatacactatatattgtctattttctcaattaaaaaagataagccttttcttgatctctggtatattttataggaataatgaagttcagtttgctggcgagattcaaccccgaggatgctcttaccatctagaggtttcagctggtgatgtgaaggttggtgcattgattcaaatctaaagttttgttcttttcaatagaagtttgttataattttcatgtggagatgcaattatgaggtagcatgtagcctgccattcttataagaaaaaacatgaattatctttctttagttgtctcttgctccctaagctaattttaccttcttatttctctctgaatgcagacatttgaccggcaagttgtaaaatctgaatcagccactattaaggtgagttctcttactgattctgggaaattcaatgcatcttcggattcagtattttcttaaccgagcatatttataagaaacagcttcccctaatctccctgaaaactgtgaattagtttccttcttataatatgaaaactggactgatttgaagctggaaactgatagtagtttgcattaatatatgtattcagattcctgaactggattttgagattccaccagaggcccaaagtggtagtttatctacg

SEQ ID NO: 159139 - DNA, 402 bp, Arabidopsis thaliana landsberg
ggtcacaaagaagatcggtcttgtttatcagatcatcattgctccaaaggttggtcctttctttatagaatcatttcgtttattactctgttttgttttatgtttgaatgtgacagatttggaatttcagaaattagggtttgaaaaggttacttacatcgttgatctgaagaaaggcgaagtcgccaaaggttagcttttgtttgttttgactatggtacaatctgaaagttttgattttgggattatcgcaattgggaatctggcaattcgattggagacaaaagtgaagagtacctgggaacttacaaaacacagactcctgaaatttgaccttgcttcaaaggttaggtttttcttgagaatacggccattgggaattgaaatgaagagaatctgcac

SEQ ID NO: 159140 - DNA, 436 bp, Arabidopsis thaliana landsberg
gtacgacgtggttccgcagctggaggaatagctgcaggaatctggtgttggtgtcgatcgacacctttgttgtgtcgttcgacaccgattgcatccgcgtgctgctcccgatggtgtcgatcgagacccacttggtgtcgctcgacacgagccctcctgtatctctagcagctaattgcgcattaaggccgcctgatcctcattggcgtcctcaggtaggatgagtccatgatcatccaatctctgaccagcctcattgtaggcttgccatcctcatctctcaaaactctttctgcatcagctctgatgactctgtcagccattgctaatttatgagtttttcggttggtgcgttcaagttttcccaagtccagaacagacaagttgataagctccttctattgtgtgttccttgtttgcctaggcatacacctga

SEQ ID NO: 159141 - DNA, 816 bp, Arabidopsis thaliana landsberg
atgcaattcttggctgctcttggaggtggaagtgggatcgagtatgaaatactaaagactaatcccatcttggaagcatttggaaatgcaaaaacattgagaaacgatcattccagtcgttttgtaagctctccaaactccaaaataccttttgcttactctttttatttttactatgtgtctttctaatcgttctgggtctttatttaactcagaatctgtctccgattttaaattgacagggtaagttgatagagattcattttagtgaaacagggaatatttcgggtgctcaattcaaacatgtaaagcataaaccctatgtgctgcttcacacatttttttcatttttcctttacaaaatctaacagcttttttcttgttgtcttatattttgcagttttactagaaaaggtaaattcctcaatatttttgctgcttcagtttctttcatgttgaaaaataattcttaatattgacatcctttcatgttctgttgtcacactttaatagtcaagagtggttcaatgtacggaaggagaaaggtcatatcatatattgtgcatgatagtaaagaagatcaagaaagtgtatttgcaatttttgctgtagtatatagacgctcgtgaataatggaaaaccactattaaacctgagatcacttcagcaggaatgtccaacccctcatgcacgaagagtgtctccatttgtaacaattcttgtgagtaacaccacgtttcatgtttttaggaatttgaacgaaaaccttatacttttgattatcttaccacaggatcaagttattcaaccctttaa

SEQ ID NO: 159142 - DNA, 368 bp, Arabidopsis thaliana landsberg
ttcttgatcattttctcttgtgagtttttgagtttaaggacttaaaagacaaaacgctatggtcaagttcacaaagcaattcgagggacagcttgtgcccgaatggaaagacgccttcgttgattactctcagctcaagaaagacctcaagaaaatccatttgttcaccaatggagttgagaagaagcacacagaaacttctctcatcaaaaccgttaagtcctctttaggaaggctttccattttcggtaataaggggcgggaacaatctcgtgtcatccaagtactaaaaataaacttgagcctttgtgacttttatttatcaactattcatgggtttgttgtgttaatggttttgatgcttttta

SEQ ID NO: 159143 - DNA, 696 bp, Arabidopsis thaliana landsberg
taaactcaaacttactaattagtattaatgttacatagtacaaagattgtaagcatccttctcaatgattggtctgaagccaatctggagtacagttatctaatatatagcatgataaatgtaaaaagaagtggctcttttagtaatgccgtttttccatataaaaatctacttttgagagtttaaattattatttttaagcgttagggtttaagagttaatttactttgttggcttttaaaaatatggaccatgttattagttttatagaaaatattgcctgttttttgaagagtctaaaacaaagtacaattaaaactcaaaataaataggttatttattatcttttatatcatcgacatttctctaaaaaacaaaggaaaaattgaaagtttcttcatgtccactttaaatattcactctctttattctttgtctttttttttttgatgaatctctttattctttgtctttttaaaataatatagcacgacataaccccaataattagatagaggctgatttaatgtacctttcctttgtagagactgttgaaggaattgcaaggtccatagtgcttgtatgagaataagtacttgtcatcaaagggcactctaggcacaacatcattgttatagacgaatctctcatactctattccatgctttgtcaccacacccttcataaactcaccaa

SEQ ID NO: 159144 - DNA, 483 bp, Arabidopsis thaliana landsberg
ggtaaatttttagaagagataaaatcgatcagtgaaatgattgtgaaattagcttcgtttttgatgtatatggaatatattgctacaggtcgagaacaaacaggatagaaactatcagattctgagtacatagaagaagagccgcggcgttctagaattgggcatttgaagaagaaggcttttagttgttcaactaaacttacacatcctttgaagatgagaaaaggcaaacgtaaaatcgatttccagattcctttgattgaagatgttagagatgagaaagaggagaagcttgtttctaaattgcgtcaacaacttcttcagaaagatttgttgcctccagtacatgatgattatcatatgttgttgaggtatccaatgagctaccaaagttccttcttttcttatagacaactgtggagtttgaaccgtatagagttgcgtctctgtgtaggtatctgcgctcaacctatgactaggtcg

SEQ ID NO: 159145 - DNA, 989 bp, Arabidopsis thaliana landsberg
tgagtttgaaggcgctgtgattgcgttgttccatatgctgataactaagtccaataaggttgctgcgctcttacaagctttttaccggcagaaccttccaaatgttaccaacttgcttgcaacagtgttgatcttcttgattgttatatacttccaaggcttccgtgttgtgttgcccgtgaggtcaaagagtgctcgtggccaacagggttcataccctatcaagctgttctacaccttcaacatgccaatcattctgcagtctgctatctgctcaaacctctacttaatatctcatgtacttgtgctttcttttgtttcctcattaagggacaacacaagtgggaacataaagttgacattttggatttcctctttaacagcttctttacaggaaattcagtggaaatttctttgtgaacctattgggacagtggaaagaatcagagtacagtggacaatctataccagttagtggtcttgcatatttgatcacagctccggcaaggtaattcacaagtaacgtgtgtccccatcaatataacaatacttgatttccagttctctgaatatttgttttccacggttacagttttgccgatatggcagctcatccattccatgctctgttctatatcgtcttcatgctcactgcttgtgccctattctcaaaaacatggattgaagtctccgggtcttctgctagagatgtagctaagcagctaaaggtaataatccctaaaccttttctccattgctaaataatttaaacatttcgacatggaaagtgaatttatttgtaaaatatgattaggaacaacaaatggtgatgccgggacacagagagtccaacttacaaaaggagctgaaccggtacatcccaacagcggctgcatttggaggagtgtgcatcggtgcgctcactgttttggctgatttcatgggagccattgggtcggggactggaatcttacttgcagtcacaatca

SEQ ID NO: 159146 - DNA, 1030 bp, Arabidopsis thaliana landsberg
atgaccgtcgctgtagctaagcttctgatctccgccatggcggttttcatgcttgtttctgcttcgttcgcgacctcgaaagtgccgttcatggtggttcacaagaaagccactctcaacaggctcaaatctggcgccgaacgcgtctccgtttcctacgacatctataaccaaggatcctcgttagttctctatccttcatctagttatttcccgaatccgtttgatttctccattttcatttccgatccgtgttaatttctgattgcatggagagattggtcaatgtagaattaggagattatgcttgagctatcattagatctaccgtatgcgtatcagttcctaaacgaaacgccatttgatctgatctcattgtttatcggaattttggatttggtttgtgaattttgtatctgccggctacgatgactttgagattcttaatgaatgtcagctaaaagcgtcagatatttgtggtgtttgctctcaggtcggcgtatgatgtgactctgacagataatagctgggataaaaagacttttgaagttgttaatggaaacacttcaaaatcatgggaaagacttgatgcgtgagtttcttcctcaatcataaaatcttatattggcctgctttagcttttactctcgtcactaatctaatatttgctgtgcagaggaggtattctgtctcattctatcgaattggaggccaaggttaaaggagtcttctacggtgctcctgctgtcgttactttccgcatccccactaagccagctcttcaggtttgccatttttaagctcccttcattctagttcttggaactggttgaagcaataaacctccccaattaatctttctaatcagaattactttctgttgttgtggccgttattttactaaatatttggttttgtgatgtaatcgtgtattatggttttattgtttgtaggaagcatactcaactccactactacctctagatatcctcgcagacaaacctccaacgaaacctttggacgtggtaaa

SEQ ID NO: 159147 - DNA, 647 bp, Arabidopsis thaliana landsberg
ctaaacgtggccaagtggaattcgttaaagctaaccgaggcaatatttcaaagttagtctctgctctcttacctacagatgacgatgtttatctagaattgaaagaagctagggaacggcctagaaagtctgctgtgagtcctaccatgaaaaagaggttcagggagagcatgaatatgctgcagtggttgatgttccaggaggagcctgatgtttctttgagaaatctagcaaaactgaatcttgatcagcgaggtgtttgtggctctgtctggggacagaatgatatagcatataggtgtaggacatgcgagaatgacccaacttgtgcaatctgcgtgccttgtttccagaatggggatcacaactcccacgattattcaatcatctacacaggtggtggttgttgtgattgtggggatgaaacagcatggaaacctgatggtttctgttcaaatcataaaggttctgaacagattcaacccctctcagaaaatctagcaaattcagttgggcctgtacttgatgccctttttacttgttggaataacaagctcttatctgcagaaagtagtggtcagaaaggtgctagatccaacgatactcttgtgatactccaaaagatgtcaaacgagctgacattatag

SEQ ID NO: 159148 - DNA, 571 bp, Arabidopsis thaliana landsberg
gctgaaattactttctctttgtgaatatttctggttacagatgctgcggttgattgcaacagcattgaaagatgtcggtccatattctatgttttatcttgctgctgctgtatctgacttttatgtgccatggaagagcatggtaagagtctcatgtcctatataaccatggctacacattatcttctgtctgaaagatgttttttgtatatatttggtgaaaccagacagagcacaaaatagaatcaggatctggtcctttagacataagactagctcaagtccctaaaatgctatcagtcttgagatcaaattgggctccaaaggccttctgcatatcattcaaggtcaatctctctctctattctctattctttcttgtattgattctccgaaatccgatgatgtatatgcaaattcttgattcagcttgagacagactcaaagattctgatggagaaggctacaaaggctctaagaaaatacaaagtgcacgcagttgtagccaatgagctatcaacccgtaaggaagaagttgtggttgtttcaagcagcggtaatgttgtggtta

SEQ ID NO: 159149 - DNA, 265 bp, Arabidopsis thaliana landsberg
aggagttagcagaaatggcgaaaaatgcggtgaaagaaggaggatcttcagatctagaggtagataggttgatggaagagcttacgttagttaaactgcaaaaagagaaggtataaagaagttgaatgtattgcaagttatggaataataatgtttttgtaattctgatggtttgagttacaatagtaaaagattgtatttgttcattcaaatttacaatggatgatcttttagtttgtagtattggtaaatgaatgtgaagtta

SEQ ID NO: 159150 - DNA, 291 bp, Arabidopsis thaliana landsberg
aaaaactcgaagtttatgcatgccttacctgttgacgtggcaacatacgcattgcaggataagcatgcactgacggatatgctgacatccccgactgtggaagatgcgataaagaagagagttgagatgaaaacccgaacatacgggcaagaagtgaaagttgggatggaggagaaagaagaagaagaagaagaagggaatggatacaaaatttcaaaatcagtccgatcttagttggtgacttatatggagattggatcatgcctttaacaaaagaggttcaagtggagg

SEQ ID NO: 159151 - DNA, 454 bp, Arabidopsis thaliana landsberg
gaaaatgatctcaatttaccacatttttaatgtacttttcagcttgtgaatgctgcagtgatagttgatccttcagttaggcgaataatagctagtgaaactgatcaagtatatgcatcatctgctcctcgtgacatgactagcgcagagaccaggcccttcgaggaaacaggggaaatatgcttaaatgacacacttgaaaaacagaatggttcattgtctactgtttcttgtctgaatccctggcaatggagtttgcagccgcatgacactgaaaattgtagccagtggcatcctcttaggcatgcttccatggttgccattgaatcctcttctgccagagatagaaatctgtttcccaatccatccaagatttttgatcaggatcatgttccgccctcaaatacagattctctggctagaaagcagcaatcaagcagtcatagtccagacg

SEQ ID NO: 159152 - DNA, 653 bp, Arabidopsis thaliana landsberg
  unsure (1)..(653): unsure at all n locations
atggatccatcggacgcgtggtactttaagacttacatggacgcaggggaatacgggttcgggttacaagccatgccactcgtaccgcttaatgattgtccacgaaacgcagcctatatggacggagttttcgccgcagccgatggaacaccgttcgtgagagaaaacatggtttgtatctttgagagttacgccggagatattgggtggcgtcactccgaaagccccatcaccggtataccggtcagtctttttttcttatgggtattatttacatagaaaaaagtttagggtttgaaaagtaaatcttaaaatttttgagttttaatgtaaattataatttggatttagtagataagggaagtgagaccaaaagtgacgctagtggtacgaatggcagcttcggtaggtaactatgattacatcattgattacgagttccaaactgatgggcttataaaagctaaggtatttttctactttatatgagtttccaaattataaaagattccatatatatacgattccgtggaataataaatatttcactttttttgtcactaactaatgtacgtaataatgacaggtcgggctaagtggaatctaatggtgaagggacacatatcagacaaaactangtggagaaagataag

SEQ ID NO: 159153 - DNA, 274 bp, Arabidopsis thaliana landsberg
aaaacccttctctgctttttatcaaaattctctctttttcccaaaaagattcacaaatttgttgtagtctcgccgttaagatggcgccggcgacggagcatcagagctcgttcttgagtcgactaagccgtcgcaatcaagtggtttccatggaggttaaccacgagcaagagcaagaagaactcgaagattttcaaaaacacgtagctgaacgtttcgcggagctcttaccaccgtcggattcgccggaatcttacccgattctttcgatcca

SEQ ID NO: 159154 - DNA, 327 bp, Arabidopsis thaliana landsberg
gagaaatatttgtttccggaggagtctcgggttgaaaagcatgtcaatgtgttgaagaaaaataagataggagtggctgctcacttctatatggctccacaagtgcaatgggtcttgtctcctgctcaaaagcattgtcctcatctctctaaatctgattctctcgtcatggcagactcagctgtcacgatggctaaagctgtatgccagtttataacagttcttggtgtcgctttcatgtccgagaatgttcgtcccatcttagctctagctgggtttcaaacggttaaagaagggttttttcctctcacaccatgttatgtgata

SEQ ID NO: 159155 - DNA, 716 bp, Arabidopsis thaliana landsberg
acctgaagaagatcaaacttgatcacgagccctcatattactcacaaaggcttgcagccctcactcccggatttgctggagctgacattgcgaatgtctgtaacgaggcggctcttattgctgccagacatgaaggagcaacagttacaatggcgcactttgactctgcaatcgatcgtgttattggtggtctggagaagaaaaaccgggtatgtgctttcgcctttatcaacaaaattcaactgtttggcgtattgccagttttttatattattatttgttcattttcgtttatattggaacctgctccttaggaatctaggataaatctcaaatttgaaacccaacaaattggtgacgtatattatcagcacttttctttctacaacggaaacctgaatgttctacaatctcttttggtggtttcatgaccgcaggtaataagcaagctggagcgccgtacagttgcatatcatgaatctggccatgcggttgctgggtggttcctggaacatgcggaaccgttgctaaaggtgactattgttcctcgtggcacagcagcgctcggatttgcccagtatgttccaaatgaaaacttgctcatgacaaaacaacccctctttgacatgacttgcatgactctcgtatgccttgcatatgatcacgttaaacgcctacttgctactaatgtgaatgattctcgacagataatataa

SEQ ID NO: 159156 - DNA, 1114 bp, Arabidopsis thaliana landsberg
atcaaacatcacatctctttctcttttatctctttttctcggtcttcaaagagtttcttagttaccaaatcaatggcaggtatcaaagttttcggacacccagcttccacttccaccaggagagtcctcatcgccctccatgagaaaaacctcgactttgagctcgttcatgttgaactcaaagacggtgagcacaagaaggagcctttcctctcccgcaacgtaagtatatctatctatctatgtgttgttgtaagacaagagaccaactgttttcatgtatctggcctgcatctcaaatgttttgtgtttgaacttctttcctcttcagccttttggtcaggttccagcctttgaagatggagacctcaagctcttcggtatgaaccttttccatgcatcatcttcaatctcaactctgagttgacaaaagccattagagagcaaaatcactaataagaattggatttttttatttttattttgtgtagaatcaagagcgattactcagtacatagctcaccgatatgaaaaccaaggaaccaaccttctccaaaccgactccaagaacatatctcagtacgcaatcatggccattggaatgcaagtagaagatcaccagttcgacccagtggcttcaaagcttgcttttgaacaaatattcaagtccatctacggcttgaccacagacgaatccgttgttgcagaagaggaggctaagttagccaaggtccttgatgtctacgaggctaggctcaaggagttcaagtatttggctggtgaaactttcactttgactgatcttcaccacattcccgcgattcaatacctgctcggaactcccaccaagaagctcttcaccgagcgtccacgtgtcaatgagtgggtggctgaaatcaccaagaggccagcttccgagaaggttcagtgagaaatttctaaaaggaaaatatggttttgcttcagtcacagtaataatgctaagattaaataagcggctttctcattgcccaatttctcagtactttctttctgttgtatcctctgttttctttcagttatgtgagtgtgtgtgtatgctcttgagagtatctttggcaaaaactatttatct

SEQ ID NO: 159157 - DNA, 679 bp, Arabidopsis thaliana landsberg
gtttcgtcttctcatttctctgcttctggttcagtattttggctgttgcgggatcgatttatacccgtaaagtggtttccaatgggctcgaagccttggctacatctagctcctcagtataaaaccctagaaaccttttgggatgatgaagacgatgctcctggtcctagatgcgctcatacacttacggctgttgcagctactaagactcacggtcctcgtcttattctcttcggcggcgccactgctattgagggagggagttcttctgttcctgggatcagtaagtttcccttattgaatttgagaatttgattttttttttttttttgtttggtttgatttgatctggagttgttctggttctggttttagggttagctggtgttaccaatacggtgcattcttatgatattctcactaggaagtggacaaggtaataaagacttcgtttttagttttcagattatgttgtttggtttattattgttttcttccaaatccacgttggtttgatggagaagatggcaattgtgaattttccggaattgcgcaggcttaaaccagctggtgagcctccgtctcttagggctgctcacgccgctgctgcagttggcaaaatgaatcgtttttcaggttagcttttgatcacagttattcagattgtttattgttgctc

SEQ ID NO: 159158 - DNA, 1010 bp, Arabidopsis thaliana landsberg
cttcctctctctctctctctcttctctaatctaatctaatcaaatttctcttttttaggaagagaagtttcctcctgcgactttgttctttctcaatatgaatcccggaaaatcgggaacctctagcgatttcagctaatctttacttaccttttctttagttctgacaagaagtagcaatacccttttggagattcgatcgtattcgctgtttttttttgtgtgttttagctgtcttcgtgtctctgctactttgtgtttgatcatggagagatctgattctagagatttctacaacttcgctaagacttcttctggtcagttctctttcttgttcagctctttttgttttcaaatctaataaaagtgtttttattttgtgattcttcagtttgctaaagcttctttctttgatctgagatgtgaatgatttgatttgcttctgatttgtgaaaactttaagagaaacatactttttgtttcatgcttgttatgtttgatttatcttccttgttacagtatttgattcgttttttttttaagttttgtagtaacctataagatttactaatttgatttttgaagttgtatgaaatgattgaaatgtcacagatttgtttacaaaagctttagttttacttaaattttctggtcaactgattgtcacttacctcatgtgtttgatgaaactggatcttattgtctttgtgcagataacaatagtgcactctttgacgcatctcaatatgagttctttggtcaaagtcttgaagaagtcgaattgggtggtcttgatgatgatggtactgttcgtggacatgttgatgatgaagagtatcacttgtttgataaaagagaggtaatttggactgagtctgttcttggcaatatttgatgctaattatatatgagataaatggaagataaaacaaaacatttacttctggtttcagggtgctggtttaggatcattatctgacatggatgatcttgccacaacttttgcaaag

SEQ ID NO: 159159 - DNA, 484 bp, Arabidopsis thaliana landsberg; identical to SEQ ID NO: 2354
  unsure (1)..(484): unsure at all n locations

SEQ ID NO: 159160 - DNA, 554 bp, Arabidopsis thaliana landsberg
gtgttccccttacttattgagaaattcaagtatgaggagcaagcttacatagtctggcggtttctctgcagtattcctgtgaatatgcttgctgtgttcttgccatggatttcttcttccatttcagtagatgaaagcaaggagatgcaaacgtgcttaaagaagatagttccaggcgagaagctccttcagcaggtaagttttgaattaagatccaactttctaagttgaaagactttggcttgttgattgatattttccttttgaaggttattttcacctggctgggagggaaaagcaataccgtggcttcgtgtcgcattgaagattctatgttccagtgctgtctagattcttctagcagcatgcttccttgtaaagcaagtagagaacagtgcgcatgtgagggttccaagattgggaagagaaagtacccagagcttactaactttggctcatctcatactctgcacccagttgatgagataaagaaaagacacaagtcaatcaacaaggagatgaaagaaatagccgatgaggctaggaagattcag

SEQ ID NO: 159161 - DNA, 5131 bp, Arabidopsis thaliana landsberg
atgaatgacaaacataacagatcggaaatatatttaaaaaactgcaataaattaaggtcattaatacgtggccgaaagcaactaatttactaaccaatgcacacatctacttgcttcgtcttcttcttccttcttctttctaccaccattttcagattcaaaattcaattctaacagtttcacttaccctgctcctctctctctctctctctctctctcgctctctttctcatgtgatctctctcgctctctctttcttctctaaaagccaaaacttcgatggcattactgtgattttcctcataaagtaagctccttttttcgccggagattatgggaggctgtacttccaaaccctccacttcctccggcagacctaaccctttcgctcccggtaatgactatcctcaaattgacgattttgcccctgaccatcccggtaaatcaccaattcctactccttccgccgcaaaggcctctcctttcttccccttttacacgccgagccctgctcgccaccgccgcaataagagccgcgacgtcggcggaggaggagagagcaagagtttgactagcacgcctctccgtcaattacgccgtgcgtttcaccctccgtctccggcgaaacacatacgggcggcgctacggcggaggaaagggaaaaaggaagctgctttatctggggcgacgcagctaacgacggaggtaccgcagcgtgaggaggaagaggaagtagggcttgacaaaagatttggtttttctaaagagtttcacagtagagtagagttaggggaagaaattggacgaggacattttgggtacacttgctctgctaagttcaagaaaggagagctcaaaggtcaagtggttgctgtcaaaatcatcccaaaatcgaaggtaacaaaacttgagtttagtttcttgatcttgatgattgcatactctccattgtagtgttagctgatagaattgaatgtgttttgattcttttttggcagatgacaactgcaattgctatagaagatgtgagaagggaagtgaaaattctacaggctttatctggacataagaatctggtacaattctatgatgcatttgaggacaatgcaaacgtctacattgcaatggagtaagatcattattttatcataaccttaaccatttccttgtttgatgttgaatttagttaggttttagttatgaatttggtaaaaagaacctattgtttcataattggatttaagtagtttgaatttgcaggctatgtgaaggtggtgagcttcttgacagaatactagcaaggtgtgtgtctgtgtgctactaaagagttatcgatacttatggccagagattgttcttattttataaaaagattcatcgtttttttctacaggggagggaaatactcagagaatgacgcaaaaccagtgattatacaaattctgaatgtggtagctttctgtcatttccaaggagttgttcatcgagaccttaaaccagaggtgaggcacaattttgaactggaaagaagattatgttttacttttatgtgtagaatgttttctgatcgctgcttcatcatcagaacttcttgtacacttccaaggaggagaattctcagcttaaagcgatagactttggcttatcagactttgtcagaccaggttcatcatcacacattttactatgtcactatttctccagttctttttcttctggttagtaaactaaaaatggtattttgtgcccctttttttgaaagatgagagactaaacgatatagtgggaagtgcatactatgtagctcccgaagttctacacagatcatatacaacagaagcggatgtgtggagcatcggagtcatagcatacattctactatgtggtagccgtccgttttgggcaagaactgaatccggaatttttagagctgttcttaaagctgacccgagtttcgatgaacctccttggcccttcttgtcttctgacgctaaagactttgttaagcggttattgtttaaggatccccggcgaagaatgtcagcctcccaagccttgagtcagtcatttttaatttcacagctctttatagttttatgtctcctgtcttttggtagtcataaatcaccaaattcagttcctatttacttttttcagtgcatccttggatccgagcttataatacggacatgaatatccctttcgatatcttgatctttaggcagatgaaggcgtacttgcgatcttcttcattacgcaaagctgctttgagggtatgttttaggcattcttttaaagtgtcgaaaagagcattgaagattactttctcactattatgtgctttcttttcacaggcgctatcgaagacgttaatcaaggatgaaattctttacctgaaaactcaattttctcttctcgcaccaaacaaagatggcctaatcacaatggataccattagaatggtttgtgacactataacttctcttatattccttcctcttgagaaaaaaagagaaacaccgtagtaatctaatctgtattgcattttttgtttctgtttaaacaggcacttgcaagcaatgcaacagaagcaatgaaagaatctcggatcccagagtttcttgctttggtaaatgactgtgttctctcggattttgataaatgctttaacaatttggtgttaatgatccttcattgactggctttttacagctaaatggacttcaatacagaggaatggattttgaagagttttgtgcagctgctataaacgttcatcagcacgagtcgcttgattgttgggaacagagcattcgacatgcttatgagcttttcgacaagaatggaaaccgagctattgtcatcgaagaacttgcctctgtaagttaaagcatctgtcttcagcttaaatacaaaaatatcgaaaaacagatcctctaaaacgacatgcttttgaattgcaggaacttggtgttggaccatctataccggtacattcagttctacatgattggatcagacacactgatggaaagcttagcttcttcgggtttgttaaactgttacatggagtctctgttcgagcctcggggaaaactacccggtgaagataacgaaaacaaacatgacctaagcgaaatcgtaaaagaagatgtcaaaacctttactctaaatcttggattggtattggaaatgtaatagttggtcaaagactgtacaacaaatgaaaagtttcttacaagagcaattctaaaaaaaagattgttgtaataatatagtaaccacagatactttgatactctatgtgaagtcaagaaaatgaaaatgaaaattccaaaaagatttgatttttgtctctctttcttcccaatgattatggaatcagcgaaatcttggttatttccggtttgttactgtgctttaatttgtgagatctgagtcggtgtaaccagtgaaaaccggttctagtgatggaaataaattagaatttagaaaacaaaccaaaccgattttcttctcccccaattttatattttgcttctcctctcgagtttgggattcgagtttaaggaattagggattctaatctctctctctttctctcgagatttttcttcacttagttcttgattctgattaaaagttgatcttatagttccggtaacttcgttttctgggtttaattttcgattcaatcttcatctccttgatccacagccatgactgaggtaaatcaaaattcgcatcttttctctccaaatctctttgaattacgaaacctctgtcttgtttcgtaattgaaattgatcttgagtttgtttttttgttatttcagtattgggtaagtcaagggaacaaatggtgtgaattctgtaagatatggatacagaacaatccaacaagtattagaaaccatgaccttggtaagcgtcaccgagaatgtgttgataagaagctcactgatatgcgtgagaggagtgcagccaaagacaaagagctcaagaaaaacgaaaaactgcttcaacagatcgaagctgtgagtaatcattcttgtttcttttgccagtgatacttattctaacgtttttatttctgattccgttgtttatatctcaacttgtttcagaaagcaactcgtagctatcagaaagatattgcaactgctcagcaagtagctaaagcaaacggtgcaccagaggatggtacatccggtaagtatctctctctatgatgtcattagtatttgttcttcgacttatagctgctatattcagggttgttgcttagctttggatctgtttgttatagacttaacattactgaggtcgtagagtatgtgtgaattggatttgtgaattgctttcattgaccaaaagtatgaacaaaccaagcagcgtttgattcttcgattgtcatattacacatctttgcaaatgacttataagttttaatgcctataaccctatagagaatcatcacgaaagagcgaaacggttgcttcttttgagtcactctcaggttctttcatcattttgattgccatttttcttagcctttttcatttatacatataccatgtagtaaccatattgttatggcagattggatgctcgacagtgcttcaggctattattacaaccagaccaatggtctgcactatgattcacagtctggattctattacagtgactcaataggtatgtaatatatatcgagttttttttatttgtttccttgcaaacatgattgtatacaatttcgtcgtgtgtatgcttacacgggtaatgaaacaggacattgggtgacacaagacgaggcctacgctgcggttaaaacatcatcaggaaccaaagtacctctcgtgaaaaagcctgtatcttcttcaggagctggaccaagtgtggggaaaccacctggccgtcttgtcacagcttctttaaatcctaaaagagctgtgaaaggagcggcttcatctgttgatcttggcaacaacaagagaaagaggcaagatgagaaaccgaagaaagtatctgcagaagagaaagctgcattgaaggcaagagaagctgctaggaaacgagttgaagatagagaaaaaccattgcttggtctttacaatagacccttttga

SEQ ID NO: 159162 - DNA, 564 bp, Arabidopsis thaliana landsberg
taatacttcttgtaggcacgggctggtgttcgagaggttcactttcttccattcaatcccactgacaagaggacggctcttacatatattgacagtgatggtaaaatgcatagggtcagcaaaggtgcacctgagcaagtaagctgtctgttcccgtttatgttctattcaaaatattttggtgtagagcatagtcttattagcttctattgtcgatgtctcagatcctaaatcttgcacacaatagagcagagattgagcggagagtacatgctgtaatagacaagttcgctgaacggggtttgcgatctcttgccgtggcataccaggtaactggagaccagctcctcaagtttctcgtgatctattagtgtaagttgatacaagattcaaggttgtatgagtttggccttctacacgaagttccggaagggacgaaagaaagtgctggaggcccttggcaatttatgggtctcatgcctttttttgacccaccttagcatgacagtgccgagacaattagaagggctttaaatcttggggtgaatgctaaaatgatcacag

SEQ ID NO: 159163 - DNA, 5855 bp, Arabidopsis thaliana landsberg
  unsure (1)..(5855): unsure at all n locations
atgcaaactcgatcaacaggcaaccagaacctccttttcaacgacaacatcgaccgcatagctcgcgaaatcagagaaaggagaaacacagtcaaccttgtacctcagcaaccactcgaaatggctgccaaacggaatcaacagaatgggcctaccaacattggtgctggagatgcaccacgggaccaccgtcaggggaaagaaactgcacctcctgctatccagaaaaataaattcgagattaggagttgtctcatctcgatgattcaggggaacaaatttcatggtctatcaatggaggatctactcgaccacttggatgaatttgataggctctgcaacctaacaaaagtcaatggtgtcagtgaagacggattcaagctccggttgtttccattcttcttgggcgacaaagcacacatctgggaaaagaatatgccccatgactcaatcatcacctgggatgattgcaagaaggcttttttagcaaagttcttctccaacgccaaaactgcaagactcataaatgagatttctgtgaagcatgggagcgctttaagggttacaccaaccaatgccctcatcatggcttcaagaaagcctctctacttagcactctatacagaggagttttaccacgcatcagaatgcttctggataccgccagcaatgaaaatttccagaacaaagatgttgaagaaggatgggaattgattgagaaccttgctcaatcaaatggcaagtacaacgaggactgtgataggaccgttagaggaacagctgaccgtgatgtcaaacacaggaaggatatcaaagcgctaaatgacaagctggacatgattcttttttagccagcagaagcatgcacacttccttgttgctgacgagcagtatcaagtccaagatggggagggtaaccagttggaagaagtcagctacatcaacaacaaccaggctggctacaaaggatacaacaacttcaaaaccaacaatcccaacctctcctaccgcagcaccaacattgctaatccacaagatcaggtctatcctccatagcaacaacaaggtcagaacaaaccttttgttccctacaaccaaggtttcgttcccaagcagcaatttcaggggaactaccagcaacaaccaccacctgggtttgcacctcaacaaaaccaaggtcttgctgctcctgatgctgaaatgaaacagatggtacaacagctgctacatggacaagcatctagctcaatggaaattgctaagaaattatctgaattgcaccataagctggactgcagctacaatgacctgaatgccaaaatggaagcattaaacaccaaagtcagatatttggaaggccaatcagcatctacctctgcaccaaaagttacagaacttccagggaaagcaatccagaaccctaaggagtatgccactgctcacgccatcactatctgccatgatcgagagctcccaaatcgacatgcctttacctctatcactagggacagtgaagttcaagaaggggaggttttcgttcagaatgaagtttcagctgaaatagcaatagaggagcctatactcgatcgtagtactcgatcccaagctcaagtagtacctccttctcttaaaaagcatgccgctactaaaaccaaggataaagtctttgttcctccaccctacaagcctttactaccatttccagggagattcaagaagcaactaataaagaagtatgaagctctctttgaaaaacatttgaaggaccttgaaatcacaatgcctctagtagactgtcttgcgctaataccagactcacacaaacgtgagaaggacatgattacagaaaggatcagagaagttctaggaacggtggcgttaactcacgagtgtagtgcaatcatccagaagaagattgttcaagaaaagttagaagatccgagatctttcactctaccatgctttattaggcaactagctttcagcaattgcctatgtgatttaggagcttcagtcagcctaatgccactttctgttgcaaggaagctgggatttgtcaaatataactcgggcgacctaaccttgattcttggtgataagagttcaaggagaccttttggcctgttcgaagatctgcctataatgatcaatgaagtagaagtacctactgactttgttgtgctggatatggaagaagagcataaggatcccttaatactgggaagaccattcttagcttcagtgggagcagtgatagatgtcagagaagggaaaataggtctcaaccttggaaagcacatcaagttgcactttaacatcaacagaactccacaagggtcaacagaagatggaagaacctctggaaatgatagagcgatctcaggagaaggatatgagactgaaagagtgaaagaacttagaaaaaagtctgataagcagaatgaaactatagagaagctggcccacaccattgagcaacttaggagtaagctgaatcagatgcagaaggaagctcaacctaaaggcgggattaacactatcccgagaaaagaattcacttcaagatggtctcaagatacagattatcctccagaagagaaggaaggctattttgaagaaagggggattgagtattctgctgcggacctctccagggaggacgctgaatatgatgatggtatcagagaggattatgctaaccctctctacagtttattttcttcttgataagtgtgaggagttattttatagacttaaaacaagctcacttgggaggaagtcccatgactatccttgtaaataatttttactttctcgttatttttgatttgttttagttgtgtttgtggttctcaggaacaaaggagtaacgtgaaggtagagtaaaaattcaaaacttttactctaatgatggcctagagatcgagtatatcgctcgagtatgagtgatgtttaaaaacctaaaaaaaaaattcatcattttactcgccaaacagaagcgacaaagtcttcgagggagttttagcaagtttacagaagattgcaggatttcgtggggtttttacatgaacagagaatacagagaagaaacaaggagacacatgtgggacccactgcttacgcctatgttccccatgcagctgaccagaagacaaaaatctatcctcttcttctctacaccactcgatctctccttatttcttcactcgatctcatcgccttctctcttcaaaaactcgacctcaccatctctcttactcacacactcgaccaaacaagaactcgcccctcactctgtttcactcgacctcaccatttgctgcaacacaagctctcttcactgctgaacacttatcaccttcaagctcatcatctctccatctgagacatcactcgaccacagctctcttcgcctctccatcatcaccgcttgctccctctcttcaaggaaacaactcgacctcgccatttcactcactcgacctatgtcagcaagccgccttcaccacttctagctcataaccactcgaccaaggtgccatctcccaagtccattcatcactcgaccatcgcctcttcacttgatcacgtctacacaccatctaccatcactgacctctttcaaaccgcttcactatctctcgcctctcaaggtcactcgatcgcaagcacactccattcacacaaccaaggaatcacttgacctcgagttcaccaaactggcaaagaaaaaaaaaaaaaaaaaaaaagttttttgtacactcgaccagtttactctgttggtttgtgtttttggttttgttgggactaacgtattaacgtttatctttgagttacatttgttttaaggtttcatcatgagtaactatagtggagaatcctcaatggatcctgattataatgtggatgaagctgagtcttggtccactagaccagagagagaaaaacatgtttacgagagtttcagagatgaatttgaacgctccgcagcacgacgtaatcagagaagagctgaaatcgccagaggaaagagagcgatgtcgagtagatatgagcggatcgatgaggacatcgaaactgagtatgagccagagtcatggcgcaaggagacaaagctgctgaacaaacctgacgaggttacagtggaggagtatatccgattctttgagatgaatgacttctggggaacgaggtatccctgctattagactttagcccagttggggttactggaggacgtgcaacatctgttcgagaagtgtcatctggatacactcatgtcttacccttacgctgcctgtaaggaggagacaattgagtttctttccacactgcaagtggagatgtatgaggatctcacggactttgagctggataccatggggttagggttcttgacgttctccgtggctgaacagcggtatcagctttcgattaagaaattggaagaacagtttggtttccctagtggaaagggaaccaaacccaggtttgacagggaagagcttaaggatttgtgggctactattggaaacaatttaccgctaaactcgacgcggtccgnnnncaaccaaatccggagtcctgggatccgctactttcaccgctcggttgccaacggtttttactccagggagtctacaggcaccgtgtctaacacggacatggagatgatagattatgcgcttacagggattctccgccggacgaaggggaagaatgtcttgagaggcgatctcaacaacgcaccaccagtaatacctctgttgatccatctgtgtggatacaggaagtgggcgttgacgaacgggaagaagaaggtgagaggagcactatgcgtgggtggcgttgtgtcgccaattctggaagcttgtggagtaccgctcaaggaaccaggtttagcaccgaggatgatggacttggatcatttgcgcagatgtgagttcttggagtttgacatggctggcgactttcaccgctacaggttcgagcattcatcgattaaaatcgccaacattcttctcccctgcattgacgctactaggattctcgagggcaggaacattgacttcaggcctacgcttgaagaacttttttcgagggtagtccgccaactgaggagatcagtcataccgaaggagctacagcagaagatattgatgagacggatgatatagatgaggcggagtttgacacgagcatgtatcatttcagtgagcaaatatctcctgcgagggaaagcaagagtttgagcgaagctcacaggaacaacagcaagctgcagaagtggtgcaagaaacaagacaagttactcgccaagtgcctcagggctatcaagtttctgaaggacaagatcagctgctcctcttccactacagctattccgcagggccatctccctcaggacatgccttcgaggagatatgacgcgcccgagccaggtcggcgcaggcctgagcctagagagcaagagattctgcatgtccctgcgaggcattcatcattcgagcctcgtgaatctgggaggaagaggaggaccacactcactcgatctagcagtaggagcggacgacttctgcagtctcgtagtttacgcgaccgcggtgctggccgctgcagaaggagagaggtcgagtttcctcagagcggtgctggccgccacagagctgatgaggtcgagtacccacctgctggagctgatacagaacaaggaggttcgtctatggcctgggagcaatcgcaggtagccattgacgagcaactacgttcattcttcgactgaggtaagcgcttcacctcaccattgtactataccgtatgttgtgatttgtttcttcattttttgtttctgtgat

SEQ ID NO: 159164 - DNA, 258 bp, Arabidopsis thaliana landsberg
cattttccttggggaggtttgagtttttgtttggtggtgatgttttgtagtttaccaaaagaaaatgggagaagtagggagtcgtgggacacacagcaatagcgagcgaacgtacgttcatatgctggccctgtgtgtagtttgtgttgttattagtgtgagagcatgaatcagtatgatgaatttatgattcgttctattttgtgtttaagttttcggtcagagattcagacgcagcagtaaaaagttgtagtaact

SEQ ID NO: 159165 - DNA, 450 bp, Arabidopsis thaliana landsberg
atgaccgctcattcaatcgtcgcacacgttgatagcgtccttcccaagaaatctcgtgagatcgaccgtcgccgccgcagacggaagcggaagaagaagaacaaagcatctcaggccgatgtagatgcaatggacgtgtcaaaatctctgtttctcactcctactggtattgagacaccggatgcaattgaacttcgtaaggaacagagaaaggaacctgatagggctctataccaggtacttgaagaaaagggagagagtgttgttgctcctggaacattgctgagaactacacacacatacgttattaagactggtactcaggacaagacgggaaccaaaagggttgatttgctgagagggcaaaagccagatagagtggatttcagtttacagccagaagagctggatgctatgggacatgtttacagtatgaggaggcaagagaag

SEQ ID NO: 159166 - DNA, 1737 bp, Arabidopsis thaliana landsberg
  unsure (1)..(1737): unsure at all n locations
acttggagagagaaatggcgacggcatcggaaaattcaannnnnnnnnnnnnnnnnnnnnnnnnnnnnnnnnctgtcgtcgccgatcagatttcacaagccgtaaattccactgctaaccttcttcatctgatgcgtcaatcgtcttcttctcaggtatatcttcttcaaacccttttaacgcgtgctcatttagtcaccgttggattaaataggatctaggttgaataattagggtttggtttgattctgatgatagaaaatgtggatttggtgaattgtttcaaacataggtgcaacagtttcgtagttgtcctatttcattggaaactagttatctcctcctgtttcatgtaataagaccacaatgaaacacaatgtgaggttattaggatgagctttagatgttttttttttaatctctaattatgagtattcgctgtgtgtaggctcagttggcaaagctcccgaagaatctgttggcgaaagcttcactgactaaggccactggacaggtatgtatgttatggtgtagaatgtatgatgacataagtaagtactgtgtgtcttaagcatttttttttacattttgttaaggcgttggcgcagcttcctcaagtgatttcatctctagatgctcatatagaaagcggattgcacaggtttgatcttctttgacatgcactcatcatcaaatcttgtatcacttagagttgaattctaatagatagctttaagaacaatgaatgagaaatgtgataagagaatactactccctttgatgatgaagaatgtttgtagctgttgtgctctctaaccctaagtttcgttttctcgatacagcggtgttcatctaaacacagtaacccagttacttgaaaacataaaaagcacacagcttcgtgctcttcgacaatctaatatttcccctgtggtgtaaactctgatctcttattagcaattagatgtttctttcttctgttacatttttctagcaagcaattgagattatcataattgatttttgtccataggacaattgatctccagctcatttgaaaatttcagacaaatgacaagtagtgatctccaaagatagacacatacggcgttcatcttcttccaaggaacacgcttccctaatctcctccaccaaagagtcgtttccacaacagagagaaatatatggttgtgacttagtttttgatttccgtctgcgtacccattgtgcggaatctgattccataatagctctggttggttgctagctagatatctccgctggtcacttttgggatcagatttagttggcttgattcttcatgatgactgcatattcacgattaagaatgaatatgtgaatcttttctgcaattattgaaatagaaaggtttttcttttgtgttcaacttttgggaactcgtctttgagctatgtgaatctccactcttattcggccatgttttctttgctgtcataaaatttaacaatgtcataaccaccagtttagcaggcttattttgatgtggttttggttgaaaacacgatttatgggttattattttatttctagttgactttcaacatcaagagaatccataacaattacaaaaaaaaatacattaacttggttctaagaggcttgatcgtttggcagcgactgtcaaacgaacaacagaacaagtcgctgatcgcagttgatggtcgctggtcgcagtcgctagtcactggcgactag

SEQ ID NO: 159167 - DNA, 763 bp, Arabidopsis thaliana landsberg
atgctcgagttttactattcttatgacccttatgttgtctcctacaaaaacgagagaaagacgatgaaaagacttgaaatccaaggaacccaagcctttaaggttagtggatttcacatctttctaaaccatgtagagaacgtcaagcttattcacgcatagctggtttgccacattggctcttaagttcaatctcatagacaagtatttatgcaaatccgtctttattctgtctttatattctttggaattcggccacaatcacaagtttttattttgacatttaagagaaacaaaatcttaaaaacgaaccctgcaaatagctaatgatcagtcacaaagtaacatgatctagaagctacaataaataaacttacaaattccctcatgaacgtacactacattctgctgctcattcacaaaactctctcttagatcgttcactttactcgtcagtcacacatccatctgaagccgattgcacgttcttgatgtactgtttttagaatatcataaaccattcattagaaactaatccatcagatgtcaaagagacatacattatatagatacaagtggattcgtatagtaccttatataggactccgcggttaaccttgtatgcaggagcagtccatttctttctacggtcattcatttcttcgggtgagacttgtgtgtctattctcttctttcctatgtcaatggtgattatgtctccgttcttgatcagaccgatcggaccaccctcctgcacagataa

SEQ ID NO: 159168 - DNA, 859 bp, Arabidopsis thaliana landsberg
atgggggttcggtttcaaagaaggcgagtgggtaaaactgattgcttttgattgaatcaatctcgctttgctatcgtagatcgaaagagcttggtcgctcgtgattttgctgatgagttatacacttttgatatgtttgttaccaggcttgagtaaaatattattaatcatgtatttgtaactagctgaggtcttaggaatgatgttcttgggtattgcttgataagttgaaattcattcgtgtgttcttgttatatagaagattatcgtccacttaatctttgtaggtatgttccctctttccttccaccaccactggcatccaagggtaaagaaccggagaagaaggtcagtagcatggattttgtcactgtaattctcttgttcattgggtttgttgtttgaagcacaattatttagttgtaagttcatttgtttcatctttctagagggaggaggagaggcctagggaaagagaaaagggaaagactcgaaatatagataatttcatggaggagttgaaacgtgaacaagaaatgagagaaagacgaaaccaggatcgtgaccgtcagggcgatagctcggttagttcatcatactcttgctccctctgcatcatactcttttgctctcttcatcggtgttctgctctcatattaactctggactccctgctttctatactaaacttattctgtattcagccatctagccgctttgatgagctacctgatgattttgatcccagtgggaggccacgatcgtttgacgatggtgacccacaaactacgaatctgtatgttgggaatctgtccccaaggtcgtttttcttttcttacttggatcatgtgttggtttc

SEQ ID NO: 159169 - DNA, 1106 bp, Arabidopsis thaliana landsberg
acaacaggaggaactcaaataagtagagcgaaagcatcgtgatgagttccatgggctgttagatgaacatattgcaacaggagagcttactgccaaaactatatggcgtgattatttaatgaaggttatataactcaattaaatattatgtcacccagaataactattccatttcaagtattgaactgttttaatagaaaatgaattctacatctcaggtcaaggatttaccagtatattcagcaattgcgtcaaactcctctggagctactccaaaagacttatttgaagatgctgttgaggatttgaaaaaaagggtactagattatattcaatagtccgtttactttccaaaatatcatgaaagtgactgtaatctgttacatgacgagaaaaaatgctttgctgtctctagactgattccttttaaaagacagtaattgttgtattaagtagttctggtagcattattttgctaggtttgtgaatagtggcgtcttctgtttccatttcctgtttatttttgcttgtttttttttatgtcccttaattcctaaataaccatctgtatatttgatgtgttttttttcacaggaccacgagctcaagtctcagataaaggatgtattgaaattgagaaaagtacgcaatttatattctgtaatatttctgtattttgtaggtgtttaataatttcaatttatttccaggtaaatttatccgctgggtcaacatttgatgagttcaaggtttctatttccgaggatattggttttcctcttattcctgacgttagactaaaggtctgtagatctttgtcttgactttcaaaaattcatttccagatgatgtttgaagatacaagtcttcttgcttcatgatgcataaactagtttaagcacagtaaaatcactgcagtgttagcatattctttattgaaccttgaatgtctcatttggatatgactgctaattatttgttttggtgatgcttctcagttagtctttgatgatttgctggaaagggcaaaggagaaggaagaaaaagaagccagaaaacagacacggcagactgaaaagttggtagatatgcttcgctccttcaag

SEQ ID NO: 159170 - DNA, 1112 bp, Arabidopsis thaliana landsberg
atgaaggagaaattcagtgctctggaaggtagagtatcaggtttggagtctggtggttatgagaacccgaatccagctcaggtcagctctttctctacctctctccctccattcgtaactatgatttgattgctagtgagataatctcgttactcttttagataaattaagctattcatatgatctaagttttacagaaagcttttttgtttggttggttacattgatattgttcattgatatttaatcaacttagaattcaagaatttctagagaggtcaagcaagcgtagtaatttcaccactgcctgtataagccacagaatgttgccaatttacttaacaagttttctaaagtttggttggacaaattgcttgagaatttcaataacaaaagcagtttcacaccttctgcttacatgaagttacattggtagtagtagctcatagtgttatgcatcttgaaacgattgtttgttagtgagatgatctcataactctggttgatcaatcaagctatccacgtgatctgaatgtcatagcaagctcttatgtttggtgggttacttctcattgttcattgatttcttcacaattgtttagtctacggagaattcaagaatttctagaggtgttatagtttgctggtactgcttctcatgaaagaacaattagtttcagacattgagatttcaccactgcctatataagccacaaaatgttgcccattaatcttgagttttctagagtttggttggacaaattgcttgagactttagagtctctctagtttggtgaatttcaataacaaaagcagtttcacaccttcttaagttacattactagtggtagctcatagtgttgtgtacctagaaacgattcattcacattttgatcaacttgttcaatcatatattaattccactctgttgtaggatgaaaggatttcataaaagaaagcatctcacaatagtttcatactctcacactatgtatcctttttcttactaggtcaacttcttgctcaccattgcttcttcttgtaggttgagagttgaagactcctgcaagtggtaccagcgcaaattaatcaaagacttggctgatgtgtga

SEQ ID NO: 159171 - DNA, 652 bp, Arabidopsis thaliana landsberg
  unsure (1)..(652): unsure at all n locations
gttcaaatagaatactaagaccnagaatctagtgtattattttaatttggcagctcacatgttgaaatgtattagcttgtgatattgtgcagaagtaaggcttgatgaagaaatggaagccatgggaaaggaaatggtcacacattgggaggactaccattagctgttaaagtgttgggaggcttgttagctaataaacatacagttcctgagtggaaaagagtttctgacaatattggatctcaaatagtaggaggatcgtgcttagatgacaacagtctcaattcggtttaccgaatattgtctctgagttatgaagatttgccaacgcatttaaagcatcgcttccttttcctagcccatttccccgaatattccaagatatctgcgtatgatttgttcaattactgggcagtagaagggatttacgatggatcaaccatccaagatagtggagaatactacctagaagagcttgtgaggagaaatttggttattgcagacaacaggtatttgagttcgcactctaaaaattgtcaaatgcacgacatgatgagagaagtatgtttatctaacgcgaaagaagagaacttcctacaaataatcaaagaccctacttccacctctaccatcaatgctcaatctcgtagta

SEQ ID NO: 159172 - DNA, 1783 bp, Arabidopsis thaliana landsberg
  unsure (1)..(1783): unsure at all n locations
tctaatcggaccctaaaccaatgaactcttctccagtcacaggtaccttgcgctacgtcgatgacggcaacatacggcgagannnnnnnnnnnnnnnnnnnnaacttcttcgacaagattcgtctctcggcgaggcgagatgcgaaggaagactaaggagacgaattaccgacggagctgaatacgatcaatagcgccggcggatttcttgtggtttctcctgataagctttccgtgaagtacacgaatacgaatctacatggtcacgatgttggtgttgttcaagctaataaacctgctccgatcaagtgtcttacttactactttgagatttttgttaaagattctggtattaaaggacaaattgctattggttttactaaggaaagcttcaaaatgcgtagacaacctgggtattgttttctttatctttggattttggatccaatctttgttgatcattgtgtgttgaagttgtttagggaagaatctgaatttgaaggatttagttcaagaagtatagttttagcttgtagcttgatcattgttgtgtttaaggtatggtttattttagaaattgaggtttgtggtatggttttgggatccaagttgtggtttagttattatagagatttagcttcttggattaggttgtgtgtgttctttctggtgagttcagttgtgtagaagtggtttagggaagaatctgaaattcgaaggacattgctttgtggtttatttgaaagctaggttcttgagtttacaaatatggatgatagtgcctttgaaagaagctttatctgcctaatacttgaatttgaggttatagttttcttttgtaatggtagatgggaagtgaacagctgtggatatcatggggatgatggatacctatatcgtggacagggaaaaggtgaaccttttggtccaaagtttacaaaagatgatgcagttggcggtggtataaactacgcttctcaggagttctttttcacgtaagaaagaaactgtttcatgttttttggtacttaaataagttcattactactgtgagttgaattcatgattcattcattttcctgttactctttgtctgttaaagctgatgacatttttgattatttttgttggtgccagtaaaaacggaactattgttgggaaaatccccaaggacataagaggtcatctattccctactgtagctgtacatagccaaaatgaggagtatgttctcactctctctttaaagatcaataccattgccatcatgtatctcactctctcttacacaaagcatatttttctgaaattttggcagggtattagtcaattttgggaagaagaaatttgctttcgatattaaggtaagaggaaaaatcctttcaaacgtggttaattaggtctcatagctttatactaaagtaaggatggtgtaaccaggactactgctattgaaatcacataataggtatgcctcatgtccgttcttggtactggggttaccgaatctatagcagtggttctctttgtagacattgctctcacatttgctattttactgttcctgtgtaatcaaacctcaaactcttgggcactcaagttataatctttaaacactgaagtagggcataaaaattctttccattacatatatgtttgaaattaagtaattgacgagggctgtttccctctttctgtattattagggatatgaagcatcagagaggaataagcaacaattggctattgaaaaaatatccatacctccaaacattggttatgg

SEQ ID NO: 159173 - DNA, 975 bp, Arabidopsis thaliana landsberg
gtcaaggagcatttgaaaaaactatggatagctgccttccgtgcaatggatgacattaaagaaactgtgagaaatgctggtgataagttatgtcgggccgtaacatccttaacaataaggatctgtgatgtcacgcttaccgaactagcagatgcaaaacaagcgatggatattgttcttccttttttgctttcagaaggaataatgagtaaagtcaacagtgtacgtaaggcttcaattggagttgttatgaagcttgcaaaggttagccctaactttggtagattgatgatctaagagagttatgctcatatatgaccaatttgtctcctggtagtatattcccatatcatgcctgtttctcagagattattcttgtgacattggtagtggtacattttaattttatttcaatacagttgagtaatcagtaaacctagattgcagaacttaaccttgtgttggtgtgttctttcagttttactccaaacatgaaataattaatcagtttgaattacttgctagttttggtgaactgaatgtcctcctcggaaatatttatgatcctttaagtgattttgtgctattcgttaccgtttgcagggtgcaggagttgccctccgtccacatttgtccgacttagtttgttgtatgttggaaagtttgtctagtcttgaagaccaaggacttaactatgttgaggtatcgtttactgtcagcaacttcagtttcaatcttcaccttgtcctgaaatcgtattaaatataaattattttatttcagttgcatgctgccaatattggcatagaaaccgagaaacttgaaaatttacgaatttcaatctcgaaaggctctccaatgtgggaaacacttgatctgtgtattaatatagtggatattgaatcacttgaacaattgatccctcgtctcactcaacttgttcggggtggtgttggcctcaatacgaggtcagtt

SEQ ID NO: 159174 - DNA, 458 bp, Arabidopsis thaliana landsberg
atttatttaccccatttgatcaaggagatgaagatccactaataatctcattatcatcattaggggtgtcaaaatgggtcaaaattcatgggtcaactcaactcaactcaacccatgaaccctaatgagttattttttttgactcaaatgagttgatgggtcaaatgagttattgggtcaattggtttgatgagtcaaatgagttgggttgtaatggtttacccaattaacctatcaagttttgtaaaattgaaaaaccaactaaaatctctaaaccaatgtcaatttaaacttaaccaacacatctaaaccaatttaataaaatcaatatttttccaaaatttttaaatgtacaagcgatgaaattgagaaaaagtaaactcgtaattttccaccaaaaaacataaacccgtgattttcccgccaaaaacgtaaaccggtgattttcccgccaaaaa

SEQ ID NO: 159175 - DNA, 1585 bp, Arabidopsis thaliana landsberg
atgccgtgcaagaagcaaaaaacagaaagttcagatgacgaaatttgtgagaaggaagtgcaacctgaaatgcgagcaactggtttcgccacgatcaatgcagataatctaaagcttgtttatctacgtaagagcttagtcttagagttgttgaagcagaatgatagctttgtggacaaagtggtgggaagctttgtgaaagtgaagaatggccctagggactttatggcgtaccagatcttgcaggttacaggtaaccaagacttgcatgtcatgacctgaatttctctgatccatgtcatgatcactgcatcagaatcactgtcacacctgatatttttccttttctgttaggcattaaaaatgctgatgatcagagtgagggcgtgcttcttcatgtttctggtatggcaagtggtgttagcatttccaagctggatgattctgacataagagaggtgaatcatgtctgaattgaattcatattttaccattatatttccttgattttgggataaaaatatgacaaatctgctgcaaatgctgataaagtatatttataatattcctcctatgtgacttgttcttattcatgatcttatatttggctggtcaaaaacttcgtagaagctaaaacctcctcttgtacacattcattttcaggaagagattaaagatttgaagcaaaaagtgatgaatggtcttctgagacagacaactgttgtaagttgtgtatatcacaagatttggttctctgtttattcattaacatgacgaatcctctggtaagacagagaggtagttaaatcatttggcatttgcattctcatactcaaatcatgtaccgttctttcaggcgcttaaactcaccaatggttttttaaatctgacaggtggagatggagcagaaggctaaggctctccattatgatataacaaaacatgtaagtatctctgaaaacacatacgctaaatacgacagtctgttttgtaactgcatctcacactttgttcttgtgtaaatatcttgaaaaaaaccagtggattgcaaggcagcttaacattctgcagaagcgcatcaactgtgctaatgagaaaggatggagaagagaatatcctttgagattcaacaaaaagcacacacattttcacatggtgatttgacatggttacatttgaaacaccttaactctatccatttgtttacattagaggagtatctagagcagagagaacttctggagaaaccttcagagcaggagaggttactaaaagaaattccaaggatcattgaagacttcatcgagattaaacaagaaccatgtgtcggcggtttgtcacatgaggcggttataaatatctgattaaccaaagagcatcttcaaaaggaagaaggttgatgttgttgttttttgggctggaatattacgacttaagaaactcggctaaatatttctaagcttttgcggaaacaggaagctaactctttttgtaagatggtcatgtatgtagtagcatcaaagtgacatggtatgttttatgttcatgtatgtatatatatgcctaatgctataacttttgaaaa

SEQ ID NO: 159176 - DNA, 1841 bp, Arabidopsis thaliana landsberg
  unsure (1)..(1841): unsure at all n locations
ttgttcttcattttcttttgcaataagtcgttgttatgaagtgagtaatccactggttttgactatagaaatcaaattgctacagaatatgccggtggtttctctggctaaggttgttacttctccggcggtggccggagatttagcggttcgtgttccgttcatttattggaaacgactagtgtcgaatcgtgtttctttcgggaaattgaggcgccggagttgtataggtcaatgcgtaagaagcgaattgcaaagtcctcgtgtcttaggttccgtcacaggtttgaaatgtagacgttgattttgcttgttatctgggaaaaattggtgattattgtgctaatggtgatttgcatttgaatagatttagcgttggataattctgtggagaatggtcatcttcccaaaggagattcatgggctgtacacaaatttggaggaacttgtgtgggaaattctgagaggataaaggatgttgctgatgttgttgttaaggatgactctgagaggaagttggtggttgtgtcagcaatgtctaaagtcactgatatgatgtatgatctcattcacagagcatagtctcgtgatgattcatatctgtctgctttgagcggtgttcttgaaaagcaccgagcaactgctgttgacttgcttgatggagatgaactctcaagtttcttggctcggttaaatgatgatataaacaatctcaaagcaatgcttcgtgccatttacataggtactgttttctgttttctctttgtcaatgctaattttatattgttaggaggaggtattaagtagttgacttggattggtatgtgttcttctgaaatcttattcctcctgttataaactcttctatttctgcagctggtcatgcaaccgaatctttctcagacttcgttgtgggtcatggagagttgtggtctgctcagatgttagctgctgttgtgagaaaggtattaaagttatttatgatgtgccgcaagaaaatcctaattccaaagaactagtcgttctgtgttttacctttcttatatgcttgtgtcttttttactaatagagcggattggactgcacttggatggatgcaagggatgtgcttgttgttattccaacgagctctaatcaagtcgaccctgactttgtggaatcagaaaaaagactggaaaaatggtttactcagaactncgcaaagattattatagcaactggtttcatagccagtacaccacagaacattccaacgactcttaaaagggaggggagtgacgggtctgtagctattattagtgctctgtttacatctcaccaactcacaatttggacagatgttgacggtgtgtacagagcacatccaaggaaaggtatgcgcaagcctacattaactgtcatatatgctaggactagttattgagccatgatatgtgtgtgttcctcatcatgtttttctatgttatgctaatgaatttgttgcgatgcagttagtgaagctgttgtgctgaagactctttcttatcaagaggcttgggaaatggtaaatttccaacctcttgcacttgtttaatgcctagtttttcaaaatcgttgtttacacctaacattcatgttcatatgcctgcgcagtcttactttggggcaaacgttttacatcctcggaccattattccagtgatgaaatatgacattccaattgtaataaggaatattttcaacctctctgcccctggaacaatgatatgccggcagattgaagatgaagatggatataaattagatgctcctgtgaaagggtttgcgacgattgacaatctggctcttgtcaatgtagaagg

SEQ ID NO: 159177 - DNA, 1336 bp, Arabidopsis thaliana landsberg
atgtggtcaccgcgtaccaagcgcatcttgatatttgttttaaaagattttcgtcgcttcttcttaaggtatatattgaacgttaaagttaaacttaggatgctagtcgagatgaccataatgaaatctctagacttatttaatccagttgaaaactcatcacataatagttgtcgtatgacattttcgaaacattgttcctttgggtttagtgttgatgtagcagctagaggtgtgccattactctttgaatgcctacggaacactcatacgatgttatatggtctgtggtcacacagagtagatggaaactatcttatgtgtgatgtgccgtcttaatctattaaagggcctttggtaaaaccaaaataaattaacctttttactaaaaaactttttttttctaaaatttgggatcattttctttactaatatttttttagaatgactttgcacccttggcaaatatctatgttgtctaaaggtagagacggataaatggacacgaggaccggaaaagatggcttaatctttcggaagtttagagcaacatcttaacatatgttttggtttcatgtcaacgtatcaaacatagataggttgtaaaaaagcgttacgagaataagtattttctgaataaccgtaacgcctttttatatatctttaagaataaaaaagtcattacctgcaaaataagaagggaatttattggcagagaatccactaaaaattacaataaataatgatgaacatttgtctcattttagtcaaaaaaatatgaatctcgtgagcctttcgtttattaacctacccataatagtttttcttgtttatatatatatatggttaatggttttcagagaatgaatactcagtcactcataactagcagaagttttttctctacagattcatcgtttgaggagttctgtgagtttatcaaggtaggtatggtttcttaaatcttcgactaaagtttcaattcttttcaatttaggttttatgttaaacaaacgaggttttattttttaaacaacatatcacaaattcacaatagttgtttaacttttttgttttttgtttttttctttgactataacacatgaaaaggtcctatatgtatcctcgtcgtcgtacgaggatttttctccaccagcgaagtgatctgctgagagcagaaggcagagctaggattcatgctatgccctctccatcgatttgcagatcttgtgaggagcccatcatttcaaccgaagagagggagctatggttggagaatgctcgtcttcggacagtcattgacacttttactcgcccgactgcagaccctttttag

SEQ ID NO: 159178 - DNA, 817 bp, Arabidopsis thaliana landsberg
gtcatacccattttcccctgttcttgttctgttttctactagttgtgtctgaaagtaaagtcctctgtttttgctctgtttatgtcgtctctgaactcctacaatggcgtttaatcacagaaagatgcttctttcatgtctacagtttaaagatttacgcttttgtttccggcaataccctcccccgccaccaccaccaccgccaccgagggagctctctctcctactccccacctcgatctgcgtcgtcggctcaatcatactctttctatttctagtcttcttcctctacctgcacatcacgcaacaacggcggatttcagccgccagcgtaactcccggtgacacaaaccaacaggaagatgaggacgaaacagaggagagagatttctccgactttcatcacgtttggaaatcccaaccgtcggtctccaccgttccgcgatcaactcgatcacagtcgttggattcaaaaagggagaagggataatcgacggcacagaatgctctgtctgcttaaacgagtttgaagaagacgagtcgctgagactgttaccaaagtgtagccatgcctttcatctaaattgcatcgacacttggttgctctctcacaagaactgtcctttatgtcgtgcccctgtacttcttatcactgaaccacctcatcaagaaacagagacgaatcatcaaccagattctgaatcgagcaatgacctccgtggaagacaagacagttccagatctagaagaaaccataacatttttcttccaagggcacaaagtgatttggcaaactactgtggctcaggaagagtag

SEQ ID NO: 159179 - DNA, 1666 bp, Arabidopsis thaliana landsberg
tctctcatttaaccaccagaacgtactagccttaccggcagcagcaagggagccgcctgtggatgtcaagattaacgatatcgctgggaattcgattgccgggatattgtacaaatgggtgaactatgggaaaggatggagaccaagatggtttgttttgcaagatggagtgctttcatattataaaatcaagggacctgataagatcgttgttatccatgagactgagaaaggatcaagagtgatcggagaggagtccacacgtatgatctctaggaataagcgtcacgccgccactaacaacaccaaccaccagctccgccgcaagccattcggcgaagttcatctcaaggtttgatcaactttctctattggttttgtcagtgaaaaaaaattatttacttttttggaacagattttgtgcttagtttcctccaaagtgccatttttttttatgtttccgcttaccactctttcttacggttttgcactattaatattttgtaactacttatcgcgccgatattttttactggtaaaaactcttaccgcttttaagacactatatattatatgattggacattaaatttagttttgatgattgaatgatataaatagtacagtactcaatattccatttgatcatcatctactcgatcggtggtatatataatagggttcatcgattcgggagagtagatcagatgataagaggttttccatttttactggtaccaagaggcttcacctacgtgcggagacgcgagaggacagagaagcttggatagaggctttacaagctgtcaaagatatgtttccaagaatgtcaaactgcgagttgatggcaccgaccaacaacttagacatctcgatagagaagcttaggctgcgattggttgaggaaggagtgagtgagtcagccattcaagactgcgaacaaatcacgaggtctgagttctcggcaattcagagccagcttttgcttcttaaacaaaagcaatggcttctcattgatacactcagacaattagaggtacttaaaaccttccgaacatcccctatgtatgtctaaactcttctaataaattgatgtatctatgtcattgtctagacagagaaagtagatttggaaaacacggttgtagatgagactcaacgacaagctggcaacggagactcaggtaacttgatacacaagaaaccttttctgtactacaacatttttatatcttgagctgatgatttcttttatctcagaagaaacaattagtgaatctgatgatgataatgaacaatttgatgaggctgaggaggaaatggatacatgtgactctctttcttcaagttcattcaaaagtattggatccgtttttcgcacatcatcattctcttcagatgatgatggacttactaatggttttgagtcagagaatgatgatgttgatccttctatcaagactattggatttaactatccacatgtcaaaagacgaaagaagttacctgatccggttgaaaaagagaaaagtgttagcctttggtcaatgatcaaagacaacattggcaaggatctcacaaaagtttgtcttcctgtctacttcaatgagcctttatcttctctacaaaaatgctttcacaaatttggagcattcatatcttcttga

SEQ ID NO: 159180 - DNA, 951 bp, Arabidopsis thaliana landsberg
aaaatttcaaccgggattgttcctccaccatcggcttcatcatctccgtcgagctatggagaccttcaaccaatcgaagagcttccaccgaagctacaagagatcgtcaagcttttccaatcggtacaagagccaaaggctaaatacgagcagcttatgttctacgggaagaatctgacacctctcgattctcaattcaagacgagggagaataaagtagaaggatgtgtttctcaggtttgggttagggctttctttgatgaggaacgtaatgttgtgtatgaagctgattctgattcggttctcactaaagggttagctgctctattagtcaagggtttatctggaagacctgtccctgagattttgaggataacacctgatttcgctgttcttctcgggttgcagcagagtctgtctccttctagaaacaatggattacttaatatgcttaagctgatgcagaaaaaggctcttcatttggaagtcaaaggtgaggaagattcaagttctggagagagttcagaatccagctttgagtctattcctgagactaaggacgaagctaatgttccggaggtggatttggagtctaaacctgatctagttgaggatttgggaacagaaaagattgatgattctgagagtgggtcaaatgttgttgctttagggagtagagggatgaggataagagagaaattggagaaggagctagatcctgttgagttagaagttgaagatgtttcttaccagcacgcaggacatgccgctgttagaggtagtgctggtgatgatggggaaacacatttcaacttgcgaatcgtttcggatgctttccaaggtaaaagcttggtcaagagacataggctgatatatgacttgttgcaagatgagttgaagagcgggttacatgctctctctattgtggcaaagactcctgctgaggtttga

SEQ ID NO: 159181 - DNA, 378 bp, Arabidopsis thaliana landsberg
gagaacagagagaatatgataacttcaggagaaaagttgagatagctcgagggaagagagcaatgacagagaggtatgagctgatagatgaggatctagaagaagagtatatgcctgagcatactcgcatagccaccaaacttctgcacaaacctgatatattgcctgctgaggagtatatcaagctcttcaagctgaatgagttctgtagcacaaggtatccgtgctcgaccacactggcacaacatggattactggaggatgttcaacacttgtaccagagttgtcaccaggacactctgatggcttacctatatgtaccctatgaagaagaaacgattcagttcctctccacactgcaagtggagctttaccaag

SEQ ID NO: 159182 - DNA, 2634 bp, Arabidopsis thaliana landsberg
atgagcgctggctatgatgggaaaacaatcatctgggatgtgagtttactttttggataggaatagtccttaatcttatcaatagcgatacttacctccttagatttttttttctagatatgggagggtataccaatcaaagtgtacgaaatcgggagatttaagttggttgatggaaagttttcacagtaagtacccaatgaaatgtccacgacaagatcttctatattttttttgtgtgtttgcaaatgactccagttaaacatgcaattgactattgagtctgaaactagaagaaacagtcatgttaagcatatccaattgggtgtacaatattcatatttctttcagtaaagacatctgcttctgaagcatttatttagtcacatgaaagtcttggaatcaattttttaagatactatttccctggcactgtgtagagatgggacatctattgtgctttcagatgatgttggccagatatattttctaaacacaggacaaggagagtctcaaaagaatgcaaaatacgaccaggtatggtagattttacatctcagatgcatgatcattttctagtatatggctgaagtctctattactttctgaccctttgtcttgctttgtattgattagttcttccttggtgattatcgtcctcttattcgagataccaatggacatgttcttgatcaggtttgtttcaaatacttgtttcttctgttttctttctaatttctgctgcgttcttgttaatagacctcaccgaactgtgcatactttttatatccttgcacctgcggtatttttgaataataagctttataattttcatggtgcaggagacgcagctacttcctcatcggaggaaccttcaggatcttctttgtgattcaagtttgtttccaaaagctcatctttatttcagttatacaagatgttgtttattcaggaaacatattcctggtgttttattttgatttttcaggtatgattccgtatccagaacctgaccagacaatgtttcagcaacgcagacttggtgcattaggagttgaatggcgtccttcctcgataaagttttctgttggccctgattttagtttaggtcaagattatataatgcctcctttggctgatctggatagactgattgagccattgcctgagtttatagatgctatgtactgggaaccagaacacgaagttctgagtgacgacaatgattcagagtataatgctgaagtttcctctgatggggctagggcaagcccatgttccaactcttcaaatgaacttgagtgcagctccgaggacagtgacgttgaaaatattcacgaaagtagctatcattggaaaagaagaagaaaacatcctaaggtatgttttgctcaactcatgcgattttgtttgtcagtatctattaactaactcccgttttctcaggtcaacgtctctacttcatctggaagacgtgataagaggattttggatgagaatgatagctcgaattctggaattaagagaaccaagaaccgaagaattgtcgtgaaggcttcaaaaagaaaacattctgatgtcaaagcatcacggccgcagagagcagcagctcaaaatgctcgatccttgctttctaaaatttctggaagctcttcggatgaagttgatgatgataatgattcatccaacagtgaatctgatagaagcatacccactttgcgacagttggacaaaccatctcagatgctggaatctctttcaaatgacaaacagaagaaaagattgattgtaaagatctctgttaagaagccagcagagtctatgggaagcaagggagatgtgataaatcaggctgatttagagcaactatcttccaaacctttggaggagaatcacagagtgattggtatatattccagagaacccgggtcaagttctgtagatgcaaaaggtgattcagggtgtcagagtattccctactctatgaatacgccacagagagaaaaggccgataatcagttgataagatcttcagatcaagaccagaatatgtgcaagtggagggaagagattcctgtttgtgaacctaccgaattaactgcgcctgagaacatagaagaagcccaaccattttatgggtagggaaatcagactataatgggaacgttatgtttgtattatatttccgcaatatctaattcatcgtattctcttgcagggatgaagctgatgagattcttccaaagaaagttcgacgactgaggttaaagcttcggcatcccaacagtcctcgaaaactagaacctgatgaggtggcagatgatttggcagatggtgcagatgggtttgcatccatagctccctctttcatgaatccgattatgcattctgaacctgtgatagatagcgttagagattcttctgcacataactttgagtttggagaagctacagctgatgtgatacgtagaaaaagatccataacaagtgaatctagtacaagaaatagcgcattacgcataaggttgggctctggatctgtagacaaaataaagaaacaagggattcattccacaagcgtgtatgatgatgcatcacttgaagaacggccttctacctcaaaagctgggtccc

SEQ ID NO: 159183 - DNA, 348 bp, Arabidopsis thaliana landsberg
gattccaatggagaagatcttgaaggttatgtaggtgcaggcctgtatgcaggtaatggggtaaagaattccaatttatgaggattgcaaagaagaggcttatcgtcattgtattgatctcatcatcttaacaacattggagcaaccatgaaatttttctttccgttttcttgcagtgtaccaatggacgaggaagagcaagtcgtgctcgattacacaacagatcctttgatcgttgagttgagcttctagaaaaaggttctttcagacattgaacgagctggagatgccattgagaaactctatggaactgcctaggacattgaaggtgtgatcagagacgggaag

SEQ ID NO: 159184 - DNA, 481 bp, Arabidopsis thaliana landsberg
  unsure (1)..(481): unsure at all n locations
attcgatactccgagcagcctggaactaaagtttgtgcagcatttttggctaccaataacacagaagctgcagaaaaaatcaaattcagaggcaaggaatatcttatcccgcaccgctccatcagtattctccctgactgcaaaaccgttgtttataacaccggggaggtgataataaatacaaaatcttctagcaaatctttcattttcctcgaagaagaaaaatgaatcttgattgttttttttttgtttggtttactattttggtcagatcatctctcatcatacttcaagaaacttcatgaaatcgaaaaaagcgaataagaattttgatttcaaagtgttcaccgagtcagtgccaagtaagatcaagggtgactcttttatacccgtnnnnnnnnnnnnnnnnnccaaagatgagtctgataacggatggaacacaacaaggtaagtaaggatataattggactatcttatgtat

SEQ ID NO: 159185 - DNA, 2654 bp, Arabidopsis thaliana landsberg
atgtcttctctgatctctttcatcttccttttccttttctcatccatcacagcttctgctcaaaatactttctacctatatcataattgttcagtcacgacgactttctcaagtaacagcacttactccaccaatctcaaaacccttttgtcctctctctcttcccttaacgcttcttcttactccaccggattccaaaccgccacggcgggacaggcccccgacagggtcaccggacttttcctctgccgcgtcgacgtctcgtcggaagtttgccgtagctgcgtcacctttgccgtaaacgaaacgttgactcggtgtccaaaagataaagaaggcgtgttctattacgagcagtgtctgctcagatactctaacaggaatatagtagccactctaaacaccgatggaggaatgttcatgcagagcgctaggaatcctctatcagtcaaacaagatcagttcagagatttggtcttgacccccatgaacttagccgccgttgaagcccgcaggagtttcaaaaaatgggctgtgagaaaaattgatttaaatgcatcccagagtttgtacggaatggttcggtgcactcctgatcttagggaacaagactgcttggactgtctgaaaataggcatcaatcaagtaacctatgacaaaattgggggaaggattcttctgccgagctgtgcttcaagatacgataattacgcgttttacaacgaatctaatgttggaacacctcaagattcatcaccacgtcctggtatgaacagtccctttcctttgactacatatttcaacacaagtttcatacaagaattttgcttaaaaaattcttgctgttgttgatacaggaaaaggtggaaactcctctgtcataattattgcagttgttgttccaatcactgtactttttcttctattagtagctgtttttagtgtcatggctaaaaataatatgacgctcaatgagaaggcaccattagctgtatgtaagcacaccaaagataaacatatctcctcataaaatgaatagtctgttgtgctcttacttaattcagctgttgaagttttcttttccagatgggaatgatattacgactgcaggatcacttcagtttgattataaggcaattgaggcagcaacgaattgctttttgccaattaacaagctaggtcaaggtggtttcggcgaagtttacaaggtattattaccattgaacagagcaatgtactctgtttttcccctgtttccaaatcaaatctcacacacattacttcgaaagttgagatctatgggatgagtgcagcaaccttgtatttgcaaaggttgttggggaacaaaacaaactctagtcgtgaattatcatcctatatttgtaacaaatactaacttcaacttatataattgcattttgagtacttcattttcatgattaatcttaccgacaattcctatatacctatggttatcttaaaataaattactcgtgtagggtacacttcctaatggactacaagttgccgtgaagagactatcgaaaacatcaggacaaggtgagaaagagttcaagaacgaagttgttgttgtggctaagcttcagcacagaaatctggtcaagcttcttggattttgtttggagagagaagagaaaatacttgtctacgagtttgtgtctaataaaagccttgattacttcttgtttggtaagatttagcttaggaaagatatttccttttggaactcatgttttaggtattctaactatatgaatgtgtgcagattttagaatgcagagccagctgtattggactacacggtacaagatcattggaggaattgctagaggaattctttatcttcatcaagattcacgactcacaatcatacatcgtgacctcaaagcgggcaacatcctcttggacgctgatatgaaccccaaagttgcagattttggaatggcgaggatttttgggatggaccaaacagaagccaatacgagaagagttgtgggaacctagtaagtttttctcttaaaatgtattgcctctctatagactgtattatgcttctatggactcaacatttttagtattgtggcagtggttacatggctcccgagtatgctatgtacggcaagttctccatgaaatcatatgtgtatagttttggggtcttggttcttgagattgtaagcggcatgaagaacagtagtctcgatcaaatggatggtagcattagcaacttggttacatatgtgagtatataaagctttaaaacttctaatgtttttttgctttattcaaacaatgaccaaagcctaagttattaaaatgttgaacagacttggagactatggagcaatgggtcgccatcagagcttgtggatccgtcatttggagataattatcaaacaagcgaaattactaggtgcatccatatcgctttactatgtgttcaagaagatgctaatgatcgtccaactatgtctgcaatcgtccaaatgctcactactagctcgatcgctctcgccgtgcctagaccacctggattcttcttacgaagcaagcaactgaaactggtatttaaaggatcagagtctgatcagtatacaagcaagtcttcctcatttagttcgtaaaaaatgatg

SEQ ID NO: 159186 - DNA, 1280 bp, Arabidopsis thaliana landsberg
atgacacaacattggcctgatttctcttcccaaaagctctctcctttctctaccccaaccgcaaccgctgtcgccaccgctacaaccgccgtacaaaacccctcatgggtcgacgaattcctcgacttctcagcgtctcgccgtggcaaccaccgtcgttccatcagcgactctatcgcattcctcgaagctccaacagtcagcatcgaagaccaccaattcgacaggttcgatgacgaacagttcatgtcgatgttcaccgacgacgacaaccttcatagcaatccttcccatatcaacaacaaaaataacaatgtggggcccacgggatcttcatcgaacacatccacgccgtccaatagcttcaacgacgataacaaagaattaccaccgtccgatcataacatgaacaataatatcaacaacaactataacgatgaagtccaaagccaatgcaagatggagccagaagatggtacggcgtcgaataacaattccggtgatagctccggcaaccggattctcgatcccaaaagggttaagaggtaacaaaattattcaagaacatgcatgcacgtaaaaatatcaactcatcagatttgattacgatgcaccaaatattttgaaaaatatgattactgaagattagcgtcacatcactaaccatataatgttttttaaattgttaacaaaaataaagtaaatatttctgaatgtttctacagaatattagcaaatcggcaatcagcacagagatcaagggtgaggaaactgcaatacatatcagagctcgaacgtagcgtcacttcgttgcaggtacattatacaaacattcataaatcataatcttttaattattcaaataatttcatgattataaatttattatgaccttaaatcatttttgtggcaaaaaaactgaaattaaaggcggaagtgtcagtgttatcgccaagagttgcattcttggatcatcaacgtttgcttcttaacgttgacaacagcgctctcaagcaacgaatcgctgctttatctcaagacaagcttttcaaagacggtattaatgtcatgtaacttttggatttaattctcatgtaaattttttggataattatggaattaatatatgtgtgtttatgagatttttcattttctcgtcgatgcattcaattatcactgacaatatatgagcacgcccaataatcttctctcactagctaatataacatcaaaaaactaattttattctgcagcacatcaagaagcattgaagagagaaa

SEQ ID NO: 159187 - DNA, 1571 bp, Arabidopsis thaliana landsberg
  unsure (1)..(1571): unsure at all n locations
cttcttggcgagttcgcgaccttggtcggaaaatcaacaatcgcttctctgcaatcgcattatcggctctaatggcagacccagaggtacaattaccttaaaccccctcaatctcctcctctcacgagttcatttttttcgatttcggatttttcttcgtttagtttcgttctgtttcttctagaccttgtttctcttatcggacagaatcttgttgctgatttcgctaattttgtttaaattttgggtttcacgatgtgggttttgtcttgcttttcttttcggggtttgcgatgattttttgttcgttttgttttgggttaacacagaccttagcggcgttgaagagagcctacgccgatacgatactgaacacgacgaaggaagcggcggcacgtgtgatggnnnnnnnnnnnnnnnnnnnnnnnnnnnnnnnnnnnnnnnngacggttagaaatgaagcacttcatacgttggttaggcttaaacagatgcttgattccaaggtactatcactttgttcttattttcatttgtttatgggttcttggtttgttttatttggtttctgcctgattatgtttttggggtcttagaggcatttcttttttcttgcttcatatgaagatggcttttgaaattaagtttttcagccttgctttcatggttttaagcattgttaatgttgtgtgtgtgtgtgtgactctgagttttgtttattcagtctttgacatttgaagtgactaaaatcttccatcattcaaatgatatgcttcgagactatcatttttgctatgttttttcactacattcacttcattgaacgttgatacaagccattgtttttgacactcttgagactattacattgatactttgcagatatagcttttctcttcctccattgatatttgttcatgaaacctaaggcctaaaactaatgagcgtaaccaagtgtagcttagtgtcagcaagttctagattcgttgtaccattgttggcagtgaggcttacacatatttcatggcttatgctctcaattctcatttcatcgtgaaatttttaagttaaaggtttttcagtgtgggggatatagctttttcatcttagagactgtatcacgtttgcttgaggatgagctttccctaatggagtatatctttcttttgtggctggctttgcgtttcctcctcaactctaatttttaaataaccgatttgtgtttataggttaaggagacagagatgcaatccttgaagcagcaacagaaggttgaggaacttgaagctcagcttggagaagctgaagatattgtaggagagctgaggttggagttgagagtacttcacgatgagctcaagaaacttacggatggtcagaaacatcttaaaaagaatcatgaggaaaacctctgttggaataaccgtgatgctgcagtttctgtaatgcctgaggtttcttgcagtcacgagaacacagaagctgtaggtttttgcatcccagtggaacaaaatggatcagtggtggctaatgggagaaaagtaccgtctttgactcgcaaaatagtataa

SEQ ID NO: 159188 - DNA, 1979 bp, Arabidopsis thaliana landsberg
atgaaccggtcggtcgtttctatatttgattcgttcggtttatcctttaaccggtcgaaccgaagcttcttttgttcgtatgaagaaaactaaaacccaaatctctctctggtacaccatgagaggagctctgttcagaaatgcatctctctgcgttcgcagaatcattctttctcctaggatctcccccaatgttccctttctcactccaatcgccgctccggctcctcccaaattcagatttttcagttccgaatccggtgagaactcgactactgccactgagtcttcgccgactgattcatccgataagaaggatctcgttgtagaggatgtcagcaacaaaggtaacagactctatcctctcttcaagcttgtttggttacctcacacttgaaatggccttgtattagttgaaatgtgtgagtctaattctcatctcgccatttctgaatgcctcacagttttcaattgatccttcgatataagattcgtagcttcttatctcctgaactactaggtaatcgtttgaaattgactttatatgttggattttgtggtctcagagcttaaaagccgtatagacaagtatttcaatgagggtaatgaagatgctttacctggagttattgaagcacttctacagagaagacttgtagacaaacacgcagagactgatgatgaattgatggaaaaaatcgagagtctacctttcaaagatgatgtcaaggatgaagattttgaatccgatttcgaagaagcgcattctactgacgaagaacttgaggatttgtacaactctcccgagtatgtagctgaaaagatgaggaagaaagaatttttcaacatggacgataacaagtgggatcacatgattagagaaggtatccaacatggctgtcttaccgatactaaacaatgcgaggagattctcgaggatatgctcaaatgggaccagcttcttcctggtaatgctcttttatttttcaatcttcccgttcatcgactcacatccttagacatagattaggttgattaatagactattgtgcctcgttatagctaaacacactctcttagtggaacttatcttttgtagttaacctttctatttggattttaatgaatcatggtagtagaaccattcttcttttcttaactctttcaaggtaatgtactatgtcggatttgttgcttctcggatcagtagggctgtttagagaatatattggtttgttcctgttatgcgtatgtatgaacatcctctaactgtgtatcttcattcagatgacttgaagaaaaaagttgaagcaaagtttaatgagctcggggatatgtgtgaaagaggtgaaattgaggccgaagcagcttatgagcttttcaaggaatttgaagatgagatggtaattcagtatggggatcagatggaagctgagggtcctccccaatttggtgaaacagatacttctgacaggaatactgacttggatgatccctccggtaaaggcccaatcctcaggtggcaatcaaggatagtttttgctcctggaggtgatgcgtggcatccaaagaacaggaaagttaaaatgtctgttacagtgaaagagcttgggctctcaaatcatcaggctaaaaggctaagggaacttgtaggaaaaagataccattcagggaaagacgagcttacaatcacctgcgagaggtatataaactataaatcttaagcttttcgcgagacaagaatgttgaatcatgtaatgtttttgtcctgtcacaggtttgaacaccgagaagaaaacaggaaagactgcttgagaactctttacgggttgatagaggaagctgggaaagccaacaagatcgctgaagacataagaacttcatatgtaaaacagagactccgagccagtccagcttttatgcagaaactacaagccaagatcataaggtctaaagaatcaaatgccatcaacgcttga

SEQ ID NO: 159189 - DNA, 1874 bp, Arabidopsis thaliana landsberg
  unsure (1)..(1874): unsure at all n locations
atggcagagcacctaacggaattggagaagatgactaaacccgttcttgatgctctgagaagctaccaggatttgcctccggataaagctttggctacactagaattcgaagacaagaaaaggcaatacgaagcagcggagaagcgtctagaagaagtattacaatcagctcttgagtgattgttataaaacctaaaaatattatgttttgagtatactatgagcaaatgcattattctgtgtattgtggttttgctaccaaaatcacacataagaaatccaatttttttctttctttctatgaaatcgcatgatctcttttccaaattcaactaatttttcggcttaggagttttttttcattcaacacgaaagaagcatccacaaagatggatttacagtttagtagaatgagaatccatccacaaagatgatcccacccaaccaggagatacaagagctgacggtggttaccaaacaagagatctccgttctaaatactgttctaaatacgtcctcatcgtcatctcagttggtcccaaggtaaaaagtactattaacgtaatgactacagttgcaaaatacagcttacttaatttctctcaaaatctggctaagaatggtctaatgggagtccagaatgttgctatggatttactagaattatctcatctgtaccatgttagttgttgctgatttacaggaagcttcaccattgttgcaacagagtacataataacaatcacagcagcaacagatggtcccattgcaacaacaacaattgttcagttattttttctctaatttagtaggtaatttttagtgtatcccaaatattcatatccatatccattattcttgtttgtcccttttatccgaaatggaccgacctaaacctaaacatcgataaaaagaagagtcaaattgtttggtcgaaatgaatctggttcattcagctttcgaatggataaaagcaaaacgacacgtagttcaaacgtatttttctaaatttcattttttgtttgaaaagcaagttactgagggaaaacggagccacgtcgaacaatatcttgacacctcacaataaacgacacgacgtgtacactttcgtcaccatgtagattcctctttttgttttccccctcaaattctcactttactcaaaagattcctcggatcatcagaaaatggctatggctacgcgagcgattcgataccagttaccgtcaccgagatttagagctcctagatgcgaatcatcggaaccgattaagcagattcagatccagcaacgaccaagaggtggcgatttagccgagaacgggaagatnnnnnnnnnnnnnnnnnnnnnnnnnnnnngatcttatggatctgatatggtcatcgctaaaaaggacggcggagatggtggaggaggaggatctgatgttgagttagcgtctccgttttttgagacgcttacggattacatagagagttcgaagaagagtcaggatttcgaaaccatctccggtagactcgccatggtaattagacactaaaccttaaattagaaactcgatctcggttttagtcggtttaattcgtaaatttactgttttcagattgtatttgcggtgacggtgacggaggagattgttacggggaactcgttgtttaagaaactagatgtggaaggattgagtgaagctattggagctggtctcgccgcgatgggatgcgcggcgatgtttgcttggttaacgatttctcggaacagagtcggacggatctttacagtgagttgcaactcgttcattgactcgttggttgatcagatcgttgatggactgttctacgataccaagcctagtgattggtctgatgatctttaa

SEQ ID NO: 159190 - DNA, 3258 bp, Arabidopsis thaliana landsberg
gtgtttaggatagttttgcatgcatgttgcatatttgtgttgttttcaggtgatttggagcttttggcgagctaattgggagaagcgtacctgatcatgtcaaaccactcgacccccaggtcgagtagacgcttcacgaactcaacagaccattcgaccccctggtcgagtaggggacttcacaatttcacctcatcactcgaccccctggccgagtatcaccgcgagagatactcgatcacgtcactcgaacccctggtcgagtgtcttcacccccaccacctgaccatcactccatcacatcactctacttggaagtcgagtatcaccgtcaccaccactcgactacatactcgatggcaagcttcagagtcttcttcatcccgcactcaaccagacactcgagtacaaggaagaaaagaagactccagctattcactcgacctctcactcgaccacgtgggtcgagtacagtttttaatccgtcccaatactccgtcgctttgagtattagggtttcggaatattttgctataagtagcatgtactttacattttcgagaacaagttttttatctaagttttattctgaagacattgtgttcttgaccttttgtaatccggatttctcttttatctattcagtattcagtatttgttcatgattttgtttactgttgttcatcctgttatcatcttgctattactctgttgttatcatgttttcattccattcaacgttatgctttctacaatgaggtctgagtagtgaataggttctgaggatgggttaaagtagtttaggattctcagtatgctaggtggttgagttggattgatagatcccttctggattagttgttcttaatgcctattgctttctgatcaactgaaatttgagcccagacatttccgcgcccaaaagatgttcgatgaaatgtctgaaccactaattacatagattcgtggccctgtaccaaggtattggttgcaaggagcttttggctttaacttgttgatttgtaatgcctgttaggttagctctcgtcaatggtgattgagtctgggattaggttaacttgagggtctctgttgcggtggcacttagatttggttaatgaacttgttgtctagggataatttattgagcatgtcgatcacctgtaaactgaggaaacgaaactactcaattaccccatcctcgggaattctttatctgattgattttattgtttactctactgttgtttattgtgtcttgtcatctgttgcttaatttttgtaattctttcttgtcactcgacctgatagtcgaccacccagttgtctgacaacagactatgcattcgagtatctttgtttcatttactgtttgttactcgacctcacccagtgctctgctacgagctgtgttggtcgcgtgttttactcgttctgcttgattttctgttttctgcatgttcacttaggactgctagaacacaccaaaacgtgttattgcttggcttgacttagtgacttatgatcacatcttgattgttagcatcacacacatttggattgacaaccttcagtactacaacgacatgatagtgctttaggattaattgatcttaaaaacctattatcagcaggctctgaatgagaaattagacaagttcattctactacagaagaagcaaactcactttgcttgtaaggatgagcagtttaaggttcagaatttggggaataatctgttataagagacaggatacatctagaaccagggagcctatatcaatggtttcaaccactatagacaacatcaaacccattacaagccttttgttccatacaatcaatgtcaagggtttgttcccatgcaacagtttcaaggaagctaccaacagcagcagtatgcaccactatgttttgctcaacaacaaccaactcacaatgcacacgatgcagacatgaaaagtatactgcatcagatactacaaggtcagtcttttggatctatggtttcggaaacgaaacttgctgagatacacactatggtggattcctcttataatgatctgaatatcaagtttgagactttgaactctaagatgtgatacatggaaggacaatttgcttctacttcagcaccaacgcctccatgccaacttcctggacacgccattcagaactccaaagaatatgcacatgcagttacacttcgcagtggcagaaaacttctcaatagtcagaacaccgagcagatcactgaggaagtgaacttcaagaaggggaggatccgcatcaaaacgaagtccaaaccaatgaaccaactatacttgatcagccttcagcttcactcgaccctttactcgatcgagcaaaaccaacttttgaagaaagaaaagttgctgttgcagcaaagaataaagaatttgctcctccgcgttacaaaccaacgatgcctttcactggaagattcaagaaggaatgaattgaaaagtacaaagcattttttgataggcagctgaaggagatcgaattaagaatgccactaatggatgcatttaagctcattccaccctcccacaagtacctacaagatctgattatggagagaatcaaagaagtacaaggaatggaagttcatagccaagagtgcaatcctattatacacaaggagagtgtccaagaaaagctagaagagcttgctgttaaagatctactccaaacttctttaactaagagagttgaagctaaatatctccctagtgagaccttgatctctaagaagtcattagcctcccacaagatagtaacatgggcatatgtcattataggtgtgattaggtcaaaagaggcatgttcaactcaagctcgaccatcaaactcgaccagtaggtcatgttcaaacctctactcactccaaatgctcaagctcaacgtctaaactcgacctgcatgttaagcaaaacactctagcatctgataattggttaaagctttagagaagatataaatggtaggagaaagccataagggagctaacacaaacagtgaaaagaactcaaggatcaaattaaggaccttcgtgggaaatccaaccaagtaccattcagcatcaaagacaaaccccctgatggaaccaccaccctggttagcaaagctgaaactgaactcaaagtgaatgggcagagagtcaagccttgtatggttgagcagatcattcaagaggagagctcatttcctctcctctcatcaccctttgcctaa

SEQ ID NO: 159191 - DNA, 3211 bp, Arabidopsis thaliana landsberg
aagattctgttttcaggttacgcggttggtcaaatctggaaccgggaagacaacgtttagcgattggagatggagcaaatgatgttggaatgcttcaagaagcggatattggtgttggaatcagcggtgttgaaggaatgcaagcggttatgtctagcgatatagccattgctcaattccgttacttagagcgtctcttgctcgtccatggtcactggtgctacagcagaatctcatcaatggtacaattttttctctctcagaaacaatctccatataaactctatacattcatcaaacttttctctaacgcggttctgtttccgctattgcagatatgttacttcttctacaagaatatcacttttggtgtcaccgtgttcttatacgaagcctacacatcattctctgctcaacctgcatataacgactggtttttatcgcttttcaacgtttccttctcttcgcttcccgtcattgctctcggcgttttcgatcaagacgtctcagctcgatactgttacaaggtacccaaacattatctcccataaaccctataaaaacctcaaactcctcataatcgctaattaaactctgtttttgttttttgttcttgcagttcccgttgctataccaagaaggagttcagaatcttctcttcagctggaagagaatcatcggatggatgttcaacggagtctttaccgcactagccattttcttcctatgcaaggaatctctcaaacaccaactctataaccctaatggcaaaaccgccggcagagaaattctcggcgggacaatgtacacttgcgtagtctgggtcgtcaacctccaaatggctttagccataagctatttcacttggctccaacacattgtaatatggggctcagtagcattctggtacatcttcctcatgatctatggagccatcactcctagcttctccacagatgcttacaaagtcttcattgaagccttagctccagctccatcctactggctcaccactctcttcgtgatgttcttcgctttgatccctttcttcgtcttcaagtcagttcagatgagattcttcccgggataccatcaaatgattcagtggattcggtacgagggtcattctaatgatcccgagtttgtggaaatggttaggcagagatcgattcggcccacgacggttggtttcactgcgagaagagccgctagtgtacggcggtccggtaggtttcatgatcagctcaacaagaatttcattgctttctgaagagaagtgtacgaatgtctcagcgtttgtgcatatgtacttgtatatatagctatcaatctggggaaagctagggctcttttatatgttgtgattgcttgcctgaaaagtcatcaaaaagggttcgcttcactcgtatacttatttgtatgtagcttttttttcttgtagatcacgatttgtctttcaatttaattgtatttataattgatatatatatactcttcatctttttttaacatctacactttttgtcattgattaatcgcaagccatttttcttgacttagtcataagagatgtaactacaaacaatgttgttccttttagtttttttatacggtagatggtttctatactttaataaccccgccccatgtattttttttatctcatagatagaaacgtgttataaatatgtacaccttaacaataggaaagtaatctttacatataatgtatacaatcgccacttgctaaaaaagaagttatatttctgtattctatttagtacatttagtagaatagaaaaccttacatattgaaaattgattccaaattctgagagatctagagatttaaatgattgatttagttccattttttcttttgatttttctttccaagcgtgactcgtggggattaattacgagatccctatcatggatggtttaaatttaggtcatatatacgacgaaagagattgttgtttaacacatacgatggaggacgcagagaagcgagaggtgattgcatcatcatcattacaaagaaagagaaacagaggaagaacactaaggaaaagaagaagaagaaacgagaagcgagtactaatggttccatcatcattaccaaacgacgtcctagaggagatctttttaagatttccggtgaaagcactaatccgactcaagtcgtctctctcgaaacaatggagatcgacgatcgaatctcgcagttttgaagagagacacttgacgatcggtaagaaagccttcgtggatcatcccaaggtcatgctcgtaggagaagaagatcccttaagaggaaccgggattcgtccagacactgacattggttttaggttgttctgcttggaatcggcttctcttctatcttttactcgtctcaatttccctcaagggttcttcaactggatctacatatctgaaagctacttcctccggcagggtttcagattttgatccacaagtttaaccccactgaacgtgagtggaatgtagtgatgaaatcaatctttcatctagcattcgtgaaggccaccgattacaaattagtgtggttgtacaattgtgataagtacattgctgatgcgtcgagtccaaacgtgggagtcacaaagtgcgagatttttgactttaggaaaaatgcttggaggtacttggcttgcactccaagtcatcggatattctattaccaaaagccagcatctgcaaacgggtcggtttattggtttacagaaccatataatgaaagaatcgaagtagtggcttttgatattcacacggaaacattccggttgctgcccaagattaatccggctattgctggttcagatcctcaccatattgacatgtgcactctggataatagtttgtctatgtcgaaaagggagaaagatactatgatccaagatatttggaggttgaaaccatcagaagacacatgggaaaagatttttagcatacctgtccttcttctcggactgagaagcgtgatcaatttgattggagcaagaaggatagggttgagccagccacacccgtcgcggtttgtaagaataagaagatccttctctcacatcgctattcccgaggtttggtaaagtacgatcccctaacaaaatctatcgatttctttttccgacatcctaccgcttacagaaaagttatttattttcaaagtttgatatctcatcta

SEQ ID NO: 159192 - DNA, 2645 bp, Arabidopsis thaliana landsberg
acaaaaggaaaaaagcatcaagaacatggcggagactcaaggaaaggtcatcacttgtaaaggtaagtaaatgactcaccaatgagatggtttcctatcattatgctgttgatgcatatgatgatgatgatgatgattatgatagtaatgatgcatgtatgtgatgcatgtagctgctgtcgtatggggtccaaaagtgccgcttgtaattcaagaaatatgcgtcgatcctcctcagaaaatggaagtccgtgttaaaattctttactcctccatttgccacaccgatctcggatgttggaacggcacggtactcatggatatatactcgaatcagtacaaaaattgcaatgtttcttgattgtaatctaatcaaaaatatgttatttttggtgtgtaaaagaacgaagctgaacgagcatttccaaggattcttggccatgaagctgtcgggtatatcccgatatctaaacccttttataaccgcctatgagtgtcgctaactaaatatgttttctatgtttcggttatatgtttgataggattgtagagagtgttggagaaggagtaaaagatgtgaaagaaggagactacgtgattccgactttcaatggagaatgtggtgaatgtaaagtgtgtaagagagaagaaagtaatctctgtgagcgatatcatgtggatcctatgaagagggtgatggtgaatgatggagggacgagattctcaaccaccataaacaaggacggtggttcgagccaaagccaacctatatatcacttccttaacacctccacgttcaccgaatacactgtcttggactcggcttgcgtcgtcaagatcgatcctaattctcctctcaagcaaatgagcctcttgagttgtggtgtctcaactggttagttactaatttactcgtatatagcaattggattcttggatttttgtccatatagtcttgaacatcgagaacttgctatttgttttagaaatgatatattatcatatcctttgtgggagataacatagtgagttttgggactagctagggaataaaggagaagataggaccttggtttcaaaaacacatttaattctcctttcaaaaacgcagttatttcaatttgtctctgtaacagtaaattttaatttactgttacatattgtcgtggtccattgaccacctcaagtatatacataagtggtaaaaataagaagcatgcatagtttcatgaggtgtttccttcttaatgttacgacgtcgttttgaaaaataggggttggagcagcttggaacattgcaaatgtgaaggaaggaaaaagcactgctgtctttggattgggttccgttggactcgctgtaagattaaacttcattaatccatttatgcatccaaagtatgataaaaattaatttttcacttatatatatgaagtgaaaatgatatatttatttcatgaatgagaactgaaggttgctgaaggtgcaagagctagaggagcttctaggatcattggtgttgatgctaatgcttccaaatttgagaaaggtacgttactttctttttcaccaatgcttcgattgcgctctcgctctttttctacatactaaggttgatatggggaaaataaaaccaaatttcccaaactcttttccacttatctaattaagcatctcgaaaagtagtgaagcaaataacttaagaatgcgaatgcaatagtttaatttccaactttccaattatacgccataatggaacataaacaaaatgatatttttcaggaccaaatggactgattataaggtttactagattttgtggagcgtaccaatctacgactatgtccatataattaccatattactccaatcaaatattgcaggtaaactgatgggagtaacagatttcataaaccctaaagacttaactaagccagtacatcaggtaatataccaattttcttataacaaaaaaatatcaataattgtaaaaaaaaataaaaaaattgttaactaaaatttttaaccattgcgaatttgcgatggatcaatatacaaaaagatgatacgagagataacgggaggaggcgtggactatagctttgaatgtacaggaaacgttgatgttcttcgcgaagcctttttatccactcacgtcgtaagtccataataatattatgaattgagatcaaaatcttaatttggtttacttgatgttgatttagttacttgataaagaaggaaatgagaaacattattttgatgatagggttggggatcgacagtacttgttgggatctatccgacgccaagaacattgcctcttcacccaatggagcttttcgacggccgtagaatcaccggttctgtgtttggtggcttcaagcccaaatctcagcttccaaatttcgcccaacaatgcatgaaaggggtctgaaatttgtctctaatttctaatcttagaaacaagaagtaattttgtgttttagtgatattaattggaatctttgatttgtaggttgtgaaattggaaccttttattaccaatgagcttccatttgagaagataaacgatgcgtttcagctgcttcgcgatggaaaatctcttcggtgcattcttcaaatctctaaacttctcaagagatga

SEQ ID NO: 159193 - DNA, 372 bp, Arabidopsis thaliana landsberg
aaaaccaaaattttctgttgtttctctgtttgtgtagggttgaaccttcccacaaaaggatgcttgttgaagccctacagaaccaaaacgaagtggtaattccctggtcactaagttgtcatcattacccatcttctttttgtctgtgtttcagttcacatgcattcttattttgtattcatggctttgtttcaacttttaagtttctaatagttttacttattagagaagaaaagttcttgcctctaactgtagcacttatgaaccttattctcctaggtggcaatgactggtgatggcgttaatgatgcccctgcattgaagaaagctgacattgggattgccatgggttctggaacagctgtagcaaag

SEQ ID NO: 159194 - DNA, 490 bp, Arabidopsis thaliana landsberg
gagttcctggaattagcggtgtaacagcagaacaacgcaaaagactaacaatagctgtggagcttgtttccaatccttcaataatatttatggatgaaccaaccacaggattagatgcaagagctgctgcaattgtaatgagagctgtgaagaacatcgccgagactggcagaactgttgtttgcacaattcaccagccgagcatagatatctttgaggcatttgatgaggtaaaacctcgtaaaaccttcatctcatttaaagtctcttgtttaaagtacattaatatgtgacccttcaatggcagctgattctgatgaaaaatggaggaaagattatctattacggacctgttggacaacattcaagcaaagctattgaatactttatggacagttcctatatattactgaaactgttgcatataatgttctcttctctacttccaaattataacaataattctcaactgtcgagcattcctggagtt

SEQ ID NO: 159195 - DNA, 739 bp, Arabidopsis thaliana landsberg
caatcaagatgtgatctgaaatcactaagtcaagccaagcaataacaggttttggtgtgttctagcagtcctaagtgaacatgcagaaaatagaaattcaagcagaaacaataaaacactcgaccaacacagctccttgcagagcactgggtgaggtcgagtgacaggtcgagtaaaagacagaaaataaaacacagatactcgactgcacagtctgttgcgagacaactgagtggtcgagtatgaggtcgagtaacaagaaagaactgcagaaattaagcgacagataacaagatgcagttaacaacagtagagtaaataaagaattcaatcagataaagaattcccgaggatagggtaattgagtaaacaattgtagagtttacaaagaattcaatcagataaagaatcccctcctgggatcgatcgatcccttcctggcgggtctgaacttcatttggcacagtgagacacagaccaattaggtggtacatagcttcccttaagttcggatcaaaccaaccaacacactatcccaatctattcaatgagttcctatgatgcttaacaatataaccaatataatctcgacgtttccggttccttgatctcctttcccgctttttctctcttttttttttagtatcattttttttttgtttttttttttttttgaatagcgggggagtggaaccggtgtctcacaaaaatctgcatcaggaaaactcaaccaatgtag

SEQ ID NO: 159196 - DNA, 462 bp, Arabidopsis thaliana landsberg
  unsure (1)..(462): unsure at all n locations
ctcctgataatgatttcgctgaaaagatcaggtaattctcaatcaaagctttgaaggttctgtctccattttaaggataccattaatggttcgaagcaacttagtagtattgggaatttgggaacctatagtatatagtatatggatttctaattctttctcttgtttgaatcttgcagacgattacatcggatgaaataaaagaaactacagctaacatgtgagagagctggttcttccatcttcatcacctctgttctttaggtaaaaaaaaagagagatatgtctcgccccaaatgcagtcttgaacattgataccccgagcatcttcttcgttcttctgtacaactctttcactcttaagataatattctttagtatgatcttttnnnnnnnnnnnnnnnnnnagctatataaaaggatccaactttacacgaaatcttcaataagtaagcttaaaag

SEQ ID NO: 159197 - DNA, 268 bp, Arabidopsis thaliana landsberg
ggggtccgagacatggggaaacaacctaatcccggatccatactacggtcgctctccccgcaactggtggatactggtttctcgggctctggaaagtgacgcccgggaaacgaggtaaaagcttggaagaagacagtgaagatccgtttgacggaaacactagagtgaagaaagtgaagatcagaagcaagcaaaaatggctcgccataacttttaactttgatagctttttctctccagttacaagattgcaactgcctcaagctga

SEQ ID NO: 159198 - DNA, 1286 bp, Arabidopsis thaliana landsberg
attccagaaacgcgattacgaaggagcaatgtttaggtatgataaagccgttaagctattacctagagatcatggagatgtagcttatttgagaacaagtatggcttcttgttacatgcaaatgggattaggagaatatcctaatgcgattaacgaatgtaatttggctttagaagcttctcctaggtttagtaaagctttgttgaaacgagctcgttgttacgaggctttgaataaactggatttcgcgtttcgtgattctcgcgttgttttgaatatggagcctgagaatgtttctgctaatgagatttttgagagggtgaagaaggttttggttggtaaagggattgatgttgatgagatggagaagaatctggttaatgttcagcctgttggtgctgcgaggttgaggaagattgttaaggagaggttaaggaagaagaagaagaagtcgatgacgatgacgaatggtggaaatgatggtgagaggaagagtgttgaagcggttgttgaggatgccaaggttgataatggagaggaagttgatagcgggaggaaaggtaaggcaattgaagagaagaagctagaggataaggttgctgttatggacaaagaggtcattgcttcagagattaaggaagacgcaacagtgactaggacagtgaagttggttcatggagatgatatacggtgggcacaattgccgttggattctagtgttgtacttgttagagatgtgattaaggatcggtttcctgctctgaagggttttctgatcaaatatagagactcagagggtgatttggttaccattactacgacggatgagctgaggctggctgcgtctacgagggagaaacttggctcttttagattgtatatagctgaagttagtcccaatcaagaaccaacttatgatgtcattgataatgatgaatcaactgataagtttgccaagggatcgagtagtgttgctgataatggaagcgtcggagactttgtggaatctgagaaagcatctaccagccttgagcactggattttccagtttgcgcaactgtttaagaaccatgttgggtttgattctgattcttacttggaacttcataaccttgggatgaaactgtatacagaagcaatggaagatattgtcactggcgaagatgcgcaagaactctttgatattgctgctgataagtttcaagaaatggctgcacttgcaatgtttaactgggggaatgttcatatgtcccaggcaagaaggcagatctattttcccgaggatg

SEQ ID NO: 159199 - DNA, 332 bp, Arabidopsis thaliana landsberg
aaagaaataaaatagcataataggtgtaatgagatcctcaagaaccatgggaatagagaactgcatagtttatgttgtggttctaagtgctattgcggctacggtgacatcatacccttactcatctcctcaaaccccaagttacaattctcccagctatgaacacaaaggccctaagtacgcgccacatccaaaaccatatgttaaaagttccccaccaccacaatactacactccatcgccaaaggtaaactacaaatctccaccaccaccatatgtatacagctccccacctccaccgtactactctccatctccaaaggtaaactaca

SEQ ID NO: 159200 - DNA, 161 bp, Arabidopsis thaliana landsberg
tgtgatgctaacaatcaagatgtgatcagaagtcactaagtcaagccaagcaataacaggttttggtgtgttctatcagtcctaagtgaacatgcaaaaaacagaaaatcaaacagaaacagtaaaacactcgaacaacacaactctttgcagagcactag

SEQ ID NO: 159201 - DNA, 1318 bp, Arabidopsis thaliana landsberg
  unsure (1)..(1318): unsure at all n locations
atggttttcttcagatttcggatggaaatgagttctctatgattcaaatggaagatgatttcagatttggttgttgaagaagctatcattcttctctttgtcacggtaccttttctcaatttctccattgaatctgactgtgaattgatgcttttggtgtaatttagtttacattttcagttcctgaagctcatgnnnnnnnnnnnnnnnnnnnnnnatatgaagggcacaacgtcaatacacatttgcttcgatctacaatggtaataatcatcagattcatcattaggtgttgaaatcactgatctttggtttgattcatacatacatgatttggtcttgtttctcagattgcagagtctttaccgtttatgaatgaaaaaaggtctgctacaacgcaagttaaggctccacctcagttacagaaaacggtgtgtgaagtgtctcatcctcatgaactttttgtcagatttgttttggtttctaatgtcactgatataaatatattgcttcctgtggttttgattgtctcacatcagtgtatttatgagtgtagggtgctgttagagtgtcgatggtaagtcctggatttgtatatgaaccctatgcgctccgggagaaaatctcgatttggcggaggtaaattggcagatactgtttctaatacgataaacttcccttttctgcttgtttttttttactgttaatcgttttaggaagttctgactataagctacaatatagttgttctactagagttgagtttttaataattgcctcggctgttttctgttaattgttgttcagatgttttacaagaagtggttggcgaagaacgaaagaggattttatacgggaggtagaaacatattcatgcattattagactgggatatttgttttgcagatgtcttaatacatgtcaaaactctaaatttcagctaagaagtgcctacgctatcgctaagttaagaaagactgggtattcgaagaatacgttctacatagaagcactagagttatacaaacaggtattacttacataccttttgggtgtttttgtttgttttagtctcacagtagaatgtttaacaatcatcttgacttagctacccgggttttcttcagattaatattcagatggccaatggtgagaagaagacgataaggaaaaacgtaactgaaagaatgtactctgtaagttttccatctaactgattatcagttttttcttgtattgaagttgaagatgtgatggttttctgtaatgttaaattttggtttcttttcactattaggcactcgaagaacgaaattaa

SEQ ID NO: 159202 - DNA, 579 bp, Arabidopsis thaliana landsberg
  unsure (1)..(579): unsure at all n locations
ttgtttttntttacatttcttgggactctctgctcttgtttcagtttatggagcttcatggagaccgagcggggtatgatgaccctgcaattgtgacgggtattggaaccattgatgaacgttacatgttcataggtcaccagaaaaggtagaaacacccaaagaaaatataatgcggaactttggtatgcctactcctcacgggtatgttttcatgaggagcttcctggtttgcagttaaatagaaacattcagaatcagcaacactcttatcaaatttctataatgtctaccacagatagaggaaagcacttcggatgatgtattatgcagaccatcacggttttccaatcgtaaaattcatcgacattcctggagcctatgcagaacttaaatccgaggaactcggacaggtacaataaatgtcttttatgtttgaagtgtactggtttatcttatctgcagcataacatttttttgtttacctgtatcatagggtccagcaattgccaacaatctgaggaaaatgtttaacctgaaagtgccaattctttctattgtcgttgtccaggttgtttg

SEQ ID NO: 159203 - DNA, 523 bp, Arabidopsis thaliana landsberg
gtgactggagacatacatgaagaagttaagaatcataaccgcttgcttgacaaagtggtaagctgaaagtttgatttcatctgtttcagtttgtagatctctatcacatgcttttcttctaagctatttgttgttgtatctctaggggaacaaaatggactccgcgagggggataatgtcgggaacgatcaaccgcttcaagttggtatgtaaataagatttcgtaccttttatataggcatcaccccttatgtttttcgctatcacaacttatatctgaataccactcgcttttgaccctacaggtctttgagaggaaggctattcgcaagagctgcaagctcctggcttatatggggctcctgaccctgaccatggattaccttatgaggagaaatacacgagttcttatagttctcaaagcacttgacttttctcagggactggcacaagcgcttgttctttgactggaacactgaccatctttcggactttgcaggctagtaacactacatcaaagggt

SEQ ID NO: 159204 - DNA, 815 bp, Arabidopsis thaliana landsberg
aaaaagcggggcgggaaattcgacggtgatctcgctgttccaaagattttacgatccagattccggtcatataactttagacggagttgagctcaagaagctgcaattgaaatggttgagacaacaaatgggactagtgggacaagaacctgtcttgttcaacgacacgattcgagccaacattgcttatggcaaaggaagtgaagaggccgcaaccgagtctgaaatcatagccgctgcagaacttgccaatgcacacaaattcatctctagcatacaacaggtaatggaataaaaacagaacaaatttgtaagaactctgtttttcaaagtttcttacgatgcaagcaatacaattttgtagggttacgacacagtggtgggagagaaagggattcagttatcaggaggacagaaacagcgggtagctatagcacgtgccatcgtgaaagagccgaagatattgcttttggacgaagcaacgagtgctcttgatgcagaatcagagcgactggttcaggatgcgcttgaccgagtgattgtaaaccgaaccacggttgtggtggctcaccggttatcgaccattaaaaacgctgacgtcattgccatcgttaagaacggtgtgatcgctgagaatgggactcacgaaacgttgatcaaaatagacggtggggtttatgcttcccttgttcagcttcacatgactgcttctaattgataatgatataatgttttgtttacgatagcaaaaatataaatatgttgttgtatgcaagtttatgtagctgtcactatttattttcgttccctttctc

SEQ ID NO: 159205 - DNA, 710 bp, Arabidopsis thaliana landsberg
gtaggcttgggcatgtaaagaatggaatgtaattctaattgatgttgataactagactttaggtgttttaagtctaaactgtgtggctgacacattgaaacaactggtcgtgacagggattcgggttcaggagtttctcttccagctgattttgttaaggttggccgtcgacttcttattagtgctaaatcattcagcctttttatgtgtgtaacgtttcttctaattccatcattgctactatgcagatacaatacgcctatgagctgttaacaaatctagtatggaaaagggactatgacttatacgccattgatgaatcagtagtaagttgttagttctgtatcttcactctttttgttgcagcaaactgaaaaagaaggaagatttactctcttttttccttttcaaatataaccccttgttttaatggttgcagcatattatagaggaacttgaaaaacaatatgctgtggaagattttgcaaaaataaaacttcccctactggaagttgtttcttatggtcagttaaccaacatacctctttgacattttcaattctgtttcttgtattcgtttttatatttcttccgatgccaacttattggtgtataaaacctgtttagagcctgaacgtgaaggttttatgtcaataacatctcaagactttgcgtccaagttccaagattctaagccatggctcattcag
